United States Patent Application Publication US 2011/0296543 A1 - sequence listing, part 13

SEQ ID NO: 55693 - DNA, 1590 bp, Unknown
  Obtained from environmental sample
  misc_feature (1)..(1590): n is a, c, g, or t
atgagcaaaggaaaaagtgacaagatcacatataagccatacgaacaacaccagacatatctgataccgccaagcgccgaagaactgataccgaaagaccatctcgtaagactggtaaacgaagtagtagacgagatggaaatagaacggctgatgagaaagtatcaaactggcggcggtgcaagccggtacaatcctgtaatgatgacgaaactgtttgtgtacgggtacatgacgaagatatgttcgagtcggatgttggcgaaggcggtacgcgagaacgtgatgtttatgtggcttgctggaaaccagaaacctgattttcggacgctgaactatttcaggggtaaactgctgaaaggagtgatggaagaagtcttcataacggcggtaaaaatgcttgctgcgaaagggtacataaaactggaacattattttgtggacgggacgaagatagagtcagcgtccggccggtacacgtttgtgtggaagaagactgtggaaaagaacgacaaaaaactggacgacaaattacgggcgtacatcaaaacggccgaacaggtatggagagaagaaaacgaagaatacggggacagggatcttgaggagatgggaaggaaggaaaagtttaccagcgccgacgtgaaggaactggcggggattctccgggaaaagatacagcggcttgagtccgaggaagataaaaaaaaactgaaaaatgagataaaaacgatagagaaggaatatttaccgaggaaaaagcggtatgaaaaggcaaaacggatatgcgggaaacggaacagttattcgaagacagacaaagacgcgacgttcatgaggatgaaggaagaccgcatggggaacgggcagctcaagcccgcatataacgtgcaaatagggacggaaaacggattcgtggtagggtatgacatatttcaaaatccagcggacacaaggacgttgaaaccgcacttgaaacggcagtcaaaacgattgggaaaaaatccaaaagcggtaataacggacgcgggctatgggagcgaggagaattatgtttatcttgagaaccggaaaatcacagccgtagtcaagtacggcacatatcataaggaaaagagcaagaagtggaaagaagacgcttcaagaagtgagaattgggaatacaaccgaaacgagaaatattatatttgtcctaacgggaaaaaactgacattcagggaaagcaggaaaacaaaaaacaaatcaggacacgcgatgacgatacagcggtatgaatgtgaatcgtgcaaatactgcagattacaaaaacaatgtaaaaagggtacggggaatcgcggtatagaacgaaacgagcgttggctcagattgaaacgcaaagccaaacgggtactggaagacgagaggtatatggaactgaggaaacggcggtctgttgaagttgaaactgtattcggacagataaaagggaatcaggggttcaggaggtttctgttacgtggaactgaaaaagtgtcaactgaatgggggctgctctctcttggatataatttgaagcagttgtataggacaaacagggataaagcggcataa

SEQ ID NO: 55694 - protein, 529 aa, Unknown
  Obtained from environmental sample
  DOMAIN (271)...(517): Transposase DDE domain
  misc_feature (1)..(529): Xaa is any amino acid
MSKGKSDKITYKPYEQHQTYLIPPSAEELIPKDHLVRLVNEVVDEMEIERLMRKYQTGGGASRYNPVMMTKLFVYGYMTKICSSRMLAKAVRENVMFMWLAGNQKPDFRTLNYFRGKLLKGVMEEVFITAVKMLAAKGYIKLEHYFVDGTKIESASGRYTFVWKKTVEKNDKKLDDKLRAYIKTAEQVWREENEEYGDRDLEEMGRKEKFTSADVKELAGILREKIQRLESEEDKKKLKNEIKTIEKEYLPRKKRYEKAKRICGKRNSYSKTDKDATFMRMKEDRMGNGQLKPAYNVQIGTENGFVVGYDIFQNPADTRTLKPHLKRQSKRLGKNPKAVITDAGYGSEENYVYLENRKITAVVKYGTYHKEKSKKWKEDASRSENWEYNRNEKYYICPNGKKLTFRESRKTKNKSGHAMTIQRYECESCKYCRLQKQCKKGTGNRGIERNERWLRLKRKAKRVLEDERYMELRKRRSVEVETVFGQIKGNQGFRRFLLRGTEKVSTEWGLLSLGYNLKQLYRTNRDKAA

SEQ ID NO: 55695 - DNA, 882 bp, Unknown
  Obtained from environmental sample
  misc_feature (1)..(882): n is a, c, g, or t
atggattgggggcgccgaaacaagtattttgacagcgacgaggacgcgaaagcgttctacgatgaaatctgctatatgcttgcccgccagattgccgcgcccaacagcccgcagtggtttaataccggcctgtacgcggtttacggtattgacggcccggcccaggggcattactattttgacactgttaaaaatgaagtggtaaagtccgacagcgcctacaagcggccccagccccacgcctgcttcatcctttccatcgaagatgatctggttaacgacggcggcatcatggatctggtgacgcgggaagcccggctgtttaagtacggctccggcaccggctccaatttttcccgcatacgcggcctgaacgagcatctttccggcggcggcgtttcttccggtctgctctcttttttgaaaataggggatcgttccgcctcggcgataaaatcgggcggcactacccggcgggcggccaagatggtaacactggacgtggatcaccccgacgtggaaaaatacatttcctggaaagccgaggaagaatataaagtcgcctcgatggtgaccggctccgcaatattgaaaaaacaccttgacggaattaaaaaggcgctcgccagtttccgggggccggataccgacaaattcaatatcgaaaaaaaccacgatctgaccgcggctctccgagcggcaataggtgataaaattcccccgtcctacctgtatcagcagctcaggcggctggagcatggtgatgatgacgtgtattcacagacctactctaccgcctgggatgacgaggcgtacaacactgtttcgggccagagttccaataacagcctgcgtataacgatgaatttatgtgggcggtga

SEQ ID NO: 55696 - protein, 293 aa, Unknown
  Obtained from environmental sample
  misc_feature (1)..(293): Xaa is any amino acid
MDWGRRNKYFDSDEDAKAFYDEICYMLARQIAAPNSPQWFNTGLYAVYGIDGPAQGHYYFDTVKNEVVKSDSAYKRPQPHACFILSIEDDLVNDGGIMDLVTREARLFKYGSGTGSNFSRIRGLNEHLSGGGVSSGLLSFLKIGDRSASAIKSGGTTRRAAKMVTLDVDHPDVEKYISWKAEEEYKVASMVTGSAILKKHLDGIKKALASFRGPDTDKFNIEKNHDLTAALRAAIGDKIPPSYLYQQLRRLEHGDDDVYSQTYSTAWDDEAYNTVSGQSSNNSLRITMNLCGR

SEQ ID NO: 55697 - DNA, 2358 bp, Unknown
  Obtained from environmental sample
  misc_feature (1)..(2358): n is a, c, g, or t
atgtgggcggtgatgaacgacggggactggaaccttaccagccgcaccggcggcgccgtcgtgaaaacggtcaaggcccgcaagctctggacagatattgcccgcagcagctggcagtgtgccgatcccggcttacaataccacacaacgattaatgactggcatacctgcccggcgggcggagatatccgcgcgtcgaacccctgctcggaatatatgttcctggacgacaccgcctgcaacctcgcctcgataaacctgggcgcgttatacaataaagaatcaaaaacgttcagcgtcgagggctacctccacgccattgggatttggaccactgtgctcgaaatttcagtggtaatggcgcagtttccctcgccgaaaatcgcggagctttcataccagtaccgcacgctcggcctgggtttcgcgaaccttggaaccctgcttatgcttatgggccttgcctacgattccgcagaaggcagggcggtggcgggggcgctttcggccctgctttccggcgaggcgtattcccaatccgcccgcatggccgcagaattggggtcttttctccgttataaggaaaattcagccaacatgctccgcgttatacgcaaccacaggcgggcggcgtacggcagccccgacacggagtatgagggcctgcacaccataccctgcggaatcgacgggacgcgctgtccggcatatctgctggacgcggcaaaggccgcgtgggatcgggcgctggaactgggcaaaacccacggctaccgtaacgcccaggtcacggccattgcccccaccggcactatcggcctgttgatggactgcgacaccaccggcgtcgaaccggatttctcccttgtaaaattcaagaagctcgccggcggcgggtacttcaaaattatcaaccagtccgtgccccccgccctggaggccctgggctattcgccccaattaatagaagaaattatcgcgtatgccaccggctataaaacgcttaacggcgcgccctatataaatcccgatacgcttaaagcgaaaggctttaccccggaggcgatagccgccgccgaggacgcggttaaaacagccttgaacctggaaggggttttcacctcctggacgcttggcagggactttgttgaaaagatccttcacattccggaatccacatggtcgctgccgggctttagcctgcttaagcacattggctttagcgcggaggatatcgcggacgcggagttgtacgcctgcggaaccatggggcttgaaaacgctcccggcctgaaaaaagagcattacgcggtttttgacacggcgactccgtccggcaagaacggcaagcgttcgattccctggacagcccatatcggaatgatggcggcggtgcagccctttatctccggggctatttcaaagacgattaatatgcccaactcggcaaattatgaagacgtgaaaggcgcgtatatgctttcgtggaagcacggtcttaaagcggtggccctgtaccgcgacgggtcaaaactttcacagccgcttaacagcgtcgatcccggcgcggatccgttagccgacactattttgaaagttgagaagggtttggacattccggcttcctcgcccgaccgcaagaaattaaacgcgcgcggtttgcgcagggcattgcccaaccgcagaatgggttacactcagaaggcgaagatcggggggcactcgatttttatcaggacgggcgaatacgaggacggcaatcttggcgaaatattccttgatatgcacaaggaaggggcggctttcaggagcctgttaaacagtttcgccattacggtatctctcggtttgcaatacggcgtgcctcttgaagaatatgttgacgctttcactttcagcaggttcgagcctaacggttttgtgcaggggcacgattatgtgaagatggcgacaagcgttatcgattatattttccgtgatctcgctatcagttatcttaaacgcagcgacttggcacaggttaagcccgaagacttggaagcgacggggacgaagagcgatttcggcgtgtcagacggcaaagaccggagcgacaagcacagcgcgggtttcaggccgagcgcgacggtttccacaccgaagagcgcgtctgcgccgcaggtctcgcagcaagcagcggcgcctcaatcatcaacagggaaaaccattaaagggcagggcgcctcttttgcgggaaacagtatgtcgatagacggggggggtgttgcgggtaacgcggctaaagcgggcattgctccttccggggcgcatacggcggttatggacagctcttatcctgaggagaagcgaggttattaa

SEQ ID NO: 55698 - protein, 785 aa, Unknown
  Obtained from environmental sample
  DOMAIN (1)...(371): Ribonucleotide reductase, barrel domain
  misc_feature (1)..(785): Xaa is any amino acid
MWAVMNDGDWNLTSRTGGAVVKTVKARKLWTDIARSSWQCADPGLQYHTTINDWHTCPAGGDIRASNPCSEYMFLDDTACNLASINLGALYNKESKTFSVEGYLHAIGIWTTVLEISVVMAQFPSPKIAELSYQYRTLGLGFANLGTLLMLMGLAYDSAEGRAVAGALSALLSGEAYSQSARMAAELGSFLRYKENSANMLRVIRNHRRAAYGSPDTEYEGLHTIPCGIDGTRCPAYLLDAAKAAWDRALELGKTHGYRNAQVTAIAPTGTIGLLMDCDTTGVEPDFSLVKFKKLAGGGYFKIINQSVPPALEALGYSPQLIEEIIAYATGYKTLNGAPYINPDTLKAKGFTPEAIAAAEDAVKTALNLEGVFTSWTLGRDFVEKILHIPESTWSLPGFSLLKHIGFSAEDIADAELYACGTMGLENAPGLKKEHYAVFDTATPSGKNGKRSIPWTAHIGMMAAVQPFISGAISKTINMPNSANYEDVKGAYMLSWKHGLKAVALYRDGSKLSQPLNSVDPGADPLADTILKVEKGLDIPASSPDRKKLNARGLRRALPNRRMGYTQKAKIGGHSIFIRTGEYEDGNLGEIFLDMHKEGAAFRSLLNSFAITVSLGLQYGVPLEEYVDAFTFSRFEPNGFVQGHDYVKMATSVIDYIFRDLAISYLKRSDLAQVKPEDLEATGTKSDFGVSDGKDRSDKHSAGFRPSATVSTPKSASAPQVSQQAAAPQSSTGKTIKGQGASFAGNSMSIDGGGVAGNAAKAGIAPSGAHTAVMDSSYPEEKRGY

SEQ ID NO: 55699 - DNA, 942 bp, Unknown
  Obtained from environmental sample
  misc_feature (1)..(942): n is a, c, g, or t
gtgggctggttcccgggcggacgctgggcggaatggaacgaccgctttagggacgatatgcgccggtactggcgcggggactcaaaactaaccaggcatcttgcgacaaggctttcaggaagctccgacttatatttacgagacggccgcaagcctttccattcggttaatttcattacaagccacgatggttttacgttaaaagatctggtttcgtatgaaagaaaacacaacgaagaaaacggtgaaaacaaccgcgacggcggtgacaacaacaacagcgccaataacggcgtcgagggccaaagcccgaatgaaaaaatcgaaacccgccgttttaagctaatgaaaaatttaatagcaagcatgatggtttcccttggaacacccatgatactgggaggggatgaaataggccgcactcaaggtggaaacaacaacgcttattgccaggacaatgaaatatcctggtatgactggtcgcttcatgaaaagaatcacgctttataccgcttcgtaaaagagataatcgctttccgccgccgtcatcccggttttatgcgccccgagttttttacaggccgggacggaagatacaacgccattccggacataagctggtttgacgaaaacggagacacacctgactgggacgatatcggcccgtgccttgcctttagaatggacggctctcacgctgatatacttgccgacagggatgacaacgactttttcatcatgttcaacggaagcgagaaagctttaaacttcaaagtatgcgaaccaatggccggtaaaaaatgggttcgcgcggtggacacgggccttccttcgcctaacgatattctgaaaagcggcgaggaagtaatattggaaaatccatacgcctatccggttaaagaaaagagcatggtgatacttatttcaaggttgttgtattaa

SEQ ID NO: 55700 - protein, 313 aa, Unknown
  Obtained from environmental sample
  misc_feature (1)..(313): Xaa is any amino acid
MGWFPGGRWAEWNDRFRDDMRRYWRGDSKLTRHLATRLSGSSDLYLRDGRKPFHSVNFITSHDGFTLKDLVSYERKHNEENGENNRDGGDNNNSANNGVEGQSPNEKIETRRFKLMKNLIASMMVSLGTPMILGGDEIGRTQGGNNNAYCQDNEISWYDWSLHEKNHALYRFVKEIIAFRRRHPGFMRPEFFTGRDGRYNAIPDISWFDENGDTPDWDDIGPCLAFRMDGSHADILADRDDNDFFIMFNGSEKALNFKVCEPMAGKKWVRAVDTGLPSPNDILKSGEEVILENPYAYPVKEKSMVILISRLLY

SEQ ID NO: 55701 - DNA, 621 bp, Unknown
  Obtained from environmental sample
  misc_feature (1)..(621): n is a, c, g, or t
atggacgaaagcagttttattttcggcgtagaccttgacggagtggtaggagatttttacggcgcaatgcgaaagattgccgccgcctggctgaacaaacccgtggaagctcttacaaccgacgttagctttggacttgaagaatggggccttgatgaattcggcggctatgacaggcttcaccgtttcgccgtaactcagcgtaaccttttccgcgacatggagcctatcaaagacgcgcctgctgttctgcgaaaactttcaaacaaacacaacattagaattcgcatcatcacacataggctttttctaaaatactaccacaaagccacaatcacccagacagtggattggctggattcctgggacattccatattgggatctttgttttatggccgacaagggcgctgtaggcgctcatgtgtatattgatgattccccgtccaacattgtgcgtctgagggatcagggctgtaatacaattattttttccaattctaccaatctgaaactggaaggcccaagggcacacaactggcaagacgcggaacgccttgttatggaagcctttgaagaatggcaaaccggtaccagaaatatgtttgctccctctctctga

SEQ ID NO: 55702 - protein, 206 aa, Unknown
  Obtained from environmental sample
  DOMAIN (4)...(186): 5' nucleotidase, deoxy (Pyrimidine), cytosolic type C protein (NT5C)
  misc_feature (1)..(206): Xaa is any amino acid
MDESSFIFGVDLDGVVGDFYGAMRKIAAAWLNKPVEALTTDVSFGLEEWGLDEFGGYDRLHRFAVTQRNLFRDMEPIKDAPAVLRKLSNKHNIRIRIITHRLFLKYYHKATITQTVDWLDSWDIPYWDLCFMADKGAVGAHVYIDDSPSNIVRLRDQGCNTIIFSNSTNLKLEGPRAHNWQDAERLVMEAFEEWQTGTRNMFAPSL

SEQ ID NO: 55703 - DNA, 1005 bp, Unknown
  Obtained from environmental sample
  misc_feature (1)..(1005): n is a, c, g, or t
atggcaaaccggtaccagaaatatgtttgctccctctctctgaccatgagcgcaattgttcttgccgccatcaatgccaaatggattcatccttcactggccctaaggctcttaaaagcaaacctgagaacccttgaagaaaactgtaaaattttggagtttgccttaagacagcccttaaaagaaaaaaccgcccccatcatcgcggagcggccacagcttttgggtctttctgtttcaatatggaaccacctggcaactctggagctgcttaaagcccttgaagtggaatggaaagatgaaacgagaaggcctttcatcgtccttggcggcccggaagtttcctggctgccggaagacgcggagattttccgctacgccgattatgtgatccgtggtgaaggcgaagagagctttcgttccctttgttttgaactgttaggcgaaagccagagtacgaaaaaaacgaaaaacgaagaaacagtttttataggcaacggcgataccattgtaaatgtaaacgaaatttcctccccttaccgtctttacacagatgaagacctaacgcgaaaactcatttatgtagaagcatcccggggatgtccttttaattgcgaattttgtttgggctcgtcaagaaaccaaccagccgcgcagaaggtacgcgaattcccgctggagccttttttagcggacatgtatacccttattaaaagaggcggcaaaacctttaaatttttggatcgtacctttaacctggacattgatcgcgcacagaggataattgaatttttccttgacaagataaatgacaagcccttttgcgtccatttcgaaatggttccttcccgctttcccgaaccgctcaaagaactgctttgccgtttccctgccggaaccctgcggctggaactgggaatccaaaccctctccccgcaaaccaggaagcttcttcaaatgtcagtgaacatagatgaagagctcgtgccgctcgtgccgatctga

SEQ ID NO: 55704 - protein, 334 aa, Unknown
  Obtained from environmental sample
  SIGNAL (1)...(22)
  DOMAIN (18)...(145): B12 binding domain
  misc_feature (1)..(334): Xaa is any amino acid
MANRYQKYVCSLSLTMSAIVLAAINAKWIHPSLALRLLKANLRTLEENCKILEFALRQPLKEKTAPIIAERPQLLGLSVSIWNHLATLELLKALEVEWKDETRRPFIVLGGPEVSWLPEDAEIFRYADYVIRGEGEESFRSLCFELLGESQSTKKTKNEETVFIGNGDTIVNVNEISSPYRLYTDEDLTRKLIYVEASRGCPFNCEFCLGSSRNQPAAQKVREFPLEPFLADMYTLIKRGGKTFKFLDRTFNLDIDRAQRIIEFFLDKINDKPFCVHFEMVPSRFPEPLKELLCRFPAGTLRLELGIQTLSPQTRKLLQMSVNIDEELVPLVPI

SEQ ID NO: 55705 - DNA, 1428 bp, Unknown
  Obtained from environmental sample
  misc_feature (1)..(1428): n is a, c, g, or t
atgaatcgcaaaaacgtccaaactgctacactccaggcagtagcgagtcctatcgtaggtaaaaggatcagtatttccggcaacgatgaaattgagcccatgcttgtcaaagccctgaacgtacttggggtttatgacgaggcaatgagcatctcttccatggtgctggataaaaccggacaggtattgaaaaccgccgaatacaaaagacaaatgcgtttttgcgaattatgcaaaaaatattttcataacactacgccggttctcgtcaggacaggaatctgggagggaagcatatacccctgcgaaaaactgcacacggaagcgtctgtcaaatcgcgaagcacaggcgaaacccagatttacgcctgcgcggcaggtttcgcttactggaatagcccccttttccacacgggacattacgccggggccatgagcgccggacaggtactcatgtgcgggcatgacgaagcggtggaaaaatttcactccatgtgcaacgacagcatcgccgcagagaaattcggcatgatgataaaggaggtagccgaaaagaagcatcatgaaattaaagctatggcccgcctcctggggctttgcgccgctgagatatccgaaaaggaaaaagacaccggcaaaacaatccgcggcatggcctggcttaaagagctaccaagagggatgaaagaacaaagcaaagccaagacagcaaccgtttcttccgtgcaggaaaaagcggggacagaagaaattctggaaaaagagcggatgctcatggcggcatttcagagaggcgacagcgaagcgggaaccaaaataataaacgagcttattaacagcaccctgtccagatacccgcataattttgagcttgtccgtttcagggctatagaacttttggtattgctttcaagggccgctgacggtagcgcctcaatggaaaacaacagccgcattttgacgcagatccaggaatccaacgcagtcgaagagctgataaaaaacctgaaccgtgcggccagccaaatggcagataaaattttttccttccggggaatgcgccactcctcggccctccgcaaggcacaaagatttatctgggagaattatacccggaaaattgacctcgaggaaatttcaaaagcttcaggattgtcggccccgtatttcagtacaattttcaacgaagaaatgggggaaaaactttcacgttaccttaaccgccttagggtagaaaaggcgtcagcactgctcacagaaaccaataagccaatgaacttaatcgccgaactttgtgggtttgaagatcaaagctggttttcaaaagtatttaaaagttttacaggggtaaatcccggaaagtaccgggaagccggaaaaatggggcataagttaaaaaatggaaaaaacattaaaacaaaacagtga

SEQ ID NO: 55706 - protein, 475 aa, Unknown
  Obtained from environmental sample
  DOMAIN (361)...(407): Bacterial regulatory helix-turn-helix proteins, AraC family
  misc_feature (1)..(475): Xaa is any amino acid
MNRKNVQTATLQAVASPIVGKRISISGNDEIEPMLVKALNVLGVYDEAMSISSMVLDKTGQVLKTAEYKRQMRFCELCKKYFHNTTPVLVRTGIWEGSIYPCEKLHTEASVKSRSTGETQIYACAAGFAYWNSPLFHTGHYAGAMSAGQVLMCGHDEAVEKFHSMCNDSIAAEKFGMMIKEVAEKKHHEIKAMARLLGLCAAEISEKEKDTGKTIRGMAWLKELPRGMKEQSKAKTATVSSVQEKAGTEEILEKERMLMAAFQRGDSEAGTKIINELINSTLSRYPHNFELVRFRAIELLVLLSRAADGSASMENNSRILTQIQESNAVEELIKNLNRAASQMADKIFSFRGMRHSSALRKAQRFIWENYTRKIDLEEISKASGLSAPYFSTIFNEEMGEKLSRYLNRLRVEKASALLTETNKPMNLIAELCGFEDQSWFSKVFKSFTGVNPGKYREAGKMGHKLKNGKNIKTKQ

SEQ ID NO: 55707 - DNA, 768 bp, Unknown
  Obtained from environmental sample
  misc_feature (1)..(768): n is a, c, g, or t
atgatatcctacaaaggcgcggataaagatttttctctggaaggccagaccgcgattatcacaggcggggccgccggtatcggttacgcgacagcggaattcttcgcgaaaaaaggcgtaaatcttgttcttgccgaccttaacccggatgcggacgcggcggcaaaaaaactgggcccaaaaaacatcggcattccggggaatgtgtgtgactgcgcataccgcaaaagcgtgatcgatgccggagttaaagcctttgggaaaatcgacatacttataaacagcgccggaatagttgccctggaaaaagccgagagcatcagcgaagatttttggaataaaaccatatccgttaatctgacatccagtttcatgatggctcaactctttggcgcgtatcttattgaaaaaaaactgcccggctgcattgttaatatcgcctcacaggcaggcgtgatagcgctggacaagcacgtagcctactgcgccagcaagggcgcgatcatctcaatgacccaggttctggctctggagtggggaaaatacaatatccgggtaaattgcgtgtccccgacggtcgtgctgacggaactcgggcacaaagcgtgggacggccctgccggcgacgccttcaaaaaggaaatccccgccgagcgcttcgccgagcctgacgaaattgccggggttatcgccttcctgtgcagcaatacagccgccatgattaccggacataacctgctgatagacggcggttataccataaaatag

SEQ ID NO: 55708 - protein, 255 aa, Unknown
  Obtained from environmental sample
  DOMAIN (16)...(180): short chain dehydrogenase
  misc_feature (1)..(255): Xaa is any amino acid
MISYKGADKDFSLEGQTAIITGGAAGIGYATAEFFAKKGVNLVLADLNPDADAAAKKLGPKNIGIPGNVCDCAYRKSVIDAGVKAFGKIDILINSAGIVALEKAESISEDFWNKTISVNLTSSFMMAQLFGAYLIEKKLPGCIVNIASQAGVIALDKHVAYCASKGAIISMTQVLALEWGKYNIRVNCVSPTVVLTELGHKAWDGPAGDAFKKEIPAERFAEPDEIAGVIAFLCSNTAAMITGHNLLIDGGYTIK

SEQ ID NO: 55709 - DNA, 600 bp, Unknown
  Obtained from environmental sample
  misc_feature (1)..(600): n is a, c, g, or t
atgtttaatttttgcccatcgtgcgcctcaaaaaaaatcgcttttgtgaagggaaaatctttccgttgtcccgattgcggttttgtttattatcacaatgtagccgcggctactggctgtattatcgttgtgccggaagatgagaattctacggaaacggggcagttgtccaacaatttgccatgtaaagaatcggacaggatcatctttcttgttcggggcaaagagccgggtatcggtaaactcgatcttcccggcggctttgttgatccaagcgagggcgttttagacggcgtctaccgcgaattacgggaggaaattaactggacgccgcatattcccgagggtgcaaggttatcggatgtttttaaattgtttgcatcttttccaaatttatacttttataaaggcataaattacaatacatgtgatatgtatttttcagtccgcgcgcctggtcttaaaccggaagacctgtgtcaggaaaaagccgaaatctcggagattcgatttttaaaaccctcagaaattgatttttcccagttcgcttttccttccaccgtgaaggctgtaaaaacgtatcttaacatccttgactaa

SEQ ID NO: 55710 - protein, 199 aa, Unknown
  Obtained from environmental sample
  DOMAIN (34)...(197): NUDIX domain
  misc_feature (1)..(199): Xaa is any amino acid
MFNFCPSCASKKIAFVKGKSFRCPDCGFVYYHNVAAATGCIIVVPEDENSTETGQLSNNLPCKESDRIIFLVRGKEPGIGKLDLPGGFVDPSEGVLDGVYRELREEINWTPHIPEGARLSDVFKLFASFPNLYFYKGINYNTCDMYFSVRAPGLKPEDLCQEKAEISEIRFLKPSEIDFSQFAFPSTVKAVKTYLNILD

SEQ ID NO: 55711 - DNA, 585 bp, Unknown
  Obtained from environmental sample
  misc_feature (1)..(585): n is a, c, g, or t
atgtatcgaggtaatatggctgctaatcattcaatccccggtgaataccgtagagcggctgaacgtctgtttttcaaagacgggttctccaaggggcataaacttgatgtaaaagccgcttgtgaatttgccaagtcacttggaatcggcattgaatatcagcgtttactcgcactcgaaaaaaacagcggggagttacggacttttcttgatcagtttcaaaataatttggctttgttaattaaaaaaacatgggtagaaaaatccgatgaagaccgcaagggaaaattgcaggatgaaattccgctatttatgtccacggttgagcagacggattatataaaagccataaatgaatttagcgggatccttgatgaattagcttatctgttttttggctctcaaagtgaaaaagaagactttgcagagtatactttccgcattgacgtgcagatggggcttttttggtggtatggaagcaaacttgagttgttaaaagatataaaaactcaaaatatagacagcaatgataaagtgttatgggcaattttgcttttgggactttgttatctgacaaatttttaa

SEQ ID NO: 55712 - protein, 194 aa, Unknown
  Obtained from environmental sample
  misc_feature (1)..(194): Xaa is any amino acid
MYRGNMAANHSIPGEYRRAAERLFFKDGFSKGHKLDVKAACEFAKSLGIGIEYQRLLALEKNSGELRTFLDQFQNNLALLIKKTWVEKSDEDRKGKLQDEIPLFMSTVEQTDYIKAINEFSGILDELAYLFFGSQSEKEDFAEYTFRIDVQMGLFWWYGSKLELLKDIKTQNIDSNDKVLWAILLLGLCYLTNF

SEQ ID NO: 55713 - DNA, 918 bp, Unknown
  Obtained from environmental sample
  misc_feature (1)..(918): n is a, c, g, or t
atgaaccatgatgatgtacgccgacacgtccagccgttccctggcttcgatggggtaactgtaggaagccttactaaagccatcctcaaaaaatggctgatatggcttgcagggcgaaaaactataagccacaaaaaagacggaaccatcattgaaggcaacaacttatcaggacgcagagctaatacagtattacaggccgttagggttgctatccgttgggcggtagacaatgaagaaatagacacagacccattcagaaagttaggtgaagtttctgaaagtataaaagaaaaaggcgttctctcattcgaggaaagaaacagattaacaacgctgccgataaatgattatcgttcccgccttgttatgcttttaggcagttactgcggacttcgcaggggtgaaatgcgaggtctacaatggggtgatatagcggatggaattattaccgttcaacataactttattgacattgaaggtgtaaagcagcccaaatacaacagcacccgaaaagtccccataacggcagacattcaaaaattgctggacatagcccgtaaaaatgcctttaatacatcacctgaaaactatattttggaaagccctcttacacctggaaagcccctctgcaataattttttccgcgaagccgttactaaggaactggaaagtatagggattaccgcagcccgccagaaagaacgtgttttaacttgccatagcctacggcatacatttattacacttgcacagctatcgggtattcccgatgttgtaatcagagcgcttgcaggtcataaaagcgaacaagtacaacaaaagtacagccatgtaccgcaagttattgattttaacgatgcccgaaataagcttgaagcctatgggcaaaatgaactaaaaaccgccaatggttag

SEQ ID NO: 55714 - protein, 305 aa, Unknown
  Obtained from environmental sample
  DOMAIN (101)...(290): Phage integrase family
  misc_feature (1)..(305): Xaa is any amino acid
MNHDDVRRHVQPFPGFDGVTVGSLTKAILKKWLIWLAGRKTISHKKDGTIIEGNNLSGRRANTVLQAVRVAIRWAVDNEEIDTDPFRKLGEVSESIKEKGVLSFEERNRLTTLPINDYRSRLVMLLGSYCGLRRGEMRGLQWGDIADGIITVQHNFIDIEGVKQPKYNSTRKVPITADIQKLLDIARKNAFNTSPENYILESPLTPGKPLCNNFFREAVTKELESIGITAARQKERVLTCHSLRHTFITLAQLSGIPDVVIRALAGHKSEQVQQKYSHVPQVIDFNDARNKLEAYGQNELKTANG

SEQ ID NO: 55715 - DNA, 1647 bp, Unknown
  Obtained from environmental sample
  misc_feature (1)..(1647): n is a, c, g, or t
atgaggccggacgcgctatgcaaagccctcggcataaacgaggacgagttcaagacgctcaacccgagcatacgcccggtgctattttcgcagaagaagccgattcccgcaggctacaacgtaaacgtaccaaaccgcatcacttcagaaacggccttggccgccctgaaccgcgctcccctacccatgcgggccacgcaaaaggaagcggcggaatcggagggttactacaccatagtaagcggcgacaacctcgccggcatagcgaagcgcttgggcgtgcagatgagcgatctcgcggcggtgaacaatatcacgaaatcgagcaaattgcaagttgggcaggtgctgctgataccgtcgggcggcgagtctggatcagcgctgggagcgacaattacggcgtctaagtccgcgccgaaggcgggagccgccgatacggttaaagcagccgcggttatcgcgtctaaaccggcttcaaagcaaactaaagccgcggcggttgatactgtcaagaaggttgcgttaattgataccgcgagcgttgcgccggtcgatacggcgaaaaaagccgcgggagttgccgacacatcaaaagcaaccgtcgcgtctaaatccgtatcgatgacggtgtccgtcaataccgcgagtacagtatctgtagataccgcaaaaaaagtttcggcggttgccgacactacgaaatcaacggaaccggcgttgctcaataatcttcgggtaacgataaagtccccgacctttgagcgtaccgcgccgccggcggcgcttgtacagacaccgccggcatcaacgcctcccgcattaacgcaaactgtactaacacagcctgcattgacgactccgaccgtatcgacaccgccgcccgtattaacatcatccgtaccgccgatacaaccggtatcgacgccgcccgtatcaacgccgtccgtaccgcctatacaaccggtatcgacgccgcccgtatcaacgccgtccgtaccgccgatacaaccggtatcgacgccgcccgctatcgccatagcaccggcaccggcgcccatcgacaccgccaccgccaagccggcaaagatcaacccgtcggtcaaacccgaccccgaccccacattcaacgccgacgtctacgatctcggcatgaccgtggccccgggcggctccagcgtccgcatccgcgtctcggtcgacgagtccatcgggcgcttcgccgagtggatgcgggtcaatatcagcgatatccgcaccgccaacaacatgaccgagaacgaggcgctgcagctcggcgcgttcatctccatacccatacgctcgtcaacgaacatcaagcgcttcgaggtcaaccgcctgcagtaccacttggctatagaggaggacttcttcgcgaacttcaacgttacggactttgagaagcggacggtcaagccgggcatcaacctatggaagatatgccgggaggcgcagatccccatgtggctcttgaagaagtacaacagggggataaacttctacgccatgcagcccggcagcaccctttggatacccaaggtaggcgccaaggacgaggtcaacagcgccgggaacgaggtagacccggcgatatcggaggcggaggaaccggcggacgggcaataa

SEQ ID NO: 55716 - protein, 548 aa, Unknown
  Obtained from environmental sample
  DOMAIN (476)...(519): LysM domain
  misc_feature (1)..(548): Xaa is any amino acid
MRPDALCKALGINEDEFKTLNPSIRPVLFSQKKPIPAGYNVNVPNRITSETALAALNRAPLPMRATQKEAAESEGYYTIVSGDNLAGIAKRLGVQMSDLAAVNNITKSSKLQVGQVLLIPSGGESGSALGATITASKSAPKAGAADTVKAAAVIASKPASKQTKAAAVDTVKKVALIDTASVAPVDTAKKAAGVADTSKATVASKSVSMTVSVNTASTVSVDTAKKVSAVADTTKSTEPALLNNLRVTIKSPTFERTAPPAALVQTPPASTPPALTQTVLTQPALTTPTVSTPPPVLTSSVPPIQPVSTPPVSTPSVPPIQPVSTPPVSTPSVPPIQPVSTPPAIAIAPAPAPIDTATAKPAKINPSVKPDPDPTFNADVYDLGMTVAPGGSSVRIRVSVDESIGRFAEWMRVNISDIRTANNMTENEALQLGAFISIPIRSSTNIKRFEVNRLQYHLAIEEDFFANFNVTDFEKRTVKPGINLWKICREAQIPMWLLKKYNRGINFYAMQPGSTLWIPKVGAKDEVNSAGNEVDPAISEAEEPADGQ

SEQ ID NO: 55717 - DNA, 903 bp, Unknown
  Obtained from environmental sample
  misc_feature (1)..(903): n is a, c, g, or t
ttgaatgtggggtcggggtcgggtttgaccgacgggttgatctttgccggcttggcggtggcggtgtcgatgggcgccggtgccggtgctatggcgatagcgggcggcgtcgataccggttgtatcggcggtacggacggcgttgatacgggcggcgtcgataccggttgtataggcggtacggacggcgttgatacgggcggcgtcgataccggttgtatcggcggtacggatgatgttaatacgggcggcggtgtcgatacggtcggagtcgtcaatgcaggctgtgttagtacagtttgcgttaatgcgggaggcgttgatgccggcggtgtctgtacaagcgccgccggcggcgcggtacgctcaaaggtcggggactttatcgttacccgaagattattgagcaacgccggttccgttgatttcgtagtgtcggcaaccgccgaaactttttttgcggtatctacagatactgtactcgcggtattgacggacaccgtcatcgatacggatttagacgcgacggttgcttttgatgtgtcggcaactcccgcggcttttttcgccgtatcgaccggcgcaacgctcgcggtatcaattaacgcaaccttcttgacagtatcaaccgccgcggctttagtttgctttgaagccggtttagacgcgataaccgcggctgctttaaccgtatcggcggctcccgccttcggcgcggacttagacgccgtaattgtcgctcccagcgctgatccagactcgccgcccgacggtatcagcagcacctgcccaacttgcaatttgctcgatttcgtgatattgttcaccgccgcgagatcgctcatctgcacgcccaagcgcttcgctatgccggcgaggttgtcgccgcttactatggtgtag

SEQ ID NO: 55718 - protein, 300 aa, Unknown
  Obtained from environmental sample
  SIGNAL (1)...(28)
  misc_feature (1)..(300): Xaa is any amino acid
MNVGSGSGLTDGLIFAGLAVAVSMGAGAGAMAIAGGVDTGCIGGTDGVDTGGVDTGCIGGTDGVDTGGVDTGCIGGTDDVNTGGGVDTVGVVNAGCVSTVCVNAGGVDAGGVCTSAAGGAVRSKVGDFIVTRRLLSNAGSVDFVVSATAETFFAVSTDTVLAVLTDTVIDTDLDATVAFDVSATPAAFFAVSTGATLAVSINATFLTVSTAAALVCFEAGLDAITAAALTVSAAPAFGADLDAVIVAPSADPDSPPDGISSTCPTCNLLDFVILFTAARSLICTPKRFAMPARLSPLTMV

SEQ ID NO: 55719 - DNA, 1032 bp, Unknown
  Obtained from environmental sample
  misc_feature (1)..(1032): n is a, c, g, or t
atgttcttgtgttccgcattgtcgggagatccaaccgattatacaaccggttttacatatcaatctccttattatcttgccgactatgattatataacgagcaaacataacaagattgcccagtcaattttaatatcaatacttgccatattggggatataccacttcctgttttttgtcattttccgcgaaaaccgctacagtttactatgcggatctttttttcttggtatgagtttttattatatgatgcggagaactcaatggatacgtcaatttatccccaattctgacattgcgatgaagctggaatatttaacgcttttctttatgatactggctcttatggcttatacggacaagctttgcaacggtcgtttttttattgcaaccaaaatatacggtattttgtgtgtggttatggcggtgtcccaattgtttttttcacgaacttacggaagcgaggcggcggctgtctgggaagcggcgagtatgatcgcaatagtatggctttttatttataattttattcttccaattaatcgcgaattgaaaaaaagtaaaaatttcatcgatatattgattaatacttatcctggaaatctgttaattgctttttcaataatcagcataaccggaatttttgaccttcttgattccgccgttctgcatttatcgctgagtttaaccaattacggtatagtagtctttgcgttgtcggttacatttatgttattcagaatgtccgttataaaagacagggaacttaaagaaaaaagcgcattgctggaaaaggcgactaatcccgagtccgcgcgcgagaaggtatttaactcatacggattaacggaacgcgaaaaagaagttgcccgtttaatggcggaaggacttgataacaaggaaatcggcgagcgtttatttgtatccggcagaactatcgcgttccacgcaacaaacattttccgaaaattcggcattatcgacggcaaaaacaaggggcgcgcggtgtttttggcaaagttgtttaactaa

SEQ ID NO: 55720 - protein, 343 aa, Unknown
  Obtained from environmental sample
  DOMAIN (37)...(248): 7TM diverse intracellular signalling
  misc_feature (1)..(343): Xaa is any amino acid
MFLCSALSGDPTDYTTGFTYQSPYYLADYDYITSKHNKIAQSILISILAILGIYHFLFFVIFRENRYSLLCGSFFLGMSFYYMMRRTQWIRQFIPNSDIAMKLEYLTLFFMILALMAYTDKLCNGRFFIATKIYGILCVVMAVSQLFFSRTYGSEAAAVWEAASMIAIVWLFIYNFILPINRELKKSKNFIDILINTYPGNLLIAFSIISITGIFDLLDSAVLHLSLSLTNYGIVVFALSVTFMLFRMSVIKDRELKEKSALLEKATNPESAREKVFNSYGLTEREKEVARLMAEGLDNKEIGERLFVSGRTIAFHATNIFRKFGIIDGKNKGRAVFLAKLFN

SEQ ID NO: 55721 - DNA, 879 bp, Unknown
  Obtained from environmental sample
  misc_feature (1)..(879): n is a, c, g, or t
atgtaccacctgcgctattactttgccgacgcaaaaggtgatgctgccagaaacgccataatgaacggcgaaggtgcgcctgacggcgcggcacctgtcggcgcttatattgaacttgccaccaccaggccggaaacgctgttaggtgacaccgcggtggcggttcaccccgaagatgaacgctatgcgggtctgaagggaaagggcggcattgccgccactgtccgtctcccccttgccgggcgcgatattcccatcgtgtttgacgcctacgttgaccgggcattcggaaccggcgtggtaaaaatcacccccgcccatgatcccaatgactgggaccttgccaaacggcacgatcttcccgtaatcaatatactcaaccccgacggaactctcaacggcgaagtccccgaaaagtaccgcggcatgacagtcaaacaggcccgcgccgctgtgctggaagacctgaaagcgggcggttggtacataaaagaagacaacatcaaccatgcggtgggccattgttaccgctgccataccgtgatagagcctttcctttcagagcagtggtttgtcagaatgaaaccccttgcggaaaaagccctgacctcctggcggcggggcgatattgtcttctatcctcccaaatggcagcatacctaccagcactggatggaaaatatacgggactggtgcatcagccgccaactctggtggggtcaccggattccagcgtgggattgcaaagactgcggtaaaacgtcagtgtcgcgtaacgacctgagcgcctgtcctcactgcggttccgttcatattgaacaagaccccgatgtacttgacacctggttttcagctggctctggcccttcagcactttag

SEQ ID NO: 55722 - protein, 292 aa, Unknown
  Obtained from environmental sample
  DOMAIN (4)...(292): tRNA synthetases class I (I, L, M and V)
  misc_feature (1)..(292): Xaa is any amino acid
MYHLRYYFADAKGDAARNAIMNGEGAPDGAAPVGAYIELATTRPETLLGDTAVAVHPEDERYAGLKGKGGIAATVRLPLAGRDIPIVFDAYVDRAFGTGVVKITPAHDPNDWDLAKRHDLPVINILNPDGTLNGEVPEKYRGMTVKQARAAVLEDLKAGGWYIKEDNINHAVGHCYRCHTVIEPFLSEQWFVRMKPLAEKALTSWRRGDIVFYPPKWQHTYQHWMENIRDWCISRQLWWGHRIPAWDCKDCGKTSVSRNDLSACPHCGSVHIEQDPDVLDTWFSAGSGPSAL

SEQ ID NO: 55723 - DNA, 1089 bp, Unknown
  Obtained from environmental sample
  misc_feature (1)..(1089): n is a, c, g, or t
atgatactatcattaacaatggatattaagaaaaaacttaactttttaatgtatttcacattaatattatcggtttttattgcaatatcatgcagtttacattcttccggtattgatccttattaccttacaggctcaaaggaagacaggaaaaaccttatagagctttttaacctgctaaaaaaagaagaaccgggcggcgacggcgaatttgccgtcacaagggaaattgccacaagtttcgcgcggttaaacgattatgaaagactgatacattttttaagcgcaaaagcgattaataacccggctgacccttataacggctactattttttgatgattgcctacgcgtatgtccagcgggaatcgagacctatcgccgccctttactttgatttaatcattaaaaattaccctgaccttatcataaacgacgagtcaatccaccttgtctgcctgcgtaaccttatcaatgaaaacgtcaaagtagaccgaaaagtttggtactataacgagcttatctccagattttccgaaaaaatcgatttaggaaccagttattttatgctgggtcaggcttgcgaacaagccggagactggaacggcgcggttgcggcatatacaaattatctgccgtattcggggactgtaatccccggttttccctatgccgaccaacacgcaaaacatcaggttgactttagcaggtctcaaaaagactggacttttgaaagcctgcccgcgttaagaagcgcaatagaagccgctcttgacgaagccaacgcaacagcgcttatgagataccagacaaaagtcaactttttcgcccgttcatgggaacaggtggaaaccgatgatattggtatgaacaagtttaatcttgcccaatttatgtacggcaaccatatcaaatattctccaactctggacgattcctctaattcaaccgaagcgtttttaaaaacgacaggctggtcattgtcgcttaatacctggtatttgtactttagaaagatttatttcccgcaagaccctgaaatccacggaagatgggaatgggctggtatttactacggagagaaattttga

SEQ ID NO: 55724 - protein, 362 aa, Unknown
  Obtained from environmental sample
  misc_feature (1)..(362): Xaa is any amino acid
MILSLTMDIKKKLNFLMYFTLILSVFIAISCSLHSSGIDPYYLTGSKEDRKNLIELFNLLKKEEPGGDGEFAVTREIATSFARLNDYERLIHFLSAKAINNPADPYNGYYFLMIAYAYVQRESRPIAALYFDLIIKNYPDLIINDESIHLVCLRNLINENVKVDRKVWYYNELISRFSEKIDLGTSYFMLGQACEQAGDWNGAVAAYTNYLPYSGTVIPGFPYADQHAKHQVDFSRSQKDWTFESLPALRSAIEAALDEANATALMRYQTKVNFFARSWEQVETDDIGMNKFNLAQFMYGNHIKYSPTLDDSSNSTEAFLKTTGWSLSLNTWYLYFRKIYFPQDPEIHGRWEWAGIYYGEKF

SEQ ID NO: 55725 - DNA, 1350 bp, Unknown
  Obtained from environmental sample
  misc_feature (1)..(1350): n is a, c, g, or t
ttggggctggacgcggaaagcgccctgctggtttcggcgcgtaacggcacgggcgttgacgagcttttcgaggccattgtcaaacgcgtcccgccgccgtcgggcgacaaaaacgccccgctgagggcgctcattttcgactgccattacgattcctaccggggcgtcgtggttcatctgcgcgtctatgacggaacaattaaaaaagggatgaaaatatcctttatgtcaaacggctctgtgtacgaggttgagaccaccggcgttttcaaaattgttctggttgaaacaaacgagctttccgccggggacgtgggctatgtcatcgccggtattaaaacggtcagcgacgtgcgggtcggcgacacggttacgggcgcggataacccctgccctacccccttaagcggtttccgcgaagtaaagcccgttgtcttttcgtcaatctaccctgtagattccaacgattacgaagaactgcgcgcaagcatggaaaaactcaagctcaacgacgcctcgcttgtgtacgaaaaagattcatcggcggccctcggtttcggtttccgctgcggctttctcggccttctgcaccttgaggtgatacaggagcgtcttgaaagggaatttgaccagtcggtgatatttaccgctccttccgtaaagtacaaactgcggctaaaaaattcaaaagatgaagtaatgattgacaaccccatggaataccccgacgaggggttgatcgaaggcgctgaggaaccctatattcgcgcgtcgatcatcaccccggcgacattcctcggcaatataatgaccctctgtcttgaaaaacgcggggtacagaccaacatgacctaccttgacgaaaacgtgtggagcttgtgtacgacatgccgctttcggaagtactctttgacttttacgaccgccttaaaagcacaagcccgcggttacgcttcttttgattacgatataacaggctataaacccacggagctggtcaagcttgacatcttgttaaacggcaaagccgttgacgccctctcccagctcgtgttcaggaacaacgcctataaccgcgccagaatcgtctgcgagcggctggtggacgaaatacccaggcagcagttcaagattccgattcagggggcaatcggcagtcagattatcgcaagggaaacggtaaacccactgcgtaaggacgttctggccaagtgctacggcggcgacattacccgcaagcggaagctcctggaaaaacagaaggaagggaagaaacgtatgcgtatggtgggggacgtggaactcccccagagcgcgttccttgcggtgctaaagacgaaagagcaataa

SEQ ID NO: 55726 - protein, 449 aa, Unknown
  Obtained from environmental sample
  DOMAIN (55)...(125): Elongation factor Tu domain 2
  misc_feature (1)..(449): Xaa is any amino acid
MGLDAESALLVSARNGTGVDELFEAIVKRVPPPSGDKNAPLRALIFDCHYDSYRGVVVHLRVYDGTIKKGMKISFMSNGSVYEVETTGVFKIVLVETNELSAGDVGYVIAGIKTVSDVRVGDTVTGADNPCPTPLSGFREVKPVVFSSIYPVDSNDYEELRASMEKLKLNDASLVYEKDSSAALGFGFRCGFLGLLHLEVIQERLEREFDQSVIFTAPSVKYKLRLKNSKDEVMIDNPMEYPDEGLIEGAEEPYIRASIITPATFLGNIMTLCLEKRGVQTNMTYLDENVWSLCTTCRFRKYSLTFTTALKAQARGYASFDYDITGYKPTELVKLDILLNGKAVDALSQLVFRNNAYNRARIVCERLVDEIPRQQFKIPIQGAIGSQIIARETVNPLRKDVLAKCYGGDITRKRKLLEKQKEGKKRMRMVGDVELPQSAFLAVLKTKEQ

SEQ ID NO: 55727 - DNA, 390 bp, Unknown
  Obtained from environmental sample
  misc_feature (1)..(390): n is a, c, g, or t
atgggtcagaattcggcacgaggaagtacccttatattcatatttatagagccactggtcagcatgttttctttaagcgccgaggctcataatctagcgaaaacattcatgagcatccactgcatttccatggccctgggctggcctattagttttgccatgcctaacgcgctgagagctgcaggggacgcccgctttgtaatggtagcaagcacaatttccatgtgggtagtccgcgtctgtgcggcgtatctgtttacattcaccctcgggatagggccgctgggggtgtggcttgcaatgggagcagacttcttcgtccgcggtggcgcgtttactttacgctggcgtagcggcaagtggcaggaaaagcgggttataagggattaa

SEQ ID NO: 55728 - protein, 129 aa, Unknown
  Obtained from environmental sample
  misc_feature (1)..(129): Xaa is any amino acid
MGQNSARGSTLIFIFIEPLVSMFSLSAEAHNLAKTFMSIHCISMALGWPISFAMPNALRAAGDARFVMVASTISMWVVRVCAAYLFTFTLGIGPLGVWLAMGADFFVRGGAFTLRWRSGKWQEKRVIRD

SEQ ID NO: 55729 - DNA, 789 bp, Unknown
  Obtained from environmental sample
  misc_feature (1)..(789): n is a, c, g, or t
ttggtaccgcagaattccctttctaccgcccgcgacgcgattataacgatggaaggcatagaaataatccgcccgaccaataatattgacgaccttattcccggccttactcttaacgtaaggggggtatcagaacgtccggtggatttaaaagtaaaaggcgacacggaaaaagtaaaagaagcaattataaattttgtcggaaactacaacaggcttatagccgaaattaacgtgcttacagcaagaagcgtatcctcgggatcgggaaccaaaacaagcgtggacgattccgtattaaatgaattgacatatttaaccgcggatgaaagggccgaaatgagaaccagacttggcgcttttaacggggaccttacgctgaatcagcttaaaaacaggctgttacagtccgttaccgcgccctaccccaccagccttgagcgcgatctttcacttttggcgcaaatcggaataggaaccaacgcggcaagaggcgccggttatgagccgtccaaacttcgcggctatcttgagatagacgagaaaaaactggactcttcgcttgagaataaaattcctgctatcagggagcttttcgccagcgatacttcaggcgacatgattgcggataccggtgttgcgtataacgtagacgcgatagtgaaaccgtttgtggaagtaggcggaataattacattaaaaactaataccatagattcgcgcataacccaggatgaaaggcgcgtcagcactatggaacgccagcttgcggcaaagaaacggaactga

SEQ ID NO: 55730 - protein, 262 aa, Unknown
  Obtained from environmental sample
  DOMAIN (10)...(260): Flagellar hook-associated protein 2 C-terminus
  misc_feature (1)..(262): Xaa is any amino acid
MVPQNSLSTARDAIITMEGIEIIRPTNNIDDLIPGLTLNVRGVSERPVDLKVKGDTEKVKEAIINFVGNYNRLIAEINVLTARSVSSGSGTKTSVDDSVLNELTYLTADERAEMRTRLGAFNGDLTLNQLKNRLLQSVTAPYPTSLERDLSLLAQIGIGTNAARGAGYEPSKLRGYLEIDEKKLDSSLENKIPAIRELFASDTSGDMIADTGVAYNVDAIVKPFVEVGGIITLKTNTIDSRITQDERRVSTMERQLAAKKRN

SEQ ID NO: 55731 - DNA, 1668 bp, Unknown
  Obtained from environmental sample
  misc_feature (1)..(1668): n is a, c, g, or t
ttgagagtcggcggctttattttacgcttaacttttgttattgctctttttctaaccgtattttcaggctgtgaaaaagctcccaaagaaaagcgcgccgtatcaatagaaaacctgtcgttcagggacatatacggtataacacgggaagaaatcagagccatcgaagccatcaggaaaaaacacagcgttttttcctgcgccttaaatatttccacggattctttctacgataaaaacggagaactttccgggtactcggttttgttttataaatggctttcaaatcttttcggaataacgtttaagccggaaaccttcgaatgggtcagtctgcaggaaaaaatatataataatgaaattgattttacctttgaacttgcgcagacccaggagcggcgcaaagatttattcgtgtcaaagcctgtcgcccagcgcccgtttaagatatacaggattaccggcagcgagcctcttgcgaaaataatcagcttgcgaaaaccgcgtttagcgtttttaacgaactccgtccttctggaagatacaaaagcaaacgccggatatgaatttgacgttgtttttgttgaagaccatgccgacgcttacccgcttttagaaagcgggcaaattgacgcgtatatagcgcttgacaatacggaatctgtttttgacgtgttcggcaacgttacaggcgagaattttttcccccttattttcagatcgttctccctgttaaccgggaacaaagagctaagcccgataatctccgtccttgataaagcgcttgacacaaataccctcgcctatcttaccgacatacgcaaaacagggtatcagaaatatcttggaaccaagctttacgcgcagttaaccgaagaagaaaaatcattcattaacgcaaaccctgttattcccatagccgccgaatttaacaattacccggtaagtttttttgacacggaaacaaaaaaatggcagggaatttattttgacgcattaggtgaaattacaaacatgacgggcatgaagtttgaacctgtatgcgaaaataacatgcaatatcatgaacttttaaccatacttgaaaacggaaatgcgcaaatcatatccgagctttaccgcttaaaagaatatgaaggccgttttttatggtcggatgtctcgcttttacaggataattacgcgtttataacaagatcggatttccataatatcgacttaagcgaggtttcttatttgcgcgtaggagccaggcattcccattattcagacttatttacaaaaatgtttcccggacatgagaatttttttaaatacgcgactcaggaagaaacatgggataatttaaaaaacggcacaattgacgcgatattctccagccggcgcaggctggttatctacaccaactaccacgaagaagcgggctttaagctcaatttaatattcgatgatgaatttgacacgcccttcggttataacagggacgctttagttttaaagtcgattatcgacaagtcattgaatctaatcaaaataaacaacatatcaaatcagtggatgaacaaaagctatgattaccgggctaaaatgacggccgcccgccttccctggctggtcggcgtttcggtattaaccttcctgatactccttctggtattaagcctttaa

SEQ ID NO: 55732 - protein, 555 aa, Unknown
  Obtained from environmental sample
  DOMAIN (304)...(522): Bacterial extracellular solute-binding proteins, family 3
  misc_feature (1)..(555): Xaa is any amino acid
MRVGGFILRLTFVIALFLTVFSGCEKAPKEKRAVSIENLSFRDIYGITREEIRAIEAIRKKHSVFSCALNISTDSFYDKNGELSGYSVLFYKWLSNLFGITFKPETFEWVSLQEKIYNNEIDFTFELAQTQERRKDLFVSKPVAQRPFKIYRITGSEPLAKIISLRKPRLAFLTNSVLLEDTKANAGYEFDVVFVEDHADAYPLLESGQIDAYIALDNTESVFDVFGNVTGENFFPLIFRSFSLLTGNKELSPIISVLDKALDTNTLAYLTDIRKTGYQKYLGTKLYAQLTEEEKSFINANPVIPIAAEFNNYPVSFFDTETKKWQGIYFDALGEITNMTGMKFEPVCENNMQYHELLTILENGNAQIISELYRLKEYEGRFLWSDVSLLQDNYAFITRSDFHNIDLSEVSYLRVGARHSHYSDLFTKMFPGHENFFKYATQEETWDNLKNGTIDAIFSSRRRLVIYTNYHEEAGFKLNLIFDDEFDTPFGYNRDALVLKSIIDKSLNLIKINNISNQWMNKSYDYRAKMTAARLPWLVGVSVLTFLILLLVLSL

SEQ ID NO: 55733 - DNA, 1524 bp, Unknown
  Obtained from environmental sample
  misc_feature (1)..(1524): n is a, c, g, or t
atgtttgaactgctggcgcatgtcatgccggaattaattctcttggacgtagaaatgcccgagatgaacggctatgaagccataaaaaaacttaaaaacagcagtattaccaaggaaattccggttatattccttacgtcaatgacggacgcgcagagcgagttggaaggattaagctacggcgctgttgactatatacgcaagccctttgtcactcccctattgctccagcgtataaaaacccagctttcaattctggaacagcagaatgaaatcaggcatcttctggacttaaaaacggaagaagttaaaatgcgcgaagcggcggaacatgaggcggaaagcgcctcccaggccaagggcgacttcctttcccacatgagccatgaaataaggtccccgttaaacgccgtaatcggaatgataaacatcgccaacgaggaaaaaacccttgaaggcgtaaaggtttatcttgaaaaagcggagaacgcggcaaagcacgtgttaggcgtcataaacgacattcttgacatgtcaaaaattgaagcgaacaaacttgagctttccgacagtgaatttgatttcccgaaaatgatgacgaacattgtggacgtaacgggcataaaagcgcaggaaaaacacatacagatagaaacagatatcagcaaggatattccgactgtagtaatctgcgacgaattgcggctggcgcaggttattacaaaccttatgaccaacgcgataaaattcacgccggataacggcaagataaagctgaacgcgcaaaaactggaagaaaaggaagatgaagttaccataagaattgaagttgcggactcaggcatagggatttcgcctgaacagcaggcaaaacttttctcggcatataatcaggccgaccgcaccatctcgaaacaattcggcggcacgggtcttgggcttgccatttccaaacggattatcgaacttatgcagggaaagatttggattgaatcggaactgggcaagggcgcgaaatttatatttaccttaaaaatgaaaaaaggaaaacctgccgcggcctcggccgatgcctcatccgccgcctccgccgaagcccccaaacccactgtcccaagcataaaggcgacggatctgcatttacagggttataccatattggcggcggaagacatggactttaacagggaagtcctttccaaatatatggaaaaaaccggcgttaccattgattacgccgaaaacggcaaagaggccgttgaaaagttcaaagtaaatcatgaaaaatactgcatgatccttatggacattaacatgccagaaatggacggggatgaggctacaaaggtaataagatcgcttgacatcccaaaagcaaaagaaataccgattgtagctatgaccgcggatgtttttaaggaagacgttgaaaaatgcctttctgtgggcatgaacgaccatatctcaaaacctattgtcccgaaaatcatttattcaaagattaaacagcatcttaagttataa

SEQ ID NO: 55734 - protein, 507 aa, Unknown
  Obtained from environmental sample
  DOMAIN (119)...(184): His Kinase A (phosphoacceptor) domain
  misc_feature (1)..(507): Xaa is any amino acid
MFELLAHVMPELILLDVEMPEMNGYEAIKKLKNSSITKEIPVIFLTSMTDAQSELEGLSYGAVDYIRKPFVTPLLLQRIKTQLSILEQQNEIRHLLDLKTEEVKMREAAEHEAESASQAKGDFLSHMSHEIRSPLNAVIGMINIANEEKTLEGVKVYLEKAENAAKHVLGVINDILDMSKIEANKLELSDSEFDFPKMMTNIVDVTGIKAQEKHIQIETDISKDIPTVVICDELRLAQVITNLMTNAIKFTPDNGKIKLNAQKLEEKEDEVTIRIEVADSGIGISPEQQAKLFSAYNQADRTISKQFGGTGLGLAISKRIIELMQGKIWIESELGKGAKFIFTLKMKKGKPAAASADASSAASAEAPKPTVPSIKATDLHLQGYTILAAEDMDFNREVLSKYMEKTGVTIDYAENGKEAVEKFKVNHEKYCMILMDINMPEMDGDEATKVIRSLDIPKAKEIPIVAMTADVFKEDVEKCLSVGMNDHISKPIVPKIIYSKIKQHLKL

SEQ ID NO: 55735 - DNA, 501 bp, Unknown
  Obtained from environmental sample
  misc_feature (1)..(501): n is a, c, g, or t
atgggaaacccccgaataccgagggaagatcatctggttttaatcacctgccggcctgatctgataccgatcgacctgaagcgtcaaggacgcgctgaagagcatcttgcacttttttatcctgagacggaaaaggacagggaagacctttttaaaacgctgattcgtaaacttgatcttgatattcgcaatttttctattgcagaccttttcagaaaatataaatatgaatattccggcgctgaccttgaggcggttcttgtccgcgcaaaactgctcgcggcaatggatgaccgtgtttttgtaaaacgcgaagatatggaagaagcaatgggggattttgttccggctgcttatcctcatgaagttgcgttgcagaatcttgtcgctgttttggaatgcacttccaaagagatgataccgaaggacttccgcaatcttccccgcagcaaaattatcaacgacattcaggaattaaaagccttactgggagaaaggtag

SEQ ID NO: 55736 - protein, 166 aa, Unknown
  Obtained from environmental sample
  misc_feature (1)..(166): Xaa is any amino acid
MGNPRIPREDHLVLITCRPDLIPIDLKRQGRAEEHLALFYPETEKDREDLFKTLIRKLDLDIRNFSIADLFRKYKYEYSGADLEAVLVRAKLLAAMDDRVFVKREDMEEAMGDFVPAAYPHEVALQNLVAVLECTSKEMIPKDFRNLPRSKIINDIQELKALLGER

SEQ ID NO: 55737 - DNA, 774 bp, Unknown
  Obtained from environmental sample
  misc_feature (1)..(774): n is a, c, g, or t
atggaaaggaaagacgggcacttaaaacaacaacttgatctttggtatgaaaaaatctgtacaaaagattttatttcctctgatccggttcagtttccgcacaggttttcaaaacgtgaagatattgaaatagcggcttttctttccgctacaattgcgtggggcaggcgcgacataattcttcgcagcgcggaaaaaatgtttgttattatgggaaatagtccgtataactttgtaatgtccggcggatacaaaaaacttaaaaaccgcaatattcaccgcactttttttgagaacgacttcaaatacttctgccgcggctttgagcactgttacgcgaaatataaaaatctggaagaattgtttacagcttcgccggatgtatgggaaggttttgccctgtttcgcgaagaaatggcagaggcaaacgacgggcgttattcaaaacacatttcaaatcctggcgcacaggacagaaacggctccgcatgcaagcggctaaaccttgcgctgcgctggctcgtgcgcaaagggccggttgatctcggtctctggaaaaatttaaaacctgccgtcttgtacattccgcttgacgttcatgttgcgcggacagcgcggacacttagacttttagagcgcaagttaaacgataaaaaatcggtaatagagcttacggaaaaattacgggagttttgtcctgaggacccggtaaagtacgattattcattgtttgggaccggcatagtaaatcaaccggatttgttagacaactga

SEQ ID NO: 55738 - protein, 257 aa, Unknown
  Obtained from environmental sample
  misc_feature (1)..(257): Xaa is any amino acid
MERKDGHLKQQLDLWYEKICTKDFISSDPVQFPHRFSKREDIEIAAFLSATIAWGRRDIILRSAEKMFVIMGNSPYNFVMSGGYKKLKNRNIHRTFFENDFKYFCRGFEHCYAKYKNLEELFTASPDVWEGFALFREEMAEANDGRYSKHISNPGAQDRNGSACKRLNLALRWLVRKGPVDLGLWKNLKPAVLYIPLDVHVARTARTLRLLERKLNDKKSVIELTEKLREFCPEDPVKYDYSLFGTGIVNQPDLLDN

SEQ ID NO: 55739 - DNA, 966 bp, Unknown
  Obtained from environmental sample
  misc_feature (1)..(966): n is a, c, g, or t
ttgacaatggcggtctttgcgtggggcgcggtaaggatgagcgcaaagccgccgcaaacgactgtctccaagatcgcggtcatgcagagctacatggatcagttccactggggcagaggctcgctggacaccgcggtgacggtgagcgacagcatggtcaaagttgcggcaaagtataaacccgatatcatcatattttcggagagcgcgctgatgtgttacttagacagacgccccgaaataaggcaacaagtattggattgggcgagaaacgccaataccccgattatagccggcgccctgcattgggattatgccaacgaagcagagacaaagcgagactacaacagctacaacacagtattcttaaccgatgtcgatagagacagtttgctccgctaccacaagattctcttggtgccgttctcggagataatgccctttgcggcgaagtttcccatcctgtcaagggtgaacctcggcggcgcgagcttcaaaaggggtgagagcgagtcggtcttccgcataaacgaaaacttagagatcgccccgtacatctgctacgagataatcttcccggattttgtaaggcgtaggcttaaagattcgacgaatttgctcgtcaacgtgacgaacgacggatggttcggacgcacctccggcccgtaccagcacgcggtcatggcgcagacgcggtcgatagagaacgggataacgctggcgcggtcggctaattccgggataagcatgttcgttgacccgtatgggaggataactgaaaaaactgggctctacactcgtgatatgatggtgcgggatgtatgcgtttatcgggtgaagactctatacaacagattcggggattgggttgtgtggctgtgcttgggaattgtggtcgccggagcggcggtgaggtcggcggcgttgataaagtcaaagtctttatcaacaccgaagtcaacctaa

SEQ ID NO: 55740 - protein, 321 aa, Unknown
  Obtained from environmental sample
  DOMAIN (24)...(212): Carbon-nitrogen hydrolase
  misc_feature (1)..(321): Xaa is any amino acid
MTMAVFAWGAVRMSAKPPQTTVSKIAVMQSYMDQFHWGRGSLDTAVTVSDSMVKVAAKYKPDIIIFSESALMCYLDRRPEIRQQVLDWARNANTPIIAGALHWDYANEAETKRDYNSYNTVFLTDVDRDSLLRYHKILLVPFSEIMPFAAKFPILSRVNLGGASFKRGESESVFRINENLEIAPYICYEIIFPDFVRRRLKDSTNLLVNVTNDGWFGRTSGPYQHAVMAQTRSIENGITLARSANSGISMFVDPYGRITEKTGLYTRDMMVRDVCVYRVKTLYNRFGDWVVWLCLGIVVAGAAVRSAALIKSKSLSTPKST

SEQ ID NO: 55741 - DNA, 1071 bp, Unknown
  Obtained from environmental sample
  misc_feature (1)..(1071): n is a, c, g, or t
ttgatcaaggatgatactatgcttcttgccattccctttccttcatggttgaaaccggaagtaattccgggcctgcctttccgctggtacgggcttatgtatatcgtggctttcggtgtggcttttctgctttaccgaaggcaggtaagggaacgcagcttccccatgaccgaagatgagctttccgggctctttttttggggaattcttgctttgattttgggagcccgtattttttcctccctggtttacgactcaggcagtatctacagtcgtcggccatggcttattttctggcctttcagaaacgggcaatttacaggcttccagggcatgagttaccacggaggcgttatcggcggaattctggcgattgttatttattcaaaggcaaagaaatttgattaccgcgaaattggggatatgttcgcggccagtattcctttgggttatactttcggtaggctgggtaactttatcaatggggagctatacggacgcattaccgcaagccccctggggatggtttttcctgccgggggtatatcgcctgtggacaggaatttcgctgttatcagggaaggcgctgagcaaatgggcattgccgccattgccgaagcgggcggtgttttaaactatccccggcatccttcccagctttacgaaatgttttttgagggcatagtgctatgggcgtttatctggtttttcagaaacagaaaaccatttaaaggctttctccttaccctgtacctttccggttacggccttgtccgttttttcatagagtatttcagggaaccggacgccgaccttggctatccgattaagctgacaaaaacaagcttgcctcccgctattagccatcccgctttggatttttccaccggccagatcctctgctttattatgatccttacagggcttgcctgggcgctcgttgcctcgcgtttaaaagaccgggagcctgtacgcgtgtatgatgcaggcggggaaaaacccgcggcatcgtccggcgaaaaagccgctgaaagaaacaagcgcaggaagctgcgcaacaaactacgctga

SEQ ID NO: 55742 - protein, 356 aa, Unknown
  Obtained from environmental sample
  DOMAIN (17)...(318): Prolipoprotein diacylglyceryl transferase
  misc_feature (1)..(356): Xaa is any amino acid
MIKDDTMLLAIPFPSWLKPEVIPGLPFRWYGLMYIVAFGVAFLLYRRQVRERSFPMTEDELSGLFFWGILALILGARIFSSLVYDSGSIYSRRPWLIFWPFRNGQFTGFQGMSYHGGVIGGILAIVIYSKAKKFDYREIGDMFAASIPLGYTFGRLGNFINGELYGRITASPLGMVFPAGGISPVDRNFAVIREGAEQMGIAAIAEAGGVLNYPRHPSQLYEMFFEGIVLWAFIWFFRNRKPFKGFLLTLYLSGYGLVRFFIEYFREPDADLGYPIKLTKTSLPPAISHPALDFSTGQILCFIMILTGLAWALVASRLKDREPVRVYDAGGEKPAASSGEKAAERNKRRKLRNKLR

SEQ ID NO: 55743 - DNA, 330 bp, Unknown
  Obtained from environmental sample
  misc_feature (1)..(330): n is a, c, g, or t
ttgaaagttatcggaaaagaaaaactgatcatgggactccctttttacggccgcggatgggcaaagccgagccattcgcaggcttatttatacacaagcgttgaaagagtcatgaaagaaaacaatattaaaaatatacggcgtgaaaacggaataccggcgtttgattacgatgccacagtatcggttaaagtgtactatgaagacgagtattcgctgtcggcccgcatggagatgtatcggaacatgggcgtcaccgcgataggtttttggcggcttggccaggaaacccccgcggtttggccgctgttgaaactgggggagaagtga

SEQ ID NO: 55744 - protein, 109 aa, Unknown
  Obtained from environmental sample
  misc_feature (1)..(109): Xaa is any amino acid
MKVIGKEKLIMGLPFYGRGWAKPSHSQAYLYTSVERVMKENNIKNIRRENGIPAFDYDATVSVKVYYEDEYSLSARMEMYRNMGVTAIGFWRLGQETPAVWPLLKLGEK

SEQ ID NO: 55745 - DNA, 396 bp, Unknown
  Obtained from environmental sample
  misc_feature (1)..(396): n is a, c, g, or t
ttgatttcacttttcctttttcacttctcacttttcctttttcacttctcacttttcctttttcacttctcacttttcctttttcacttctcacttttcctttttcacttctcacttttcctttttcacttctcacttttcctttttcacttctcacttctcccccagtttcaacagcggccaaaccgcgggggtttcctggccaagccgccaaaaacctatcgcggtgacgcccatgttccgatacatctccatgcgggccgacagcgaatactcgtcttcatagtacactttaaccgatactgtggcatcgtaatcaaacgccggtattccgttttcacgccgtatatttttaatattgttttctttcatgactctttcaacgcttgtgtataa

SEQ ID NO: 55746 - protein, 131 aa, Unknown
  Obtained from environmental sample
  misc_feature (1)..(131): Xaa is any amino acid
MISLFLFHFSLFLFHFSLFLFHFSLFLFHFSLFLFHFSLFLFHFSLFLFHFSLLPQFQQRPNRGGFLAKPPKTYRGDAHVPIHLHAGRQRILVFIVHFNRYCGIVIKRRYSVFTPYIFNIVFFHDSFNACV

SEQ ID NO: 55747 - DNA, 735 bp, Unknown
  Obtained from environmental sample
  misc_feature (1)..(735): n is a, c, g, or t
atgtttgacgcgaaaaaagtgacggatgaaattgtccaatggatacgggaatactttgacaaaaacgccggtgaacgggactgcgccgtcgtgggcataagcggcggcaaggacagctcgaccgtcgccgcgttatgcgtcaaggcccttggcgcggacagggttatcggtgtccttatgccgcagggggaacagtgggacataggcttttcgcatgagttagccgatcatttgggaataaaaaaatgcattgttaatattaaggacggcgtagacgcggtttttcaatcactaaaagaaggcggattactgctgaacaggcaggcgacaataaacacccccgcgagaatcagaatggccgtcctgtacgcggtctgcgccattgtcggcgggcgcgtggcgaacacctgcaacctaagcgaggactgggtgggctattctacgaaatacggagacagcgccggcgatttcagccccatatccggcctgaccgtaaccgaggtaaaggccgtcggtagggaactgggcttgccgttaaaatttatcgacaagatgccggccgacgggctttccggcctgtccgatgaagacaatctcgggtttacctacaacgtccttgacaggtatatccgtgagggaatttgtgaaaataaatctgtcaaagaaaaaattgacatcctgcacaaaaacaacctgcacaagcttcaacttatgccggcatatcaaattaattag

SEQ ID NO: 55748 - protein, 244 aa, Unknown
  Obtained from environmental sample
  DOMAIN (7)...(238): NAD synthase
  misc_feature (1)..(244): Xaa is any amino acid
MFDAKKVTDEIVQWIREYFDKNAGERDCAVVGISGGKDSSTVAALCVKALGADRVIGVLMPQGEQWDIGFSHELADHLGIKKCIVNIKDGVDAVFQSLKEGGLLLNRQATINTPARIRMAVLYAVCAIVGGRVANTCNLSEDWVGYSTKYGDSAGDFSPISGLTVTEVKAVGRELGLPLKFIDKMPADGLSGLSDEDNLGFTYNVLDRYIREGICENKSVKEKIDILHKNNLHKLQLMPAYQIN

SEQ ID NO: 55749 - DNA, 651 bp, Unknown
  Obtained from environmental sample
  misc_feature (1)..(651): n is a, c, g, or t
ttgacgtgcagaacgattttgtcccgcgtacgcccaaacaaaggcggcgctttggcggttcctgacggatgcgccgttgtaaagccgcttaacgcgcttgccgccgccgtcgcgggcagggggggctttgtcgcggcgacccaggattggcacccggaggggcatatttctttcgcttcttcccaccccgggaagaaagttggggatataattaatataacggctcaggccgggcaagccgggcttgcccagggactttggccggatcattgcgtgcagggcggccggggcgcggatttccacgccgaacttgaccttaaaccggcgcagcttattgtgcgaaaaggctttcgcaaagggctggactcgtattcggctttttttgagaacgacaggaaaacgccgacgggccttgagggctggataagaaaactggggattgagactgtaattataggggggctggcgacggattactgcgtttttttcagcgccatggattcaaaaaaactgggatttgatactataattgttgaagacgccgtgcggggagtgggactgcccgcgggctctgtggaaaaagctacagaggaaatgaaggcggccggcatagcttttgcgatgtcgaaagatctgttggagaaattttga

SEQ ID NO: 55750 - protein, 216 aa, Unknown
  Obtained from environmental sample
  DOMAIN (14)...(215): Isochorismatase family
  misc_feature (1)..(216): Xaa is any amino acid
MTCRTILSRVRPNKGGALAVPDGCAVVKPLNALAAAVAGRGGFVAATQDWHPEGHISFASSHPGKKVGDIINITAQAGQAGLAQGLWPDHCVQGGRGADFHAELDLKPAQLIVRKGFRKGLDSYSAFFENDRKTPTGLEGWIRKLGIETVIIGGLATDYCVFFSAMDSKKLGFDTIIVEDAVRGVGLPAGSVEKATEEMKAAGIAFAMSKDLLEKF

SEQ ID NO: 55751 - DNA, 807 bp, Unknown
  Obtained from environmental sample
  misc_feature (1)..(807): n is a, c, g, or t
ttgcgcagaggcgcgttatattcttattcggctttttatccgctctcgcggcggcatggttcgcgtcgcgaaaagcgtcaaaaatacaaccggcggaggtgttgcgttatgaatgacacgcggggaaaaattcttttaaaagttataaacatagtaaaaaattatgtttcaggcgcggaaacgcttcacatcctgaaaggcattaattttgaaattgaagaaggaaagtccgtcgcgataagcgggcagagcggaagcggtaaaagtacgcttttaaatataataggcggcctagatcataccgacgagggaaacgtatttttggacggtacggacataacttcgctttcggaaaaagagatttccgtatacaggtcgaaacaaacgggatttgtttttcaatttcattatcttttaaaggattttaccgccatggaaaatattatgctgcccgcatacatcgccgggttaaagaaaaaggaggcgattgacagggcaaggcagttgttagccgacgttaaactggaagacagaagcggtcatttcccctcgcaactttcgggcggggaacgacaaagggtagcggtggcgcgttccatggtaaacgatccggcgttaattcttgcggatgagccgacaggaaatcttgatccgcagaacagcgatattgtcgctgaattgctgtatgaaaacgcccaaaaaagaaataagacgttaattatagttacccatgacaaaaaagtggcgcaaagggcgaccgtaagatttattttggaaaacggcgtgttgtcagaggaattatcttga

SEQ ID NO: 55752 - protein, 268 aa, Unknown
  Obtained from environmental sample
  DOMAIN (44)...(264): RecF/RecN/SMC N terminal domain
  misc_feature (1)..(268): Xaa is any amino acid
MRRGALYSYSAFYPLSRRHGSRREKRQKYNRRRCCVMNDTRGKILLKVINIVKNYVSGAETLHILKGINFEIEEGKSVAISGQSGSGKSTLLNIIGGLDHTDEGNVFLDGTDITSLSEKEISVYRSKQTGFVFQFHYLLKDFTAMENIMLPAYIAGLKKKEAIDRARQLLADVKLEDRSGHFPSQLSGGERQRVAVARSMVNDPALILADEPTGNLDPQNSDIVAELLYENAQKRNKTLIIVTHDKKVAQRATVRFILENGVLSEELS

SEQ ID NO: 55753 - DNA, 309 bp, Unknown
  Obtained from environmental sample
  misc_feature (1)..(309): n is a, c, g, or t
atgactgtcggctacatggcggaaaacacgcttggacggcgtatccgcaatcgtgaaaaagaagtgaaaattcacggcgaatggttcaagttaaaggcccatgttgaggaaatcaacgcattcagcgcccatgccgattattttgaaatactcgaatggctgaaaacgcttgacgcctcgcgcttaaaaggaatttatcttgttcacggcgaaaaaaaatcgcaggctttcctacagaactatctgaaagaaaacggtttcccgaatgtagaaatagtgaagtacggcaaaacttacgaatttatttaa

SEQ ID NO: 55754 - protein, 102 aa, Unknown
  Obtained from environmental sample
  DOMAIN (27)...(73): RNA-metabolising metallo-beta-lactamase
  misc_feature (1)..(102): Xaa is any amino acid
MTVGYMAENTLGRRIRNREKEVKIHGEWFKLKAHVEEINAFSAHADYFEILEWLKTLDASRLKGIYLVHGEKKSQAFLQNYLKENGFPNVEIVKYGKTYEFI

SEQ ID NO: 55755 - DNA, 657 bp, Unknown
  Obtained from environmental sample
  misc_feature (1)..(657): n is a, c, g, or t
gtggagtctaatttgaataacaacaaatatttcacatcttccgacgatgtattttcatggctgaccatgtttatcaatcttgaacgcggacaaaaacctaagagtttccgcatagacaggatggagttcctgacgaaactcgcggataatccgcagcgatgcgcgccttcaattcacattgccggttcaaaggggaaaggttctgtaaccggaatgttagccgcaatgctgactgcggcgggtttccgcgccgcgcgctacatgtcgccccatgttgtagacatacgcgagcggatatgcctaggtgattcttattttaacgaagaaatatactgcgcggcgggcaatgaactgcgtgaaatcacggaacacaggcttcctgccgaggcaaatccgctttttgacaatgaaaccgcagaaagatgcgagccgacatattttgagcttttaaccttgttctttttcttatgcgcaagaaaaggaaactgcaatgtaatggttgtagaaacaggcatgggcggtcggcttgattcaaccaatgttcttgatccgctggtcagcgtaataaccataattgaacttgaacataccgctttttctgggaaatacaatctcggaagttgcgggagaaaaagcgggaattatcaagcacggtaa

SEQ ID NO: 55756 - protein, 218 aa, Unknown
  Obtained from environmental sample
  misc_feature (1)..(218): Xaa is any amino acid
MESNLNNNKYFTSSDDVFSWLTMFINLERGQKPKSFRIDRMEFLTKLADNPQRCAPSIHIAGSKGKGSVTGMLAAMLTAAGFRAARYMSPHVVDIRERICLGDSYFNEEIYCAAGNELREITEHRLPAEANPLFDNETAERCEPTYFELLTLFFFLCARKGNCNVMVVETGMGGRLDSTNVLDPLVSVITIIELEHTAFSGKYNLGSCGRKSGNYQAR

SEQ ID NO: 55757 - DNA, 819 bp, Unknown
  Obtained from environmental sample
  misc_feature (1)..(819): n is a, c, g, or t
ttgaacttgaacataccgctttttctgggaaatacaatctcggaagttgcgggagaaaaagcgggaattatcaagcacggtaagccgttaattcttgcaaaacaaaaagatgaagcgcttgagattttccgtaaaaagacaaaagagaaagaaagtttgctgttgtattttcccgaaatcgccgggatttcaaacttaaaaattcatcacagcggcacggactttattctttcttttagttccatacagcaggatttaccgctatttacttctccgctttcactttatgttccaatacccggaaaagttcaggcggaaaatgccgctcttgccgttaccgctgtaaaaaccgccttccctgaaacaagtaaagatgctgttatacaagggcttaaaagtttttacattccggggcgttttgaaaaaattatagaaataccgccatttatcattgacggagcgcacaccccggaaagccttgcgctatgcatagaaaccttctgtttactttacggcgaaggcggcgtactcatcttcggctgcgccgccgacaaagacgcggcggcaatggcgaaaacagcgtacgctcatttttcgagaatatttatcactactcccggaacttttaagataagcaatccggctcttgtttatgaagcttttgcggcgcagtcgaataaaacagtattaatagaagatacgcagaaagctgtaaaagaggcagttgattttgcgcgtattaaaaatattcctgttcttgggacaggatctttttatttagtgtcggagataagaaagctaatcggaatatacagatga

SEQ ID NO: 55758 - protein, 272 aa, Unknown
  Obtained from environmental sample
  DOMAIN (136)...(216): Mur ligase family, glutamate ligase domain
  misc_feature (1)..(272): Xaa is any amino acid
MNLNIPLFLGNTISEVAGEKAGIIKHGKPLILAKQKDEALEIFRKKTKEKESLLLYFPEIAGISNLKIHHSGTDFILSFSSIQQDLPLFTSPLSLYVPIPGKVQAENAALAVTAVKTAFPETSKDAVIQGLKSFYIPGRFEKIIEIPPFIIDGAHTPESLALCIETFCLLYGEGGVLIFGCAADKDAAAMAKTAYAHFSRIFITTPGTFKISNPALVYEAFAAQSNKTVLIEDTQKAVKEAVDFARIKNIPVLGTGSFYLVSEIRKLIGIYR

SEQ ID NO: 55759 - DNA, 597 bp, Unknown
  Obtained from environmental sample
  misc_feature (1)..(597): n is a, c, g, or t
atggctgaaatcctgtaccgtgaagccgtctatctttggtattatttcagcgtccagtttgaacagatttttaaatactgggcgttgggaatgattgcggggtcgcttatatcggttttcggcaaggaaaaaattcattctctgtttgcggctatgcgtgggaagaattgggggcttttagggattattcccgcttctcttatcggcatagcgtccccgctttgcatgtacggcactattcccatttccgcttcttttgcggaaaaaggaatggaagaagactggctcgccgcctttatgatgagttccattctccttaacccgcagttgattttttacagcgctgctttagggaagacggctcttgttatccgttttgtaagttgttttctctgcggcattacggcggggcttttgattcgtttcttttttaagaagaggaaattttttacatttaaaagtttcggcgaagccgcaaaccgtgacactgatcccaaccttctctttcgctttttaaaaaacctatggcggaaccttaaagctacaggcccggctttcctgcttggggtggctctttccgctgtttttcagcgttag

SEQ ID NO: 55760 - protein, 198 aa, Unknown
  Obtained from environmental sample
  misc_feature (1)..(198): Xaa is any amino acid
MAEILYREAVYLWYYFSVQFEQIFKYWALGMIAGSLISVFGKEKIHSLFAAMRGKNWGLLGIIPASLIGIASPLCMYGTIPISASFAEKGMEEDWLAAFMMSSILLNPQLIFYSAALGKTALVIRFVSCFLCGITAGLLIRFFFKKRKFFTFKSFGEAANRDTDPNLLFRFLKNLWRNLKATGPAFLLGVALSAVFQR

SEQ ID NO: 55761 - DNA, 900 bp, Unknown
  Obtained from environmental sample
  misc_feature (1)..(900): n is a, c, g, or t
atgtataatatccatcccctgactattgaagacgcccttgataccacgcatcagccaaaagtcgaaacatttgaaaattatcgttttatttccttaaaatcaataaggcatgagaagaaaatccatttgataaaacaggaaattaaaaaacgttattccataagaaaccgaaaaaaaataatggaacaactggaagacatgaaggaatttgttattgatcataccaatataatcataatgaagaatgtgttaataaccattcaggaaataccgggagattcattcggggatataagaaaacggattttggaaaacatcgggcaaattcgcaaaatggggacggattatcttgcttattcattgatagataccgtggttgacgaatattttattacactggctcatttggaaaatgatattgaagatctggaagatcgcgccgtgaagacagataatgacgcgttcatttccgaaatacaggaaacaaaaaaattccttttctatataaaacgggcaatgctgccattgcgggagaatcttatgattatatcccgccaggatatgctgttagcaaacgaagaactaaagccattccttcaggacttgcgggaaaatctgtcaaacgcgatagactccgtagagacctaccgtgaatggctgacaaacataatggacgtaaacctttcggttctgtcataccagttaaacaaggtgatgaaaatacttgccgtaatatcggcaatatttattccattaacttttattgcggggatatacggcatgaattttgaatttatgcccgaaataagacagcctttaggctaccctattgtgcttggatgcatggtatctgtcgcgttgtcaatggtcatattatttaaaacaaggaaatggttttaa

SEQ ID NO: 55762 - protein, 299 aa, Unknown
  Obtained from environmental sample
  DOMAIN (1)...(299): CorA-like Mg2+ transporter protein
  misc_feature (1)..(299): Xaa is any amino acid
MYNIHPLTIEDALDTTHQPKVETFENYRFISLKSIRHEKKIHLIKQEIKKRYSIRNRKKIMEQLEDMKEFVIDHTNIIIMKNVLITIQEIPGDSFGDIRKRILENIGQIRKMGTDYLAYSLIDTVVDEYFITLAHLENDIEDLEDRAVKTDNDAFISEIQETKKFLFYIKRAMLPLRENLMIISRQDMLLANEELKPFLQDLRENLSNAIDSVETYREWLTNIMDVNLSVLSYQLNKVMKILAVISAIFIPLTFIAGIYGMNFEFMPEIRQPLGYPIVLGCMVSVALSMVILFKTRKWF

SEQ ID NO: 55763 - DNA, 1743 bp, Unknown
  Obtained from environmental sample
  misc_feature (1)..(1743): n is a, c, g, or t
ttggctaacgtgagccacgagatacggacgcccatgaacaccattattggcatgacggatcttttgctttacgaatcgcttaacagacggcagataggttttgttaatgatattaaagcgtccgccagtttactcctttccattatcaacgacatattggatctgtcaaaaattgaagcgggcaaactggcgcttaatccggttaactacgattttcacgcgcttttggataacatattttccatgttcagctatgtggcgcagaagaaaggccttgaatttcgtcatgaagtcgtgggggagatgcccgattacctgtatggcgacgatataaggctcaaacaagtattaacgaatatttgcggaaacgcggtcaaatataccgaaaaggggtatatcagttttaaggtatcgaccacagacaattacattgtgtttgagattaaagacagcggcattggtatccgcaaagaagacattccgaaactgtttaatgttttccagcggatcgaaacgggaaagaaccggggcataatcgggacgggtttggggctttccatcagcaagtcttttgtggatatgatggacgggaaaataattgttgacagcgaatatgaacatggaagcgtttttaaagtaatgatcccgattgtattgggcagcagggaaggggttatattgaaaaaaaaatcggtggagtatacccttcaggcccccgacgccaggatactgcttgtagacgataatgagttcaacataagggtagccgaagggctgttcggcctgtttaaggttaatgttcagacggctttttccggaaagaaagccattgagttggttcaaaagaatgaatttgacatggtatttatggatcatatgatgcctgaaatggacggcattgaagcaacaaccaacataaggaaaatggggggtaagtacaaacacctgcctattatagcgttgaccgcaaacgcggttcagggcgtaaaggaaatgtttttatccagcggatttaacgggtttatttcaaagcccattggaatacaggaagtgtacaaaattctgaaggaatggctgccgccacagaaggtacaggagcaagaaataccggaggagcaaacagaaactgctgaagagaaaacatacagtgattttctgatggaactgaataaagtgagcgaaatcaatgtggaaattggcctggactgtgtttccggcatggaagatatgtaccgggaaacgctggtatttttcaaccacaaaattgaagcggattgtgacgctatgtccgacagaatacataaccgggatgttaaggggctttcgattttagcgcacgacctgaaatccgcgctggccaccataggggcgttgaatttatctgaagcggcgttacggatggaaatggctgccaaaagcggcgacattgcgtactgtacgcagcggtttccgggttttagggacaagctgctgatcctgcacgaagaactgtcggccatttttccgaaggctgagccgacgaagaacaaaccggcaggggatactgcctatttacggaaaaatattgaaaaatcgcttgaggccgcttccgactttgacagcgacgcgggtcttaccgccataaacgatttgctgacctatgatttcggcgaacagaacaacgcttcactggaaagcgcagccgccgcgttcaaggaatataattacgacgctgcggcggaacagttaaataaactgaaataa

SEQ ID NO: 55764 - protein, 580 aa, Unknown
  Obtained from environmental sample
  DOMAIN (1)...(61): His Kinase A (phosphoacceptor) domain
  misc_feature (1)..(580): Xaa is any amino acid
MANVSHEIRTPMNTIIGMTDLLLYESLNRRQIGFVNDIKASASLLLSIINDILDLSKIEAGKLALNPVNYDFHALLDNIFSMFSYVAQKKGLEFRHEVVGEMPDYLYGDDIRLKQVLTNICGNAVKYTEKGYISFKVSTTDNYIVFEIKDSGIGIRKEDIPKLFNVFQRIETGKNRGIIGTGLGLSISKSFVDMMDGKIIVDSEYEHGSVFKVMIPIVLGSREGVILKKKSVEYTLQAPDARILLVDDNEFNIRVAEGLFGLFKVNVQTAFSGKKAIELVQKNEFDMVFMDHMMPEMDGIEATTNIRKMGGKYKHLPIIALTANAVQGVKEMFLSSGFNGFISKPIGIQEVYKILKEWLPPQKVQEQEIPEEQTETAEEKTYSDFLMELNKVSEINVEIGLDCVSGMEDMYRETLVFFNHKIEADCDAMSDRIHNRDVKGLSILAHDLKSALATIGALNLSEAALRMEMAAKSGDIAYCTQRFPGFRDKLLILHEELSAIFPKAEPTKNKPAGDTAYLRKNIEKSLEAASDFDSDAGLTAINDLLTYDFGEQNNASLESAAAAFKEYNYDAAAEQLNKLK

SEQ ID NO: 55765 - DNA, 1623 bp, Unknown
  Obtained from environmental sample
  misc_feature (1)..(1623): n is a, c, g, or t
atgaaagagaaacttataatccttggcgcgggtgtcatgcagggacccgttatcaatatagctaaagaactgggctactacgccatcgctctggacggcagttccgccgcgccttgtatctctctggcggatcaatttgaacaaatagatttaaaagacaaagaaggcatagaagcgtttgcccgctccattcagggaacaacagaccgccttgggataatgacggcggggactgatttttcagccaatgtcgcgtgggtagctgaaaaattagggcttccgggtatcccttacgaagccgctcttaacgcgtcggacaaagcaagaatgcgcgaatgtttcaaaaaagccgctctgccctctcccgattttataaccgttacatcggcggatttaccgcttacttccaaatccaaactttcaaagctcaactttccccttgttataaaacctgtagacaacatgggaagccgcggctgccgccgagttgacagcgcggaagaattaaacgaagcggcaaaaaccgctatcggcttttcacgatccggccgcgccattttagaaagttacatggaaggacccgaattctctgtagacgcgattgtctaccacggagaaataaccatctgcggtcttgcggacaggcacatttttttccctccgtactttatcgaaatgggacatacaatgccgacagttatcgaagaagaaaaacaaaccgcaattctggacactttccgcgccggaatccgcgcccttgggcttgacggaaaggaaagcataggagccgcaaaaggcgacattaaacttactgccaaaggggctatgatcggggaaatagcggcgcgtctttcaggcgggtatatgtcggggtggacatacccctattcatccggcgctttgccaatcaagggcgctattcttgcggcaatgggacgcgaacccgaaggacttactcccattaaaaaatggacatgcgcggaaagggcatttatatccattccgggaaccgtaaaagaaattacggggatagaaaaagcaaaatctgcaaacggcgttaacgactttttcctgcgaatcgagaaaggcagtaaagtctccttcccggaaaacaatgtaacaaagtgcggcaatgtcatcgcttcagccgaaaacagggaaaccgcaatacaaatagcggaaaccgccgcccgttcaatcattatcagacttgacctgtcagacccggaaacaaagggatttttgtcgtcaaccgccgtcttcccgccggatgccttccaattaacagaagaattaaaagccgccctttcgcatataccggattttttctctcccaatgacaaaaacgacagccaactcccaactacccaaatttaccccttcccggcttttacttcgtcaaatttgaaggattatatgggcagaactgtggaagaagtcctaaatatagtccgtttattgaccggttttcccattccagtaacttcagaaaatgccgaaaatatagtaaggcttggcagatctttctggactgcgttaatccgcggttcttatcagggcgcggtctattacattgatagtttgggagcaaaaattgattcaaaaccattggaaaaaagttaa

SEQ ID NO: 55766 - protein, 540 aa, Unknown
  Obtained from environmental sample
  DOMAIN (105)...(283): Phosphoribosylglycinamide synthetase, ATP-grasp (A) domain
  misc_feature (1)..(540): Xaa is any amino acid
MKEKLIILGAGVMQGPVINIAKELGYYAIALDGSSAAPCISLADQFEQIDLKDKEGIEAFARSIQGTTDRLGIMTAGTDFSANVAWVAEKLGLPGIPYEAALNASDKARMRECFKKAALPSPDFITVTSADLPLTSKSKLSKLNFPLVIKPVDNMGSRGCRRVDSAEELNEAAKTAIGFSRSGRAILESYMEGPEFSVDAIVYHGEITICGLADRHIFFPPYFIEMGHTMPTVIEEEKQTAILDTFRAGIRALGLDGKESIGAAKGDIKLTAKGAMIGEIAARLSGGYMSGWTYPYSSGALPIKGAILAAMGREPEGLTPIKKWTCAERAFISIPGTVKEITGIEKAKSANGVNDFFLRIEKGSKVSFPENNVTKCGNVIASAENRETAIQIAETAARSIIIRLDLSDPETKGFLSSTAVFPPDAFQLTEELKAALSHIPDFFSPNDKNDSQLPTTQIYPFPAFTSSNLKDYMGRTVEEVLNIVRLLTGFPIPVTSENAENIVRLGRSFWTALIRGSYQGAVYYIDSLGAKIDSKPLEKS

SEQ ID NO: 55767 - DNA, 384 bp, Unknown
  Obtained from environmental sample
  misc_feature (1)..(384): n is a, c, g, or t
atgcgtaaagtagttttagacacaaacatactggtatctgcaatgctaacaataaatggcataccagctaggataacagaaatggcattagacggcgaattatccgtctgctacaattcaaacattttacttgaatacaacaatgtattatacagaccgcaatttaacttcaatgccaaaaaagttcaaaacatagtaagcaccatcacagaacttggcatagaactaatgccaaccgcaagcaatttcccaatgacccacgaaagcgacagaaaattttacgatttgcacaaagcagcaaacgcaattttaataacaggaaacataaaacatttcccaaaagaaagcacaataataaaaccagcagattttatattgcaataa

SEQ ID NO: 55768 - protein, 127 aa, Unknown
  Obtained from environmental sample
  misc_feature (1)..(127): Xaa is any amino acid
MRKVVLDTNILVSAMLTINGIPARITEMALDGELSVCYNSNILLEYNNVLYRPQFNFNAKKVQNIVSTITELGIELMPTASNFPMTHESDRKFYDLHKAANAILITGNIKHFPKESTIIKPADFILQ

SEQ ID NO: 55769 - DNA, 411 bp, Unknown
  Obtained from environmental sample
  misc_feature (1)..(411): n is a, c, g, or t
atgccagataaagcatttatagacaccaacatatttatatactatcaaaggtcagacaacccacaaaagcagtctatcacaaaaaatctactagaaaacaacaactgcgtagcaagcacacaagtaataagcgaaataagcaacatactcacaaaaaaataccccacactagaaaaagaaattcaattatttttacaagacataacagaattttgcgaaacaataacaatttccaaaagtttaatattcaaagcgttaaaattacacttcaaatacaaatattcattttacgacagcctaataataacaaccgccctagaagccaactgcgacactctttacagcgaagatatgcagaatgggcaaataatagaaaatgtgcttagaattgtaaatccgtttgttggttga

SEQ ID NO: 55770 - protein, 136 aa, Unknown
  Obtained from environmental sample
  DOMAIN (5)...(124): PIN domain
  misc_feature (1)..(136): Xaa is any amino acid
MPDKAFIDTNIFIYYQRSDNPQKQSITKNLLENNNCVASTQVISEISNILTKKYPTLEKEIQLFLQDITEFCETITISKSLIFKALKLHFKYKYSFYDSLIITTALEANCDTLYSEDMQNGQIIENVLRIVNPFVG

SEQ ID NO: 55771 - DNA, 561 bp, Unknown
  Obtained from environmental sample
  misc_feature (1)..(561): n is a, c, g, or t
atgaaaacaaattttcgcgaacaagactccaaaataatagcacccacctatgcaaaggcaaatgtggacttcacgcacgggaaaggtgctttgctttttgatagcaatgggaaggaatacttggattttgcgagcggaatatccgtaaatgcgcttgggcactctcaccctgctataaaaagagcgatatgggagcagagcgaaaagttttctcatatttcaaatttattcccaaactcaccgcaaataaagctcgctcaaaaaatgctctcgcttaccaagttcggcaaagaaaaaggcaaagcttttttttgcaactctggcacagaggcaaacgaagccgctataaaattcgcgagaaaatattttcacaataatcgcattgaaataatagcatttgaaaacggttttcacggacgtacctacggtgcgcttgctgcaacggggcaagaaaagctaaaagaaggttttggtccaatgccagccggctttaagcacgtggaatggaacaatgtagaggagtgtgcaaaagcgcagttagcaaaaacacggcggcaataa

SEQ ID NO: 55772 - protein, 186 aa, Unknown
  Obtained from environmental sample
  DOMAIN (23)...(185): Aminotransferase class-III
  misc_feature (1)..(186): Xaa is any amino acid
MKTNFREQDSKIIAPTYAKANVDFTHGKGALLFDSNGKEYLDFASGISVNALGHSHPAIKRAIWEQSEKFSHISNLFPNSPQIKLAQKMLSLTKFGKEKGKAFFCNSGTEANEAAIKFARKYFHNNRIEIIAFENGFHGRTYGALAATGQEKLKEGFGPMPAGFKHVEWNNVEECAKAQLAKTRRQ

SEQ ID NO: 55773 - DNA, 1227 bp, Unknown
  Obtained from environmental sample
  misc_feature (1)..(1227): n is a, c, g, or t
atgaacccaacatggatactgatcgttccctgctgtgaggaaggccgcggcggaggtcatttaaacagatgtatttcgctcacaaacgaactgcgctacgctgggcgcgaagcgtattttttcttacaggaaaaaaccgagcaaattacaaatctgttggaatcaagaaattttaacatgtcatgggttctaaacaaaaatcaagttaaccgcccctttgccctgatcgttttagaccgtaatcaaactccgcacagcgagcttctgcactggaaaaaacttgcgcctgtaataggtatagacgagggtgggcggcatcgcgacaactttgattttctgatagacatactaattccggaaggatttgaacacccgtccgctaacataacttccatcggtttacttgagttaccaaaaaaaataaaaaacaaaacggacacaaagaacgaaaaattaaaaattttaataagctttggccaggaagacgccgccggtcttgggcttaaggcgattaataaactggcggaaagcaatataaaagacgctgagataactttattgaaaggcggcttaaacaaatcggaaacccctatacctgattatgtaaaaacgctggaatctattcctgatcttgcggatcatctttatgaatacgacatagtaataacccactacggcatcacggcttacgaagcgtcatacgcaggggtaaatgtttttctggatcaccccacttcgtatcacaaaaagatagctaaggcggcagggttctcggatatttcagcgctaacggacgctgagtcttttgaagcgtcatgttccgttcccattgattggtcagaaataaaacaagaaaaaatagcgaatttaatcaactcatttactccgcagataaacaaaaattgccttgtctgcggaaaagcgtcaaacaaacacagtaaagctcgtttccctgatcgcacttaccggcgttgttccaagtgcggagcgatatacatggatagagcgaatccggctccgattgaatatgataaagattatttttttgaatcatacaaaaaacaatacggcaaaacatatcttgaggactttccaaatcttatcgcaatggcgaaacgacggttaaagattatttcgcgaatacttcgcataaagagcgcagaggagcaaagagcgcaaaacccggatagcgtttactaccctcctatgtctctcggccgaatctga

SEQ ID NO: 55774 - protein, 408 aa, Unknown
  Obtained from environmental sample
  misc_feature (1)..(408): Xaa is any amino acid
MNPTWILIVPCCEEGRGGGHLNRCISLTNELRYAGREAYFFLQEKTEQITNLLESRNFNMSWVLNKNQVNRPFALIVLDRNQTPHSELLHWKKLAPVIGIDEGGRHRDNFDFLIDILIPEGFEHPSANITSIGLLELPKKIKNKTDTKNEKLKILISFGQEDAAGLGLKAINKLAESNIKDAEITLLKGGLNKSETPIPDYVKTLESIPDLADHLYEYDIVITHYGITAYEASYAGVNVFLDHPTSYHKKIAKAAGFSDISALTDAESFEASCSVPIDWSEIKQEKIANLINSFTPQINKNCLVCGKASNKHSKARFPDRTYRRCSKCGAIYMDRANPAPIEYDKDYFFESYKKQYGKTYLEDFPNLIAMAKRRLKIISRILRIKSAEEQRAQNPDSVYYPPMSLGRI

SEQ ID NO: 55775 - DNA, 1383 bp, Unknown
  Obtained from environmental sample
  misc_feature (1)..(1383): n is a, c, g, or t
ttggggtacggcttagacggcggatcggcgcttgaaggcggaaatggttttgaaacaaatcttgcgttcttaattgataaaagcgcgcctgaaattacagaaataaacgtaccaaaggacgctcttaaaacagaatttaccgtagacggaataatagctaaaactttcggggtgaaaaagctaagcgtaaaacttggcaacgatgaaattgccgttcttgataaggacagcaacggagaatattacttaataaaaaaacctgtcgaaggcaataactacggagtagaaattacagtagaacgcaggcctaacgcgaaaagatcctttgactttacagccacgataaatcctgtttccataaagaacggtggaacattgaaagacggtccaacatcgcttacatttaccgctgtcggctcatcaggacaggcggcgataggggtggacagttttacacttgacaccacaggaccggcgattacagttggagcgcctatcaacaacaacgtttatgttgtaggcgcagattggataacccttaagaacgcggttgatggtgatgatttctccggcgctgcttctgtagaaacaatctatgacaagttatttaacgccagaataaaagacaaaaaagcttcctttacggtaacctttaccgatgacttctcgaatgttttctcggataaaaataacaaatattggtacaggttcgacggcgagggatggaaagaagcgacagtgcccggtacggaatttggtaaaaagtcggtgagcgtaaaactgccgctgccggccggcgaagaatggacagacagcgtacaccgtctgagcgtccgcgtaaaagattctctggataacggttacgataacacaacttcggatttaattatttcagcgcttggagacggcaaggagaataacgactacggacatgagacctatcgtgcctttatgatcgacagcggtatacctaagcttacagaaattcaaactgaattgggaactataagttcaggcggatcgctcagcgtaagcggaagaattgacaatacgtttaaggtcatggaattgaacgcaaagattggttcatctaccacgaatataaatctaagtaattatgtaacaccttatgcgaacagcaagaaaacatattactttgagaatgttcccattaattcatctgatataaaagccgctacaaacgacgtagaaggttcttacacggtcagtttgacagttcaaggttcctcagagctttcggatatgaaggtaagcacatttatccttgacactaagggaccgactatttcaattaacgcgccaattaaggataggatttatctgtccgataccgacgtaaacatgatcaacggcgctatttag

SEQ ID NO: 55776 - protein, 460 aa, Unknown
  Obtained from environmental sample
  misc_feature (1)..(460): Xaa is any amino acid
MGYGLDGGSALEGGNGFETNLAFLIDKSAPEITEINVPKDALKTEFTVDGIIAKTFGVKKLSVKLGNDEIAVLDKDSNGEYYLIKKPVEGNNYGVEITVERRPNAKRSFDFTATINPVSIKNGGTLKDGPTSLTFTAVGSSGQAAIGVDSFTLDTTGPAITVGAPINNNVYVVGADWITLKNAVDGDDFSGAASVETIYDKLFNARIKDKKASFTVTFTDDFSNVFSDKNNKYWYRFDGEGWKEATVPGTEFGKKSVSVKLPLPAGEEWTDSVHRLSVRVKDSLDNGYDNTTSDLIISALGDGKENNDYGHETYRAFMIDSGIPKLTEIQTELGTISSGGSLSVSGRIDNTFKVMELNAKIGSSTTNINLSNYVTPYANSKKTYYFENVPINSSDIKAATNDVEGSYTVSLTVQGSSELSDMKVSTFILDTKGPTISINAPIKDRIYLSDTDVNMINGAI

SEQ ID NO: 55777 - DNA, 612 bp, Unknown
  Obtained from environmental sample
  misc_feature (1)..(612): n is a, c, g, or t
gtgtaccgccgcatctccgacgagtaccttgaccccatgacatttctggcggaatccctcatcggagtgccgcatattatggacgcttaccgcgcgggaaatgtcgcaataatcaacgcgccgggcaacggcgtcgcggacgacaagggcatttattattttgtgcctaaaatgataaaatactatcttggcgaagagccgattctgcaaaacgcgccaacatacctgccgtactacgaagatgatctcaagttcacacttgagaatatcaagcggcttgtcataaaggacgtgtcggaggcgggcggctacggtgtggtgtttggcagcgagttgtcagaggagaaattggccgaaatcaaggctctcattattaaagagccgcggcggttcatatcgcaggaggtcatagactttatcgatcttgatataatggacggaaacggcggttccgttccacgaaaggccgacctgcgggcgttcgtgctgatgggcaaaaccacgcgcgtgtgggcaagcgggctgacgcgcttctcgcgcattgagggatcgttcattgtcaattcttcgcagggaggagggtttaaagacacatgggtactatctcgatag

SEQ ID NO: 55778 - protein, 203 aa, Unknown
  Obtained from environmental sample
  DOMAIN (58)...(202): Domain of unknown function (DUF407)
  misc_feature (1)..(203): Xaa is any amino acid
MYRRISDEYLDPMTFLAESLIGVPHIMDAYRAGNVAIINAPGNGVADDKGIYYFVPKMIKYYLGEEPILQNAPTYLPYYEDDLKFTLENIKRLVIKDVSEAGGYGVVFGSELSEEKLAEIKALIIKEPRRFISQEVIDFIDLDIMDGNGGSVPRKADLRAFVLMGKTTRVWASGLTRFSRIEGSFIVNSSQGGGFKDTWVLSR

SEQ ID NO: 55779 - DNA, 648 bp, Unknown
  Obtained from environmental sample
  misc_feature (1)..(648): n is a, c, g, or t
ttggaaggtacacggagcgcacctacaccacgctcagaaccttcttcaactatcacgataaaacgctcgacaaggataaaaatgcctacaaggagtttcttgataatctggacatcgagggacaagtacggcgatcaccgccgcttcatacagggctatctgtacgatagcgcggactgcttcaccgtcagttcgacgcttcgccttgcacacgacaacgcgcttgtctgccgtaacgtgatcggcagcgaggcgctcgcgtacatccaactcgcggctgacgctttccgcgcaagccgcgatgccaaaaaccttcgcctgtcgcttatgccggtcattgattaccttttggcattctggggcagcgtagacgataaaatcgccagcggcgaggcgcgcacgattgtcaaatgcggcaagctcgtagagcggctcgatttgtatttcaggttctcgtacaaatacaaacttataaacagcgagtacgaaaagctgtgccatgttcttgcgcgcgtacgaaaaggcttctgtaacgcgcagcatcttgcggtgctggttgaagccctcgcaacagaggaaagctacaaggcgcgcatggaagaagtgcttgaaagccttaacaggctgtttgaggagcaggccgcttga

SEQ ID NO: 55780 - protein, 215 aa, Unknown
  Obtained from environmental sample
  misc_feature (1)..(215): Xaa is any amino acid
MEGTRSAPTPRSEPSSTITIKRSTRIKMPTRSFLIIWTSRDKYGDHRRFIQGYLYDSADCFTVSSTLRLAHDNALVCRNVIGSEALAYIQLAADAFRASRDAKNLRLSLMPVIDYLLAFWGSVDDKIASGEARTIVKCGKLVERLDLYFRFSYKYKLINSEYEKLCHVLARVRKGFCNAQHLAVLVEALATEESYKARMEEVLESLNRLFEEQAA

SEQ ID NO: 55781 - DNA, 789 bp, Unknown
  Obtained from environmental sample
  misc_feature (1)..(789): n is a, c, g, or t
ttgaagactgtccgctttcaatatcaaacggaactggcgttctcttcacccgcgtccgaacaccggtttctgctcaggatactgccgcaaagcgacggcaggcagcggataaaaagccttttgtggcgtattgatccgtcgcctattgatacgctatggcagaccgtagacggtttcggcaacaacgcgctcgcgggacaaataaatgcgccgcacagctatttccgcttcgaaatagaagggaccgcagaagtgtcggacgaaccgtacacaacagcctcagaagaaccgccgcgcatgctgctctatccgacagaattgacacgcgctcactcagggcttacagatttctacaatgacattagccgttccgccccgtcaggcatgccggatcgcattcaacatttttctcacgccgtccacacccgtcttcgatacgagcgcggcgcgacagagaattcaacttcggcggcgcaggcgtttgacttaggcgcaggcgtctgccaggattacgcgcaaatattgctcgccctccttcgccttgacaaaatcccctgccgctatgtcgcaggccttgcctcatgctacggcgaaacccacgcatgggtcgaagcatggacgggagatcgttactgctccgcagacccgacgcgcgacaaactcatagacgagggttacatcgtcctctcaaggggccgcgacttcgccgacagttcaatagaacgcggagtattcaagggcgcgtgccgaggaacgcagacgattagcctgagcatggaaatttcgtaa

SEQ ID NO: 55782 - protein, 262 aa, Unknown
  Obtained from environmental sample
  DOMAIN (163)...(217): Transglutaminase-like superfamily
  misc_feature (1)..(262): Xaa is any amino acid
MKTVRFQYQTELAFSSPASEHRFLLRILPQSDGRQRIKSLLWRIDPSPIDTLWQTVDGFGNNALAGQINAPHSYFRFEIEGTAEVSDEPYTTASEEPPRMLLYPTELTRAHSGLTDFYNDISRSAPSGMPDRIQHFSHAVHTRLRYERGATENSTSAAQAFDLGAGVCQDYAQILLALLRLDKIPCRYVAGLASCYGETHAWVEAWTGDRYCSADPTRDKLIDEGYIVLSRGRDFADSSIERGVFKGACRGTQTISLSMEIS

SEQ ID NO: 55783 - DNA, 393 bp, Unknown
  Obtained from environmental sample
  misc_feature (1)..(393): n is a, c, g, or t
ttgcgttgctacacatatgtcggcaaacccaatatcctcaaggccgatcaaacgttatgggacaaaccgcccacagccccgcgtaccttcggccctaatcccgcttggacgccctacaacggccacatcgtctggctcggaccgcacagcgagtggtgggcgcatcaagacaagaacccgaaaaagcgccgcgagcgatccgtctggccgcccgatccgtacattaataacggatactacgaggtgatcaagcgcagcgacacggaagttgtaatgcgggggccggagagcgaattcagcggggtgcggctcgtcaagtccgtcaagataaaagccggcaaggtgttttttaacgtcagcgccgagcatatccgaaacacccccgtctcgtga

SEQ ID NO: 55784 - protein, 130 aa, Unknown
  Obtained from environmental sample
  misc_feature (1)..(130): Xaa is any amino acid
MRCYTYVGKPNILKADQTLWDKPPTAPRTFGPNPAWTPYNGHIVWLGPHSEWWAHQDKNPKKRRERSVWPPDPYINNGYYEVIKRSDTEVVMRGPESEFSGVRLVKSVKIKAGKVFFNVSAEHIRNTPVS

SEQ ID NO: 55785 - DNA, 432 bp, Unknown
  Obtained from environmental sample
  misc_feature (1)..(432): n is a, c, g, or t
gtgcggatagacgccccgaacggaaccggcgacgacgaggcgtgcgtgttttcgcaaagcgggggctacttaacaatcgagccgcgcaagccgtccaagggcaaggagaggcgctggggcaaggcgttcatccaagccggaaagggtatgatggcggccttcgcctcgtcgcaagcgctgataatccgcttcaaaagacactcgccgaagttgatacatcccgagcaggcgcttgtggaattttataatataacgacaaacaacaaggaagaggcgttgacagaattggaataccacgcgccttataggacgcttgcgcccggcgagtcgatggaggcgtggcagtcttgggaactttatccgttcaagccgcagccaacgcctgaggagtgcgttagattcttaaagagccaagggcctcagcgctgctga

SEQ ID NO: 55786 - protein, 143 aa, Unknown
  Obtained from environmental sample
  misc_feature (1)..(143): Xaa is any amino acid
MRIDAPNGTGDDEACVFSQSGGYLTIEPRKPSKGKERRWGKAFIQAGKGMMAAFASSQALIIRFKRHSPKLIHPEQALVEFYNITTNNKEEALTELEYHAPYRTLAPGESMEAWQSWELYPFKPQPTPEECVRFLKSQGPQRC

SEQ ID NO: 55787 - DNA, 783 bp, Unknown
  Obtained from environmental sample
  misc_feature (1)..(783): n is a, c, g, or t
gtggagtgcggcggcgacctgcaggtcaagggcataatagaagattgcaagataaccgtcaaggggaatatcctgtgcaaattcggcttcgtcggcaccggcaagggaaccataaccgccgacggcaacgtcaacttgaacttcatgaaaaatcaatcgatagtcgcgggcggcaacgtcaacatcgccaaagaggccctgaattgcaacataaccgccacaaagtctataaacgtgttcggccacccgctctcggtagccggaggaacgctcgtctccaacggctccataaccgtgagaaccgtgggcaacatcagcggagccaaaaccaccctccaaataaacccggagccggaactcatagcggagatggacggtataaaaggccgccatagcgaaaaacgaggagaacgcgaagaatttggaaaatatgatcaaaaagatgccgccggcggaacaggtaagaaacaaagagcacgtgcgcaaactgaaaaacacgatcatactcataaggcagcagataggggcgctggaggggaaaatgcgtctgctcaacataacgatgaacaaattcgaaaacgccttcatacgcatagaccgcatggcgtaccccggtacgacggtgaggttcggaaccatgaatatggcgctctccgacacattgcagggcgggaaaacgatacgggtcatcaaccaagagatcagggtgttctcggacagaccgatcaggccgaagcccggggaagaaaagaaatagattttggaaaatatcagcagcgctga

SEQ ID NO: 55788 - protein, 260 aa, Unknown
  Obtained from environmental sample
  misc_feature (1)..(260): Xaa is any amino acid
MECGGDLQVKGIIEDCKITVKGNILCKFGFVGTGKGTITADGNVNLNFMKNQSIVAGGNVNIAKEALNCNITATKSINVFGHPLSVAGGTLVSNGSITVRTVGNISGAKTTLQINPEPELIAEMDGIKGRHSEKRGEREEFGKYDQKDAAGGTGKKQRARAQTEKHDHTHKAADRGAGGENASAQHNDEQIRKRLHTHRPHGVPRYDGEVRNHEYGALRHIAGRENDTGHQPRDQGVLGQTDQAEARGRKEIDFGKYQQR

SEQ ID NO: 55789 - DNA, 900 bp, Unknown
  Obtained from environmental sample
  misc_feature (1)..(900): n is a, c, g, or t
ttggatttgttaatggactgcataaaaggcgagatgaccgaaaaacagtcattcataatcgctcagggcacgcaacccataaagggcgaggacgggcgcgtcgagttctgcttcaacatcgacccctcccccgccccgaccatcgccgaggacggcagcgcggactacaagaacatcgacatcgtaaacttggtgaacaacgggacagtactggcgaaactctatccggcgcagaagggcacgcccggcaaaaacgtctacggcaacgccgtcgcggccctcaacggaataccggcacgtctgccggttggggccaacaccgccataccgaccgacaacccgaattccctgatcgcggtatccgacggcatagcaagttacgacgacacctccgtcaacgtgtcgccgggatacgtgatctccggcgacgtcgacttcaaaaccggcaacataaaatacgataactccatcatgatcaacggcgacattaagagtcggattcgaggtggagtgcggcggcgacctgcaggtcaagggcataatagaagattgcaagataaccgtcaaggggaatatcctgtgcaaattcggcttcgtcggcaccggcaagggaaccataaccgccgacggcaacgtcaacttgaacttcatgaaaaatcaatcgatagtcgcgggcggcaacgtcaacatcgccaaagaggccctgaattgcaacataaccgccacaaagtctataaacgtgttcggccacccgctctcggtagccggaggaacgctcgtctccaacggctccataaccgtgagaaccgtgggcaacatcagcggagccaaaaccaccctccaaataaacccggagccggaactcatagcggagatggacggtataaaaggccgccatag

SEQ ID NO: 55790 - protein, 299 aa, Unknown
  Obtained from environmental sample
  misc_feature (1)..(299): Xaa is any amino acid
MDLLMDCIKGEMTEKQSFIIAQGTQPIKGEDGRVEFCFNIDPSPAPTIAEDGSADYKNIDIVNLVNNGTVLAKLYPAQKGTPGKNVYGNAVAALNGIPARLPVGANTAIPTDNPNSLIAVSDGIASYDDTSVNVSPGYVISGDVDFKTGNIKYDNSIMINGDIKSRIRGGVRRRPAGQGHNRRLQDNRQGEYPVQIRLRRHRQGNHNRRRQRQLELHEKSIDSRGRQRQHRQRGPELQHNRHKVYKRVRPPALGSRRNARLQRLHNRENRGQHQRSQNHPPNKPGAGTHSGDGRYKRPP

SEQ ID NO: 55791 - DNA, 852 bp, Unknown
  Obtained from environmental sample
  misc_feature (1)..(852): n is a, c, g, or t
atgcgaaactcccaaaataatacgctggaaaactgccgtgttctgtacgcccagcatttttatgtcagtgattattcgcagattgaagaatacaagtggagcggcaacatggttgtaacaggatcaaacaaccggataacgcggtgtgaatttggcaatacaagcggcaacgggattgttcttggcggcgatgacaatgtttttaccaataactatgttcacgacacaaattacgcgggcaattttcttgacggggtgtatgttttatcctcaaaacgccttgaagtttcgcgtaacacaatgataaatcagggacgcgcccatgtgtatttcgcgtatgggcacttttttgaaaagtgcgtagtccgtaataattattttgaaaacaataacataatggttccggacggagggggcggattttataccattaataccgacggcggcggaagtgaagtatataataactttgttattgtcggcgggagtaaaggcgataatgggacgatgaaaagactcctttcgggtttatatgttgatgatttaagtttcaattacagcgttcatcataatattgttattggcggcaccgacgccggaattcggcacggccttacgcatataaacattccgcagccgcagggaacgcgcttttttaacaataccattattggctcgcaaaacgggtttgggttccattatatatacggacaaaacacggacaccagaagcgttacaattacagacaatttgctggtaaatattaaatcccgcgatataacaggcgcgggctttgaaacggaaaatgggttaactatgacggtaattttgagaatggagctatacctgtaa

SEQ ID NO: 55792 - protein, 283 aa, Unknown
  Obtained from environmental sample
  misc_feature (1)..(283): Xaa is any amino acid
MRNSQNNTLENCRVLYAQHFYVSDYSQIEEYKWSGNMVVTGSNNRITRCEFGNTSGNGIVLGGDDNVFTNNYVHDTNYAGNFLDGVYVLSSKRLEVSRNTMINQGRAHVYFAYGHFFEKCVVRNNYFENNNIMVPDGGGGFYTINTDGGGSEVYNNFVIVGGSKGDNGTMKRLLSGLYVDDLSFNYSVHHNIVIGGTDAGIRHGLTHINIPQPQGTRFFNNTIIGSQNGFGFHYIYGQNTDTRSVTITDNLLVNIKSRDITGAGFETENGLTMTVILRMELYL

SEQ ID NO: 55793 - DNA, 1233 bp, Unknown
  Obtained from environmental sample
  misc_feature (1)..(1233): n is a, c, g, or t
atgctgagaaacggcgcaaacgattgtgattatacaaaattttacgacgtgtttttacaggacntgctgagcgatcgcagtttctccacccaggcctccgttccntgcgtcgtgtatctgaacggtgaatactggggaccgtataatttcaggaaaggtacagcgacaatcatacggaatataaatacggcgttgataaagataatgttttcttcttacgataacggggaattggacgacggtaatcccgctaccgatgccaatttatatccaaatatggtggtgggatttgcaaacaaagatatgtcaaattcgacaaactatgctgatttttgcaatctcgttgatattgacaattatattgatttctgtgcggcggaaatttacatatacaatgaagattggcctcataataattaccgggcatggagaacgcgtaacgtggaacccggtaacccctatggcgacacaaaatggcgctggcagatgtttgatacggaatttgcattaggaatctatagcgacggcggccttattggtaattctaatccccgtgaagacgccttcgcaaaaatctttagtaatgctaataaacctaatacctctgaagttattacccctgatgtcattaaagataattatgacaacaacagactttttaaagctttgttgaaaaatcccgatttttgcaaaaaatttgtcaacacaatgctggatctttacaatgtaaactttcaccccgataatttcggacccaaattgactagttatgagactgtatacaagccgttaatgcatggttattataccaggtggggcaccccctgggggacagagtcagtttttgatgataaagtaagaaacgccagaaaatacctgaatgccataggaaccgagatggtaaataattatttaccaaaatattttaacggcggctattcgttcattgccaatatcggcatttccgcgggcaatttgcgcgaggttaccctctccgtgacaggcgcatccggcgcaaccataaaagttaatacggttactccgaaacttgtgtcgggaagctggacaggcaagtattactccggcgttcccattaccgtaacggcaagtcccactgcgagcggcaaaacatttaaaggctggacggtaacgggcggtaccgccgcgactccttcagcgacgacaaccactgttacccttaccggtaacgcaacaattacggccacgtattaa

SEQ ID NO: 55794 - protein, 410 aa, Unknown
  Obtained from environmental sample
  misc_feature (1)..(410): Xaa is any amino acid
MLRNGANDCDYTKFYDVFLQDXLSDRSFSTQASVPCVVYLNGEYWGPYNFRKGTATIIRNINTALIKIMFSSYDNGELDDGNPATDANLYPNMVVGFANKDMSNSTNYADFCNLVDIDNYIDFCAAEIYIYNEDWPHNNYRAWRTRNVEPGNPYGDTKWRWQMFDTEFALGIYSDGGLIGNSNPREDAFAKIFSNANKPNTSEVITPDVIKDNYDNNRLFKALLKNPDFCKKFVNTMLDLYNVNFHPDNFGPKLTSYETVYKPLMHGYYTRWGTPWGTESVFDDKVRNARKYLNAIGTEMVNNYLPKYFNGGYSFIANIGISAGNLREVTLSVTGASGATIKVNTVTPKLVSGSWTGKYYSGVPITVTASPTASGKTFKGWTVTGGTAATPSATTTTVTLTGNATITATY

SEQ ID NO: 55795 - DNA, 360 bp, Unknown
  Obtained from environmental sample
  misc_feature (1)..(360): n is a, c, g, or t
ttgatgagcgcggagtacatcatggcggaaggaaacgataatgtaatcctctgcgagaggggaatacgcacctttgaaacgtatacgaggaacaccctcgatctttcggcggttcccgtgctaaaggaactctcccacttgccggtaatcatcgatccgagccacgctataggcgtctcgcgttatgtgaaatccatggcgctggcttcggtggcggcaggcgcggacgggcttatcattgaggtgcataatgatccgaagaacgcgtcctgtgacggcgctcagtccctcacgcttgaacagttcgccgatgtagcggataaggtgcggcgtatacgcgaagttatcgcggaactttag

SEQ ID NO: 55796 - protein, 119 aa, Unknown
  Obtained from environmental sample
  DOMAIN (1)...(115): DAHP synthetase I family
  misc_feature (1)..(119): Xaa is any amino acid
MMSAEYIMAEGNDNVILCERGIRTFETYTRNTLDLSAVPVLKELSHLPVIIDPSHAIGVSRYVKSMALASVAAGADGLIIEVHNDPKNASCDGAQSLTLEQFADVADKVRRIREVIAEL

SEQ ID NO: 55797 - DNA, 834 bp, Unknown
  Obtained from environmental sample
  misc_feature (1)..(834): n is a, c, g, or t
atgataacgggcattatcggtcttggccttataggaggttccttcgccaaagcgtacaagaccgccggacacaccgtatacgcgagcgagatcgataaaagcatactggatttcgccattctttcaggcgctcttgacgctcctttggataccgacacgctgtcccgctgcgacttgatcctaatcgcgctgtatccgcaggcggcgatagaatttctggataagatggcgcggcacatacaagcttccgccacagtcatagactgctgcggcacaaaaaaaaatatatgcgccgcagggtttaaggccgctgatcaatacggctttaccttcgtgggcgggcaccctatggccggaaccgaacactcggggtttaagcacagcaaggcgaatatgttncagggcgcgtccatgatcatagtgccgcccgtgtatgacgacattcagtttcttgagaagatcaaagttctgctcgctccggcggaattcggcaggctgaccgttaccactgctgaaaaacacgacgcgatgatcgcgttcacctcgcaaatggcccatctggtatccaacgcctttataaaaagcccgaccgtacttgagcataagggattttccgccgggagctacaaagacctgacgcgcgtagcctggctcaatgagcgaatgtgggcggagctgtttctggagaacaaggagaatctgcttcatgagcttgatctgtttctggcttccctaaaggagtacagggacgcgctgcagaaggaggacttctccaaactccagtcccttcttcttgatggcaagcgccttaaagaagaagttgaccgccgatga

SEQ ID NO: 55798 - protein, 277 aa, Unknown
  Obtained from environmental sample
  SIGNAL (1)...(18)
  DOMAIN (5)...(271): Prephenate dehydrogenase
  misc_feature (1)..(277): Xaa is any amino acid
MITGIIGLGLIGGSFAKAYKTAGHTVYASEIDKSILDFAILSGALDAPLDTDTLSRCDLILIALYPQAAIEFLDKMARHIQASATVIDCCGTKKNICAAGFKAADQYGFTFVGGHPMAGTEHSGFKHSKANMXQGASMIIVPPVYDDIQFLEKIKVLLAPAEFGRLTVTTAEKHDAMIAFTSQMAHLVSNAFIKSPTVLEHKGFSAGSYKDLTRVAWLNERMWAELFLENKENLLHELDLFLASLKEYRDALQKEDFSKLQSLLLDGKRLKEEVDRR

SEQ ID NO: 55799 - DNA, 1269 bp, Unknown
  Obtained from environmental sample
  misc_feature (1)..(1269): n is a, c, g, or t
atgagcagcaatgtgaaaatttctccggctgggctgaacggcgttgttcgcgcgatcccctccaagtcgcaggcgcacagggcgcttatatgcgcggccctggctgataaaccgacaagcatagaatgtgagggcggttccgatgacatagcggcaacggctgactgtctgtccgcgcttggggctaaaattgaacgcgaatcaagtgtttatgttctccatcctctgaaacgggagcggaacgatggtatcgcttcattgccctgcggggaaagcggcagcacgttccgctttatgctgcccatagtcggcgcgcttggacgtnaagcttcgtttgtcctgaaagggcggcttcccaaacgccctctctccccgntatacgaagagcttgtccgccacggagctgaattgtcgccgcagggttcagtttcgttttatgccgacgggcgacttacgccgggacgttattcgcttgacgctggtatatcgtcgcaatttatcagcggcttgttattcgccctgcccttgctcgacggcgacagtaagctctttctgaccggaagcgccgaatcgttcccttatatcgagctgacaatggcgatgctggaggagtttggtgtaagagcggattttagcggcgaggtgttttccataccaggcaggcaaacgtaccgttcttccggtattgtgcgcgtagagggcgattggtcgaacgccgcgttctggctgggcgctggcgctatcggcacaggcagggttacctgcgccggtctggacttacaatcccggcagggcgacagggcgatcctagacctactcgcgaaattcggcgcgcaggctaaaacgaacgattctgccgtaactgtatccggagggaaacttcggggcattgaaatcaacgcgaaagatattcccgatctcgtgcccatattggctgtgatcgcctccgccgccgaaggaatcaccgttattcgcaatgccggaaggctgcgcaccaaagaaagcgacaggctcgcttctgttagcgcgctgctgcgcgctttaggcgctgatgtgagcgagacggaggacgggcttgtcatacatgggagcaccgcttttaggggtggggaggtttcttcctacggagatcaccggatcgcgatgtctgcggcaatcgcggcgacggtttgcgcggagccggttgttattcatggcgcggaggcggtcaataaatcgtatccaggattctttgatgatctgcgtctattgggtggatcggttttgtaa

SEQ ID NO: 55800 - protein, 422 aa, Unknown
  Obtained from environmental sample
  DOMAIN (6)...(414): EPSP synthase (3-phosphoshikimate 1-carboxyvinyltransferase)
  misc_feature (1)..(422): Xaa is any amino acid
MSSNVKISPAGLNGVVRAIPSKSQAHRALICAALADKPTSIECEGGSDDIAATADCLSALGAKIERESSVYVLHPLKRERNDGIASLPCGESGSTFRFMLPIVGALGRXASFVLKGRLPKRPLSPXYEELVRHGAELSPQGSVSFYADGRLTPGRYSLDAGISSQFISGLLFALPLLDGDSKLFLTGSAESFPYIELTMAMLEEFGVRADFSGEVFSIPGRQTYRSSGIVRVEGDWSNAAFWLGAGAIGTGRVTCAGLDLQSRQGDRAILDLLAKFGAQAKTNDSAVTVSGGKLRGIEINAKDIPDLVPILAVIASAAEGITVIRNAGRLRTKESDRLASVSALLRALGADVSETEDGLVIHGSTAFRGGEVSSYGDHRIAMSAAIAATVCAEPVVIHGAEAVNKSYPGFFDDLRLLGGSVL

SEQ ID NO: 55801 - DNA, 795 bp, Unknown
  Obtained from environmental sample
  misc_feature (1)..(795): n is a, c, g, or t
ttgcagaattgcaaaaaaaacggtatattaaaggcggtaaatatgtcttcgcaatacggaaaaaaaataaaaatatcgatcttcgggcaatcgcactccccggcaattggcgtgagcattgacggcttaccgggcggaatcaaaattgatatggatgaactgcgggccttccttaaacgcagatccccggggcaaaacgacatttccacggcccgttcggaagatgacgagccagagattttgtcagggctcgtggaaactgttacatgcggcgcgccgcttgccataattatccgcaacaaagacgcccgatccgccgattaccgcgaactgcgggatattccgcgcccgtcccatgccgattttaccgcgcacataaagtacggaggttttcaggatgtggcgggcggagggcatttttccggcagactgacagctcctctgtgcgccgcaggagggatatgtttacaaatactgcgcggtctgggaatcagcattggagcgcacatattacgggttggcaatgcacaagacgatccctttgatcctgtgtctgtatcaagcgcggatttcgagacaattctcgaaaaccctctgcccgtactcaaccgtgaagcgggcgaatccatgaaaaaacaaattctggaagctaaagaaaaaggcgattcggttgggggcattgtagagtgcgcggcaatcgggctgcctgtcggcttgggcgatccgatattcgacggcattgagaacagaattgcagggatttgtttttggaatactgggcgtgaagggcgttga

SEQ ID NO: 55802 - protein, 264 aa, Unknown
  Obtained from environmental sample
  DOMAIN (23)...(264): Chorismate synthase
  misc_feature (1)..(264): Xaa is any amino acid
MQNCKKNGILKAVNMSSQYGKKIKISIFGQSHSPAIGVSIDGLPGGIKIDMDELRAFLKRRSPGQNDISTARSEDDEPEILSGLVETVTCGAPLAIIIRNKDARSADYRELRDIPRPSHADFTAHIKYGGFQDVAGGGHFSGRLTAPLCAAGGICLQILRGLGISIGAHILRVGNAQDDPFDPVSVSSADFETILENPLPVLNREAGESMKKQILEAKEKGDSVGGIVECAAIGLPVGLGDPIFDGIENRIAGICFWNTGREGR

SEQ ID NO: 55803 - DNA, 1002 bp, Unknown
  Obtained from environmental sample
  misc_feature (1)..(1002): n is a, c, g, or t
atgaacatcttaataattggcggcgccggatatatcggcagccatgtggcaaaggaatttcttgaaaaaggacaccgggtcacggtatacgacaacctttcccagcgcctgagggaaaacgtgcttgcccttgcagccattggcagttttgcgtttatccacggggatattcacgattaccccggcctgagtacgattatgaaggggggctatgacgcgcttatacacctggccgcttcaaaggccgccggggagtccatgcttgcgccggagaaatactctcgcaacaatatcatcgggacgctcaatatcctcaacgctgcttcggaaactggaatcaaaaacattgtgttttcttccagcgcggcggtttacggcgaacctgagtatcttcccattgacgaaaagcaccccacaaggccggagaattactacggatttacaaaactggaaattgagcgtttcctgggctggtacgaaaagatcaggggcatgcgctatgcctgtctgcgctactttaatgcggcgggctatgatgtaaagggaactataaaggggctggaacagaacccggcgaacctgctgccggtgatcatggaaacggcctgcggcatgagggcggagcttcaggtcttcggcaatgactacgacacgccggacggaacctgcattcgggattatatccatgtcagcgatctcgccgtcggccacgccgctgccctggattacatcagcaaaaacagcaaaagcctgattgtgaatctgggcagcgaaacaggggcttcggtaacggaagttctcgaaaccgcaaggcggataacaggcaagcccattcccgcaaagattgtcggcagacggcccggcgatccggcaaagctgacagcgtcatcagcccttgcccacgaactgcttggctggtcagcaaaatattccgatatggaaaccttgatacggacgagttgggaagttttacacaaagagcaaagagcaggtagcaggtag

SEQ ID NO: 55804 - protein, 333 aa, Unknown
  Obtained from environmental sample
  DOMAIN (1)...(131): short chain dehydrogenase
  misc_feature (1)..(333): Xaa is any amino acid
MNILIIGGAGYIGSHVAKEFLEKGHRVTVYDNLSQRLRENVLALAAIGSFAFIHGDIHDYPGLSTIMKGGYDALIHLAASKAAGESMLAPEKYSRNNIIGTLNILNAASETGIKNIVFSSSAAVYGEPEYLPIDEKHPTRPENYYGFTKLEIERFLGWYEKIRGMRYACLRYFNAAGYDVKGTIKGLEQNPANLLPVIMETACGMRAELQVFGNDYDTPDGTCIRDYIHVSDLAVGHAAALDYISKNSKSLIVNLGSETGASVTEVLETARRITGKPIPAKIVGRRPGDPAKLTASSALAHELLGWSAKYSDMETLIRTSWEVLHKEQRAGSR

SEQ ID NO: 55805 - DNA, 684 bp, Unknown
  Obtained from environmental sample
  misc_feature (1)..(684): n is a, c, g, or t
gtgtgggaagggaaggatcggtatgcgccgccattgtgcggcgatcctccggctttaaccaaggccggcgatgccggccaggccggcattgcgagccctgaaaatccggcaatactcgcggggagttcccttggagccgttatttccgaattggcggcatgcaaacggcccgatttggtaaaagccctgatcttcattgacggctgtttccccattgataacaaaattgacaattctcttctcccgctcatgctgccctctgtcggcagtaaatggtaccggtcttttcgcaaaaaccataaggcagcgtgggaatcgctgtatccgtattatggcgatctggatgccatgaacggcgaggatcgcgaattcctgagagagcgggtaatcgccagggtggaaagcgagaatcaggaacgggggtatttgtccaccctgcggagcatgagtattttttttatgtttaataagaggttcgtttcccgtaaaataaagacatatccggggaaaatcgctatactttggggtgagaaagacagggttttacctgttgacaaagccgccctttttcgcggcctgcggcctgatgcgcagatgacgttaatctcaggagccggtcatcttccccatcaggaaaaatatgaagaaacagcggcggaaatgctgcggtttctgaacaaatag

SEQ ID NO: 55806 - protein, 227 aa, Unknown
  Obtained from environmental sample
  DOMAIN (9)...(223): alpha/beta hydrolase fold
  misc_feature (1)..(227): Xaa is any amino acid
MWEGKDRYAPPLCGDPPALTKAGDAGQAGIASPENPAILAGSSLGAVISELAACKRPDLVKALIFIDGCFPIDNKIDNSLLPLMLPSVGSKWYRSFRKNHKAAWESLYPYYGDLDAMNGEDREFLRERVIARVESENQERGYLSTLRSMSIFFMFNKRFVSRKIKTYPGKIAILWGEKDRVLPVDKAALFRGLRPDAQMTLISGAGHLPHQEKYEETAAEMLRFLNK

SEQ ID NO: 55807 - DNA, 924 bp, Unknown
  Obtained from environmental sample
  misc_feature (1)..(924): n is a, c, g, or t
ttgacgggagataataaaatcaccgccgattctgtaaaaaattccggctaccgcaggtttgaagattacgaatacaaaactcagaagtttatgggatttggcacttttgccaaccaaaaagatgaaaaagaattgcctttgcaaacggcagtattgctctcggcagaagcaggcgcaaaatggaaactaaacgaaacttatcggctttacaccggcgcctatattgattacgggctaaattcagttacaaaaagaaggcaccatcctggtagagctatagagtataacagccaagagcgaacctttgctatcgaaaatttagtagatgaagctgtgccgctagccataggtttaaaagtgaaactatcattcaatgctggtcccgccgttgcagaaacagagaaaattgccaaagaagaagaaaacaagcaacgcgaactaattgaggctaacgcaatagcagccgaaaaagaagccgcacgtttagcggcggaaagagaaactgcccgcttggcttccattcaggaaggcaaggccgcgcacttgcaagccaggatagattccatacagaatcaggttctaaacgactttcacataactcaaacaaaaccgagcgaaaagcaaataccagcattggatgcgataatagccctgctgaaagaccacccagaactgcgtttctatataaacgggcacacctgcgaccaaggcgacaaggaaacaaataggatagttggctatgaacgtgccaaagcggtgaaagactatgttatctccaagggcattgacgaaaatcgcatacttggcataggttccaagctctattatgaacccttagtcccaaacaccagcgaagaaaaccgcagaaagaacagaagagtggaatttgttattgaaaagtggctaccccctgatggtaattaa

SEQ ID NO: 55808 - protein, 307 aa, Unknown
  Obtained from environmental sample
  DOMAIN (194)...(292): OmpA family
  misc_feature (1)..(307): Xaa is any amino acid
MTGDNKITADSVKNSGYRRFEDYEYKTQKFMGFGTFANQKDEKELPLQTAVLLSAEAGAKWKLNETYRLYTGAYIDYGLNSVTKRRHHPGRAIEYNSQERTFAIENLVDEAVPLAIGLKVKLSFNAGPAVAETEKIAKEEENKQRELIEANAIAAEKEAARLAAERETARLASIQEGKAAHLQARIDSIQNQVLNDFHITQTKPSEKQIPALDAIIALLKDHPELRFYINGHTCDQGDKETNRIVGYERAKAVKDYVISKGIDENRILGIGSKLYYEPLVPNTSEENRRKNRRVEFVIEKWLPPDGN

SEQ ID NO: 55809 - DNA, 405 bp, Unknown
  Obtained from environmental sample
  misc_feature (1)..(405): n is a, c, g, or t
atggcacagcaccgccacacgcccgagatagagcaggagctctccgccgccgccggcaaaccggtaacgataactttctcgccgcacctattaccgattaatcgcgggatattatctacaatatatttaaaaacggaaaccggcgccgcggagtgcgccgatatcgtcaaaaagttttattccggttcagacttcgtgaggatacgcgaatcatccgatttgccgcagatatcctccgtggtccacacgaactactgcgacatagcctttaccggcggaggcggaggccaaccggtaatagcggtatcggcgctcgacaacctcgttaagggggcgagcggccaagcgttgcagaatatgaatatcatgttcggcattaaagaaactaccggacttttaagatag

SEQ ID NO: 55810 - protein, 134 aa, Unknown
  Obtained from environmental sample
  DOMAIN (1)...(110): Semialdehyde dehydrogenase, dimerisation domain
  misc_feature (1)..(134): Xaa is any amino acid
MAQHRHTPEIEQELSAAAGKPVTITFSPHLLPINRGILSTIYLKTETGAAECADIVKKFYSGSDFVRIRESSDLPQISSVVHTNYCDIAFTGGGGGQPVIAVSALDNLVKGASGQALQNMNIMFGIKETTGLLR

SEQ ID NO: 55811 - DNA, 804 bp, Unknown
  Obtained from environmental sample
  misc_feature (1)..(804): n is a, c, g, or t
atgtcaggaatggcggtaataaaaatcggcggttcgacggtagacactcccggcctcttgggcgaattcgcccaaagcgtcgcggatttccaccgcgacgggcgtctccccatcatagtccacggcggcggcaaggacatcgcccggcagcttgacaaactgaacaaggagtccgtcttcgtagaggggatgcgcgttaccgacgccgagtccgtgcgggtcgtccagatggtgctctccggcgacgtcaacaagcgcatagtgcacgaactagtaaaaaggaacgttccggcgctcggcataagcggcgttgacggcggtttgctgcgcgctacgaagttgcttgtgaacggtcaggacatcggttttgtcggagagatcggcatcgtgaaggacgagatcatccgcgccttctttaagtccggccacatcgccgtcgtctcgcccgtttcttgcggggtagacgagagaggggtctgcaccggcgagatattcaacgtcaacgccgattccgccgccggcgacatcgcgagggcaatgaaggtcggcgacctgatcttcatctccgacgtgcccggcgtgaagatagggggcgcggtgcgcaatgttatacgcgtatcggagatagaggggcttatagagtccggcgacgttaccggcggcatgatccccaaactgcgctccgcggcggcggcggtggaggccggggtggcacgggtgcatatctgcgggtggcacgggcccacgacgcttatggacgagatggacgagaaaacggcgcaggggactacaattcaaaaataa

SEQ ID NO: 55812 - protein, 267 aa, Unknown
  Obtained from environmental sample
  DOMAIN (3)...(244): Amino acid kinase family
  misc_feature (1)..(267): Xaa is any amino acid
MSGMAVIKIGGSTVDTPGLLGEFAQSVADFHRDGRLPIIVHGGGKDIARQLDKLNKESVFVEGMRVTDAESVRVVQMVLSGDVNKRIVHELVKRNVPALGISGVDGGLLRATKLLVNGQDIGFVGEIGIVKDEIIRAFFKSGHIAVVSPVSCGVDERGVCTGEIFNVNADSAAGDIARAMKVGDLIFISDVPGVKIGGAVRNVIRVSEIEGLIESGDVTGGMIPKLRSAAAAVEAGVARVHICGWHGPTTLMDEMDEKTAQGTTIQK

SEQ ID NO: 55813 - DNA, 420 bp, Unknown
  Obtained from environmental sample
  misc_feature (1)..(420): n is a, c, g, or t
atgaaggcaaagacggcaaaggtaaggacggcaaaggcggcgacggcaaggaaggccgcggcggcatcggtaaagaaggcaaaggcggcggcgaagaaggcgacagctaagaaaacaacggcggcaaaggcaaagaaggcgaaaccggcatcgctaaaaaagacaaaagccgcgacggtaaaaaaggcgaagaagtcaacgataaagagggcggcagcggtaaagaaagccgccgcgcctaaaataatgatggacgtgtcccccgatgagatattcgtccctacctacaagcgcggagggggcgcgttcgtccgcgggggaggggatgtacgtttacgactcggacggcaaagagtacttagatttcggcgcgggtatcgcggtaaacgcgctcggccatgcccatccggtgctgcttaa

SEQ ID NO: 55814 - protein, 139 aa, Unknown
  Obtained from environmental sample
  misc_feature (1)..(139): Xaa is any amino acid
MKAKTAKVRTAKAATARKAAAASVKKAKAAAKKATAKKTTAAKAKKAKPASLKKTKAATVKKAKKSTIKRAAAVKKAAAPKIMMDVSPDEIFVPTYKRGGGAFVRGGGDVRLRLGRQRVLRFRRGYRGKRARPCPSGAA

SEQ ID NO: 55815 - DNA, 885 bp, Unknown
  Obtained from environmental sample
  misc_feature (1)..(885): n is a, c, g, or t
atgagatattcgtccctacctacaagcgcggagggggcgcgttcgtccgcgggggaggggatgtacgtttacgactcggacggcaaagagtacttagatttcggcgcgggtatcgcggtaaacgcgctcggccatgcccatccggtgctgcttaaggagttgaacgctcagggcggacggattatccatacgtccaatctttactataacgagccgcagattgaattggccgcgaagttggttaagcacagtttcgccacaaaagtttttctatgcaacagcggaaccgaggcgaacgaggcggcgataaagtttgcgaggaagcgcggaaccaaggcttcggcgcagaagtttcacgtgctctctttttcggacggtttccacgggaggacttacggggctttgagcgcaaccgcccagccgaagtttcacgtgggcgttgggccgcttcccgacggttttcactacgctccgttcaacgacattcagtgcgctaaggccacgcttgacaaatacgaatttgcggcaataatcgttgagccgttgcaaggcgaaggcggggtcaacgcggcaagcgttgagtttttgcgctttttgagggaatacgccacggaaaactcaatctcgctaatatttgacgagatacagtgcgggatgggccggacgggaacgctgtggtaccatgagcaggcgaacgtatcacccgatatcatgacattagccaaaccattaggcggcggtctgcccctgggagcggtgctctgtatagacgacgtggccgcctgcatctcccccggagaccatggaacaactttcggcggaaaccccgtggcctgcgccttgggaacgaaagtcattgacattgtgagcgataaaaagttttag

SEQ ID NO: 55816 - protein, 294 aa, Unknown
  Obtained from environmental sample
  DOMAIN (14)...(294): Aminotransferase class-III
  misc_feature (1)..(294): Xaa is any amino acid
MRYSSLPTSAEGARSSAGEGMYVYDSDGKEYLDFGAGIAVNALGHAHPVLLKELNAQGGRIIHTSNLYYNEPQIELAAKLVKHSFATKVFLCNSGTEANEAAIKFARKRGTKASAQKFHVLSFSDGFHGRTYGALSATAQPKFHVGVGPLPDGFHYAPFNDIQCAKATLDKYEFAAIIVEPLQGEGGVNAASVEFLRFLREYATENSISLIFDEIQCGMGRTGTLWYHEQANVSPDIMTLAKPLGGGLPLGAVLCIDDVAACISPGDHGTTFGGNPVACALGTKVIDIVSDKKF

SEQ ID NO: 55817 - DNA, 378 bp, Unknown
  Obtained from environmental sample
  misc_feature (1)..(378): n is a, c, g, or t
atgtcaatgactttcgttcccaaggcgcaggccacggggtttccgccgaaagttgttccatggtctccgggggagatgcaggcggccacgtcgtctatacagagcaccgctcccaggggcagaccgccgcctaatggtttggctaatgtcatgatatcgggtgatacgttcgcctgctcatggtaccacagcgttcccgtccggcccatcccgcactgtatctcgtcaaatattagcgagattgagttttccgtggcgtattccctcaaaaagcgcaaaaactcaacgcttgccgcgttgaccccgccttcgccttgcaacggctcaacgattattgccgcaaattcgtatttgtcaagcgtggccttagcgcactga

SEQ ID NO: 55818 - protein, 125 aa, Unknown
  Obtained from environmental sample
  misc_feature (1)..(125): Xaa is any amino acid
MSMTFVPKAQATGFPPKVVPWSPGEMQAATSSIQSTAPRGRPPPNGLANVMISGDTFACSWYHSVPVRPIPHCISSNISEIEFSVAYSLKKRKNSTLAALTPPSPCNGSTIIAANSYLSSVALAH

SEQ ID NO: 55819 - DNA, 1281 bp, Unknown
  Obtained from environmental sample
  misc_feature (1)..(1281): n is a, c, g, or t
gtggacatgagggaatggctgccggaggatcatttagtctattttgtaatagaggcgatagagcaaataggggtggccggatttaaagtaaaccggagcggcagcgggagcgaacagtacccgcctgagatgatgctggcgttattggtatacagctatgtgacagggcggttcggttccaggacgatagaagcggcgacatatacggacgtggcgctcagatatatatgcggaggggaagcgcaccctgatcattcggtaatctgcgcgttccgcaaggacaacaaggaagtatttgaagaaacatttacaaagatacttgtattagccaggcagacgaagaaactgaaacaaactggaggggccagtgccgacgggacaaaaatacatgcgaacgcgagcaagcacaaggctgtaagctacaagcgggcaggggaaatcatagaagagcttaaggaagaagtgaaagggctgatgcggatggcggaagaggctgacgggaaagcggagaaaccggtgataaacataccggatgaaataaagctgagggaagagcggaagaaggcgctggaagaagcgagggccgagatggaaaagatgtatgaagcggcaaaggaagaagggacaaaaacacggaaaaaactggacgaataccagcataatttcaccgacaaggacagccggataatgaaagttggaaacggggagcattatgagcagagctacaacgcgcaggcggtagttgacacggaagggagcatgctgatactgggagggtatgtaacgcaaaacgtgaatgacaagaaggaaatggagcctgcggtagcgagtgtcgataaagaagtgcgggaaataaacacgatatgtctggatactggattttacagcgaagaggcggtagccgcggtagaaaatataaatgaagaaggaaagcgggaagggcctgaagtattttgcgcggtagggaaagggcatcacgggaagacggtggaagatttgaaagacaaggggcccaaggggcggcctcctgcaaacatgagtgcgaaagaaaagatggcgcggaaacttaaaaccaagaaagggaaagaggcatacaagaaacggaaagagacggtagagccggtgttcgggataataaaaagtgtaatgggatttcggcaatttatgctgcgtgggatagagaaagttaataccgaatgggcgttagtgcgtgtcgcgtataactttaaaaggctgcacaggctcatgggagggaaacggttggccgaatgcctggcataa

SEQ ID NO: 55820 - protein, 426 aa, Unknown
  Obtained from environmental sample
  DOMAIN (222)...(409): Transposase DDE domain
  misc_feature (1)..(426): Xaa is any amino acid
MDMREWLPEDHLVYFVIEAIEQIGVAGFKVNRSGSGSEQYPPEMMLALLVYSYVTGRFGSRTIEAATYTDVALRYICGGEAHPDHSVICAFRKDNKEVFEETFTKILVLARQTKKLKQTGGASADGTKIHANASKHKAVSYKRAGEIIEELKEEVKGLMRMAEEADGKAEKPVINIPDEIKLREERKKALEEARAEMEKMYEAAKEEGTKTRKKLDEYQHNFTDKDSRIMKVGNGEHYEQSYNAQAVVDTEGSMLILGGYVTQNVNDKKEMEPAVASVDKEVREINTICLDTGFYSEEAVAAVENINEEGKREGPEVFCAVGKGHHGKTVEDLKDKGPKGRPPANMSAKEKMARKLKTKKGKEAYKKRKETVEPVFGIIKSVMGFRQFMLRGIEKVNTEWALVRVAYNFKRLHRLMGGKRLAECLA

SEQ ID NO: 55821 - DNA, 717 bp, Unknown
  Obtained from environmental sample
  misc_feature (1)..(717): n is a, c, g, or t
ttggcgaaaaacggcgttagcctcacattgctttggaaggaatattttgagaattgcaggatggaaaactcccggccccttatgtattctgccttttgcaatcaataccagcaattcgcggcgaagcataaagcaaccatgcatgttgagcataagccaggcgaacgcatggaagttgactgggcaggagataccgctttcatcctggataacatttcaggaaagccaatccctgtctatttgtttgttgcggtattgccctgttccggctatgcctatgcagaaggctttttgaaccggaacatggaaagctggataaccgcacatgtccatgcatatgagttttttggcggcgcaacaaggctattgataccggacaatttaaagaccggcattgaaaaagccgactggtactctccggttatcaacaagacgtatcatgagatggctgaatattatggaacagcggttatacccacgggggtaagaaaaccaaaagagaaagcaagcgtggaacgggcggtcggcatgctctcgacttggataaccgccgccttgcgaaaccggcagtttttctccctctgggaattaaacgaggcgatgcggcaaaaactggccgactttaaccgaaagcccttccagaaaagccgggcagccgggaaagcgcctttacggaggaacggccattcctcataccgcttccctgtaagccattga

SEQ ID NO: 55822 - protein, 238 aa, Unknown
  Obtained from environmental sample
  DOMAIN (49)...(221): Integrase core domain
  misc_feature (1)..(238): Xaa is any amino acid
MAKNGVSLTLLWKEYFENCRMENSRPLMYSAFCNQYQQFAAKHKATMHVEHKPGERMEVDWAGDTAFILDNISGKPIPVYLFVAVLPCSGYAYAEGFLNRNMESWITAHVHAYEFFGGATRLLIPDNLKTGIEKADWYSPVINKTYHEMAEYYGTAVIPTGVRKPKEKASVERAVGMLSTWITAALRNRQFFSLWELNEAMRQKLADFNRKPFQKSRAAGKAPLRRNGHSSYRFPVSH

SEQ ID NO: 55823 - DNA, 453 bp, Unknown
  Obtained from environmental sample
  misc_feature (1)..(453): n is a, c, g, or t
gtgcttgtcggacggctgacaagggatgcggagcttaaatcaattgccagcggacaggcagtctgtaaattttcgattgccgtaaaccgccgccgcaaaaatggcgagcaatgggaggacgaggcgaatttctttgatgtcgtggtctgggggaggcagggcgagactctgcaccagtacttgcttaaaggaaaacagattggcgttgacggcgaactgcgcttgaatcgctggcagcaggatgggcagaaccattccaaagtggaaattgtcgccaataacatccagcttttgggctcttccggcggcggagcttcctcgggcggttcttcctttggaggcggcgcctccggcggtgccataggaggagataataattcctatatccaacagcaggcccagggcggcaatgtcccggcggaagacggctttgccgatgatattccattttaa

SEQ ID NO: 55824 - protein, 150 aa, Unknown
  Obtained from environmental sample
  DOMAIN (1)...(98): Single-strand binding protein family
  misc_feature (1)..(150): Xaa is any amino acid
MLVGRLTRDAELKSIASGQAVCKFSIAVNRRRKNGEQWEDEANFFDVVVWGRQGETLHQYLLKGKQIGVDGELRLNRWQQDGQNHSKVEIVANNIQLLGSSGGGASSGGSSFGGGASGGAIGGDNNSYIQQQAQGGNVPAEDGFADDIPF

SEQ ID NO: 55825 - DNA, 333 bp, Unknown
  Obtained from environmental sample
  misc_feature (1)..(333): n is a, c, g, or t
atgtctgaagaaaaatatatggacggcgaaagatccttccgacgcgaccgcggaatggacagccagatggacgggcgtgacggcgatgacaggatgggccgcggcggtaaaggcggcaaggctttcttcaacaaaaagaaggtatgcaaattctgcgtgcaaaagctcaaaattgactataaggacgtggatacgctgcgccgttttatcaccgagcggggaaagatcctgccgaggcgcataaccggaacctgcgcgaagcatcagcgcgccctggccgtagccataaagcaggccaggatcatagccctgcttccgtttgtagctgaataa

SEQ ID NO: 55826 - protein, 110 aa, Unknown
  Obtained from environmental sample
  DOMAIN (52)...(105): Ribosomal protein S18
  misc_feature (1)..(110): Xaa is any amino acid
MSEEKYMDGERSFRRDRGMDSQMDGRDGDDRMGRGGKGGKAFFNKKKVCKFCVQKLKIDYKDVDTLRRFITERGKILPRRITGTCAKHQRALAVAIKQARIIALLPFVAE

SEQ ID NO: 55827 - DNA, 471 bp, Unknown
  Obtained from environmental sample
  misc_feature (1)..(471): n is a, c, g, or t
gtgaaagacgttgcaaagggctatgcccggaactatctttttccaaggggaatagctcttccttacgcggcgcagacaatcaagctgtttgaggcaaggaaggatgaaattgaagcgaagaaagcccagaagcggcaggacgcgatgggtcttaaggaacggcttgaaagcctggagctttccattaccatgcccgcgggcgccaatggaaaactgtatggctctgtcaccagccacaccgtagcggatgagctggtaaaactgggcttccagattgaccgcaagcggatccaccttgcgagcgcgggtataaagaatgtcggcaagtacaaagccattatcaggctgtacgagaattcccaggcggaaatccagctccacatcatcgggcaggaaattaaaaccgaaacccatgaagcgccgcccgtccgtccccaccgccgccgtatggatgaagccgctgcggaataa

SEQ ID NO: 55828 - protein, 156 aa, Unknown
  Obtained from environmental sample
  DOMAIN (1)...(31): Ribosomal protein L9, N-terminal domain
  misc_feature (1)..(156): Xaa is any amino acid
MKDVAKGYARNYLFPRGIALPYAAQTIKLFEARKDEIEAKKAQKRQDAMGLKERLESLELSITMPAGANGKLYGSVTSHTVADELVKLGFQIDRKRIHLASAGIKNVGKYKAIIRLYENSQAEIQLHIIGQEIKTETHEAPPVRPHRRRMDEAAAE

SEQ ID NO: 55829 - DNA, 921 bp, Unknown
  Obtained from environmental sample
  misc_feature (1)..(921): n is a, c, g, or t
gtgagagccgtcgtgaagaaaaccgtaaagaaggccgcagagcgcgagttagtctcgttcgatttcgccgtcaaatatttgttgcgcggcaagagcgactacgtgatcctcagcggttttctgtccgagctcatgggtaaaaaggtcgtggttaagggcattatggagagcgaaagtaacaaagctaccaaagacgacaagaccaaccgagtagatttaatagcgcagatcggtagcggcgaacttgccgtatttgaaattcagtttttggaagagtgggatttcttcggcaaagtgctttatggtgtcagcaacgcgataaaggagcaggttaatgttggcgataagtacaatatcaagaaagtctattcaataagcatagcgtacttcaatttaaacgccaaaaaggagtatctgttttccggcaagtttaacgactttcacggcgttcactacaaggatgaagtggtcagattcgctcaatcccgtactccgacatctaaaagactgtttgatatacatcctgagtattacctgattttgccaagaatgttcgacgaaaaactgcgcggtcgtttcgacgagtgggtttacatcctaaaaaactcaaaggcccgcgacgatttcagggccgccggaattaaagaggccaagaccaagttagactacttgcgcatgacgcccaagaggaaaaaggagtacgaggctttcatggaacaccgccgaagcgctagtagcgtgttagaaacggcggtaggcaaaggcgaacttagaggcctacggaaaggcagacaggaaggtcaagatatggaacgtaccaaacacgttaaaagtatgtacaaaacaggtttcaccgttaaacaaattgttaaaggcctaaatctttctgaaacggttgtcaggcagattttaggcttgtag

SEQ ID NO: 55830 - protein, 306 aa, Unknown
  Obtained from environmental sample
  misc_feature (1)..(306): Xaa is any amino acid
MRAVVKKTVKKAAERELVSFDFAVKYLLRGKSDYVILSGFLSELMGKKVVVKGIMESESNKATKDDKTNRVDLIAQIGSGELAVFEIQFLEEWDFFGKVLYGVSNAIKEQVNVGDKYNIKKVYSISIAYFNLNAKKEYLFSGKFNDFHGVHYKDEVVRFAQSRTPTSKRLFDIHPEYYLILPRMFDEKLRGRFDEWVYILKNSKARDDFRAAGIKEAKTKLDYLRMTPKRKKEYEAFMEHRRSASSVLETAVGKGELRGLRKGRQEGQDMERTKHVKSMYKTGFTVKQIVKGLNLSETVVRQILGL

SEQ ID NO: 55831 - DNA, 798 bp, Unknown
  Obtained from environmental sample
  misc_feature (1)..(798): n is a, c, g, or t
atgaggtatctcgcaagaagaaaaattccaattcctgtagcaaagaaaaaatcctacagcatggacgataacctgtggcatatttcccacgaaggtcttgaacttgaagacccggcgactgaaccgcaattaaaaaaaatgcttgccatgaccataccgccagaaaaagcgcctaacaagcctgaatatgtggaaattgattttgaaaaaggcatccccgtctcacttaacggaaaaaaaatggacggcgtacagttaattaacgcgctcaacaaaataggcggcgcaaacggaatcggcgttgtagaccttgtagaaaaccgcgttgtcggaatgaaaagccgaggcgtttacgaaactcccggcggctccatcctctactatgcccatcaggaacttgaacacctctgtcttgacaggcagacttattcattcaaacagcaggttgcgcttaaattaagcgaacttatctacggcggcttatggttcaccccgttacgcgaagcgttatgcgcttttgttgacagcactcaagctaccgtaaccggcaaagtaaggcttaaactttacaaaggttcgataaacgccgcgggcgtaacatccgcctattcgctttacaacacaagcctcgcgagttttacgacgggggaacttttcaatcacgccgacgcgaaaggttttataaaactctacggtcttcccgtacttgtaagatcgctcatggaacaggggaaaaaagacggggttaaagccgcaggtgcgtcttcggcgaaggcaagggcaaaaacaaagcgttga

SEQ ID NO: 55832 - protein, 265 aa, Unknown
  Obtained from environmental sample
  DOMAIN (1)...(241): Arginosuccinate synthase
  misc_feature (1)..(265): Xaa is any amino acid
MRYLARRKIPIPVAKKKSYSMDDNLWHISHEGLELEDPATEPQLKKMLAMTIPPEKAPNKPEYVEIDFEKGIPVSLNGKKMDGVQLINALNKIGGANGIGVVDLVENRVVGMKSRGVYETPGGSILYYAHQELEHLCLDRQTYSFKQQVALKLSELIYGGLWFTPLREALCAFVDSTQATVTGKVRLKLYKGSINAAGVTSAYSLYNTSLASFTTGELFNHADAKGFIKLYGLPVLVRSLMEQGKKDGVKAAGASSAKARAKTKR

SEQ ID NO: 55833 - DNA, 360 bp, Unknown
  Obtained from environmental sample
  misc_feature (1)..(360): n is a, c, g, or t
ttgaaaaccaagcgtaatccagtaacaaaaacggcaaaacctctttggtcaggacggcttgcggaagttccgcaggtggaggcttttgcttttcaagcgtcaatcaatgttgacagccgccttgtctttgacgacatcgccggaagcaaggcccacgcagtaatgctcggcaaacagggaattatcccgaaggacagcgccggtaagatagtaaaagaacttaacgctattgcaaacgaaattaaagcgggcaaattggcgatagatactgagcatgaggatattcattcttttttagaagccagtcttaacggagcgtcttggcgacacgggcaaaatggttcacgccgggcgcagtag

SEQ ID NO: 55834 - protein, 119 aa, Unknown
  Obtained from environmental sample
  misc_feature (1)..(119): Xaa is any amino acid
MKTKRNPVTKTAKPLWSGRLAEVPQVEAFAFQASINVDSRLVFDDIAGSKAHAVMLGKQGIIPKDSAGKIVKELNAIANEIKAGKLAIDTEHEDIHSFLEASLNGASWRHGQNGSRRAQ

SEQ ID NO: 55835 - DNA, 1410 bp, Unknown
  Obtained from environmental sample
  misc_feature (1)..(1410): n is a, c, g, or t
ttgaaaactaagcgcaatccagtaaaaaaaacggcgaagccgctgtgggcagggcggcttgcggaagttccgcaggcggaagcttttgcttttcaggcgtcaatcaatgttgacagccgtcttgtctttgacgacatcaccggaagcaaggcccatgccacaatgctcggcaaacagggaattatcccaaaggacagcgccagtaagatagtaaaagaacttaactccattgcaaacgaaattaaagcgggcaaattggcgatagatactgagcatgaggatattcattcttttttagaagcagtcttaacggagcgtcttggcgatacaggcaaaatggttcatgccgggcgcagtagaaatgatcaggtggcggttgctttccgcctgtacctgaaacgcacggtgccgcaattacaaaatgaattagccgcgcttgttaatgttcttcttgataccgcattgtcccatgtaaacagtatcatgcccgggtatacgcatcttcaaagagcacagcccgtaacgcttggacatcacctaacggcatggtgcgccgcgcttgaaagggattattcccgcctcagcgacgcccttaaaagacttgatgagtgcccattgggaagcggagcgttagccacaactaccctgcccttggatcgcaaagctgttgcgcaggatttgggcttcagcaggttatgcgtcaattcaatggacgccgtcgccgaccgtgactttgccctggaactttcaagcgcctgcgcgatcactatggttcatttatcgcgtttttgcgaggatatagttctgtgggcaagcgaagaatttaaatttatcgatctggcagaatcatggagcacgggctcttcgatcatgcctcagaaaaaaaatcccgattntgcggaactcatccggggaaaaacaggaagaacaacgggcaatcttgtcgctctttttacgcttctaaaaggattgccttatgcatataacaaagatttacaggaagataaagaaaatcttttcgacagcatcgacacattgaacgcctgccttcgaatgttcacgggaatgattaaaagcgcccaatttaacattaagcgcatgaaagctgcatgcacgggcggctttttggaagcgactgacacggcggaatatcttgtccgtaaggggcttcctttccgcgccgcccatgaagttgccgcttctctggtacgcgattgtattgaggcggggcataaacatattggcgtgttaacgctcgcgcaattaaagaaacactccaaactttttgaagaagacatttataaactgataacgccgtcagcctgcgtaaaagcgcgcaagataccggggggacccgcgctaagagaagtccgcagacagataaagctgttacgcaaaaaaataaattaa

SEQ ID NO: 55836 - protein, 469 aa, Unknown
  Obtained from environmental sample
  DOMAIN (18)...(312): Lyase
  misc_feature (1)..(469): Xaa is any amino acid
MKTKRNPVKKTAKPLWAGRLAEVPQAEAFAFQASINVDSRLVFDDITGSKAHATMLGKQGIIPKDSASKIVKELNSIANEIKAGKLAIDTEHEDIHSFLEAVLTERLGDTGKMVHAGRSRNDQVAVAFRLYLKRTVPQLQNELAALVNVLLDTALSHVNSIMPGYTHLQRAQPVTLGHHLTAWCAALERDYSRLSDALKRLDECPLGSGALATTTLPLDRKAVAQDLGFSRLCVNSMDAVADRDFALELSSACAITMVHLSRFCEDIVLWASEEFKFIDLAESWSTGSSIMPQKKNPDXAELIRGKTGRTTGNLVALFTLLKGLPYAYNKDLQEDKENLFDSIDTLNACLRMFTGMIKSAQFNIKRMKAACTGGFLEATDTAEYLVRKGLPFRAAHEVAASLVRDCIEAGHKHIGVLTLAQLKKHSKLFEEDIYKLITPSACVKARKIPGGPALREVRRQIKLLRKKIN

SEQ ID NO: 55837 - DNA, 519 bp, Unknown
  Obtained from environmental sample
  misc_feature (1)..(519): n is a, c, g, or t
ttgagggataaccgcatcatcacttttgagtacatgggggcttatgatgcacagtacgtaccccgccgagtcaaaccctatcagttactcttcgaaacaggcctttggtatttatacggtttcgcagaagagcgtaaagacatcaggcttttctctctgtgccgggtaaaaaacatcgcccttaccaaagaccgtttttcccttccgaaagattttgattaccggaatagcagcgctggtttttttggcgtttttactgggcagaaaaaacagcgcttcaaaatcgctttttacgattattccgttgcatgggttaaagaccgtaaatgggcggaagatcaaaaaatcgtcgaggataatgacggcgttactatcacttttacaagctcgcagtttgacaaagttttggaatgggtactgtcacgcggctgtaccgcccttccgctggagccggaacttctggtagaagcctggcgctggaacattgaagaaatgcgaaaaatggcggggaaaaaatga

SEQ ID NO: 55838 - protein, 172 aa, Unknown
  Obtained from environmental sample
  misc_feature (1)..(172): Xaa is any amino acid
MRDNRIITFEYMGAYDAQYVPRRVKPYQLLFETGLWYLYGFAEERKDIRLFSLCRVKNIALTKDRFSLPKDFDYRNSSAGFFGVFTGQKKQRFKIAFYDYSVAWVKDRKWAEDQKIVEDNDGVTITFTSSQFDKVLEWVLSRGCTALPLEPELLVEAWRWNIEEMRKMAGKK

SEQ ID NO: 55839 - DNA, 528 bp, Unknown
  Obtained from environmental sample
  misc_feature (1)..(528): n is a, c, g, or t
atgagtgatttaggtattacgggcttatatgatataatggatgccatgagtaaagataaaaaaccaaggcgcaaaacaatgccgaaagcggcacttgcccgtctgtgttttatcgacgagcagattgcttccgggaattatccgagtacggcgtggctggcggaaaattgcgggaacgctagcctttccacgataggtcgggatatttcttttatgaaaaatattttgaatgcgccgataaaatacaacgtgctaaaacgaggcttttattactcaaagcccaaataccgcgtccctttgggcttttacggcggcgacgagcttttggctttaggcatggtggaggcccttcttgtcatgtataaagacactcccatctatgacacggcgtacaatcagcttaaaagtattaccacgcccgtggactcgaaagcaattccgactggtatgaaagccgtatcgttgttccgcaagttccatccgcttctgtaccggttgacatatggaaccncattacaacagccttga

SEQ ID NO: 55840 - protein, 175 aa, Unknown
  Obtained from environmental sample
  misc_feature (1)..(175): Xaa is any amino acid
MSDLGITGLYDIMDAMSKDKKPRRKTMPKAALARLCFIDEQIASGNYPSTAWLAENCGNASLSTIGRDISFMKNILNAPIKYNVLKRGFYYSKPKYRVPLGFYGGDELLALGMVEALLVMYKDTPIYDTAYNQLKSITTPVDSKAIPTGMKAVSLFRKFHPLLYRLTYGTXLQQP

SEQ ID NO: 55841 - DNA, 675 bp, Unknown
  Obtained from environmental sample
  misc_feature (1)..(675): n is a, c, g, or t
atgagaaaaggttttgcctgccttttttcgggaacgccgggaacggggaaaacggaaaccgcttatcagatcgcccgcgaaaccgggcgcaacataatgatgatagacatatcaaacacaaaaagctgctggttcggcgaaagtgaaaaaaagataaaaacaatatttagaaattaccggcacgcggttgataattccaagctggccccgattctgctgttaaacgaggcggacgcggtaatcgggaaacggaaagtgtatagcggttcaagagggtcggttgaccagaccgagaacgccattcagaacatcattttgcaggagatagaaaacctcgtggggattcttatcgccacgaccaacctgactcagaacatggacaacgcctttgaacggcgctttttgtacaagattgagtttacaaagccctgccttgaagcccgacagtccatctggcaaagtatgatgccctccctttccgccgccgaaaccgaaaagctcgcctctcgttatgacctgtcgggaggccagattgagaacatcgcgcgtaaagccgaggttgactttgtaattaacggcggctgcgtttcaatggacgcgctttcacggcattgctcggaggagatcgccgggcaatttaacacttcaaaaaggatagggttcgccaatgagtga

SEQ ID NO: 55842 - protein, 224 aa, Unknown
  Obtained from environmental sample
  DOMAIN (6)...(191): ATPase family associated with various cellular activities (AAA)
  misc_feature (1)..(224): Xaa is any amino acid
MRKGFACLFSGTPGTGKTETAYQIARETGRNIMMIDISNTKSCWFGESEKKIKTIFRNYRHAVDNSKLAPILLLNEADAVIGKRKVYSGSRGSVDQTENAIQNIILQEIENLVGILIATTNLTQNMDNAFERRFLYKIEFTKPCLEARQSIWQSMMPSLSAAETEKLASRYDLSGGQIENIARKAEVDFVINGGCVSMDALSRHCSEEIAGQFNTSKRIGFANE

SEQ ID NO: 55843 - DNA, 408 bp, Unknown
  Obtained from environmental sample
  misc_feature (1)..(408): n is a, c, g, or t
atggaaaaacgccgcccgttaagacctcaatccgtaatggaaaacattccgcaaaatgagggaattaacgctcttgccccggaagacaacggaaccgcctctcttgaagagcgcaaagaccttcaaaaagcggcggaaagaaaagcgctctacaccgacgttgactttaacgggcatgttaataatgtccgttatatccaatggatagaggatactcttgatcctcaacttttagaaaaagccgataaaatccgcattgatattaattacatgaatgagattatgcttggagaaaacgcggaacttttatccgcgcctattgccggtgaaaataatgcctttgcttttgaagggcggaaaaaagaaagcggacaaacggcttttagggctgaattgcggctgtggtaa

SEQ ID NO: 55844 - protein, 135 aa, Unknown
  Obtained from environmental sample
  misc_feature (1)..(135): Xaa is any amino acid
MEKRRPLRPQSVMENIPQNEGINALAPEDNGTASLEERKDLQKAAERKALYTDVDFNGHVNNVRYIQWIEDTLDPQLLEKADKIRIDINYMNEIMLGENAELLSAPIAGENNAFAFEGRKKESGQTAFRAELRLW

SEQ ID NO: 55845 - DNA, 651 bp, Unknown
  Obtained from environmental sample
  misc_feature (1)..(651): n is a, c, g, or t
ttgaaaataaaaacgcccggatcgcccgtaatttgcgaggattttgtcatttttaccgccgattcaagccttcgcagggtaggagtagcgtttttccacgagaattttgccaatacttactggtttaagaagattgtcgtcccaaatgactttgacgccccaattccgcccggaaagaaagttcccgacccttacaaggattcaggcgttcaattttatatatataaagttccgcagcaggtaaaagagcttgagtacagaatcgtaattaacggactgtggacgacagacccaagcaattcccaaatcaggagagaccctgtttccggtttaaatttgtcgatattgcgcatgcccgataaaccggtaaaaccgaacccgtttgacagtcttcctgaaggagtaacctttacttttaacggagcgcccggagagaccataacagtagcgggcaattttaacagttgggacccgtttatgtacgaaatgaaggagaccgctaaaggcgtttacaccctaacgctctcattggctcccggcacataccaatatgtgtttttctgcaaaggtcagcgtattgtagattcattgaatccgcgaagaacttacgcccgtgacggaaaagccgcatcgatcattgatgttccgtaa

SEQ ID NO: 55846 - protein, 216 aa, Unknown
  Obtained from environmental sample
  misc_feature (1)..(216): Xaa is any amino acid
MKIKTPGSPVICEDFVIFTADSSLRRVGVAFFHENFANTYWFKKIVVPNDFDAPIPPGKKVPDPYKDSGVQFYIYKVPQQVKELEYRIVINGLWTTDPSNSQIRRDPVSGLNLSILRMPDKPVKPNPFDSLPEGVTFTFNGAPGETITVAGNFNSWDPFMYEMKETAKGVYTLTLSLAPGTYQYVFFCKGQRIVDSLNPRRTYARDGKAASIIDVP

SEQ ID NO: 55847 - DNA, 381 bp, Unknown
  Obtained from environmental sample
  misc_feature (1)..(381): n is a, c, g, or t
ttggtgcgcggcgatctcggcagcggcaaaaccacgcttgcgcgtttctggtggaggcattgccggggggggacggggcggaaatttcaagcccccagctttacgctgtgcaatatgtatcccacggagcctccggtcttgcattgcgatctgtatcgcgtgggcggcgccgtgccggatgaactcggcgaaacccttgatgcgggagatatggcggtgctcgtggaatgggcggagcatctccccgttgagcagcgtccgcaagattttctggacatttctcttctggcgtgtgatggctgtcgtatcgtgcgtattgagatacatggccgcaacagcgcacgggccgaggtgcttttacgggccgtgcaatccatgtga

SEQ ID NO: 55848 - protein, 126 aa, Unknown
  Obtained from environmental sample
  DOMAIN (1)...(104): Uncharacterised P-loop hydrolase UPF0079
  misc_feature (1)..(126): Xaa is any amino acid
MVRGDLGSGKTTLARFWWRHCRGGTGRKFQAPSFTLCNMYPTEPPVLHCDLYRVGGAVPDELGETLDAGDMAVLVEWAEHLPVEQRPQDFLDISLLACDGCRIVRIEIHGRNSARAEVLLRAVQSM

SEQ ID NO: 55849 - DNA, 324 bp, Unknown
  Obtained from environmental sample
  misc_feature (1)..(324): n is a, c, g, or t
atgcttttaggatacagagataccgaaagggggcatatattggaaaacatagtatttttggagcttttgcggcgtggttacaaggttcatatagggaaatttttggattttgagattgattttgtggcagaaactccaaaagaaagaatttatattcaagtttgcgaaagtttagttgacaaaaacgtttttgagcgagagattgctctgctaaaacatataagagacaatcacgaaaaaataatactctcccaagataagaatttcattgcttcttatgatgggattaaaattgtgaatgtgattgattttttgctggggtag

SEQ ID NO: 55850 - protein, 107 aa, Unknown
  Obtained from environmental sample
  misc_feature (1)..(107): Xaa is any amino acid
MLLGYRDTERGHILENIVFLELLRRGYKVHIGKFLDFEIDFVAETPKERIYIQVCESLVDKNVFEREIALLKHIRDNHEKIILSQDKNFIASYDGIKIVNVIDFLLG

SEQ ID NO: 55851 - DNA, 900 bp, Unknown
  Obtained from environmental sample
  misc_feature (1)..(900): n is a, c, g, or t
atggatgtaaaggttgccaacaaagaatacgatggcaccgacattgctagaattactgaaattacagtctggggagtaattgccggcgatgcagtaaccgttgtcgatggcagtgccaagtttagcgatgaggaagtcggaaacaacaagccagtgacattcagcggattttccctcggcggcacggatgcaggcaactacacactctcagcgcaaccagcaagtgtaaccgcaaacatcaccgcccaatcaactccgcctccaactgtggtagataaatgcgggactagcacaataaactatgaaaagcaattctgttggaatgatatagtttattcgaaatgcaacggttcagattatgaccctgaaatgaataaatgccaaagcggtgttcttcagtacaaatgcgggaaaagcagctggtatgacgaggaaaagcaattctgctttgaagacaaagtttattcgaaatgcaacggttcagattatgaccctgaaatgaataaatgccaaaacggtgttcttcagtacaaatgcgggagaaacagctggtataacgaggaaaagcaattctgctttgaggacatagtttattccttatgcggcggcagttcgtatgaccccgtttatgaaatatgccaaagcggagaagtaattttcaatacaactcctattcttccacaaagtgcgcttggcaacattagcgtacaagtgataaaaaatgacattatgctttcaaacctgccccagggcgcaaaagttgaggtgtacaacctccaaggcaaactcgtatttgcatcagtaaatcggggttcagacattttgagaatagaagttcagacaaaaggaatgtatattgtgaaggcaggtagccaaataaagcgaatagctgttaggtag

SEQ ID NO: 55852 - protein, 299 aa, Unknown
  Obtained from environmental sample
  misc_feature (1)..(299): Xaa is any amino acid
MDVKVANKEYDGTDIARITEITVWGVIAGDAVTVVDGSAKFSDEEVGNNKPVTFSGFSLGGTDAGNYTLSAQPASVTANITAQSTPPPTVVDKCGTSTINYEKQFCWNDIVYSKCNGSDYDPEMNKCQSGVLQYKCGKSSWYDEEKQFCFEDKVYSKCNGSDYDPEMNKCQNGVLQYKCGRNSWYNEEKQFCFEDIVYSLCGGSSYDPVYEICQSGEVIFNTTPILPQSALGNISVQVIKNDIMLSNLPQGAKVEVYNLQGKLVFASVNRGSDILRIEVQTKGMYIVKAGSQIKRIAVR

SEQ ID NO: 55853 - DNA, 1119 bp, Unknown
  Obtained from environmental sample
  misc_feature (1)..(1119): n is a, c, g, or t
atgaacgcttttttttggaggttactcatgcagtatgaggggcaagtacggataccttgcggctgtgccatatccggcattattgacagaacggggcggcgtatgagcggtgaggcgattatcaaatcgatcgccgttatgcatgaccgctcgaatggtctgggcggcggatttgccgcatacggaatctaccctgaatataaggactattacgccttgcatttattttacgattccacgtccgcaaaaaaagagtgcgaggaatttcttgagaagcattttgatattatcaacctttcaaaaatcccaaccagaaaaataaaagaaattaccgatgagcctctaatatggcggtactttgtaacttcgctgccgacaaaactcgcagatagtcagcttgacgagtatgaatttaccgccaaatgcgtgttccgcgtaaacacaaaaatcgatggcgcttatgtcttctccagcggaaaaaatatgggcgtgtttaaagctgtcggtttccccgaagatgtcgggcgtttttacaagctggaagaatatgagggctggtgctttacgtcgcacggacgttacccgacaaatactcccggctggtggggcggcgctcaccccttcgctctccttgattattcagttgtgcataacggcgaaatatcttcctacgataccaaccgcagagctatcgaaatgtacggctacaaatgtacgctgcaaaccgataccgaagttattacctacattattgattatctgcacagaaaacaaaaactttcttttgatgaaatcgcctcggtaatcgccgcttcattttggcagaccattgaaaaacagccggcgaaagagcgcgagattcatgagtatttgcgcgtaatgttcagcgctcagcttataacgggtccgttctctatccttgtgggctttgacggcggattgatggcgttaaacgacagacttaaactgcgaagcatggtcgtcggtgaaaaggacgatattacctacattgccagcgaagaagcggctatccgcatcatcgaaccgaaccttgataccgtgtgggctcccagaggcggtcagccggtaatcgtcaacataaacagaggtaaagcataa

SEQ ID NO: 55854 - protein, 372 aa, Unknown
  Obtained from environmental sample
  DOMAIN (142)...(341): Glutamine amidotransferases class-II
  misc_feature (1)..(372): Xaa is any amino acid
MNAFFWRLLMQYEGQVRIPCGCAISGIIDRTGRRMSGEAIIKSIAVMHDRSNGLGGGFAAYGIYPEYKDYYALHLFYDSTSAKKECEEFLEKHFDIINLSKIPTRKIKEITDEPLIWRYFVTSLPTKLADSQLDEYEFTAKCVFRVNTKIDGAYVFSSGKNMGVFKAVGFPEDVGRFYKLEEYEGWCFTSHGRYPTNTPGWWGGAHPFALLDYSVVHNGEISSYDTNRRAIEMYGYKCTLQTDTEVITYIIDYLHRKQKLSFDEIASVIAASFWQTIEKQPAKEREIHEYLRVMFSAQLITGPFSILVGFDGGLMALNDRLKLRSMVVGEKDDITYIASEEAAIRIIEPNLDTVWAPRGGQPVIVNINRGKA

SEQ ID NO: 55855 - DNA, 1560 bp, Unknown
  Obtained from environmental sample
  misc_feature (1)..(1560): n is a, c, g, or t
atggacggacacacgacaactgtaggcagggacggctctgatttaacagcggctgtttttgccgccgccgccggagtaaaaaaacttgaaatttggactgatgttgacggtatccttacagccgatcctgatcaggtaaaaaacgctttcagaatagatgaaatatcctatacagaggcgcttgaaatttcccactttggcgcaagagtaatatttccgtcttcgatcaaacctgctttggaaagaggcatttccataataatacgtaatacttttaatcctgattgtccgggaacaagaataaccaaaaatgcgccggaagggaaatatcctgtaaggggaattagttcaataaacaacgctgctcttgtaagcatacaggggtcgggcatggctggcgttgccggtttttcagcccgcgttttcggcgcgcttgcgcgcaagaagatcaacgttatgctgattacgcaaagttccagcgaatattcaatctgttttgcaatactgcccgaagacgcgcagccggcggaatcggtattaaaggaagaatttgcaaatgagattcgactcggctttatagagaatccggttgtagaaaaagacctttcgattattgcggcggtaggttccgcaatgaagagcacttccggcatttcaggcagggtttttcacgctcttggccgcaatggggtaaacatagttgctattgcgcaggggtctacggaaacaaatatttcggcagttgtgtcaaagaatgacgaggcgaaggcgttaaacgcaattcatgacgctttcttctttcctcaaacgcgctctgtaaacctttttcttgtcggcacaggaaacatcggaggaaccttgctggatcaaattgcggaaacaaaagaaaaacttgacaggaacatgataaaaataaatcttatcggaactgctaattacgacagaatgatcttttcgcaggaagggcttgatcccaaaaaagcaaaaagtctggtaaatgaaggaggaaagggaaccgttccctttgtcatttctgattttatcgaaaagatgatttcgtataatctccccaatacctgtttttgcgattgtacggcaagcgatgatattgcggcatcctacggtaagattctttcaaattcaatacctgttgttacgccgaataaaaaagcgaattccggcaaacttgactattataagaaactaatttcgtattcgagggaaagaggcatcccgtatttatatgaaacaacggtaggggcaggacttccggtaatttcgacaatacgcgatctttatctttcaggcgataaaattgtcaggatagaagccgttccgtcagggactttaagtttcatttttaacaattttgacggttcaaagccgttctccgctcttgtgcgtgaagcgaaggcaaaaggctacacagaaccggatccaagagacgacctgaacgctatggatgcggcacgcaaggccttgatcctcgcaagggagatcgggctttcccttgaattttccgatgtaaaaattgagcctatacttccgccggcctgctaa

SEQ ID NO: 55856 - protein, 519 aa, Unknown
  Obtained from environmental sample
  DOMAIN (279)...(416): Homoserine dehydrogenase, NAD binding domain
  misc_feature (1)..(519): Xaa is any amino acid
MDGHTTTVGRDGSDLTAAVFAAAAGVKKLEIWTDVDGILTADPDQVKNAFRIDEISYTEALEISHFGARVIFPSSIKPALERGISIIIRNTFNPDCPGTRITKNAPEGKYPVRGISSINNAALVSIQGSGMAGVAGFSARVFGALARKKINVMLITQSSSEYSICFAILPEDAQPAESVLKEEFANEIRLGFIENPVVEKDLSIIAAVGSAMKSTSGISGRVFHALGRNGVNIVAIAQGSTETNISAVVSKNDEAKALNAIHDAFFFPQTRSVNLFLVGTGNIGGTLLDQIAETKEKLDRNMIKINLIGTANYDRMIFSQEGLDPKKAKSLVNEGGKGTVPFVISDFIEKMISYNLPNTCFCDCTASDDIAASYGKILSNSIPVVTPNKKANSGKLDYYKKLISYSRERGIPYLYETTVGAGLPVISTIRDLYLSGDKIVRIEAVPSGTLSFIFNNFDGSKPFSALVREAKAKGYTEPDPRDDLNAMDAARKALILAREIGLSLEFSDVKIEPILPPAC

SEQ ID NO: 55857 - DNA, 1404 bp, Unknown
  Obtained from environmental sample
  misc_feature (1)..(1404): n is a, c, g, or t
atggccgagggatcgcagttccgcgcggcggcaaaggcggtagccgatgcggggatcgtgctggaaggagatctgcccatactgatgaatgatgacagctgcgacgtgtgggctcacaaggaaattttcaatctggagctttcagcgggagcgccgcctgatatgtacagccccgaagggcagaactggggtttccccctgcacaactgggatgaacaggagaaagacaatttcgcctggtggaagcaaaggctcgccgttgcgggtaaatattatcaggcctataggatagatcatgtgcttggttttttccgaatatgggcttcatctcacagggattattcctccgcgcttgggcgctatatcccctacacgccaataaccaattccgatttaaaaaaactcggttttgataaaggccgcatacggtgggtttctttaccgcacatacccaccaacgagcttctggacgcaatgcgcgccaaccaaatgaacgaagatgatattgccgcggcaacaaagaaaattttttctaaagcgcttgatcgtgttggcaatgaggaactttggctgttcaagaaaaaaattaaaggcgaaaaagatattgacgacctaggactgcatccatccgcccgatcatacctgatcaatgtatggcgtaaccggcttttccttgagtacgcaaaagggaagtattttccggtttggagttacagagactcccgcgcttaccattcacttgccaacgaggaaaaagaaaacctggaacaattattgcaaaaacgaatggcaagatcggaaaaaatatgggaggcccatgggagaaagctgctctctgtcctggttgagtcttcgtccatgctgccctgtgccgaagatttgggagcggtaccgaactgcgttcccnaggtactgacaaagttgaagattttaggcctgcgggttgtccgctggcacaggcaatgggacaaaccaaaccagccttatatcccgtttgaagattaccccgagctttcggtttgcaccgccgcggtacacgatagttccaccctccgtgaatggtgggaacgggaagcgaaccaacaacagttcgccggctttgtgggcgtcccctcattgccaaaggtatacaacccgggaacggcaaaaacaatccttgcaaaaatcgcgacggcccgttcccgtttccgtgtcttccagattcaggatttgctgcatctttccaacaagtggtactcgcaagaccccgcttcggaacgtatcaatgtgcccggaacctgcaatgaatttaactggacataccgtcttccggcttccgtcagcgaaataataaaagacaaggatgtggtgaaagccgttcaggaactaagcaaggtgaaagcggccaaaaagatcaaagattaa

SEQ ID NO: 55858 - protein, 467 aa, Unknown
  Obtained from environmental sample
  DOMAIN (2)...(457): 4-alpha-glucanotransferase
  misc_feature (1)..(467): Xaa is any amino acid
MAEGSQFRAAAKAVADAGIVLEGDLPILMNDDSCDVWAHKEIFNLELSAGAPPDMYSPEGQNWGFPLHNWDEQEKDNFAWWKQRLAVAGKYYQAYRIDHVLGFFRIWASSHRDYSSALGRYIPYTPITNSDLKKLGFDKGRIRWVSLPHIPTNELLDAMRANQMNEDDIAAATKKIFSKALDRVGNEELWLFKKKIKGEKDIDDLGLHPSARSYLINVWRNRLFLEYAKGKYFPVWSYRDSRAYHSLANEEKENLEQLLQKRMARSEKIWEAHGRKLLSVLVESSSMLPCAEDLGAVPNCVPXVLTKLKILGLRVVRWHRQWDKPNQPYIPFEDYPELSVCTAAVHDSSTLREWWEREANQQQFAGFVGVPSLPKVYNPGTAKTILAKIATARSRFRVFQIQDLLHLSNKWYSQDPASERINVPGTCNEFNWTYRLPASVSEIIKDKDVVKAVQELSKVKAAKKIKD

SEQ ID NO: 55859 - DNA, 585 bp, Unknown
  Obtained from environmental sample
  misc_feature (1)..(585): n is a, c, g, or t
atggaggttggttcttttatagggcttgccgccgtcaccggaggggatctccatatagaaggaacccgcccccaggatctgcgcccggcaaaaatcgcctttggcaagctgggcatctcctgggcgcatgagggaacaaccatccatgtcccccagaaacagccactggaggttaattgcgacttagggggcatgattcccaagatagacgacgcgccctggcccggcttccctcccgaccttaccagcattatcaccgttgtagccacgcaggtaaaaggaacggtgttaatccacgaaaaaatgtttgaatcgcggatgttctttgtggacaaacttatcggcatgggggcgcggatagtgttatgcgatccccaccgggctgtggtttccggtcccgcgaaattgcacggctccgagcttattagcccggatgtccgtgccggcatggctatgctcatagccgccctctgcgccgagggcaggagcgttatacgcaacgtctaccagattgagcgcggctacgagcgcctggtagaaaggctttccggcctgggagctttgataacaaaaagcagttcctag

SEQ ID NO: 55860 - protein, 194 aa, Unknown
  Obtained from environmental sample
  misc_feature (1)..(194): Xaa is any amino acid
MEVGSFIGLAAVTGGDLHIEGTRPQDLRPAKIAFGKLGISWAHEGTTIHVPQKQPLEVNCDLGGMIPKIDDAPWPGFPPDLTSIITVVATQVKGTVLIHEKMFESRMFFVDKLIGMGARIVLCDPHRAVVSGPAKLHGSELISPDVRAGMAMLIAALCAEGRSVIRNVYQIERGYERLVERLSGLGALITKSSS

SEQ ID NO: 55861 - DNA, 1863 bp, Unknown
  Obtained from environmental sample
  misc_feature (1)..(1863): n is a, c, g, or t
atgctgggtgtgcgctttgaagaagcgctcctgaaaccagaaacccctcatgtaagccttaacgcgggaatctcgagtcacgcggcatcttcgcggttttatgtttttatgaccacggcgaaaacgggcagcgcagaagcaagccttgaggatatattgaaaataaaagaaacaatgatccgttacggctttaccgattcggaaatagcgacagcggcggagatgctggtttcggacttgcaagaactggttcaggaaaaagacaaacagcaatcgcagaaatacattaactcgctgaccgattattaccttaaaggcggaaattacgcggatgttgaatgggagctggacgcggtctcgcgaatgctgccccatatcaaggcaaaagacattaacgcggctattaaagattattttgcgtcagacgacattcaggtgtttgtctttgcgccggattcggaacaggacagcctgccggatgaggcgcgaatcaaacagatgatagcggaaagcaaaaaaatgacaattgccgcgcccaagtccaaaaccgtcgaaggcgggcttttatcgtctgtgcctgaacgcggctctgtggtttctgaatccattgatgccgaaacagacgcggtcatatgggaattgggcaacgggtcaagagtcattcttaaatcgaccaaaaacaaaaacgacgagattgttatgcacgcaatggccctcggcggaacaagcagtgttcccctggaagacgacgtatccgcgagcctcgccatagaaatgactcaggtttccggccttggcccctggccacatcccgagatgacaaggaaactcgccggaaaacaagtctccctttcgcggtatgtttacagctattaccggggtttcaggggttcttccaattcaggcgatctaaaaaccttttttgaaatgctttacctcagcttcacagaccagcgcattgacgacgaggcggtacaggccatgatggatcagtacaagacctcactcgctctcagaagggaagaccctcacgcggttttctccgatgagattaccaggactaactatagcggacacccgcattttatgccccttacgttggaggatcttcccaaagtaaatactgataccgcccttgcctttatccgcagaggcatgaaccccgccgattatacttttatattcacgggaaacctggatttaaaaacaatgcggaaatataccgaaagttaccttgcgtcgattcccaggggggagacctggaatgcctggacggatctttctgttacgcgcccgggaaaagttgaaaatatcgtttacaagggtaaagaagagcaaagcacggtttacatggtatggttttccaaagcccagtatagcgacgaactcggcgcgacatgccaggtgttaaacgaatatcttgatataaaacttgatgatgaaatccgtgaaaaactcggaggagtatattcaattacatcaggcgtgtccgtctcaccttttcccggggacgagctttccatgcaggtatattttagctgcgatccaaagcgggtaaagaaactgcaaaacgccgttatcgcgttattgaatcaggcggcgagcggcgttatagaccgcgacacttttacgaaggccgtggaagcccccaagaaagagtgggaggtctcgattcagaacaactcctatatcgcccagagctacgccaattcatcggtactgctgaaccttccgttgtcgcggctgaacaggcggccaaaattgtacgatgccgtaacccagactgacattcaacggctgtgcggccagcttttagggggaaacggccccgcgctggttgtgttaatgcctgaaaacaggtag

SEQ ID NO: 55862 - protein, 620 aa, Unknown
  Obtained from environmental sample
  DOMAIN (372)...(550): Peptidase M16 inactive domain
  misc_feature (1)..(620): Xaa is any amino acid
MLGVRFEEALLKPETPHVSLNAGISSHAASSRFYVFMTTAKTGSAEASLEDILKIKETMIRYGFTDSEIATAAEMLVSDLQELVQEKDKQQSQKYINSLTDYYLKGGNYADVEWELDAVSRMLPHIKAKDINAAIKDYFASDDIQVFVFAPDSEQDSLPDEARIKQMIAESKKMTIAAPKSKTVEGGLLSSVPERGSVVSESIDAETDAVIWELGNGSRVILKSTKNKNDEIVMHAMALGGTSSVPLEDDVSASLAIEMTQVSGLGPWPHPEMTRKLAGKQVSLSRYVYSYYRGFRGSSNSGDLKTFFEMLYLSFTDQRIDDEAVQAMMDQYKTSLALRREDPHAVFSDEITRTNYSGHPHFMPLTLEDLPKVNTDTALAFIRRGMNPADYTFIFTGNLDLKTMRKYTESYLASIPRGETWNAWTDLSVTRPGKVENIVYKGKEEQSTVYMVWFSKAQYSDELGATCQVLNEYLDIKLDDEIREKLGGVYSITSGVSVSPFPGDELSMQVYFSCDPKRVKKLQNAVIALLNQAASGVIDRDTFTKAVEAPKKEWEVSIQNNSYIAQSYANSSVLLNLPLSRLNRRPKLYDAVTQTDIQRLCGQLLGGNGPALVVLMPENR

SEQ ID NO: 55863 - DNA, 651 bp, Unknown
  Obtained from environmental sample
  misc_feature (1)..(651): n is a, c, g, or t
atgatcagatcggccgagggtaatatatgttttcagtgtggtgaatattgtgcggataaagaagttgatatagaaaataaaactgcgttatgtcctttatgtggatataaaaacaaatttttatcaatacctttatttattgttggtggtgcaagcggaacaggaaaatcaaccgtattaaaggaattaacaggaaatatggataatgtcattttgcttgagacagatataatttggcaagaagaatataataagcctgaaaataattacaggaaattctttgaaacatggttaagaatagcgaaaaatatatcacaatcgggcagacccgtagtattatttggtgctggtttaggagttcctgaaaatatagagccttgtacagaaagaagatatttttctagtataaattatttgaatatatattgttcagatgatgaattagaaaaacgattactcaaacgtcctcaatggagaaattgtcaaaataaagaatttattgataaacaaaaagaatttaataattgggttaaaaattatggaaaagaaaaaaaacctgaaattgatttaatagatacgacaaatttactacttgaaaaaactgttgaaaatgtcagaatatggattaataataagttgataactaaatga

SEQ ID NO: 55864 - protein, 216 aa, Unknown
  Obtained from environmental sample
  misc_feature (1)..(216): Xaa is any amino acid
MIRSAEGNICFQCGEYCADKEVDIENKTALCPLCGYKNKFLSIPLFIVGGASGTGKSTVLKELTGNMDNVILLETDIIWQEEYNKPENNYRKFFETWLRIAKNISQSGRPVVLFGAGLGVPENIEPCTERRYFSSINYLNIYCSDDELEKRLLKRPQWRNCQNKEFIDKQKEFNNWVKNYGKEKKPEIDLIDTTNLLLEKTVENVRIWINNKLITK

SEQ ID NO: 55865 - DNA, 723 bp, Unknown
  Obtained from environmental sample
  misc_feature (1)..(723): n is a, c, g, or t
atgggcggggtgttgatgctgtccagggcgacggaactgcaaactgagataaaagggtggcttgaagcgtcgggctttgaagacgttgcggttacgggcaaggaaaatgaggagcttaatacggctatctgcaacaagaagccccgtctggtcattattgacagttggttttatcaggacgggacgccttgcagggtcggcgatctggtgaagctgtttcctaaactgaacatagctgtcgtttcgtttcatgatttctctgcgagacgagccccgtggttcatctgggagggggcgaagtcataccttagcttgtgggaagggtatggggaatttcagcggggcttgcggattgtgagggagggcggtcagtatatttcgccgaaagtccagcgcctgattgaccattgcgatgcatggccggataccaaaaacaaaatgaccaaacgccagaaggaatgccttgtcatgctgtgctgcgggattatccctctccaaattggggaaatactgaatatatcattaagcacggtttataaccatttgaacagcctatacagagcctttcatgtttgcagccgtgaagagatggttgcgctagcttgggagatggaacttgtaacctccaaagatattaggctttacaacaagaagaaagagcgcttgccgcttcctgaatgggcggcggtgaaaaagaaatgcgatagtttctattttgattga

SEQ ID NO: 55866 - protein, 240 aa, Unknown
  Obtained from environmental sample
  DOMAIN (144)...(201): Bacterial regulatory proteins, luxR family
  misc_feature (1)..(240): Xaa is any amino acid
MGGVLMLSRATELQTEIKGWLEASGFEDVAVTGKENEELNTAICNKKPRLVIIDSWFYQDGTPCRVGDLVKLFPKLNIAVVSFHDFSARRAPWFIWEGAKSYLSLWEGYGEFQRGLRIVREGGQYISPKVQRLIDHCDAWPDTKNKMTKRQKECLVMLCCGIIPLQIGEILNISLSTVYNHLNSLYRAFHVCSREEMVALAWEMELVTSKDIRLYNKKKERLPLPEWAAVKKKCDSFYFD

SEQ ID NO: 55867 - DNA, 492 bp, Unknown
  Obtained from environmental sample
  misc_feature (1)..(492): n is a, c, g, or t
ttggccgagatggagagccgcttttacggttgtaccagtcttgccagcgtcaccataccaagcggtgttaccagcattggaaattccgcttttaaccgatgcacaaaccttacaagcataaatatacccaacagcgtaacaagtatcggaattgccgcttttcaatcttgcgccaaacttactgaggtaaccattcccaacaacgttaccgaaataaaaggttccgcttttaatcgctgcacaagtcttacaagtgtaaccatacccgccaatgttacaagtattggtgattgggctttcggtaataatacaaaccttgtcagcgtaacatttcagggaactatacctgcgagtaattttaacagtatgggttcgttcttcggcgatttacgggataaattttacgcgacaaatgcaactaacggcacacccggaacatataccacaactgcgccggtgaacgctagttctgtgtgggttttccaaaggtaa

SEQ ID NO: 55868 - protein, 163 aa, Unknown
  Obtained from environmental sample
  misc_feature (1)..(163): Xaa is any amino acid
MAEMESRFYGCTSLASVTIPSGVTSIGNSAFNRCTNLTSINIPNSVTSIGIAAFQSCAKLTEVTIPNNVTEIKGSAFNRCTSLTSVTIPANVTSIGDWAFGNNTNLVSVTFQGTIPASNFNSMGSFFGDLRDKFYATNATNGTPGTYTTTAPVNASSVWVFQR

SEQ ID NO: 55869 - DNA, 1038 bp, Unknown
  Obtained from environmental sample
  misc_feature (1)..(1038): n is a, c, g, or t
atggcgcaaattccatataaaattcatttaacagaagatgaaacgccgaaacaatggttgaatttacgggcgtttatgaaaaacaaaccggcgccgcttttacatccccagacgcttaaacctgctaaggcagaggatttacagccggtattctgtgatgaatgtataaaacaggaattggatataacttcaaaatttatagatattcctaaaggtatactcgaattttacaagggatatcgtccgtctgcgttggttcgcgcgtattttttggaaaaaacactcgatacgccggcggaaatttattacaaatacgaaggaacaaacacaagtggttcgcataaattgaattctgcaattcctcaagcattttacgcaaaagagcaaggtttgacttcgctgacaaccgaaacgggcgcagggcaatggggttcggctctgagtatggcctgtgcgttttacgggcttgatttgatcgtttatatggtaaaagtttcaacacagcaaaagccttatcgaaaaaaccttatggaaacatacggagctaaagttattccctctccatcgaatactacagaaacaggaagaaaaatacttgaaaaaaatcccgacacaggaggttctttgggttgtgctgtttcggaagcagtcgaaactgctgtcaaaagtgacaaatgccgttatgttttaggaagcgtgcttgatcatgtgcttttgcaccaatcaataattgggcttgaaacgaaactcgctcttgacaaatatgacatagttccagatatggtaatcggctgtgctggcggaggctcaaatttgggcgggcttatcgctccttttatggttgataaaattttgggtaagaccaatacacattttgttgcggttgagcctgcaagttgtccatcgcttacaagaggaaaattcgcgtatgatttcggggatacagcgcaaacaacaccgcttattaagatgtacactttaggaagcggctatattccgtcgtcaaccacgcaggcggtttgcgttatcacggaatga

SEQ ID NO: 55870 - protein, 345 aa, Unknown
  Obtained from environmental sample
  DOMAIN (76)...(345): Pyridoxal-phosphate dependent enzyme
  misc_feature (1)..(345): Xaa is any amino acid
MAQIPYKIHLTEDETPKQWLNLRAFMKNKPAPLLHPQTLKPAKAEDLQPVFCDECIKQELDITSKFIDIPKGILEFYKGYRPSALVRAYFLEKTLDTPAEIYYKYEGTNTSGSHKLNSAIPQAFYAKEQGLTSLTTETGAGQWGSALSMACAFYGLDLIVYMVKVSTQQKPYRKNLMETYGAKVIPSPSNTTETGRKILEKNPDTGGSLGCAVSEAVETAVKSDKCRYVLGSVLDHVLLHQSIIGLETKLALDKYDIVPDMVIGCAGGGSNLGGLIAPFMVDKILGKTNTHFVAVEPASCPSLTRGKFAYDFGDTAQTTPLIKMYTLGSGYIPSSTTQAVCVITE

SEQ ID NO: 55871 - DNA, 357 bp, Unknown
  Obtained from environmental sample
  misc_feature (1)..(357): n is a, c, g, or t
ttgcgttatcacggaatgaattctaccttgtcgcagttgtatgctgatggacttatggaagcgtgttcaatagagcagacgaaagtatttgatgcggcggtacttttcgccaaaaccgaaggaattttacccgcgcccgaatcgtcgcacgcaatccgcgttgcaatagacgaagccataaaggcgaaagaaacgggacaaaagaaaaagattttattcggactcacgggaacaggatattttgatatgactgcttatgcacaatataacgcaaaaacaatgagcgaccatattccaagcgatgaagatttggaaaaaggcttcaattctattccgaatatcactgttaatgtataa

SEQ ID NO: 55872 - protein, 118 aa, Unknown
  Obtained from environmental sample
  misc_feature (1)..(118): Xaa is any amino acid
MRYHGMNSTLSQLYADGLMEACSIEQTKVFDAAVLFAKTEGILPAPESSHAIRVAIDEAIKAKETGQKKKILFGLTGTGYFDMTAYAQYNAKTMSDHIPSDEDLEKGFNSIPNITVNV

SEQ ID NO: 55873 - DNA, 570 bp, Unknown
  Obtained from environmental sample
  misc_feature (1)..(570): n is a, c, g, or t
atgaaagtgacagaccattgtacgctttacgccggctggcaattaaaaaatataacggttacattaaatgccgcgggcggcagcgtgccaagcccctcaagtaaaattataacttttggcaccgcttatggcgcgttgccatatatttccagagacaaattcacctttgtcggctggtttaattcacgcggggagcaagtaggtaccggtacaatcatgaatgacccgaacaaccacacgctaaccgcgcgatggactgcaattcctcaagcgcccgccgcgccttcgcctccaaaacccgctccgacgcctgcgcctgcgcccgctcctaaacccgcgcctgctccgacatctaactgtaccataaccttccataggaatggcgcgccttgcaacgcggttccgcaagtaaccgccccctgtaacagcagaatatctttgccttcgcctcccacttggccgggccatacttttaccggttggaataccagtggtcacggaaccggttccgcttttacaggaagcgtacccaacgcgccaaccctcgcggtgtatgcgatatggaagtaa

SEQ ID NO: 55874 - protein, 189 aa, Unknown
  Obtained from environmental sample
  misc_feature (1)..(189): Xaa is any amino acid
MKVTDHCTLYAGWQLKNITVTLNAAGGSVPSPSSKIITFGTAYGALPYISRDKFTFVGWFNSRGEQVGTGTIMNDPNNHTLTARWTAIPQAPAAPSPPKPAPTPAPAPAPKPAPAPTSNCTITFHRNGAPCNAVPQVTAPCNSRISLPSPPTWPGHTFTGWNTSGHGTGSAFTGSVPNAPTLAVYAIWK

SEQ ID NO: 55875 - DNA, 1140 bp, Unknown
  Obtained from environmental sample
  misc_feature (1)..(1140): n is a, c, g, or t
gtgtatcctgtatttaacaattcttgttattgtatttggttttacttttacgcaaacatggaccgcaagccttatgactcagcgcgtaatgaaggatatgcgcatagggcttttcagcaagacggtttcgcagtccacggattttctttcccgtcatcccgtgggaaggatagtcacaaggctgacgggcgatgtggagactatggacgagttttttacaaccgtgattgtcgcttttctaaaagatatttcgataatggccggttctgttgttaccatgttcatcctttccccgaagctggcgtctgtggttcttgttaccctgccgcctgttttagttataacgcttataaaccgagtaaaagcgcgggacgcgttcagaaggcaaagaacggcctcctcaaaagtttttcgtatctttcggaacatcttgccggcattcaggttgtccagcttntcaggcaggagaaaaagagcgcaaatgaattccgcgccggcaataacgagcttctggacgcaaacattaaagagatgtacgtcttcgcgacattcaggcctcttgtcgaatggtttgcggtctttaccgtcgcggcggtaattgttttcggctgcaggatggtttcttccgtttccatttcattgggcgtactaatcgcttttatcaatctggtacagatgttttttcagcctgtaacagatattgcggaaaagtacaccatgctccagtcggcgatggcgggcggagagaaggtttttaagttaatggatacggacgaacaaatcccgaatacgggaacgcatgaaataaaaggagaagtaaggggccatatagaatttgaaaatgttcgatttagttacaaaaaaggagaagacgttttaagggggctttcttttgccgttaagcccggagagatgacggcgattgtcggctacacgggagccggtaaaacaaccattgttaacgttcttgcccgtctttgggatatagattcaggggtcatccgccttgacggaatcccggtaataagtatcccgttaaaagacctgcgtcgttctataatgcccgttatgcaggacgtaacgttgttctccggcacgatagaagaaaacataacgcttggtttggatttttctctctga

SEQ ID NO: 55876 - protein, 379 aa, Unknown
  Obtained from environmental sample
  misc_feature (1)..(379): Xaa is any amino acid
MYPVFNNSCYCIWFYFYANMDRKPYDSARNEGYAHRAFQQDGFAVHGFSFPSSRGKDSHKADGRCGDYGRVFYNRDCRFSKRYFDNGRFCCYHVHPFPEAGVCGSCYPAACFSYNAYKPSKSAGRVQKAKNGLLKSFSYLSEHLAGIQVVQLXRQEKKSANEFRAGNNELLDANIKEMYVFATFRPLVEWFAVFTVAAVIVFGCRMVSSVSISLGVLIAFINLVQMFFQPVTDIAEKYTMLQSAMAGGEKVFKLMDTDEQIPNTGTHEIKGEVRGHIEFENVRFSYKKGEDVLRGLSFAVKPGEMTAIVGYTGAGKTTIVNVLARLWDIDSGVIRLDGIPVISIPLKDLRRSIMPVMQDVTLFSGTIEENITLGLDFSL

SEQ ID NO: 55877 - DNA, 912 bp, Unknown
  Obtained from environmental sample
  misc_feature (1)..(912): n is a, c, g, or t
ttgaatacggaacccccgaacagcttacctctcttggcggcttttactctcgcatggcggctttccaaaaactggaaccggcggaggcgcagaatgtctgacagctattttgacaccgacgacgtaaccagagaatacgacagccgtattgtcaggcgcattctcgcgtacctaaaaccttacaaactccttgttgtccttaccattgccgcccttgccctttccactcttggagagctttatatccccgttttacaacagaagataattgataatgcgcttttgggaaaaaacgtaccttatcttattaaagggtgtatcctgtatttaacaattcttgttattgtatttggttttacttttacgcaaacatggaccgcaagccttatgactcagcgcgtaatgaaggatatgcgcatagggcttttcagcaagacggtttcgcagtccacggattttctttcccgtcatcccgtgggaaggatagtcacaaggctgacgggcgatgtggagactatggacgagttttttacaaccgtgattgtcgcttttctaaaagatatttcgataatggccggttctgttgttaccatgttcatcctttccccgaagctggcgtctgtggttcttgttaccctgccgcctgttttagttataacgcttataaaccgagtaaaagcgcgggacgcgttcagaaggcaaagaacggcctcctcaaaagtttttcgtatctttcggaacatcttgccggcattcaggttgtccagcttntcaggcaggagaaaaagagcgcaaatgaattccgcgccggcaataacgagcttctggacgcaaacattaaagagatgtacgtcttcgcgacattcaggcctcttgtcgaatggtttgcggtctttaccgtcgcggcggtaa

SEQ ID NO: 55878 - protein, 303 aa, Unknown
  Obtained from environmental sample
  DOMAIN (65)...(299): ABC transporter transmembrane region
  misc_feature (1)..(303): Xaa is any amino acid
MNTEPPNSLPLLAAFTLAWRLSKNWNRRRRRMSDSYFDTDDVTREYDSRIVRRILAYLKPYKLLVVLTIAALALSTLGELYIPVLQQKIIDNALLGKNVPYLIKGCILYLTILVIVFGFTFTQTWTASLMTQRVMKDMRIGLFSKTVSQSTDFLSRHPVGRIVTRLTGDVETMDEFFTTVIVAFLKDISIMAGSVVTMFILSPKLASVVLVTLPPVLVITLINRVKARDAFRRQRTASSKVFRIFRNILPAFRLSSXSGRRKRAQMNSAPAITSFWTQTLKRCTSSRHSGLLSNGLRSLPSRR

SEQ ID NO: 55879 - DNA, 1074 bp, Unknown
  Obtained from environmental sample
  misc_feature (1)..(1074): n is a, c, g, or t
atggagcttgtgcgcctttttggttttttctttccttttattcagtttctttccggttttacggttcttatcatgctcgcgataggcggtatgcgcgttatcaacggtttaatgacgcccgggagccttgtgtctatgttcagttatctgaatatgctgatctggccgctaatgggggcgggattcatggtaaacatgatacagcgcggggcggtatcgttgggcagaataaacgaaatttttaatacgccgccttcgattaaagaaagcgaaaacccgtccgccgcgcggccgagcgaaacgctatttgcgaacgttccagcgcttgaattgtctaatttgacattttcgtataacgatacaaatacggttctggacggcataaccttaaaagttaaccgcggcgaatggcttggaataatgggaaggacaggttcgggaaagaccacgctgataaaaacatttacccgcatgatagatccgccgccgggaagcgtgcgtgttttcggcgttgacgcgcgtaactggccgcttgaggaactgcggaaactttttgccgtaagccctcaggacagctaccttttttccgactcaatagcgaataacatctcttacggttacgacggggctgatacacagaaaaacgccgcggtggataaagcggttgtttttgcctctttggacaaggatttggcgatttttcaacacgggaaagacactttggtaggggagcgcggtttgacgctttcaggcgggcaaaaacaacgcgcggcaatagcgagagccgttatcatggacagtgaatttttaatactggacgactctctttgtgcggtagacaacgagaccgaaagaaaaatactggaagcgcttagaaatgaaagaaaagggcgcacgacgataattatctcccaccgtgtttccacgcttaaatacgcggacaagacgcttgttcttgacaaggggaagatgattgaatacggaacccccgaacagcttacctctcttggcggcttttactctcgcatggcggctttccaaaaactggaaccggcggaggcgcagaatgtctga

SEQ ID NO: 55880 - protein, 357 aa, Unknown
  Obtained from environmental sample
  DOMAIN (135)...(322): ABC transporter
  misc_feature (1)..(357): Xaa is any amino acid
MELVRLFGFFFPFIQFLSGFTVLIMLAIGGMRVINGLMTPGSLVSMFSYLNMLIWPLMGAGFMVNMIQRGAVSLGRINEIFNTPPSIKESENPSAARPSETLFANVPALELSNLTFSYNDTNTVLDGITLKVNRGEWLGIMGRTGSGKTTLIKTFTRMIDPPPGSVRVFGVDARNWPLEELRKLFAVSPQDSYLFSDSIANNISYGYDGADTQKNAAVDKAVVFASLDKDLAIFQHGKDTLVGERGLTLSGGQKQRAAIARAVIMDSEFLILDDSLCAVDNETERKILEALRNERKGRTTIIISHRVSTLKYADKTLVLDKGKMIEYGTPEQLTSLGGFYSRMAAFQKLEPAEAQNV

SEQ ID NO: 55881 - DNA, 465 bp, Unknown
  Obtained from environmental sample
  misc_feature (1)..(465): n is a, c, g, or t
atgatttaccgtgaggcggtaatcaaaaaaatgaaacgcaaatccgcgaaaaagaacctgtttattaccgcgcccggcggttacggcaaaacgaccgccgcgcaacaatggctctcttttgtccgtggggccgtggcgcggttaaggatgggaaatgaggacaataatacgggcgtgttttacaagaagctgatctgctcgctgttgaagctcgtcaagaaagaaaaatccgcgaattccgtcgaattcatgctggatacttttttggaagcgctaaaacagatgcctgttaaaaatacgcgctgttacctgctcattgacgatctgcacataattaaaaacaatgacattctgaacagcctgcccctcattgcagggcgtttgccttcttatgtctgcctgtgtctgatcagccgatccatgcccccacagccattactggatacaggcctttttgaacgatga

SEQ ID NO: 55882 - protein, 154 aa, Unknown
  Obtained from environmental sample
  misc_feature (1)..(154): Xaa is any amino acid
MIYREAVIKKMKRKSAKKNLFITAPGGYGKTTAAQQWLSFVRGAVARLRMGNEDNNTGVFYKKLICSLLKLVKKEKSANSVEFMLDTFLEALKQMPVKNTRCYLLIDDLHIIKNNDILNSLPLIAGRLPSYVCLCLISRSMPPQPLLDTGLFER

SEQ ID NO: 55883 - DNA, 1968 bp, Unknown
  Obtained from environmental sample
  misc_feature (1)..(1968): n is a, c, g, or t
atgacacaagacgacctcctgttttcacaggaagaagtcgagtggcttggaacggaagaaggccgtgaactgagcggggagcaaatccgtgacttgctggaaacaacgggcggctgggcgatgtacctttcggcactgctgtcaggcgagcaaacgtacaaaacgccgcaaacattggttcaataccttgagacgcgggtatggaacctatgggacgatgaaacaaagaaactgctggttaaacttgccgtccctgttgaaattacgcctgacttgtgcgagcggcttaccgcggaagcggacggtaaaagtattttggagcgtctggtcaaaaaggaaggggtgtttttaacgtccgccggaaataacacatatcatttccatgacatattccgcgattttttgctggaacgcgccgcgttattcgaaaatcaggaaatacgacggctgaacaacgtaaccgccgaatggtattacgagcgcggcgattaccacgcaagcgcgcagtattatatcaggaacaaagatcatgaaggcattacacgctgtttgacggcgacttcccgttaccatgaaggtttcgttatgtcggtagagtccattatgggttttataaaccagtatgtaaaaaacctgcccgctgaattcatcgctgaaaacctcatattaactttaaggagttccatagcggcattttatagcggcgacattaatgagtatatacgttatctggatatgttgtacgaaaaacaggctgaattcgccgcgaaatatcctgcttcattacaaacatttgattttatcaaaggagttgatccccgtataacgtttccggaatacattaaagggctgatacaaacgattcctcaaatgtctaaaaccaccgtgagcgtaaaagcgcacaccgccactgtaactcaaaaccttcctttttttcaccgttccatgcgtgagttttcagagtatcacgaactaaaaacagaggatttggaatcgcttaaaaatactatcggcgtaatgattggcaaagattatgaagttatggaacaggctttaatcgcgggtctttattatgagcgcggacagcttatggacgccgcccgtcatgcccttatcggcaaggaagcctgtttggaaggaatacaccccgaaacacgtttttcagctaacatgattctggcggcagtactctatgcgatgggcgattttcgggatgccgggaatgttatggcggaaacggaaatctttgttggagaaaaagcgcggtttttatatcctaatttcaaagccctgcaaacggaacgtgttatacgattaggcgacatagcagccgcaaaggaatggctggctgtgtacgcgaacagcgcggagcggctgccgttttatcaaatatgcaggcactttacatctctccgttcctatatcgcgcttgaagattatagggcggctgttgattttggcagacgtatacagcaactggcggcagattacaaacgtcctcttgaccggattgaaagcggcatattgacggcaatcgcgttatgggaaaaaggcgataaatacaacgcggctgaggaaatggaacaagccctgcttattgccgcgccttacggatttatacagttgtttattaacgaaggcaaagaaattctgcctctgttgtggatgatccgcaaaaaaacggacatagattcgcagcaggcgcaatttattgatacgcttacgcaaagaatttcggggtttgacggaaagctgagggagcatgaacaagcgccgcatctttccgttatgcgctgtaaaatgcttgagtatctgaacaagggtatgtcttataacgaaattgccgacaaaaccggtattgtacgaggaacggtaaaaaggcatattcttcttctgtataaacagttgggggtaaacagcggcgaggaagctgttataaaagcgaaaatgctgggcttgctggagtga

SEQ ID NO: 55884 - protein, 655 aa, Unknown
  Obtained from environmental sample
  DOMAIN (591)...(648): Bacterial regulatory proteins, luxR family
  misc_feature (1)..(655): Xaa is any amino acid
MTQDDLLFSQEEVEWLGTEEGRELSGEQIRDLLETTGGWAMYLSALLSGEQTYKTPQTLVQYLETRVWNLWDDETKKLLVKLAVPVEITPDLCERLTAEADGKSILERLVKKEGVFLTSAGNNTYHFHDIFRDFLLERAALFENQEIRRLNNVTAEWYYERGDYHASAQYYIRNKDHEGITRCLTATSRYHEGFVMSVESIMGFINQYVKNLPAEFIAENLILTLRSSIAAFYSGDINEYIRYLDMLYEKQAEFAAKYPASLQTFDFIKGVDPRITFPEYIKGLIQTIPQMSKTTVSVKAHTATVTQNLPFFHRSMREFSEYHELKTEDLESLKNTIGVMIGKDYEVMEQALIAGLYYERGQLMDAARHALIGKEACLEGIHPETRFSANMILAAVLYAMGDFRDAGNVMAETEIFVGEKARFLYPNFKALQTERVIRLGDIAAAKEWLAVYANSAERLPFYQICRHFTSLRSYIALEDYRAAVDFGRRIQQLAADYKRPLDRIESGILTAIALWEKGDKYNAAEEMEQALLIAAPYGFIQLFINEGKEILPLLWMIRKKTDIDSQQAQFIDTLTQRISGFDGKLREHEQAPHLSVMRCKMLEYLNKGMSYNEIADKTGIVRGTVKRHILLLYKQLGVNSGEEAVIKAKMLGLLE

SEQ ID NO: 55885 - DNA, 1755 bp, Unknown
  Obtained from environmental sample
  misc_feature (1)..(1755): n is a, c, g, or t
atgaaaggaaggggtaattatctatgcctgcgaaggcttaacgatacattgcgcgaaggtttgctctttgagttcgataaaaaagaaattgacagtattgtagaatggtcgcataacacaaaaacgggggcgaaatcggaactttcatttatgccttccgaaactttatgggcgggcgtatgctctgaatccgatctatgtttggggaatcactgcccgtggagagaacagtgttttatatttgccttgcgcaaagaggcaaataacgcgcacattatcgttgtaaatcatcacctgctctttgccgacttagcggcaaggtatcagggcgcgggttatgaaaacgcggtggttctgccgcccttcaaccgacttgtcatagacgaagcgcacactattgaaaatgcggctacttcattcttttcgcaggagttttcaagaacaggtattttccgacagcttacaaggctctacaatacgcgcaaggcaaacatacacggcttgctggtaagactctgcgctatgctgccttcaagcgaagaccggttagacgatatggctgacgctatccaaaaaatacgcgtatcggttgaaagcttggataattgcgctttagagatatgcggcatagaggggattttcaggctctccccttccgtagatgaatcatttttaaaaaaatctttattcccgaattttaaagatttacgaaaagatatactcggtcttacaaatttgatccgcgatattttggaaaaccttgacgatgaacaaacggctgaccctgttgtctggggaataaaaactattgtaaggcggctggacggcactgccgaagtctgcgatgttttctgcaattacaaaaaacacgaggacaatgttttgtggatggaaaaaatgcgtcttaaaaatacgccttggtctgtctttacaaaaacgccgctggatttagcgcccatacttaaagacagcgtattccttccgaacaaaacggtagtctgcgtatccgctacattggcgattaacgacgactttactttctgggcaagccgctgcggaataggcagtatcaatactcgtcagacgctttcgggctgcttcccctctccgttcccctactcaagcgccgttctccttgcatctcccacagacgctcccctccccgatgaagacgggtatcaggaatttattaacaaatctgtaactaaacttgccgccgccgcgggaggatcggctcttgtgttattcacttcctaccagtcattaacaggcagttacaacgccgcggcaggcgaactaaccccaatgggcatccgctgtctaaagcagggagacgacgaccgcacccgcctattgcagacttttctgtccgatgaaagttcctgcctgttcgccacagactcgttctgggaaggagtggacgctcccggcgacaccttgcggttagtcattatatgccgactgcccttccgcacacccggcgaccccgtccacgaagcccgaagggaagcggtggaaaaacagggcggaaacccctttatggagctttccctgcctcaagctgttatgaagtttaagcagggttttggaagacttatgcgccgaagcgccgacaagggcgttgtcgccgttcttgacgggcgtatccttaaaaaagcctacggcggtttattcagacaggctttaccggagaccaaaacaagtttcagcgaatttaattttattttgcaagacatagaaaactttttctattaa

SEQ ID NO: 55886 - protein, 584 aa, Unknown
  Obtained from environmental sample
  misc_feature (1)..(584): Xaa is any amino acid
MKGRGNYLCLRRLNDTLREGLLFEFDKKEIDSIVEWSHNTKTGAKSELSFMPSETLWAGVCSESDLCLGNHCPWREQCFIFALRKEANNAHIIVVNHHLLFADLAARYQGAGYENAVVLPPFNRLVIDEAHTIENAATSFFSQEFSRTGIFRQLTRLYNTRKANIHGLLVRLCAMLPSSEDRLDDMADAIQKIRVSVESLDNCALEICGIEGIFRLSPSVDESFLKKSLFPNFKDLRKDILGLTNLIRDILENLDDEQTADPVVWGIKTIVRRLDGTAEVCDVFCNYKKHEDNVLWMEKMRLKNTPWSVFTKTPLDLAPILKDSVFLPNKTVVCVSATLAINDDFTFWASRCGIGSINTRQTLSGCFPSPFPYSSAVLLASPTDAPLPDEDGYQEFINKSVTKLAAAAGGSALVLFTSYQSLTGSYNAAAGELTPMGIRCLKQGDDDRTRLLQTFLSDESSCLFATDSFWEGVDAPGDTLRLVIICRLPFRTPGDPVHEARREAVEKQGGNPFMELSLPQAVMKFKQGFGRLMRRSADKGVVAVLDGRILKKAYGGLFRQALPETKTSFSEFNFILQDIENFFY

SEQ ID NO: 55887 - DNA, 576 bp, Unknown
  Obtained from environmental sample
  misc_feature (1)..(576): n is a, c, g, or t
atggaaattaaacgagcaatagaatttggagacaatataagggaaagattaggtgaagtatacgttaatgcgttttatgatgacgtattaaattatttctcaaaggataaagctaaattaaaaaaagtatttgcctgcggatttttgctggaatatttctatgtggcgataatggataatgaaattgtaggaatgattgcctgtatgggtaaaggtgaagtttgtattaaattagatttaaaaacaattgttaaatattttggggtattcagaggattgattataaatttttggttaaaacagtttttgaaagaatttccaaaacttgatgaaaaaacagcattatttgaatgtttggctgttgatataaaacatctaagaaaaggaattgcttcaacacttattaaatcaataattacattatctgaatatgaaaattatatattagaagtaataggaacaaataaaaaagcaataaacttatatgacaaattaggttttaaaattttatatataaaacaatattttccaaatgtatatttcagcatgaaatatacaaaagaagcaaataattga

SEQ ID NO: 55888 - protein, 191 aa, Unknown
  Obtained from environmental sample
  DOMAIN (54)...(168): Acetyltransferase (GNAT) family
  misc_feature (1)..(191): Xaa is any amino acid
MEIKRAIEFGDNIRERLGEVYVNAFYDDVLNYFSKDKAKLKKVFACGFLLEYFYVAIMDNEIVGMIACMGKGEVCIKLDLKTIVKYFGVFRGLIINFWLKQFLKEFPKLDEKTALFECLAVDIKHLRKGIASTLIKSIITLSEYENYILEVIGTNKKAINLYDKLGFKILYIKQYFPNVYFSMKYTKEANN

SEQ ID NO: 55889 - DNA, 963 bp, Unknown
  Obtained from environmental sample
  misc_feature (1)..(963): n is a, c, g, or t
atgaattatttagccaatgagcaagccacatactgggatggccgggaagacggctatataaagcagttaaccggaattgcggacataatgggcgaatttgaaatgctgccaccacaggacaggagagatcagtatgacaatatgctgaaggctacattgaataacaatgccaacttcgtccgcatattttccatctggaaaccgaacgccatggacggcatggacagcctttatataggccgtccgggatcaactccaacggggcagtacgcgatgacttggggcagggataccggcccgattgaagtaaagcccaacctcatccttgatgagattaacgcatggatgaacggccccaacgcgcttaaaacccgggtcgaaaaccccacgccttttacgaatgccggaaaagaaacttttattttcagaattggagttcccataaccagaagtaccagcaacgaagtagtcggacacctatgtgttcttatagacatcggcccaatgcaggcagtggtagaaaaaaccattaaagattacgaagaaatatcggcattggttctttactcgggcaacggaatgataatgggacatttggttcctgaacgggtaggaaagatgctgattgatgtggatacgatatacggcgattatataagggaagcggataaagccgtgcgggaagggaaggaatttcagtgcagcagctattcaccggttctaaaagccgatatgaaaataaccatgattccctttcagataggcgattccggcatatactggacagtaatgatagcgacatcaaaaacgtacattatgaaagaaatgaacgagattaccagatttaccattatccttgcggtgatcgctattatagcggctgcggtaactgtgtgctttattttcaatagcacaaccaggccaatcgtcaatgtgacatttcagaaggcgaaggcggcctga

SEQ ID NO: 55890 - protein, 320 aa, Unknown
  Obtained from environmental sample
  misc_feature (1)..(320): Xaa is any amino acid
MNYLANEQATYWDGREDGYIKQLTGIADIMGEFEMLPPQDRRDQYDNMLKATLNNNANFVRIFSIWKPNAMDGMDSLYIGRPGSTPTGQYAMTWGRDTGPIEVKPNLILDEINAWMNGPNALKTRVENPTPFTNAGKETFIFRIGVPITRSTSNEVVGHLCVLIDIGPMQAVVEKTIKDYEEISALVLYSGNGMIMGHLVPERVGKMLIDVDTIYGDYIREADKAVREGKEFQCSSYSPVLKADMKITMIPFQIGDSGIYWTVMIATSKTYIMKEMNEITRFTIILAVIAIIAAAVTVCFIFNSTTRPIVNVTFQKAKAA

SEQ ID NO: 55891 - DNA, 1242 bp, Unknown
  Obtained from environmental sample
  misc_feature (1)..(1242): n is a, c, g, or t
atggaaaagcagattcgcacggcaaatcaagacgctttcatgcgcacagaagtaaatattattgtcgctacaacggcatttggtatgggagtagataaaaaagatgtcgggatggttatacactacgatatttcagattcgcttgaaaactatgtgcaggaggcagggcgcgcgggccgcgacgaaaatattaaagctgattgttatgtgttgtataatgatgatgatttaaacaagcattttattatgctgaatcaggcaaaattatcacaaaaagagatacaacaggtttggaaagcgttaaaagaattaatcaaatcaagagaatctatatcccaatccgcgcttgaaatagcaaaaaaatccggctgggatgattccgtacgtgacatggaaaccagagttaaaaccgcgataaacgcgttagagcagtctaaatttgttaagcgtgaacagaatatgtccagaatttatgccgacagtattttggtcaaaaatatgggggaagcgcgggagaaaattgataaatccgcgcggtttgatgacgcttcccgacaacaggctatccgtattatacgcagccttatttcagcaagaagcaaaacacgcggtaaagacgaagaaggtgagtctcgtgttgattacatatcagacaaacttggtatagttaaagaagaagtaataagagtcatcgggcttttgcgtgaggaaaatattctcgctgacgcgaaggacctttccgcatatatcaaacaacgcgaaaaggtcaatcgctcaaaaattatcctttccatgcacagtaatatcgaaaactttttattcatgtatctggatgaaacggaaagaacatataatattaaagaaatgaacgaagcgcttgcggctaaatatccggatacgtcaataagtcagctcggcacgatattgaattattattcaataaagcgtttagtcaaaagaaaacgggagttcaataaaaattatgtaacgcttaaaccttatttcctgacggcggaaatgaagattaaaagcgaaaaacgctgcaagatagcgggggttatcattgactatttatattcaaaagtatcagacaagccggaatcacaggacaaagaggatgttaaagtcgatttttcaatacttgagctgaaaaaagaattcaatcgggatttatttgaagaaaagcaaaaaccgatgaaatcgaagatgctatatattatttacttaagatcggggcgatga

SEQ ID NO: 55892 - protein, 413 aa, Unknown
  Obtained from environmental sample
  DOMAIN (1)...(62): Helicase conserved C-terminal domain
  misc_feature (1)..(413): Xaa is any amino acid
MEKQIRTANQDAFMRTEVNIIVATTAFGMGVDKKDVGMVIHYDISDSLENYVQEAGRAGRDENIKADCYVLYNDDDLNKHFIMLNQAKLSQKEIQQVWKALKELIKSRESISQSALEIAKKSGWDDSVRDMETRVKTAINALEQSKFVKREQNMSRIYADSILVKNMGEAREKIDKSARFDDASRQQAIRIIRSLISARSKTRGKDEEGESRVDYISDKLGIVKEEVIRVIGLLREENILADAKDLSAYIKQREKVNRSKIILSMHSNIENFLFMYLDETERTYNIKEMNEALAAKYPDTSISQLGTILNYYSIKRLVKRKREFNKNYVTLKPYFLTAEMKIKSEKRCKIAGVIIDYLYSKVSDKPESQDKEDVKVDFSILELKKEFNRDLFEEKQKPMKSKMLYIIYLRSGR

SEQ ID NO: 55893 - DNA, 885 bp, Unknown
  Obtained from environmental sample
  misc_feature (1)..(885): n is a, c, g, or t
gtggcggctgtaacaggctggaacgcggcagcaggcttaagtgcgggaaatctggtaattcagccgcaaattattgaaggcatggtctatgtttatggcggaaattttcagatggggaaggatttaggcacagatgcgaccgaggacgtggcgcctgtgcatacggtgatgctgacaggattttacctaagcaagtatcctgtaacgcaggagcagtatcaggcggtaatggggagcaatccgagtcattttaccaacgatccggtaaacggagaagcgcaggggaaacgccctgtggatcaggtaagctggtatgacgcgatagagttctgcaacgcgttgagcgaaaaggaaggattaagtctgtactacacgatagacaaggttaataaagaccccaataacataaacgaatctgacaatttgaaatggacagtcactgttaacgtgggggccacgggctatcggctgccgacagaggcgcagtgggaatacgccgcgaaaggcggaaacccaaatgcggcaggctgggtaggatacacgtattcggggagcgatatggttgacgacgtggcatggtacgatggcaataatgccagttcaggaaccagcacttacggagcgaaagttgtagggacgaaagcccccaacggtcttggcttatacgacatgagcggtaacgtatatgaatggtgctgggactggttgggttcttatgaagctgaggcgcagactgaccctgggggcgcggtctctggcactacccgtgtgatgcgcggcgggagttggttacattcggagatggacgctcgttcagtcaaacggagcagcggcctcccgttcaacccgctcgagtaccatggcttccggttggtgcgctcctga

SEQ ID NO: 55894 - protein, 294 aa, Unknown
  Obtained from environmental sample
  DOMAIN (24)...(293): Domain of unknown function (DUF323)
  misc_feature (1)..(294): Xaa is any amino acid
MAAVTGWNAAAGLSAGNLVIQPQIIEGMVYVYGGNFQMGKDLGTDATEDVAPVHTVMLTGFYLSKYPVTQEQYQAVMGSNPSHFTNDPVNGEAQGKRPVDQVSWYDAIEFCNALSEKEGLSLYYTIDKVNKDPNNINESDNLKWTVTVNVGATGYRLPTEAQWEYAAKGGNPNAAGWVGYTYSGSDMVDDVAWYDGNNASSGTSTYGAKVVGTKAPNGLGLYDMSGNVYEWCWDWLGSYEAEAQTDPGGAVSGTTRVMRGGSWLHSEMDARSVKRSSGLPFNPLEYHGFRLVRS

SEQ ID NO: 55895 - DNA, 612 bp, Unknown
  Obtained from environmental sample
  misc_feature (1)..(612): n is a, c, g, or t
ttgacagcatattttcagcatgataggataagtgttcgtatgagttttcttgaaattattctgattgccattggtttatcaatggacgcatttgcagtttcaatcactctgggattatcagccgataaactaaaaactaaagaatacttaattcccggaatatattttggtttctttcaagcgctcatgccgtttatcggatactataccggagcgctttttacagacaaattacaaagtttagagcattggatagcgtttgtattgcttggttttatcggcggaaaaatgataaaagatagtttttccaaagacgatgaaataaaaagcggtaatccgtttggaattgccaaaatgctattattggcaatcgctacaagtatagacgctttggctgtcggtataacatttgctttttttaaaattaatattttttatgcgataacaataataggtttaacaactttctttatatccatcggtggcgtaatagccggtcatatttttggagcgaaatataaatcaaaagcggaatttttcggcggagttgtccttgtattacttggagtaaaaatacttattgagcattttattaacgcgaaactaatataa

SEQ ID NO: 55896 - protein, 203 aa, Unknown
  Obtained from environmental sample
  DOMAIN (119)...(190): Domain of unknown function DUF
  misc_feature (1)..(203): Xaa is any amino acid
MTAYFQHDRISVRMSFLEIILIAIGLSMDAFAVSITLGLSADKLKTKEYLIPGIYFGFFQALMPFIGYYTGALFTDKLQSLEHWIAFVLLGFIGGKMIKDSFSKDDEIKSGNPFGIAKMLLLAIATSIDALAVGITFAFFKINIFYAITIIGLTTFFISIGGVIAGHIFGAKYKSKAEFFGGVVLVLLGVKILIEHFINAKLI

SEQ ID NO: 55897 - DNA, 507 bp, Unknown
  Obtained from environmental sample
  misc_feature (1)..(507): n is a, c, g, or t
atgatctcaaccatgcttttgataattatttatctttcatttattagcttgggcttgcctgattcattgcttggatctgcatggccttcaatgtacggcggcttacatgttccgctgcattatgccggatatatttcaatgattatagccggcggaacggttatttcaagtattttcagcgaaagattaatcaggaggtttggaacaggcattgttaccgcttttagtgttttaatgaccgccgccgctcttttggggttttctttttcttctgcttttccgttgttgtgtctttgggctgttcctctcggattaggcgcgggttctgttgatgcggctttgaataactatgttgcgctgaattataaagcaagacacatgagttggcttcattgtttttggggcattggagcttcaatagggccgaatatcatgtcattctttttgataaataaaaattcgtggaacttagggtatcgtacaatcggattgattcattctgtttag

SEQ ID NO: 55898 - protein, 168 aa, Unknown
  Obtained from environmental sample
  SIGNAL (1)...(18)
  misc_feature (1)..(168): Xaa is any amino acid
MISTMLLIIIYLSFISLGLPDSLLGSAWPSMYGGLHVPLHYAGYISMIIAGGTVISSIFSERLIRRFGTGIVTAFSVLMTAAALLGFSFSSAFPLLCLWAVPLGLGAGSVDAALNNYVALNYKARHMSWLHCFWGIGASIGPNIMSFFLINKNSWNLGYRTIGLIHSV

SEQ ID NO: 55899 - DNA, 1035 bp, Unknown
  Obtained from environmental sample
  misc_feature (1)..(1035): n is a, c, g, or t
atgacacgcgaacagttagacaaactttttgacgaatacacccgttttaatcttgaagccaaccgctcaaccgaaggagcgggattgggtatgaacattacaaggcgtcttgtcgaattaatggaaggcgaaatttcagtggaaagcgaacaaggcaaaggctcaacgttcacggtgcgtctgcctcaaggcgttgtagacgaaggaatattgggcaaagcaatagttgaaaacttaatgcggttccggctcggcaaaatgtcgcagataaaaaaaacgccgcaagttgtacgcgaatatatgccgtacggaaaagttcttatagtagacgatgtagaaacgaatctgtatgtcgcaaaaggacttatgtctccttacggattaacaatagatacagcgggcagcggatttgaagcgataacgaaaattaaaagcggcgagacttacgacattatatttatggatcactttatgccgaaaatggacggaatagaagcgacaaaaaatttgcgtgagttggggtacacacagcccattgttgcgctgacagcaaacgcattaacaggacaaacggaagtttttatggcgaacgggtttgacggttttatatccaaacctatagatatacaccagttaaacgctatgttaaacaagctggtacgagacaaacgcccgcctgaagagattgaagccgtacggcagagcaatagcagcacggctctaaccgcagaacagcagcaaatcgcaaatgccgagcttataaaagtttttttaagggacgctgaaaagaccgttgctttattggaaacaatccagagaaacaactaccgcagagccgatgacgtacaaatgtatattatcaatgtccacgcaatgaaaagcgcattggctaacataggagaggcggagctttcaggtttcgcaagaagacttgaagaagcgggacgagaccaaaatatcgtccaaatatcacatgacacaccgtcatttttatcatctctgaaagcgctgatgctgaaacttactcggaaatga

SEQ ID NO: 55900 - protein, 344 aa, Unknown
  Obtained from environmental sample
  DOMAIN (252)...(344): Hpt domain
  misc_feature (1)..(344): Xaa is any amino acid
MTREQLDKLFDEYTRFNLEANRSTEGAGLGMNITRRLVELMEGEISVESEQGKGSTFTVRLPQGVVDEGILGKAIVENLMRFRLGKMSQIKKTPQVVREYMPYGKVLIVDDVETNLYVAKGLMSPYGLTIDTAGSGFEAITKIKSGETYDIIFMDHFMPKMDGIEATKNLRELGYTQPIVALTANALTGQTEVFMANGFDGFISKPIDIHQLNAMLNKLVRDKRPPEEIEAVRQSNSSTALTAEQQQIANAELIKVFLRDAEKTVALLETIQRNNYRRADDVQMYIINVHAMKSALANIGEAELSGFARRLEEAGRDQNIVQISHDTPSFLSSLKALMLKLTRK

SEQ ID NO: 55901 - DNA, 750 bp, Unknown
  Obtained from environmental sample
  misc_feature (1)..(750): n is a, c, g, or t
ttgatcggcgagtctttttgtataacgaactgcaaaacgagggatttccaagagttgttttcagagccggtagggcacggttcggtttatttatggggaaacaataccgatgaaaacgacaggaaactcaacaggcgtgtgagaattttattgggcggcgaaacgcccatacaagttactcaagaaattattaacgctgaaccggaaatcgtacctgagaccgttcaagaaatgccgccgattacgcgagaatatattcctcgggaaaaatcggatttcaaatttccttggtggcttttgctcttgcttcctcttttgcttcttctgcttctgcttaaaaaaagaccgaagaaatcaacacataaagaaactaccgcaaatacacagcagactccaaaagcggatgcgcctaaacctgcgcctgctcctgctcccgtagttgcacccgcccctgttccggaacctgctcccgcggttgttcctgctcccgttcctgtacagcaaactaaacatgaagcggcggcggtttctcctataatggaaacaattacgataaatctggacgaagaaattcgcttttgcgcttacgaacattttgaacgccgcggcggagtaaacggctccagagaacaggactggtacgacgcattgagtgtggtatccgcaagatatacgcctcgaggctactctgtcttttttaaggacgggtactggtgggcgtccatacaaaatgctataatgcaggtatga

SEQ ID NO: 55902 - protein, 249 aa, Unknown
  Obtained from environmental sample
  misc_feature (1)..(249): Xaa is any amino acid
MIGESFCITNCKTRDFQELFSEPVGHGSVYLWGNNTDENDRKLNRRVRILLGGETPIQVTQEIINAEPEIVPETVQEMPPITREYIPREKSDFKFPWWLLLLLPLLLLLLLLKKRPKKSTHKETTANTQQTPKADAPKPAPAPAPVVAPAPVPEPAPAVVPAPVPVQQTKHEAAAVSPIMETITINLDEEIRFCAYEHFERRGGVNGSREQDWYDALSVVSARYTPRGYSVFFKDGYWWASIQNAIMQV

SEQ ID NO: 55903 - DNA, 975 bp, Unknown
  Obtained from environmental sample
  misc_feature (1)..(975): n is a, c, g, or t
gtgggcgtccatacaaaatgctataatgcaggtatgaaaacaaaccctgtcgcagactatcttgcatctgtttcacctgaaaaaatcgatccaagtatgctggcttatgtttgcaatttaacggaaatcgccaaagttactcccgagattgcggcttctatcgttttggaacttgaaaaccaaagaaaacgcgtaaaattgatcgcaagcgaaaattactgctctatggcggttcagcttgctatgggtaacctcttaactgacaaatacgccgagggtgtgcctttccaccgtttttacgcgggaaatgaaaatgtggacgctatcgaatctttagcggcgcaagaggcttgcaagcttttcggcgcgcagtacgctaatgtgcaggcgcattgcggcgcggacgctaatcttctcgcgtactgggcgattctcagcacgcggattgaaaatccggcgctggaaaaattgggcgagactaatctttacaaattaaccgattcacaatggaatgagttaagagcttctctgggaaaccagcgccttttgggtttggattactattccggcggacacttaacgcatggttacagaaataatctttcagggcgtatgtttgaaattcacgggtattcggtatccgccgaaaacggaatgttggattacgacgatattgaaaaacaggcgatggaagtgcgcccgttaattttattggcaggctattccgcttatccgcggaaaataaattttaagcgcatgagggaaatcgctgataaagtcggcgcggtgttcatggtagacatggctcactttgcgggtcttgtcgcgggcaaggtttttacgggcgagtatgatcctgtgccctggtcgcatattgtaacaagcaccacgcataaaaccctgcgcggtccgcgttcgggagttgtgctctccacagcgaattcgcggaagccttggataagggctgtctgttga

SEQ ID NO: 55904 - protein, 324 aa, Unknown
  Obtained from environmental sample
  DOMAIN (43)...(320): Serine hydroxymethyltransferase
  misc_feature (1)..(324): Xaa is any amino acid
MGVHTKCYNAGMKTNPVADYLASVSPEKIDPSMLAYVCNLTEIAKVTPEIAASIVLELENQRKRVKLIASENYCSMAVQLAMGNLLTDKYAEGVPFHRFYAGNENVDAIESLAAQEACKLFGAQYANVQAHCGADANLLAYWAILSTRIENPALEKLGETNLYKLTDSQWNELRASLGNQRLLGLDYYSGGHLTHGYRNNLSGRMFEIHGYSVSAENGMLDYDDIEKQAMEVRPLILLAGYSAYPRKINFKRMREIADKVGAVFMVDMAHFAGLVAGKVFTGEYDPVPWSHIVTSTTHKTLRGPRSGVVLSTANSRKPWIRAVC

SEQ ID NO: 55905 - DNA, 591 bp, Unknown
  Obtained from environmental sample
  misc_feature (1)..(591): n is a, c, g, or t
ttggataagggctgtctgttgacaatgggcggccccctgccccatgttatcgccgccaaagcggtttccttccgcgaggccgccgctcccgaattcaagcgttatgcgcaacgcattgtggaaaactgccgcgatctggccgccgcctgcatgaagaacggccttgaggtgcttaccggcggcaccgataaccacctcatgctgatcaacgtgaaccatatcgggttaaccggcaggcaggcggaaagctccctgcatgaatgtcgcgtaacgctcaaccggaacagcctgccctttgatcccaacgggccctggtataccgccggcctaaggcttggaaccgccgcggtcacaacgcttggaatgggaaaaaatgaaatggaggagatcgcctcaatcatgtcgatggtgctaaagggcacgaccccggctccaaatgagaaagatccttccgtaaagagcaaggcaaaatatctggtagactccgcggtaaaaacggcggcgatagaacgcgtaaaaaatctgctcgatcgtttccccgtgtatccggagctggatctgcccatgcttaaagaggcgtttgttaattaa

SEQ ID NO: 55906 - protein, 196 aa, Unknown
  Obtained from environmental sample
  DOMAIN (1)...(134): Serine hydroxymethyltransferase
  misc_feature (1)..(196): Xaa is any amino acid
MDKGCLLTMGGPLPHVIAAKAVSFREAAAPEFKRYAQRIVENCRDLAAACMKNGLEVLTGGTDNHLMLINVNHIGLTGRQAESSLHECRVTLNRNSLPFDPNGPWYTAGLRLGTAAVTTLGMGKNEMEEIASIMSMVLKGTTPAPNEKDPSVKSKAKYLVDSAVKTAAIERVKNLLDRFPVYPELDLPMLKEAFVN

SEQ ID NO: 55907 - DNA, 867 bp, Unknown
  Obtained from environmental sample
  misc_feature (1)..(867): n is a, c, g, or t
ttggaggcaactatgaaaaatgttaacgaaaagaacaaggacactgtttttactttccttttcagcaaccccgacttattgaggggactctactcggcgatagagggaattactctcccgccggacgtacccatcaatatcaacaccctttcagacgttcttttcaggacgcagagaaacgacatttcgtttcttatcaacaatcggcttattgttctaattgaacaccaatcaactatcaacgaaaatatgccgctcaggtttatgatgtactccgctaaactgtatcaggaaattacagagccggaagacaagtttaaaagaaaactggagaaaatccccaagcctgagtttatcgtactttacaacggcgaggacaactaccccgattacaaagagttaagactgtccgattcattttttcaggctgatataaagattgatttaccgctggaacttgtggtacaggtatataacatcaataagggacggaatcaggagatattgaacaaaagcaagacgcttgaaaattacagccggtttataaacaagatacgggagtaccagaaagagtatcagtggaagtataaggagaagaaagaaatacttgataaatcgttcaagtctgcgataaactattgtataaagaacaatattctaaaggactttttaaagaaacatagttcggaggtattaaatatgctgtatggcgagtatgatcctgaggtagagatgagagttgtccgtaaagaagccattgaagaaactcgtgaagaagactatcaccatttttttgaattactaaatcaagatttgactaaagaggaaataaaagagcggcttcaacaggaagaaaggattttttaa

SEQ ID NO: 55908 - protein, 288 aa, Unknown
  Obtained from environmental sample
  misc_feature (1)..(288): Xaa is any amino acid
MEATMKNVNEKNKDTVFTFLFSNPDLLRGLYSAIEGITLPPDVPININTLSDVLFRTQRNDISFLINNRLIVLIEHQSTINENMPLRFMMYSAKLYQEITEPEDKFKRKLEKIPKPEFIVLYNGEDNYPDYKELRLSDSFFQADIKIDLPLELVVQVYNINKGRNQEILNKSKTLENYSRFINKIREYQKEYQWKYKEKKEILDKSFKSAINYCIKNNILKDFLKKHSSEVLNMLYGEYDPEVEMRVVRKEAIEETREEDYHHFFELLNQDLTKEEIKERLQQEERIF

SEQ ID NO: 55909 - DNA, 1074 bp, Unknown
  Obtained from environmental sample
  misc_feature (1)..(1074): n is a, c, g, or t
atgagcaaagtgttaattgcaatgagcggcggcgttgacagttccgtagccgcgtacctgttaaaacagcggggctttgactgtaccggaataaccatgaagctgtttgaaaacagggacatcggggcaagcggggaaaaaaaatgctgctctctggaagatacggctgacgcgcgaaatgtggcgttttccatgggtatcaacttttatgtctgtaatttcgcgcaggacttcagggaaaaggttatcggccggtttattgaaagctaccaaaacggcgccacgccgaacccctgtattgactgcaaccgttatataaaatttgaaaaattgcttggccgggcaaaacagcttgatatggattatatcgccaccgggcattacgccggaattgaatacgacgcggaaagcggaaggtatctcctgaaaaaagcggctgacgaaacaaaagatcagagttatgtgttatacgccatgacgcaggaacagttatcgtacaccctgtttccgctcggcgggcttcacaagtccgaggtacgcgatattgccaaagagcagggttttgttaatgcggacaaacatgacagccaggatatatgctttgtgagggacggcaatgactatgcggattttatcgagcagtatacgggcagaaaatatgaagaaggaaattttatagatatgaacggcaatatactcggtaaacataagggccttatccggtatacaataggccaaagaaaggggcttgggctttctttaaaaaaaccgatgtatgtgcgttttaaagacacggagaaaaacaccgtaacgctttgtgaagatgacagactattttcaaaatcgcttgacgcggctgattttaactggatagcatgtgaaaaaatcaacagccctattcgcgttaaagcaaagatacggtacaaccaaaccggacaatgggcaacggcgaatcaaacctcgccggataccgttcatattgaatttgacgagtcgcagcgggcaatagcaaaaggccaggcggccgtgctgtatgacggcgatgtcgttgtcggcggcgggacaattctgtag

SEQ ID NO: 55910 - protein, 357 aa, Unknown
  Obtained from environmental sample
  SIGNAL (1)...(18)
  DOMAIN (2)...(356): tRNA methyl transferase
  misc_feature (1)..(357): Xaa is any amino acid
MSKVLIAMSGGVDSSVAAYLLKQRGFDCTGITMKLFENRDIGASGEKKCCSLEDTADARNVAFSMGINFYVCNFAQDFREKVIGRFIESYQNGATPNPCIDCNRYIKFEKLLGRAKQLDMDYIATGHYAGIEYDAESGRYLLKKAADETKDQSYVLYAMTQEQLSYTLFPLGGLHKSEVRDIAKEQGFVNADKHDSQDICFVRDGNDYADFIEQYTGRKYEEGNFIDMNGNILGKHKGLIRYTIGQRKGLGLSLKKPMYVRFKDTEKNTVTLCEDDRLFSKSLDAADFNWIACEKINSPIRVKAKIRYNQTGQWATANQTSPDTVHIEFDESQRAIAKGQAAVLYDGDVVVGGGTIL

SEQ ID NO: 55911 - DNA, 564 bp, Unknown
  Obtained from environmental sample
  misc_feature (1)..(564): n is a, c, g, or t
ttgccggtggaggaattggcggtttgggacagttttcataaccatttttgtgtggaaacaggtcattgcactgttatgattggcgcgtcttcggcggacatacggctttcagacagttttaaggtttacggcaaaaatgtatttccccgaaaaattcccgatcatatctacgcgcaaagatttgataattattcggattgttttttgcacgaaaagcggggtagcactatcccagccgtattcaacaattctgacggcggctggatacgttttgccgcgctggattttaccgacagccgcggattgatttccgccattgtgcaaggcgcgccgggcagccgcattgaaattcgtttggacgcgccggacgacgtgttggcaggaacactcattatcccaaacaccggcgacatatcctttttccccctgacagaaagaaacagtccccgccgccgtccggtttgggcatacgctgaaactcccacgggaaaaataagcggcgttcatgatctgtacctggtgttttatggaaaaaccggtctttggcgaattgatattcaatag

SEQ ID NO: 55912 - protein, 187 aa, Unknown
  Obtained from environmental sample
  DOMAIN (59)...(187): Carbohydrate binding module (family 6)
  misc_feature (1)..(187): Xaa is any amino acid
MPVEELAVWDSFHNHFCVETGHCTVMIGASSADIRLSDSFKVYGKNVFPRKIPDHIYAQRFDNYSDCFLHEKRGSTIPAVFNNSDGGWIRFAALDFTDSRGLISAIVQGAPGSRIEIRLDAPDDVLAGTLIIPNTGDISFFPLTERNSPRRRPVWAYAETPTGKISGVHDLYLVFYGKTGLWRIDIQ

SEQ ID NO: 55913 - DNA, 2016 bp, Unknown
  Obtained from environmental sample
  misc_feature (1)..(2016): n is a, c, g, or t
atgaaatttacagacggttactggggtatcangaaaggngtagaacctcattttgccgcgagcgctattgaagctgaacaaaaggaaaatgaactgacggtgtatgcgccgggaaggcagatacatcatagaacggatcctcttaatatgactctccttacggcgcgttattccagcccaatacaaaatgttatcagggtgcggatttcccattttgaaggaacggtggacagggggccgcattttccgctggagatcgatccggcatttaaaccttctatacgcataacagaggaagaggccgttcttgaaagcggagaactttctgtaaaagtcgaactggatgaaggctggaacaatgttttttctggcggcggcaaatacctgaccggaaataccgttaaatccgcgggatacatgatagacaaagacagaggggcttttgtaaaagaagagcttatcctttcggtaggagaacttatatacggcctgggcgagcgcttcgggccgctggtgaaaaacggacagaccgttgacatttggaacgccgatagcggcacggccagcgaactggcttacaaaaatattcccttttatatgaccagccgcggttacggaatatttatcaacgatcccggaaaagtttcccttgagatcggcagcgagaaaacttcgcgggtgcaattctgcgtcagcggagaagtactggaatattttatcatttacgggcctgatccaaagacaattctggaacgatacaccgccattaccggaaggccggccatgccgcctgaatggagcttcggactgtggctttcaacttccttcaccacttcctacgatgaanaaacggtgatgagttttataaacgggatggaagaacgaaaaatccccctgtcggtttttcactttgactgctactggatgaggggctttaactggtgcgattttacctgggataaagcaaccttccccgatcccaagggaatgttgtcccgcattaaggcgaagggtataaaaatctgcgtgtggatcaatccctacatcgcccagcgttcgccgctttttgccgaggggaaaaagggcggctattttctcaaacgtgcggatggcgctgtctaccagacagatcaatggcaggcgggaatggccattgtcgacttctccaatcccgccgccgtcaaatggtataccgatcatctggataaactgcttgatatgggcgtggattgtttcaaaaccgacttcggcgagcgtatcccggaagatacggtgtattttgattcgggcgatcctgagcgtcatcataacttttacgcttatctttataacaaggcggtgtttgaactgcttgaaaaaaaacggggcaaaggcgaggcctgcgtctttgcccgttcagcgacagcgtgcggccagcgtttccccctgcactggggcggtgactgcgaatctacgtttgaggcaatggcggagacattacggggcggcctttctttgagcctctcaggatttagcttctggagccacgatataggcggctttgagggaacgcctaacgccgccctgttcaaacgctggcttgccttcggactgctttcttctcattcgcggcttcacggcagcacttcctaccgtgttccctggagcgttgacgaagaatccgccgaagtctgccgcttttttaccgaattaaaagcgcgccttaaaccttatattctgcaatgctcgcgggaagcgcatgaaaaaggcgtcccggtcatgcgggcaatgttcatggaattccccaatgatcctgcctgcgcgtatcttgaccgccagtacatgctggggcctgacctgctggtcgcgcctgtgttcagcgaaagcggcgaggttacctattacctgcccgaaggcgaatggacgagcctcatctcaggcgagacagccaagggcggctgctggaaaaccgaaaagcacggcgttttaagcctgccccttttcgcccgcgccgggaagaagcttatcgcggggtaa

SEQ ID NO: 55914 - protein, 671 aa, Unknown
  Obtained from environmental sample
  DOMAIN (239)...(668): Glycosyl hydrolases family 31
  misc_feature (1)..(671): Xaa is any amino acid
MKFTDGYWGIXKGVEPHFAASAIEAEQKENELTVYAPGRQIHHRTDPLNMTLLTARYSSPIQNVIRVRISHFEGTVDRGPHFPLEIDPAFKPSIRITEEEAVLESGELSVKVELDEGWNNVFSGGGKYLTGNTVKSAGYMIDKDRGAFVKEELILSVGELIYGLGERFGPLVKNGQTVDIWNADSGTASELAYKNIPFYMTSRGYGIFINDPGKVSLEIGSEKTSRVQFCVSGEVLEYFIIYGPDPKTILERYTAITGRPAMPPEWSFGLWLSTSFTTSYDEXTVMSFINGMEERKIPLSVFHFDCYWMRGFNWCDFTWDKATFPDPKGMLSRIKAKGIKICVWINPYIAQRSPLFAEGKKGGYFLKRADGAVYQTDQWQAGMAIVDFSNPAAVKWYTDHLDKLLDMGVDCFKTDFGERIPEDTVYFDSGDPERHHNFYAYLYNKAVFELLEKKRGKGEACVFARSATACGQRFPLHWGGDCESTFEAMAETLRGGLSLSLSGFSFWSHDIGGFEGTPNAALFKRWLAFGLLSSHSRLHGSTSYRVPWSVDEESAEVCRFFTELKARLKPYILQCSREAHEKGVPVMRAMFMEFPNDPACAYLDRQYMLGPDLLVAPVFSESGEVTYYLPEGEWTSLISGETAKGGCWKTEKHGVLSLPLFARAGKKLIAG

SEQ ID NO: 55915 - DNA, 735 bp, Unknown
  Obtained from environmental sample
  misc_feature (1)..(735): n is a, c, g, or t
atgctacatgaaggatgtgtttcagaagggcttttagcgctggtcagaaagctggaaaaggaagcggttttcagggatcattttctggttggcggaactgcgcttgctttacagataggacaccgaaaatcagatgatattgatttgtttacccaaaaagagctgcagataccggaaataacaaaatttttgaagcaaaattatggcgggaaatatcagctcattaacagccaaagaatgatataccaggttatgatagaagggattaaggttgattttgtgcatcacccatttgagcttgtcgaagcggtgcagcatgaaggcgatgtggcttttcttggcaaaaaagacatagccgccatgaagctgcatgtcatagaaactaacggaagcagagcaaaagattttgtagacatattttttttattgaaagaaatttcactggataaaatgtttgaatattacagaaaaaaatattcgacagataatatttttaacgcaaagaggagcctggggtacttcgaggatgtaccggtagaaagctggaaggaagtacgcctggtcgatcgaaaagtaacggcaagtcttgtaaagaagactattacagacgcaatacgaaaatacaacgaaactcagatggacaaatattattttagcagccctgctcttttacgcagattctcacaacgtctccttcaaaaatttccagcccctgctcaatttcgctgtcactga

SEQ ID NO: 55916 - protein, 244 aa, Unknown
  Obtained from environmental sample
  misc_feature (1)..(244): Xaa is any amino acid
MLHEGCVSEGLLALVRKLEKEAVFRDHFLVGGTALALQIGHRKSDDIDLFTQKELQIPEITKFLKQNYGGKYQLINSQRMIYQVMIEGIKVDFVHHPFELVEAVQHEGDVAFLGKKDIAAMKLHVIETNGSRAKDFVDIFFLLKEISLDKMFEYYRKKYSTDNIFNAKRSLGYFEDVPVESWKEVRLVDRKVTASLVKKTITDAIRKYNETQMDKYYFSSPALLRRFSQRLLQKFPAPAQFRCH

SEQ ID NO: 55917 - DNA, 732 bp, Unknown
  Obtained from environmental sample
  misc_feature (1)..(732): n is a, c, g, or t
gtgtacgtgcaaggcggggacatcgacgcgctggaaaaagccctggacgcgaagacaaccgccggctttctgcttgaggcgattcagggcgaaagcggcattattccacagactgcggaatacatcgccgccgccgtaaagctctgccaggagcgggatatcctcctcatgttcgacgaggtgcagacgggcataggcaggaccggcaatttccttgcctgcgaaggctatggtgtaaagcccgacgttgtaaccctcgcgaaaggcctttccggagggatcccttccggggcgttccttgccggagagaaggcggcggacgtgcttcagactggcgatcacggctcgactttcggcggaaaccccatcgccgctgccgccggcatggtggttctggataccgtaacaaaaggcggctttatgaaggaaatcgcgcgaaaggggcagaagatgaaagatgctatcgcctcctggaatcatcccaaaataaccgccatccggggcgtgggcatgatgcttggcgtagacctcaccgtcgaatcctggccgattctggaagcgctaattacaaggacgcaaactcaggacacagggcttctccttcttggcgcgggcaagcagacactgcgcttcccttcgccctacaccatcagtgacagcgaaattgagcaggggctggaaatttttgaaggagacgttgtgagaatctgcgtaaaagagcagggctgctaa

SEQ ID NO: 55918 - protein, 243 aa, Unknown
  Obtained from environmental sample
  DOMAIN (1)...(179): Aminotransferase class-III
  misc_feature (1)..(243): Xaa is any amino acid
MYVQGGDIDALEKALDAKTTAGFLLEAIQGESGIIPQTAEYIAAAVKLCQERDILLMFDEVQTGIGRTGNFLACEGYGVKPDVVTLAKGLSGGIPSGAFLAGEKAADVLQTGDHGSTFGGNPIAAAAGMVVLDTVTKGGFMKEIARKGQKMKDAIASWNHPKITAIRGVGMMLGVDLTVESWPILEALITRTQTQDTGLLLLGAGKQTLRFPSPYTISDSEIEQGLEIFEGDVVRICVKEQGC

SEQ ID NO: 55919 - DNA, 2370 bp, Unknown
  Obtained from environmental sample
  misc_feature (1)..(2370): n is a, c, g, or t
atggaagaactgatccgcatgaacaacagggtagaagaaaatctggaccgccttaaagaagaatccgcctttgtggaagaaactataaaaaaaatagcgggattaaaggccgtgacggaaaaaatggagaacggcataggcagtctggaacttcgctttgcgagggaaaatgctgttgccctggaaaaggcggaagccgcggctgtcaagctggaagaagatgccctggtcaaataccgggaagaagcgctggtacgagtacaccattttcaggatacaatagaggaaaaattccatgaataccatgaaaacgcaaaagcacgcattgcggaaattcaaactctggtaagatcctgcaaggatgaatggaaaaacaatcacacacaaatggaagcggaacaaaaggagtacagggaatcctggcagcgggatatagatgcgctggatgcgctagcgctttcccaaaggaaacagtgggaggacgcggtagcggaagctgaggatcgtctgattcaactgaaccgggatttggattccaagaccggtgaagtagaggaacgtgtacttaaggaagtggagaaccgtctggcgggatacagggaagatcaggccgcgcaatggaaacattttgacgctctggcggatgatgcggctaagctggacagccagcttcgtttggctatggagacagcagaagccagggtacggaaagactttgagctttttgaggaagaacagaagagggaacgggaacgtgtatccgcagcgttagttgagagagaggacatcctaaggcggacaaaggagtacagggaatcttggcagcgggatatagaagctctggacgcgctggcgctatcccaaagaaaacagtgggaggacgcggtagcggaagctgaggagcgtctgattcaactgaaccgggatttggattccaagacaggtgaagcagaggaacgtgtacttaaggaagtggagaaccgtttggcgggataccgtgaagaacaggccgcgcagtggaaacattttgacgctctggcggatgacgcggttaagctggacagccaacttcgtttagctatggagacagcggaagccagagtacggaaagactttgagctttttgaggaagaacagaagaaggaacgggaacgagtatccgccgcgctagttgagaaagaggacatcctaaaggcggaacaaaaggagtatagggaatcctggcagcgggatatagaagcgctggatgcgcttgcgctatcccaaaggaaacagtgggaggacgcggtagcggaagctgaggagcgtctgactcagatgaaccgggatttggattccaaggccagtgaagcagaggaacgtgtacttaaggaagtggagaaccgtctggcgggataccgtgaagaacaggccgcgcagtggaaacattttgacgcactggcgaatgacgcggctaagctggacaaccagcttcgtttggctatggaggcagcggaagccagggtacgggaagactttgagctttttgaggaagaacagaagagggagcgggaacgtgtatccgcagcgttagttgagagagcggacatcctaaaggcggaacaaaaggagtatagggaatcctggcagcgggatatggaagctctggacgcgcttgcgctatcccaaaggaaacagtgggaggacgctctagcagaagcggaggagcgtctggtccaactgaaccagcatctgaattacaagaccggtgaagctgaggagcgtctgattcaactgaaccgggagctggattccaagaccggtgaagcagaggaacgtgtacttaaggaagtggaggatcgtctggcgggataccgtgaagaacaggccgcgcagtggaaacattttgacgctttggcggatgaagcggttaagctggacagccagcttcgtttggctatggagacagcggaagccagggtacggaaagactttgagctttttgaggaagaacagaagagggaacgggaacgagtatccgcagcgttagttgagagagaggacatcctaaaagcggaacaaaaggagcatagggaatcctggcagcgggatatagaagctctggacgcgcttgcgctatcccaaaggaaacagtgggaggacgcagtagcggaagctgaggagcgtctggctcagatgaaccgggatctggattccaagaccagtgaagcggaggatcgtttgattcaactgaaccgggatttggattccaagaccggtgaagcggaggaacgtgtacttaaggaagtggagggccgtctggcgggataccgtgaagaacaggccgcgcagggaaacctcggccgctcggccgaatctgtccttgggtaa

SEQ ID NO: 55920 - protein, 789 aa, Unknown
  Obtained from environmental sample
  misc_feature (1)..(789): Xaa is any amino acid
MEELIRMNNRVEENLDRLKEESAFVEETIKKIAGLKAVTEKMENGIGSLELRFARENAVALEKAEAAAVKLEEDALVKYREEALVRVHHFQDTIEEKFHEYHENAKARIAEIQTLVRSCKDEWKNNHTQMEAEQKEYRESWQRDIDALDALALSQRKQWEDAVAEAEDRLIQLNRDLDSKTGEVEERVLKEVENRLAGYREDQAAQWKHFDALADDAAKLDSQLRLAMETAEARVRKDFELFEEEQKRERERVSAALVEREDILRRTKEYRESWQRDIEALDALALSQRKQWEDAVAEAEERLIQLNRDLDSKTGEAEERVLKEVENRLAGYREEQAAQWKHFDALADDAVKLDSQLRLAMETAEARVRKDFELFEEEQKKERERVSAALVEKEDILKAEQKEYRESWQRDIEALDALALSQRKQWEDAVAEAEERLTQMNRDLDSKASEAEERVLKEVENRLAGYREEQAAQWKHFDALANDAAKLDNQLRLAMEAAEARVREDFELFEEEQKRERERVSAALVERADILKAEQKEYRESWQRDMEALDALALSQRKQWEDALAEAEERLVQLNQHLNYKTGEAEERLIQLNRELDSKTGEAEERVLKEVEDRLAGYREEQAAQWKHFDALADEAVKLDSQLRLAMETAEARVRKDFELFEEEQKRERERVSAALVEREDILKAEQKEHRESWQRDIEALDALALSQRKQWEDAVAEAEERLAQMNRDLDSKTSEAEDRLIQLNRDLDSKTGEAEERVLKEVEGRLAGYREEQAAQGNLGRSAESVLG

SEQ ID NO: 55921 - DNA, 618 bp, Unknown
  Obtained from environmental sample
  misc_feature (1)..(618): n is a, c, g, or t
atgattaaaattcttgtcgtggaagatcaggttatgctgcgtgagtcgctggaacgcgttatcggcggacagaacgacatggaagtcgtggggtcaacagacgatgccgcaaaaacgccggaactgtgccgggagttgcaggtcgacctcgtgcttatggatatagtaactaaaaacaacgcatcaggcataacgtatacagcacaaatacgcgccgaatttcccaacataaaaacagtgataatgaccggtttttcggaaatgacatttattgacgaggccagaaaagccggagcgcacagttacgtttacaaaaattcagggtatgagcatttattttatgtaatccgcaataccatgatggggaacggcatttaccccggcccggaaaactatttgccccttgacacgcaatttaacgaaagagagcttgctgtaatccgcatggtatgcaagggaaaatcaagaacagaaatagtcaaggaattgaaactgtcagaatcagtggttaaaagaattattaccgccattctggaaaagacagaatttgataacataatgaaatttgctatctacgccgtaagccgcggtttgatagtgcctgatagcgagaaatag

SEQ ID NO: 55922 - protein, 205 aa, Unknown
  Obtained from environmental sample
  DOMAIN (136)...(193): Bacterial regulatory proteins, luxR family
  misc_feature (1)..(205): Xaa is any amino acid
MIKILVVEDQVMLRESLERVIGGQNDMEVVGSTDDAAKTPELCRELQVDLVLMDIVTKNNASGITYTAQIRAEFPNIKTVIMTGFSEMTFIDEARKAGAHSYVYKNSGYEHLFYVIRNTMMGNGIYPGPENYLPLDTQFNERELAVIRMVCKGKSRTEIVKELKLSESVVKRIITAILEKTEFDNIMKFAIYAVSRGLIVPDSEK

SEQ ID NO: 55923 - DNA, 1002 bp, Unknown
  Obtained from environmental sample
  misc_feature (1)..(1002): n is a, c, g, or t
atggaaaacctcggagaagagaccgccgaagccctgcgcaatttccgttacctgtccaggaggcagacttacagtcctggcaaagagccttcatggctgccccacgcacgggtattgatagtggacgatatgccggcaaacctccttgtaacgcgggggctgcttgcccgctacggtttgcaggcggataccgccgcttccgggctggaagccgtggaaaaggtaaaaagccgcgattacgacctgattttcatggatcacatgatgcctgagatggacggcgttgaaactttaatggctataaggcaattggcaattggcgaagaacaatcaggcaagagcgtgaagcagacgccaatcattgcgcttacggctaacgcacttcgcggaatgaaagaattctatctggaaaatggctttcaggattacctttcgaaaccgattagccccgaagcgttagacgaagtgattaataaatggctcaatgaacaggtatcaagcagcgagaacgcttcttctttgttcattgccaattcctcattgttggctgaaatagaggcgcagcgccttgatattctgaaccactacctcgcatcttttaccagcgtgcccgaaactgactggctggcaaaattcgacacagcgtattttgaaaggtttacctctttgataaaatcaatcatcagcgcggaaatgcccgccgcattgagggaacaggcggccttgctggccgagaccgggcggaaagaggatacgcgtaaaatacgggaaacccttccggctttttgcgaggctctgcaaaaatggcgggaacagaaggcggcgggcaacgggcagggcacggaaaggcaaatactggacgagctcttgcccangctgaaagaggcgttgcttgcggacgaaaccgaaacagcggaagctgcattcggcgaattgggggagggctgccctcacttctaccggaagggaactgtactttcgactctatgctctgatgtttga

SEQ ID NO: 55924 - protein, 333 aa, Unknown
  Obtained from environmental sample
  DOMAIN (36)...(158): Response regulator receiver domain
  misc_feature (1)..(333): Xaa is any amino acid
MENLGEETAEALRNFRYLSRRQTYSPGKEPSWLPHARVLIVDDMPANLLVTRGLLARYGLQADTAASGLEAVEKVKSRDYDLIFMDHMMPEMDGVETLMAIRQLAIGEEQSGKSVKQTPIIALTANALRGMKEFYLENGFQDYLSKPISPEALDEVINKWLNEQVSSSENASSLFIANSSLLAEIEAQRLDILNHYLASFTSVPETDWLAKFDTAYFERFTSLIKSIISAEMPAALREQAALLAETGRKEDTRKIRETLPAFCEALQKWREQKAAGNGQGTERQILDELLPXLKEALLADETETAEAAFGELGEGCPHFYRKGTVLSTLCSDV

SEQ ID NO: 55925 - DNA, 642 bp, Unknown
  Obtained from environmental sample
  misc_feature (1)..(642): n is a, c, g, or t
ttggccgagttgatgcctggaagctttggatgtcccttttttgaccaacagttactggatcttttggcgggcaaggaagtaacgctgcccgtattcgactttagaacaggcaaacgcagggaagcaggcgggcggaagatccgcctggacagcagaaccatgctggtaatcgaaggcatacacgggctaaacgacgcccttaccccgcaaataaaaagggaaaccaaattcaagctctacgtctcggctcttacccagcttaaccttgacgatcacaaccgcatccctaccagcgacaacaggctcttaaggcggatggtgcgcgaccatcagttccgcaatgcaaaagcggtaaggacttttaatatgtggccaagcgtccagcgtggggagcggaaaaatattttcccgttccagaactcggccgatgccgcctttaactccgcactggactacgaacttgccgttctaaaattttacgcagaaccgcttctgcggacggtaaagcccggtatgaaggaatacccggaggcccaaaggctgctttccttcctggaaaatttcgcgccaatcccgccgcagtacgttcccggattcagcatactccgcgagtttatcggcgaatcggactttaagtattga

SEQ ID NO: 55926 - protein, 213 aa, Unknown
  Obtained from environmental sample
  misc_feature (1)..(213): Xaa is any amino acid
MAELMPGSFGCPFFDQQLLDLLAGKEVTLPVFDFRTGKRREAGGRKIRLDSRTMLVIEGIHGLNDALTPQIKRETKFKLYVSALTQLNLDDHNRIPTSDNRLLRRMVRDHQFRNAKAVRTFNMWPSVQRGERKNIFPFQNSADAAFNSALDYELAVLKFYAEPLLRTVKPGMKEYPEAQRLLSFLENFAPIPPQYVPGFSILREFIGESDFKY

SEQ ID NO: 55927 - DNA, 726 bp, Unknown
  Obtained from environmental sample
  misc_feature (1)..(726): n is a, c, g, or t
atggttgttcccgcgctgcaagataacgcccttgaagggcagaagcccgacgtgcttatcataggaggcggcataagcggctgcactatcgcaagggaattggcccaccatgatcttgatattctgcttgttgagaaagagcatgaccttgcaatgcaggcttcgagccgcaatgacggcatggttcatcctggcgttgatctgcgtaaaggatcatggaagtatcgctacaaccttaagggaaacgccctgtatggcaaactctgcgaagaattggaagtcgattttgatcgcagcggccagtatgtctgtttcagcaatccgttattaatgcctttcctttaccttacgcttttatactggaaatggcttggcgttccggccagagtaatcgggaaaaaagaattgcgccgcctggaacccggcctgaaggaagaccttgtcctggcgctggccttcccttctaccggagtggtctgcccttacaacctgaccatcgcctgtggtgaaaacgccgtgcagaacggtgcgcggataagccttgacaccgctgtgcttggcatgaattcatgcgacggccgcataaccgctgtcagaacaaacaggggtacgatctatccaaaggtcgtggttaacgctgcgggagtcttttccgacgaaatgcaggaatggcgggggatcgttttttttctatacatccccggcgggggagcaatattatactga

SEQ ID NO: 55928 - protein, 241 aa, Unknown
  Obtained from environmental sample
  DOMAIN (17)...(238): FAD dependent oxidoreductase
  misc_feature (1)..(241): Xaa is any amino acid
MVVPALQDNALEGQKPDVLIIGGGISGCTIARELAHHDLDILLVEKEHDLAMQASSRNDGMVHPGVDLRKGSWKYRYNLKGNALYGKLCEELEVDFDRSGQYVCFSNPLLMPFLYLTLLYWKWLGVPARVIGKKELRRLEPGLKEDLVLALAFPSTGVVCPYNLTIACGENAVQNGARISLDTAVLGMNSCDGRITAVRTNRGTIYPKVVVNAAGVFSDEMQEWRGIVFFLYIPGGGAILY

SEQ ID NO: 55929 - DNA, 681 bp, Unknown
  Obtained from environmental sample
  misc_feature (1)..(681): n is a, c, g, or t
atgccgtggaaaccccggagcgtgaaaattttgcctgccgaaaggggatcgatcgaaaccaccatgaagaaatttaacgccacctgtacgaggctcaacatgactcacatcattaattattttactggagtaagagcgcctacttacaaagaagaatttgtggtttgcaaggtaaggagatgcgtcaaccttatccactcagcgggaatccagtcgcctggccttaccgccgcaccggcaatcgcaattgatgtggcaaaatgggccgtggaactgcttgaagtcgcaggggaaacggtttcgcctaacgcggaatttaaccctgtccgcaaacgcattccacatattgccgccatgagcgatgaagaacgcaccgcgatgataaggcaaaatcctgattacggaatcatactttgccgctgcgaagagctaagcaagggcgagattatcgacagcctccgacggcctgtgccatgcgacacagtagacggtgtacaacgccgcgtccgtccacgaatgggccgctgcacagccggtttctgcgagccccttgtcttgcaaactatcgccgaacaaaagggaatcccgcttgagatggttacaaaaaatcgacggcagcggaatatactctgctgccctacggaggtcaaaactctatgtaacctgagtctactactataa

SEQ ID NO: 55930 - protein, 226 aa, Unknown
  Obtained from environmental sample
  DOMAIN (136)...(193): BFD-like [2Fe-2S] binding domain
  misc_feature (1)..(226): Xaa is any amino acid
MPWKPRSVKILPAERGSIETTMKKFNATCTRLNMTHIINYFTGVRAPTYKEEFVVCKVRRCVNLIHSAGIQSPGLTAAPAIAIDVAKWAVELLEVAGETVSPNAEFNPVRKRIPHIAAMSDEERTAMIRQNPDYGIILCRCEELSKGEIIDSLRRPVPCDTVDGVQRRVRPRMGRCTAGFCEPLVLQTIAEQKGIPLEMVTKNRRQRNILCCPTEVKTLCNLSLLL

SEQ ID NO: 55931 - DNA, 543 bp, Unknown
  Obtained from environmental sample
  misc_feature (1)..(543): n is a, c, g, or t
atgttgatttacgaaaaatatatcggaagaaacagagacgattttaagtcttacgaagatataagcaaaaactataaaattacctataacgatgattttaattttgcctacgatgtgcttgacgagttggcaaagagccagccggacgcgctctgtatgctgtgggtctccaatgaaggtgaagaaaaacgtataacgtttgcggaaatggcgcgatactccaataaagccgccaattatttcaaatccctcggtatacgcaagggcgattttgtaatgctggttctcaaaagaagctaccttttttggtattgcatgatgggccttcataaactcggcgcggttgccgttcaggcggcgcatcttttaaccaaagacgattatatttaccgctgtaacgcgggcggcatcaaaatggcggttattaccggcgacaataattgcaccgaagcttttgacggcggattaagcgaatacaaaacggtacaaatcaaggcggtaaccaaaggcaagaaagcgggggaagggctggctggattttga

SEQ ID NO: 55932 - protein, 180 aa, Unknown
  Obtained from environmental sample
  misc_feature (1)..(180): Xaa is any amino acid
MLIYEKYIGRNRDDFKSYEDISKNYKITYNDDFNFAYDVLDELAKSQPDALCMLWVSNEGEEKRITFAEMARYSNKAANYFKSLGIRKGDFVMLVLKRSYLFWYCMMGLHKLGAVAVQAAHLLTKDDYIYRCNAGGIKMAVITGDNNCTEAFDGGLSEYKTVQIKAVTKGKKAGEGLAGF

SEQ ID NO: 55933 - DNA, 828 bp, Unknown
  Obtained from environmental sample
  misc_feature (1)..(828): n is a, c, g, or t
atgataatgtcattttcatccggtaccacaggctatcccaaaatggtagcgcacgattacacctacccgctcggtcacttgatgaccggcgttttttggcacagggtagagaaaggcggcctgcattttaccatttccgatacaggctggcttaaatcgctgtggggcaaaatgtacggacagtggctcggagaatgcgccatcctgacttatgactttgaaaaattcaacgcgcgcgatattttaaaagttcttgaaaaatataaagtaacaagtttctgcgctccgcccacgatgtaccgctttatcatgaacgaggacgtgccgtcttacgatctttccagccttaaacactgcaccgctgccggcgaggctctgagtcaggacctgttcaaaaaatggaaaaccatgacagggcttaacatatacgaaggtttcgggcaaacggaaacgacaatctgctgcgggacgctttacccgttcacggaaccacatgccagctcgatgggtatgggtatccccggttacaatgtgacgcttcttgacgccgatggtaacaaagtacccacgggcgcgacaggtgaaatttgcatgaaggctgagcgctcaaagccgggagttccccgccgccctgtaggtctgtttatgggttaccataaaaatgacgaagcgacggataaatcgtggcatgacgggtatttccataccggcgatcttgcctattacgatgaacacggttatctgtggtatgtgggacgcaacgatgacgttattaaatcctcagggtaccgcataggggcccttcgaggtagaaagcgtgctgcttaa

SEQ ID NO: 55934 - protein, 275 aa, Unknown
  Obtained from environmental sample
  DOMAIN (1)...(275): AMP-binding enzyme
  misc_feature (1)..(275): Xaa is any amino acid
MIMSFSSGTTGYPKMVAHDYTYPLGHLMTGVFWHRVEKGGLHFTISDTGWLKSLWGKMYGQWLGECAILTYDFEKFNARDILKVLEKYKVTSFCAPPTMYRFIMNEDVPSYDLSSLKHCTAAGEALSQDLFKKWKTMTGLNIYEGFGQTETTICCGTLYPFTEPHASSMGMGIPGYNVTLLDADGNKVPTGATGEICMKAERSKPGVPRRPVGLFMGYHKNDEATDKSWHDGYFHTGDLAYYDEHGYLWYVGRNDDVIKSSGYRIGALRGRKRAA

SEQ ID NO: 55935 - DNA, 759 bp, Unknown
  Obtained from environmental sample
  misc_feature (1)..(759): n is a, c, g, or t
atgatggccgaggctgcgctctggcttggcgctctcctcaccggagaggctcaatccgccgttaccgcttcctcctggtacaaagaagcttcgcaaaaacaggaaagcccatcgctcagcgttagagcgcctcgccttgaaagcgttcaaatcggcggccttgccttccgccaggtacacggcggccttccgctattgggagctaatttccctcatggtacaacggttgataccttttacattttacaggacccgataagccccgccgcctggcgtgcttttacggagcaggagccaaagtgggaaaaagaaaacctggacgcccttattaaagaaggccttgtaaatgaaagctaccttgaagatctccccgatgccccggacagcggggtttcaggaatttcctggcacgcggctgtggctttttgcagttggctgaattcttcactgccgcgagaattcgcctcgtatgaggtacacttgcccaccgaagccgaatgggaatatgccgcatcttccggcgcaattgaatacggcactttttgggagtggtgcgaagagccctacgttccattaagctttctttcagttccgcaaggtgcgccgcagttttcgcccgaaaggccggtcaggggaggctcatggagaaatccgcagggttccgtaaacagcgaaacacggggctcgcttccgccttctttctgctcccccttcgtctccgcaaggcccgtgcttgtcttaaaaaggaacgtcccataa

SEQ ID NO: 55936 - protein, 252 aa, Unknown
  Obtained from environmental sample
  SIGNAL (1)...(19)
  DOMAIN (44)...(245): Domain of unknown function (DUF323)
  misc_feature (1)..(252): Xaa is any amino acid
MMAEAALWLGALLTGEAQSAVTASSWYKEASQKQESPSLSVRAPRLESVQIGGLAFRQVHGGLPLLGANFPHGTTVDTFYILQDPISPAAWRAFTEQEPKWEKENLDALIKEGLVNESYLEDLPDAPDSGVSGISWHAAVAFCSWLNSSLPREFASYEVHLPTEAEWEYAASSGAIEYGTFWEWCEEPYVPLSFLSVPQGAPQFSPERPVRGGSWRNPQGSVNSETRGSLPPSFCSPFVSARPVLVLKRNVP

SEQ ID NO: 55937 - DNA, 468 bp, Unknown
  Obtained from environmental sample
  misc_feature (1)..(468): n is a, c, g, or t
atgagcgatggcatcaagataattgcgatcaaccgcaaggccaggcacgactactccgtcgatgaaacctacgaatgtggcatagagcttttgggaacggaagtaaaatctttcagggacgggaaaatatcctttcccgacgcctgggccgaagttataaacagggaagtctggcttcattccctcagaatcgcggagaatcccttctcgtcaatttttaaccacgaccccgacaggaaaaaaaaactccttttaaaccgtgacgaaataaagcgcataacgcggaaaacagaagaaaagggctatacgcttgttcccctttcgttttatttcaaaaaaagcagggtaaaagttgagctgggtctttgcaaagggaaaaaacaatacgacaaaagagccaacataaaagagaacgacattaaacgcgatgtagagagggaattccgcgggaagaatatgaaactttaa

SEQ ID NO: 55938 - protein, 155 aa, Unknown
  Obtained from environmental sample
  DOMAIN (6)...(73): SmpB protein
  misc_feature (1)..(155): Xaa is any amino acid
MSDGIKIIAINRKARHDYSVDETYECGIELLGTEVKSFRDGKISFPDAWAEVINREVWLHSLRIAENPFSSIFNHDPDRKKKLLLNRDEIKRITRKTEEKGYTLVPLSFYFKKSRVKVELGLCKGKKQYDKRANIKENDIKRDVEREFRGKNMKL

SEQ ID NO: 55939 - DNA, 1101 bp, Unknown
  Obtained from environmental sample
  misc_feature (1)..(1101): n is a, c, g, or t
atgcaaaatcagttaggcgatgaaagcgtctatcttcggattatggaacttgaaaacggtctgctccaacataccgatacaactaacgcttatagattgttggtagaacacggaaaagatattagatacaatgacgcatggaaaaaatgggttgtctggaacggcaaatattgggaaatggatggcggttatttaatccatgacaagggcttacaaataattagggggatatataaagagttactgaaaaccgccgattatcgggaacgtatcgacattgaaaaacacgcaatgcagagcgaaagcgcaaggcggcgaaaagcacttgttgaagttgcaagctggatacctgaattgaatatcaaaactgatgacctggacaaagacccctggctttttaatgtgcgtaacggaacgattgattacggacaggggaaattggggaacattaatcaaagcgatttaatcacacggattgcgaatgttgattatgaccctgccgcatcctgccctatatggaaaaagtttataatggaaattatgaactacaatacggaattaattcactttatccagaacgccgccggttgggctattaccggagatacctcggaacaaacaatgtttattttatttggaactggcgcgaatgggaaaagtacatttcttaataccattatgaacctgttaggcgattatgccattgcaacgcctacggaaacgtttatgaggaaaattggagattatatctctaatgatatagcccgattgagagggacccgatttgttactactacggaagcggaacatgggcggcggctgtctgaaccgctgattaaacagataaccggaaatgataaaatgactgcccgcttcctttacggcgaattttttaattttattcctactttcaagatttttatggctacgaaccacaagccggttataaagggaactgaccacggtatatggcggcggattaaacttgtgccgttcattacgcggattgaggaagataaacaggataaacaccttgatctgtatntgaggatagtagcaagcggaattctcaactggcttttagaagggatggcggtttga

SEQ ID NO: 55940 - protein, 366 aa, Unknown
  Obtained from environmental sample
  DOMAIN (133)...(366): Poxvirus D5 protein-like
  misc_feature (1)..(366): Xaa is any amino acid
MQNQLGDESVYLRIMELENGLLQHTDTTNAYRLLVEHGKDIRYNDAWKKWVVWNGKYWEMDGGYLIHDKGLQIIRGIYKELLKTADYRERIDIEKHAMQSESARRRKALVEVASWIPELNIKTDDLDKDPWLFNVRNGTIDYGQGKLGNINQSDLITRIANVDYDPAASCPIWKKFIMEIMNYNTELIHFIQNAAGWAITGDTSEQTMFILFGTGANGKSTFLNTIMNLLGDYAIATPTETFMRKIGDYISNDIARLRGTRFVTTTEAEHGRRLSEPLIKQITGNDKMTARFLYGEFFNFIPTFKIFMATNHKPVIKGTDHGIWRRIKLVPFITRIEEDKQDKHLDLYXRIVASGILNWLLEGMAV

SEQ ID NO: 55941 - DNA, 1566 bp, Unknown
  Obtained from environmental sample
  misc_feature (1)..(1566): n is a, c, g, or t
ttggagttgggtgtaaaacgcggggacaaaattgggttgattgcagacaacaggcgcgaatggatgctttccgatttcggcgttctttccattggagctatcgacgttccgcgcggatgtgatattactactcaggaacttatttatatattgggttttaccggctgtgaaattgcctttgcggagaaccagaaacaggttgaaaaaatactttcctgcaaagcggaacttcccgttttaaaaactttaatcacatttgaccccgtagacaatcaaaccgaagccgccgcgaaagacgccggaattaatgtgcttttctttgccaatttggtcgccatgggagaaaagcgcgagaaaatgcgaagcggcgaagtcgaggcggaaatggacaagggcggcagcgaggatattgcgagtatcatttttacttcgggaactacgggcgagccgaagggtgttatgctgctgcacagaaattttttgtaccagcttccgtactttatcctgttctttgaagtaaagcccggcgacatttggatttccatgcttcctgtttggcatgtgtacgaaagactcatggagtatgtaatttttaattacagcaacggcatcgcctattcaaaagcaatttcatcaatattgatggaagactttaaagctatccgtcctcactggatggtttccgttccccgcgtatgggaagcaatcatggacggcattaacaggaacattaaggcaaaaagcggctttacaaaaaaattatttgatattgcggtttcaatgtctatggtttttacgcactttaaagatttaacactgggactgctcccgaattttcacggacgtatccgcgttatagattctattatcggatttttaccgtgggttttacttcttccgttcagaggacttgcccagcttattgtatttaacaaaattacgcgcgaattcggcggacgttttaaagccggaatttcaggcggcggttctttgccagcaaaggtagatttattttttaattcgattggtatccgtctgcaggaaggttacggtcttacggaaaccgctcctcttgtaactgtacggcagtacaaacattctcggcgcggaacaattggtcaggtgcttcccaatacacaggtgaaaataatcgacacaaaaggaaaagtaatgccgcccggcagaaacggaattatctatgtaaaaggcgatcaggtgatgaagggttactacgaaaaacccgaagcgaccgccgcggttttaagcgaagacggctggtttaacacaggcgacattggaatgttaacgcatgataatgaaatacgcataacaggcagagcgaaagacacaattgttcttagaggcggcgaaaatgtagagcctgttccgattgaatgtaaactgaggggaaagcccgtacattcaacagtgtatggtagtggggcaggatcaaaaatatctggcggctcttattattccgtggcagcagacaattatggattttgcggaagaaaactcaattcctgttgtcgattacgaattattgttgcaacagccggaaattaa

SEQ ID NO: 55942 - protein, 521 aa, Unknown
  Obtained from environmental sample
  DOMAIN (1)...(482): AMP-binding enzyme
  misc_feature (1)..(521): Xaa is any amino acid
MELGVKRGDKIGLIADNRREWMLSDFGVLSIGAIDVPRGCDITTQELIYILGFTGCEIAFAENQKQVEKILSCKAELPVLKTLITFDPVDNQTEAAAKDAGINVLFFANLVAMGEKREKMRSGEVEAEMDKGGSEDIASIIFTSGTTGEPKGVMLLHRNFLYQLPYFILFFEVKPGDIWISMLPVWHVYERLMEYVIFNYSNGIAYSKAISSILMEDFKAIRPHWMVSVPRVWEAIMDGINRNIKAKSGFTKKLFDIAVSMSMVFTHFKDLTLGLLPNFHGRIRVIDSIIGFLPWVLLLPFRGLAQLIVFNKITREFGGRFKAGISGGGSLPAKVDLFFNSIGIRLQEGYGLTETAPLVTVRQYKHSRRGTIGQVLPNTQVKIIDTKGKVMPPGRNGIIYVKGDQVMKGYYEKPEATAAVLSEDGWFNTGDIGMLTHDNEIRITGRAKDTIVLRGGENVEPVPIECKLRGKPVHSTVYGSGAGSKISGGSYYSVAADNYGFCGRKLNSCCRLRIIVATAGN

SEQ ID NO: 55943 - DNA, 327 bp, Unknown
  Obtained from environmental sample
  misc_feature (1)..(327): n is a, c, g, or t
atggtagtggggcaggatcaaaaatatctggcggctcttattattccgtggcagcagacaattatggattttgcggaagaaaactcaattcctgttgtcgattacgaattattgttgcaacagccggaaattaatgaaataatcgccactgaaatttccgagcgtgtaaaccccaagacaggctttaaaccctatgagcggatttacaaatttgtccttctgccaaaaccctttgaacccggcaaagaactgtcaggcaagggtgaacttttgcgtcataatattgcggcactgtacgcgaaagaaatatacaagttgtttaagtag

SEQ ID NO: 55944 - protein, 108 aa, Unknown
  Obtained from environmental sample
  misc_feature (1)..(108): Xaa is any amino acid
MVVGQDQKYLAALIIPWQQTIMDFAEENSIPVVDYELLLQQPEINEIIATEISERVNPKTGFKPYERIYKFVLLPKPFEPGKELSGKGELLRHNIAALYAKEIYKLFK

SEQ ID NO: 55945 - DNA, 1620 bp, Unknown
  Obtained from environmental sample
  misc_feature (1)..(1620): n is a, c, g, or t
atggacgaggaagaaatacggcagaggatcaaggcttcggcttccagaaaagactttatacttaaaaggtacgttacgccggaaacctataacattattagaacaatgcaggaagagaaagacagccctctggcgggcgttgtcgcaagggcggtccctttcagggtttatcctgaaaaagaccttgccgcccagattgtcggttttgtcggcacggagtatcagggccaggaggggattgagtacgcccttaataacgaactgacagggaaagagaattcaggcagcggaagcaaggtggaactgaccattgacgcaaacgtccagtatattctggaaaaagtagcgggttcgacgcttaaggctacccgcgcggaatcggttatttttctagcgatggatcccagaaacggcgagatactcggatccgcggttacgcccggtttcgatcccaatgattttcgtaatgccaacagcgaatattaccgcaaccttccggcgaatatgccttatgagccgggctcggtgatgaaggtcatatcaatttcagctcttatgaattcgggcgcgataggcgaacgctcggaatttatctgcaacggtatatacgaatggactaccccctcaggcagaaaagaacgtctgcgctgcgccgacggggtagcgcacggcagggtagggccgagggaaataataatgtactcctgcaatataggcgcgtttcacgccgccagcatgcagaacgaccagggcttttaccagtccatgctggatttcggctttggcaaaagaaccggcgcgtggaggccggaaatggaaatatccggtttccttgacaaacccggatcgaggacatggtcaagccgcaccaagcagtctatcgcgttcgggcaggagatagccgtttccgcgctgcaggtgctgcaggccgccggcgccatcgcaaacgacggggtattggttccgccaaaaatagtgtcccgcatcgtttccgccgacggcaaaacagaaaaagtttgggacaacggcgataaccaggctcgccgggtaataagcccggagatcgcaagaaagatgcgccaatacatggctgacacggcgtccgtgatgggcaccggctggcgcggcagcatcggcgatctcaatatcgcgataaaaaccggcaccgcccaataccgggatccctccagcgggaggggttcgggttattccgctacggatttcatttcaagctgtatcgcccttttgcccgcggaaagcccatcgcttgttttgtacgtggcaattataaaacccagaggcgaaactctcggcggaagaatcgccgcgcccgccataaaggaagccgccgaagaaattgtcaattaccttggcatcccgcgcggcagaaccccctggatggctcatccgggcaccatagacattggggaagagagactgccggccataggcggcagcgtccccagtttttacggcctctccaaaaaagccctggtgcccctgcttctgcgaaacgacctccacatagaaatgtggggcgacggctgggtaaggcggcagtctcccccccccggaacgacgttaaccgcggacatggtgattgaactgtatctcgagtaa

SEQ ID NO: 55946 - protein, 539 aa, Unknown
  Obtained from environmental sample
  DOMAIN (485)...(539): PASTA domain
  misc_feature (1)..(539): Xaa is any amino acid
MDEEEIRQRIKASASRKDFILKRYVTPETYNIIRTMQEEKDSPLAGVVARAVPFRVYPEKDLAAQIVGFVGTEYQGQEGIEYALNNELTGKENSGSGSKVELTIDANVQYILEKVAGSTLKATRAESVIFLAMDPRNGEILGSAVTPGFDPNDFRNANSEYYRNLPANMPYEPGSVMKVISISALMNSGAIGERSEFICNGIYEWTTPSGRKERLRCADGVAHGRVGPREIIMYSCNIGAFHAASMQNDQGFYQSMLDFGFGKRTGAWRPEMEISGFLDKPGSRTWSSRTKQSIAFGQEIAVSALQVLQAAGAIANDGVLVPPKIVSRIVSADGKTEKVWDNGDNQARRVISPEIARKMRQYMADTASVMGTGWRGSIGDLNIAIKTGTAQYRDPSSGRGSGYSATDFISSCIALLPAESPSLVLYVAIIKPRGETLGGRIAAPAIKEAAEEIVNYLGIPRGRTPWMAHPGTIDIGEERLPAIGGSVPSFYGLSKKALVPLLLRNDLHIEMWGDGWVRRQSPPPGTTLTADMVIELYLE

SEQ ID NO: 55947 - DNA, 978 bp, Unknown
  Obtained from environmental sample
  misc_feature (1)..(978): n is a, c, g, or t
gtgaaaaaacctttaacaacgataattatcatcgcggttatttttatcggcattcttgtcgcaggaccgctctttgtaattgaagagggagagcaggcggtagtcgtgcagatgggaaagattgtgcgcattgttaccaacgccggccttcacatgaaaactccgtttatagacgaggttgtccgttatccgaaaaaaattatggcgtgggacggagagcagacaagcattcccacaagggagaagcagtacatctgggttgatgttacggcgcgctggcgcattgccgatcctcagaagttttatgaatctatttccacgctggaaagggcgtattccaaacttgccgaagtcatcgattccgaagtaaaaacggttacagccgaaaattatttcagggaatcggtgcgcaattcaaatataatcatgacaagggcaagtactgttgacgatcttggtatcagcgacgaaattgatcccagcgttattcagtcctcaatacggccggaaacaaattatgaggctattgaaaagggacgacggaaaatcgcggaggaaatcctcgggcgttcgcggcggctggtccccgaatacggcattgagcttatcgacgttgttatccgtcagatccgctactccgacgatcttacacccagcgtgtacgcgcgcatgatcaaggagcgcaaccaaatcgcgcaggcaatccgttccgagggcgaaggcagaaaagccgctcttttgggaaggatggacaatgagcgtatggaaatccgctccgccgcatacgaccgttccgagtcaatccgcggcgaagccgacgcgaaagcggcaagaatttacgctgaagcttacaaccgcgacagggctttttttgatttttggcgggcgatagaatcctatcgtcaaactatgccgaaatttaacaaaactcttaccacagatatggaatatttccgttatctgtattcaccgagataa

SEQ ID NO: 55948 - protein, 325 aa, Unknown
  Obtained from environmental sample
  SIGNAL (1)...(21)
  DOMAIN (23)...(241): SPFH domain / Band 7 family
  misc_feature (1)..(325): Xaa is any amino acid
MKKPLTTIIIIAVIFIGILVAGPLFVIEEGEQAVVVQMGKIVRIVTNAGLHMKTPFIDEVVRYPKKIMAWDGEQTSIPTREKQYIWVDVTARWRIADPQKFYESISTLERAYSKLAEVIDSEVKTVTAENYFRESVRNSNIIMTRASTVDDLGISDEIDPSVIQSSIRPETNYEAIEKGRRKIAEEILGRSRRLVPEYGIELIDVVIRQIRYSDDLTPSVYARMIKERNQIAQAIRSEGEGRKAALLGRMDNERMEIRSAAYDRSESIRGEADAKAARIYAEAYNRDRAFFDFWRAIESYRQTMPKFNKTLTTDMEYFRYLYSPR

SEQ ID NO: 55949 - DNA, 1251 bp, Unknown
  Obtained from environmental sample
  misc_feature (1)..(1251): n is a, c, g, or t
ttgcaggcaaaaacaatatcaatagcctcgtttatatcgtttctttctcttgtctgcctgttattttctcttagttcatatttgatagaacttatcccttatatcggaatgttggtgcttctgtttatctgtaaccattacgctaaccagtataacagttttagttttaacatctctaaccttgcggcttatgtttatacggctgttaaactgcccgtgcttattttggatgatacaggcaatattatgctctgcaatacggcttcagaaagtttttttaagctaactactgaacaacttaacaggctgaaattatttagcctgtttgattttgcggataactccttatcagacagctcattatcattgcaccgccataaaaaagacgcgactgttttcaactgcgacgctgtttgccgcgttgagggacagaaatgccaaatttcactgaattatatttatgataaatttgatgagatgatctgtacggttgttattgttaccgacatcaccgaaaaagaagatttaattcgacaacttcatgaatctcacgctcaaattgagcgttttaacaaagaactgcagtccgaagttgaccggcaaactgaaagtatccgcaatctgcaaaaggcgattgtctattcaatgagtgatttgatagaaaaaaaagacggctacaccggcgtacataccaggcgtgtaagcgagtatgtggctattttactgcgtgaattggtaaggcgcggctatgaactgactgaatcggagattcaaagaatagcggaatcttccctgctgcatgatatgggaaaaatcgcgataccggacagcattcttcttaaaaacggaaaattagacgacgatgagttcggcgtaatgaagagccacagcgcgaaaggggcggattctctggaaaaatcaatgcagttcgtgaaggataatgactttctgaaaaacgcgtttgtaatggcaaaacatcatcatgaaaaatggaacggcggcggttatcccgacggtaaaaaaggagacgagatacctcttcttgcgcgggtaattgccattgccgatgtttatgacgcattacgttctgaacgttcgtataaaacgccattcagccgcgagaaagcaaaagcaatcatattggaagaaaacggacgccaattcgatcctgaacttgttgatgtttttttggcggtggagccggagtttgagaagttttgtaaatctactcaagagggcggagagctatga

SEQ ID NO: 55950 - protein, 416 aa, Unknown
  Obtained from environmental sample
  SIGNAL (1)...(28)
  DOMAIN (227)...(361): HD domain
  misc_feature (1)..(416): Xaa is any amino acid
MQAKTISIASFISFLSLVCLLFSLSSYLIELIPYIGMLVLLFICNHYANQYNSFSFNISNLAAYVYTAVKLPVLILDDTGNIMLCNTASESFFKLTTEQLNRLKLFSLFDFADNSLSDSSLSLHRHKKDATVFNCDAVCRVEGQKCQISLNYIYDKFDEMICTVVIVTDITEKEDLIRQLHESHAQIERFNKELQSEVDRQTESIRNLQKAIVYSMSDLIEKKDGYTGVHTRRVSEYVAILLRELVRRGYELTESEIQRIAESSLLHDMGKIAIPDSILLKNGKLDDDEFGVMKSHSAKGADSLEKSMQFVKDNDFLKNAFVMAKHHHEKWNGGGYPDGKKGDEIPLLARVIAIADVYDALRSERSYKTPFSREKAKAIILEENGRQFDPELVDVFLAVEPEFEKFCKSTQEGGEL

SEQ ID NO: 55951 - DNA, 1731 bp, Unknown
  Obtained from environmental sample
  misc_feature (1)..(1731): n is a, c, g, or t
atgccgcttgataaaaacataaagaaaacaatggtcattggctcaggcccgattgtcatagggcaggcggcggagtttgattatgcgggaacgcaggcttgcagagtattgcgtcaggacgggattgaaatcgtccttgtcaactcaaatccagccaccataatgacagataacaacatagccgacaaaatttacattgagcctttaacccttacgaccgttaagcgcattatcgaaaaagaacgccccgacagcatattatccggcctcggcgggcaaacggggctcactctctgcatgcagttagcccgtgacggctttcttgacaaaatgaacgtgcgcctgctcggttcctcccccgaaacaattgacaaagctgaagacagaaaattgttcaaggagacaatgcaaagcatagaccagccggtgattccttcggtaatcgcaaccgacgtgcaaacggcaatttctttcgccgatgaaatcggctaccccgtcattgtgcgtcccgccttcacgcttggcggcacgggcggcggcatcgcggctaacgaaacccagcttagggaaatcgccactaacggactggcgctctctccgatacaccagatattaaccgagaaatccatcacaggctggaaggagatcgagtttgaagtgatgcgcgaccgagtgggaaacgtaatcacggtctgttcaatggaaaactttgatcccgtaggcatacacacgggcgacagtatcgtaatcgcccctgccgttacgttagctgacaaagagtaccaaatgttgcgttcagccgcgttaaatattatctgcgccctcggcgttgaaggcggctgtaatgtacaattcgcgcttcataccgacagttttgaatacgcggttatcgaagtaaatccgcgcgtatcgcgctcctccgccctcgcaagcaaggcgacgggctaccccatcgcgaaagtcgcgacaaaaatcgccattggttacaccctagacgaaataataaacgccgttacgggaaatacattcgccgcctttgaaccgactcttgactatgtcgcggtaaaattccccaaatggccctttgacaaatttgtatacgcgcaaaaagagcttggcacccagatgaaagccacaggcgaagtcatggcaattgccgacacttttgaagaagcccttataaaagccgtccgaggcgcggagattggccttaacactcttgatatgccacgtcttgccgcaaaaccaaccgaagaaatccgcgcccttttaaacacggtaaccgacgagcgattattcatactatacgaagcaatcaaacgcaacatcagcgtagacgagttatacgcaatcacaaaagtagaccgctggtttttacacggactggttaatatcgccactaaccactacccgctatccactaacaactccctaatatacaaaatggtagacacctgcggcggcgaatttgaagctaaaactccgtacttttattccattcagaacgggacggagaacgaagccctgccgttcattcaaaagagcggtaaacagcgggttgtggttcttggatcgngaccaatccgcataggacagggaattgagtttgactacgcatgcgttcattgcgtttggactctgaaaagtttaggatacgaagtcatcgtaattaaacataaccccgaaaccgtctccaccgactttgacacggcgggacaggctttattttga

SEQ ID NO: 55952 - protein, 576 aa, Unknown
  Obtained from environmental sample
  SIGNAL (1)...(23)
  DOMAIN (420)...(501): Carbamoyl-phosphate synthetase large chain, oligomerisation domain
  misc_feature (1)..(576): Xaa is any amino acid
MPLDKNIKKTMVIGSGPIVIGQAAEFDYAGTQACRVLRQDGIEIVLVNSNPATIMTDNNIADKIYIEPLTLTTVKRIIEKERPDSILSGLGGQTGLTLCMQLARDGFLDKMNVRLLGSSPETIDKAEDRKLFKETMQSIDQPVIPSVIATDVQTAISFADEIGYPVIVRPAFTLGGTGGGIAANETQLREIATNGLALSPIHQILTEKSITGWKEIEFEVMRDRVGNVITVCSMENFDPVGIHTGDSIVIAPAVTLADKEYQMLRSAALNIICALGVEGGCNVQFALHTDSFEYAVIEVNPRVSRSSALASKATGYPIAKVATKIAIGYTLDEIINAVTGNTFAAFEPTLDYVAVKFPKWPFDKFVYAQKELGTQMKATGEVMAIADTFEEALIKAVRGAEIGLNTLDMPRLAAKPTEEIRALLNTVTDERLFILYEAIKRNISVDELYAITKVDRWFLHGLVNIATNHYPLSTNNSLIYKMVDTCGGEFEAKTPYFYSIQNGTENEALPFIQKSGKQRVVVLGSXPIRIGQGIEFDYACVHCVWTLKSLGYEVIVIKHNPETVSTDFDTAGQALF

SEQ ID NO: 55953 - DNA, 927 bp, Unknown
  Obtained from environmental sample
  misc_feature (1)..(927): n is a, c, g, or t
gtgcttgatcttcttaataacaaattgacggaagtgcctcttgaaaaacttgcggacggcgacctaaaaaccgataaaaacattttcttcactacggataacgcggcgattaaccgtatgaaggaacttagaattaactatacctataccccaagaatacctgattttaaaaaccttttaaccgaaacaggttttcccgaatttgtccgcactgtcctttcaacgttgagcacggcttataactatcctgtggacattgaatttacggctaactttgatccaaacggcaattttagatttaaccttctgcaatgccgccccctgcaaacaaaggggattggcagggttatggaagccccgcaacctaaagatgagaatatctttttctcgtccacgggcgatttcatgggcggtaatatcaggctgcattttgattatgttgtttttgtcaaagtgatggaataccttgagttggcggagcaggataaatatcaggcggcgcgtacagtcggtcttatcaatcaaaagttaaaggataaaacggttttattgatggggccgggacggtggggaacaactacgacttcacttggagttcccgttcattttagcgagttatgcaacatggcggccttgtgcgaagtatcgtatctgaaagcgggcatagtgcctgagttgtcttttggcagtcacttttttcaggacattgtggagtccgatattttttacgccgccatttttgacggggaaccgggcatcacattccgtcccgatcaaattttatcccgtaaaaacctgttcgcggaattttttcccgaagaaaaaaaatgggagtctgtgatacacatagcgcaaacgccgaatttaattttacattccgatattacaaatcaaaaattgcttatttactgggaacaggatgtatga

SEQ ID NO: 55954 - protein, 308 aa, Unknown
  Obtained from environmental sample
  misc_feature (1)..(308): Xaa is any amino acid
MLDLLNNKLTEVPLEKLADGDLKTDKNIFFTTDNAAINRMKELRINYTYTPRIPDFKNLLTETGFPEFVRTVLSTLSTAYNYPVDIEFTANFDPNGNFRFNLLQCRPLQTKGIGRVMEAPQPKDENIFFSSTGDFMGGNIRLHFDYVVFVKVMEYLELAEQDKYQAARTVGLINQKLKDKTVLLMGPGRWGTTTTSLGVPVHFSELCNMAALCEVSYLKAGIVPELSFGSHFFQDIVESDIFYAAIFDGEPGITFRPDQILSRKNLFAEFFPEEKKWESVIHIAQTPNLILHSDITNQKLLIYWEQDV

SEQ ID NO: 55955 - DNA, 1056 bp, Unknown
  Obtained from environmental sample
  misc_feature (1)..(1056): n is a, c, g, or t
gtgcaaatgacatttccaaacaaaccttatatttcttttgaatatccagacactagaagcattgctttaggcgacncaagagcctttttttcgcagtatgaaaaaggagctattttagacgagattcaaaaagtgccggagttgctttcttatttgcagggaattttggacaaaagcaaaaaaaatggcagatttatattgacaggaagccatcagccggaattgcacggagccattgctcaaagccttgctggaagaactgctattttggaactctatccattttctttaaaagaaactcttaacattccgcatatctcaaaaaatatttgggaattgattttcaatggttttttcccaagacttttaacgcaaaaaataagaacggaatctttttaccgttcttatgttgcaacttatttggaaagagatttgcaaagcattgtccatataagcgacaaacccagatttgagaaatttttaatgcttctagcttccagagtggggcagcttgtggattacagctcgctttccaatgatgttggtgtttctcaaaatacaattaaaaactggataaatgctctaaaatcattatatctgctttttgaacttttgccgtggcacagcaatattcgccgcaggctggttaaaactccaaaactttattttaccgatgtgggcttggcggtttatttaatgggaattaaggataggcaaactctggaaaggcatccgttcaggggtttgatttttgagaattttgttttaatggatttggttaagcaggaatggaacagaggaacaaagccatctttatattttttcagggattccataggcaatgaggtggatattttacatgagcaaaacggtatgtatgctccaatagaagtgaaaagctcggagacatttaacgaagattttgtcaaaggaattttcgcatttcaaaaaatgcttgccggaacagaatttgaaaaacaactattgccaggcactgttatttgcaacgtcaagcagaagttttcctttaaaggaataaatgtaaccccaccttag

SEQ ID NO: 55956 - protein, 351 aa, Unknown
  Obtained from environmental sample
  misc_feature (1)..(351): Xaa is any amino acid
MQMTFPNKPYISFEYPDTRSIALGDXRAFFSQYEKGAILDEIQKVPELLSYLQGILDKSKKNGRFILTGSHQPELHGAIAQSLAGRTAILELYPFSLKETLNIPHISKNIWELIFNGFFPRLLTQKIRTESFYRSYVATYLERDLQSIVHISDKPRFEKFLMLLASRVGQLVDYSSLSNDVGVSQNTIKNWINALKSLYLLFELLPWHSNIRRRLVKTPKLYFTDVGLAVYLMGIKDRQTLERHPFRGLIFENFVLMDLVKQEWNRGTKPSLYFFRDSIGNEVDILHEQNGMYAPIEVKSSETFNEDFVKGIFAFQKMLAGTEFEKQLLPGTVICNVKQKFSFKGINVTPP

SEQ ID NO: 55957 - DNA, 543 bp, Unknown
  Obtained from environmental sample
  misc_feature (1)..(543): n is a, c, g, or t
ttggttatggacaccgaagtttattcaaacaccggcggacaggcaagtaaagcgacgcccaaaggcgctgtagccaaatttgcggcgggcggaaaacccgtcggcaaaaaggacttgggagcgatagggcggtcttacggctacgtttacgtagcgcgcgtttcgcttgcaaaccccggacaaatcgtaaaagcgatgcttgaagcggaagcgtacgatggtccttctctgattatcgcttattcgcactgtgtagcgcacggaatttcgatgaacaacggcgtgagcgaagcgaaaaaagcgattgatacgggacatttggtgctttaccgctacaatcccgaaaagacgcttgaaggcaaaaatccgctcactatcgacagcaaagagccgagcgctccgttgagcgaatttacagcgggtgaaaaccgtttcaggattttgcaaaaagcgaaccctgaagcgtacgaaaaacttatcgcgtccgccgacgctgaaaacaaagcgagaatcgcaactttgcatcatttggcggctgaatag

SEQ ID NO: 55958 - protein, 180 aa, Unknown
  Obtained from environmental sample
  misc_feature (1)..(180): Xaa is any amino acid
MVMDTEVYSNTGGQASKATPKGAVAKFAAGGKPVGKKDLGAIGRSYGYVYVARVSLANPGQIVKAMLEAEAYDGPSLIIAYSHCVAHGISMNNGVSEAKKAIDTGHLVLYRYNPEKTLEGKNPLTIDSKEPSAPLSEFTAGENRFRILQKANPEAYEKLIASADAENKARIATLHHLAAE

SEQ ID NO: 55959 - DNA, 2394 bp, Unknown
  Obtained from environmental sample
  misc_feature (1)..(2394): n is a, c, g, or t
atgcgcaagatgatcgataacgatctggtgacagcacacaggacgcgcggccttaaccctgaacatccccgtatcaggggaaccgcccaaaaccccgacacctatttccagggacgcgagggcgtgaacaagtactacctcgccgtgccgggcattgtgcaggcggaaatggacaagctcgccaaaatcatagggcggcagtaccatgtattcgattaccacggcgcgaaagacgcggaaaaagtaatcatcatcatgggttccggcgcggaaacctgcgaggaaaccgttgattaccttaactcaaagggagagaaaaccggcctggtgaaagtccacctgtaccgcccctttgacgtaagcctctttgtaaaggccctgccctccacggtaaaagcaatcgccgttcttgaccgcaccaaagaccctggcgcgattggcgaaccgttatacgaagatgtccgcaccgctatcgccgaagcgaaggcggcgggtaaattctccgccgacccgattgtactgggcggacgttacgggcttggttccaaggaattcacccccacaatggtcaaggcggtgtttgacaacctgtccggcaagaaaatcgccaacttcatagtcggtattgatgatgacgtggagcacaagagcctggattacgatccgaattttgtactggaagaagagggcctgaacgaagccctgttctacgggcttggagcggacggcacggtcggcgcaaacaagaactcaatcaagatcatcagcgaggcgaaaccggaactcaacgcccaggcgtacttctcctacgactcgaaaaagtcaaacggcttcaccgtttcgcacctccgcttcggcaagggccgtatcagaaggccataccttatcaactccgcggacttcctcgcctgccataaattttcctacatggaaatgtacgacatgctcaagagcgttaaagcgggcggaaccttcctcctcaacagcccgttcaaggccgccgacgtatggaagaacctccccgtagaggcacagcagcgcataatcgacaaaaaattaaaattctatgtcatcaacgccgctgaaattgcgcgtaacaccggcatgggtaaccgcatcaacacggtcatgcaggccgcctatttcaaaatttccggcatactggccgaagccgacgcggtaaaacgcatgaaggaacatattgagcactcctacggcaagaagggcaaagacgtagttgaaaagaactataaaaccgttgacgcgtcattaaacgccgttgaagaagtaaagtacccctccaaaaccgaaggggacatccacatgaagaaaccctttgccaccgcgaaggattcatggatcaaagacgttctgggaaccatgtcgatacaggaaggcgataccctggctgtcagcaaaatcccggaagacggaaccttccccacagcgactacccaatacgagaaacgctcggtggcggaacaggttcctgtctggaatcccgacgtgtgtatacagtgcggcaactgtacggttgtatgcccccatgcctgtatgcgctttaagaaccttaccgacgatcaggtcgctaaagcgccgaaaggcttcaaaaccgcggcgataaaaccaaagccggtggatggacagaaagcggcgctggttatagcctgcgaagactgctacagctgcggcgtctgcttcaatatatgtcccatgtccaataaaggccaggaaaaacccgcgctggcatggaaacattattccgatgatcacgaattccataaggaacaggtcgcggtttgggattacttcctttcattgcccgaaacgcctgccggcgagcttaaaaacgcgaaagcgttcgcctacaagcgtcccctgtttgaattctccggcgcctgcggcggctgcggtgagacaccctacatcaaacttatgtcgcagcttgtcggcgaccgggcgctcatcggcaacgccacaggctgtacctcgatttacggcggcaacctccccaccaccccctacgcgcagagggcggacggacgcgggccggtgtggtcaaacagcctctttgaagacgcggcggaattcgcaatgggcttcaggcttaccagcgacaagctggctgtccatgcccgcgaaatcgccgaaaaagcaaaaggcgaaggcattgccgccgccatcatcgacaagatactctccaatgatcaggctgatgaagcgaagatcgacgaaatacggaaaagcatcgacgaactcaaagcggcgcttaaaaacgactcaaaacccacggctaaactgctgctctcccttgccgatttctttgtaaaaagatcggtatggggcttcggcggcgacggatgggcatacgacatcggtttcgggcggtcttga

SEQ ID NO: 55960 - protein, 797 aa, Unknown
  Obtained from environmental sample
  DOMAIN (497)...(520): 4Fe-4S binding domain
  misc_feature (1)..(797): Xaa is any amino acid
MRKMIDNDLVTAHRTRGLNPEHPRIRGTAQNPDTYFQGREGVNKYYLAVPGIVQAEMDKLAKIIGRQYHVFDYHGAKDAEKVIIIMGSGAETCEETVDYLNSKGEKTGLVKVHLYRPFDVSLFVKALPSTVKAIAVLDRTKDPGAIGEPLYEDVRTAIAEAKAAGKFSADPIVLGGRYGLGSKEFTPTMVKAVFDNLSGKKIANFIVGIDDDVEHKSLDYDPNFVLEEEGLNEALFYGLGADGTVGANKNSIKIISEAKPELNAQAYFSYDSKKSNGFTVSHLRFGKGRIRRPYLINSADFLACHKFSYMEMYDMLKSVKAGGTFLLNSPFKAADVWKNLPVEAQQRIIDKKLKFYVINAAEIARNTGMGNRINTVMQAAYFKISGILAEADAVKRMKEHIEHSYGKKGKDVVEKNYKTVDASLNAVEEVKYPSKTEGDIHMKKPFATAKDSWIKDVLGTMSIQEGDTLAVSKIPEDGTFPTATTQYEKRSVAEQVPVWNPDVCIQCGNCTVVCPHACMRFKNLTDDQVAKAPKGFKTAAIKPKPVDGQKAALVIACEDCYSCGVCFNICPMSNKGQEKPALAWKHYSDDHEFHKEQVAVWDYFLSLPETPAGELKNAKAFAYKRPLFEFSGACGGCGETPYIKLMSQLVGDRALIGNATGCTSIYGGNLPTTPYAQRADGRGPVWSNSLFEDAAEFAMGFRLTSDKLAVHAREIAEKAKGEGIAAAIIDKILSNDQADEAKIDEIRKSIDELKAALKNDSKPTAKLLLSLADFFVKRSVWGFGGDGWAYDIGFGRS

SEQ ID NO: 55961 - DNA, 528 bp, Unknown
  Obtained from environmental sample
  misc_feature (1)..(528): n is a, c, g, or t
ttgacaatgagcgacccgcaaacgctgctgaccgccgtctcccgcttccctgagacccccggcgtctacctgatgaaagacgccgcgggcagcctgctctacgtgggcaaagccgtcaacctccgctcacgcgtccgctcctactttctgagcgaccacgcggaccgcgcccagatcccgggcatgctgcgcctgttggatcatatcgacctgatcgtcaccaacaccgaggcggaggcgctgatccttgaggccaaccttgttcgcaagcacaagcccaaatacaacatcgaactgcgggacgacaagcattatccgtacctcaaagtgacggtcaacgagccgttcccgcggcttctcgtggtgcgcagagtggagcgggacggcgcaaaatactacggcccctaccccgacgttgggacgatgcggcgtatggctgatttcgcgaaacgcatatttttgttacgcgattgcaacaagaaccttccttgcaaagggcaatacgtccatgcactcggccgattctga

SEQ ID NO: 55962 - protein, 175 aa, Unknown
  Obtained from environmental sample
  DOMAIN (19)...(102): GIY-YIG catalytic domain
  misc_feature (1)..(175): Xaa is any amino acid
MTMSDPQTLLTAVSRFPETPGVYLMKDAAGSLLYVGKAVNLRSRVRSYFLSDHADRAQIPGMLRLLDHIDLIVTNTEAEALILEANLVRKHKPKYNIELRDDKHYPYLKVTVNEPFPRLLVVRRVERDGAKYYGPYPDVGTMRRMADFAKRIFLLRDCNKNLPCKGQYVHALGRF

SEQ ID NO: 55963 - DNA, 723 bp, Unknown
  Obtained from environmental sample
  misc_feature (1)..(723): n is a, c, g, or t
ttgtatatgataaccgaccccaactataatttcctctctcccgccgggcgcgattttgtgattgccgccgcccgtttcggcgccgtcagcccgtcgagccgcgtgttgatgctgggttgcggcggcggggcgggggcggtcgtggccgccaaggagttccgctgcagggtggtcgcggtggagacgcgtcccgggtttgccgaggaggcgaggggtttgtgcgagcgcgagggggtgagccacctggtgacggtcgacgccggaaatccgttcgagtccgactatgccgaagatccgtttgatttagttatcgcggagggcggttttctgagaccggcgacgagggcgccttttttcgacgcgatagggcggtggctgctgcctagggcgtttgcagctttcgcggacataatttacacaacggaacaagttcctgccgccgtgagccagatgtacggcagtttgaagaagcagacgctctcagaggaggagtaccaaaaactggttaaggacgcgggcgttgagctgcagtatgtggggctctcgccacccagcaattgggacaacttctacggatatataataaagaggttgaatgacgccgagggtttcttcggctccggcgcggtgaaggcggctatgaataatgagattaatctgttctataggatgggctgtttgaagtatatagggtatctgacatgtatttgccgtaagggttga

SEQ ID NO: 55964 - protein, 240 aa, Unknown
  Obtained from environmental sample
  DOMAIN (36)...(134): Methyltransferase domain
  misc_feature (1)..(240): Xaa is any amino acid
MYMITDPNYNFLSPAGRDFVIAAARFGAVSPSSRVLMLGCGGGAGAVVAAKEFRCRVVAVETRPGFAEEARGLCEREGVSHLVTVDAGNPFESDYAEDPFDLVIAEGGFLRPATRAPFFDAIGRWLLPRAFAAFADIIYTTEQVPAAVSQMYGSLKKQTLSEEEYQKLVKDAGVELQYVGLSPPSNWDNFYGYIIKRLNDAEGFFGSGAVKAAMNNEINLFYRMGCLKYIGYLTCICRKG

SEQ ID NO: 55965 - DNA, 723 bp, Unknown
  Obtained from environmental sample
  misc_feature (1)..(723): n is a, c, g, or t
atggccgggacttggtcatctccttctttgtggccctggcttgcctacaagtacataccgaacatcaaccaaagtataaacatcccgctcctgagcgtggacaggttctacccgtcgcttccggtctggctattcatccccttcatgacgctgaccatcgcggtgatggccaacggggtgaacttcaccgacggtttcgacacgcttgccacggtgccggcgatctgcagtttagcgttcctcgggattatttcttttgtatcgagcaacagcgtgtggagcagctacttgttgatcccccatattccgggtcttcaggagatactcccgcttataggcgcggtgataggcacgcttttagcctacctatggtacaattcgccgccgtccaccattataatgggcgacagcggctcggtcggcctcggcgggttcatcggcatactcttcatattctcgaagtcggagttctatctccccatagtggctttcatcttcctgttggagttcgtctccgtgtttatgcagatgggctacttcaagctgacgaaaaagcggatattccgctgcgcccccatccaccaccacttccagttcggcatgagggccgccgggaagtacgcgagcgagttccacataaagtcaaaggtcacctggcgcttccacatcacctccgtggtgctgttgatcgtcgggttggtgctgtttttgaagataaggtaa

SEQ ID NO: 55966 - protein, 240 aa, Unknown
  Obtained from environmental sample
  DOMAIN (10)...(159): Glycosyl transferase family 4
  misc_feature (1)..(240): Xaa is any amino acid
MAGTWSSPSLWPWLAYKYIPNINQSINIPLLSVDRFYPSLPVWLFIPFMTLTIAVMANGVNFTDGFDTLATVPAICSLAFLGIISFVSSNSVWSSYLLIPHIPGLQEILPLIGAVIGTLLAYLWYNSPPSTIIMGDSGSVGLGGFIGILFIFSKSEFYLPIVAFIFLLEFVSVFMQMGYFKLTKKRIFRCAPIHHHFQFGMRAAGKYASEFHIKSKVTWRFHITSVVLLIVGLVLFLKIR

SEQ ID NO: 55967 - DNA, 864 bp, Unknown
  Obtained from environmental sample
  misc_feature (1)..(864): n is a, c, g, or t
ttgcgcgataatcacaaaagcgccggttataattatggcgatgattcccctatcgccgccttcgcaaccattcccggcagcagcgcgcttacgttaatccgctgttccggcaagggtgcgatagaagcggtatcttccgtctttgcaccggacaaattaaaaaacgcgcccggtaataccgttattcacggatggatagttaaggcggacgaaaaaattgacgaagttcttgtttcggttttccgcgctccaaaaagttatacgggcgaagacagccttgacatatcctgtcacggcggagcgagcgcgggaaaagcggtaatagacgcgttaaaatctgcgggctttcgggacgcgcttcccggcgaatttactttccgctcttttgtaaacggcaaactagatcttacaaaagccgaatccgtcatggaactggtatccgcaaaaaccgaaactggccgccgtcacgccgtgtcgcgtctttccggctctttgcaaactgaaattgaggaaataaaaaaattggtggttcaggttctttccggcgctgaaatttaccttgactattcggaagatgaaatcggcgcggacattgacgaagatgccggaaaacttccctatcaaaacattgcgctggaagcgttatcgcgtcttaaaaaactgtccgcttcatggcggattgagcgcatttatcaggagggggtaacggtagtaatagccggccgccccaacgccggcaagtccagtctttttaacgccttgttgaaagaagaccgttctatcgttacggaaattcccggcactacccgcgactggatagaagcngtgggtttctatcgatggaattcccatccgtcttgttga

SEQ ID NO: 55968 - protein, 287 aa, Unknown
  Obtained from environmental sample
  DOMAIN (235)...(285): GTPase of unknown function
  misc_feature (1)..(287): Xaa is any amino acid
MRDNHKSAGYNYGDDSPIAAFATIPGSSALTLIRCSGKGAIEAVSSVFAPDKLKNAPGNTVIHGWIVKADEKIDEVLVSVFRAPKSYTGEDSLDISCHGGASAGKAVIDALKSAGFRDALPGEFTFRSFVNGKLDLTKAESVMELVSAKTETGRRHAVSRLSGSLQTEIEEIKKLVVQVLSGAEIYLDYSEDEIGADIDEDAGKLPYQNIALEALSRLKKLSASWRIERIYQEGVTVVIAGRPNAGKSSLFNALLKEDRSIVTEIPGTTRDWIEAVGFYRWNSHPSC

SEQ ID NO: 55969 - DNA, 597 bp, Unknown
  Obtained from environmental sample
  misc_feature (1)..(597): n is a, c, g, or t
ttgacaatatctcggcaaatgatggataagacctgggcgactcttgatagaatcgctcagcggcaagaagaaactgaccgacagatgaaagaaactgaccgacagatgcaggaaactgcccggcagatgaaagaaactgaccggattgtcaagaacaataacaaactaatcggggatcttggcaaccgtttcggcgaaatgatcgagtatatggttgtgccaaatctattggagaagtttcatgatttggggtttgtttttgataaagcttacaataatacagctataaaagaccggacgaataatatattcgcgcaagttgacattacccttgaaaacggcgacaaggttatgattgtcgaggtcaagtccaaaccggatgccgaagacataaagtcgcatattcagcgtatggaaaaggtaaaaactcatgcggcttatcatggcgacaaacggaaattcctgggggctgttgcgggtgtggtattcctgccggaggtaaaagagtacgcactgaagcaggggttttttgcgattgagccttccggtgaaacttttaatattactccgccaaatggccagccaaaagaatggtaa

SEQ ID NO: 55970 - protein, 198 aa, Unknown
  Obtained from environmental sample
  misc_feature (1)..(198): Xaa is any amino acid
MTISRQMMDKTWATLDRIAQRQEETDRQMKETDRQMQETARQMKETDRIVKNNNKLIGDLGNRFGEMIEYMVVPNLLEKFHDLGFVFDKAYNNTAIKDRTNNIFAQVDITLENGDKVMIVEVKSKPDAEDIKSHIQRMEKVKTHAAYHGDKRKFLGAVAGVVFLPEVKEYALKQGFFAIEPSGETFNITPPNGQPKEW

SEQ ID NO: 55971 - DNA, 984 bp, Unknown
  Obtained from environmental sample
  misc_feature (1)..(984): n is a, c, g, or t
ttgaataatgcccttttccagcattattttaatcgcttcgcttatacttataagcgtagaaaattatgtatttgtttttacataatgggaaaagtagaaataatcaagccatttttctacatttcattttcagagaagactatggtactagacggcaaatctcttgctgctcagattgagcaggaactcaaaggaagggttcaggcggttgttcaaaaaacgggaggcaaagttcctgcgcttgccacgattttagttggcgacgacctttccagcgcgacttatgtgaagatgaagggcaatgcctgcaaaagggtgggtttggaaagcctgcctgttttgctgcccgcttctaccactacagaagaattgctcagcaaaataaaagaactcaacgagaaccctcttgtgcgtgggattttattgcagcatcccgttccaaagcaaatagacgagcgaaaatgctttgacgcaatttcattagaaaaagatgtggacggcgtaacctccctaggttttgggcttatgagcatgggcgaaaaggcttacggctccgcaacgccaaaaggcataatctcgcttttggagcattataaaattccattggaaggcaaatatgccgttgtggttgggcgtagcgcgattttgggcaaacctatggctgcaatgctgttgaacaaaaactgcacggtcacaatctgccacagcaaaactcaaaacttgccgcatataatagagcaagctgatataatagttggtgcggtgggaattccagaattcattaaaacccagtggttgaaaaacggagtggtcgctatagatgccggctatcacaacaaagatggaggagcggtcggcgatattcaaaaggaaagtttaagcgacaagtgttctgcctacacgcccgtgcccggcggagttggacctatgaccatcgctacgttgattcaacaaaccgttgaagctagcgagatgtttttctaa

SEQ ID NO: 55972 - protein, 327 aa, Unknown
  Obtained from environmental sample
  DOMAIN (48)...(166): Tetrahydrofolate dehydrogenase/cyclohydrolase, catalytic domain
  misc_feature (1)..(327): Xaa is any amino acid
MNNALFQHYFNRFAYTYKRRKLCICFYIMGKVEIIKPFFYISFSEKTMVLDGKSLAAQIEQELKGRVQAVVQKTGGKVPALATILVGDDLSSATYVKMKGNACKRVGLESLPVLLPASTTTEELLSKIKELNENPLVRGILLQHPVPKQIDERKCFDAISLEKDVDGVTSLGFGLMSMGEKAYGSATPKGIISLLEHYKIPLEGKYAVVVGRSAILGKPMAAMLLNKNCTVTICHSKTQNLPHIIEQADIIVGAVGIPEFIKTQWLKNGVVAIDAGYHNKDGGAVGDIQKESLSDKCSAYTPVPGGVGPMTIATLIQQTVEASEMFF

SEQ ID NO: 55973 - DNA, 1185 bp, Unknown
  Obtained from environmental sample
  misc_feature (1)..(1185): n is a, c, g, or t
atgataaaactcggcactcctttcaaagcaaactcgaagaaagcccttatgctcggttctggcgaacttggcaaggaagttattattgaacttcaaaggctaggcatagaaaccatagcttgcgactcttatgaaaacgctccggcaatgcaggttgcccatcgcagccacacgctctccatgctggacggcaacgccttgcgcaaagttatagagcaggaaaaaccggattacataatcccggaagttgaagccatcgcaaccgatacccttttggaattggaaaaagagggctacaacgtgatcccaaccgcaaaagctgccaaattgactatgaacagggagggcatccgccgccttgccgcagaggaactgaaattaaaaacaagcccgtataaattcgcggaaacaaaggaagaatttttagcggctataaaggaaataggaattccgtgcgttgtgaaacccataatgagttcaagcgggcgcgggcaaagcacggtgaaaacggaagcggatgttgagcacgcttgggattattcgcagagcggtggcagaactggcagcggcaaggttatagttgagggctttgtcccttttgattacgagataacgctttttaacggtcgccactcaaaaggcacgtctttttgcgcacccatagggcacgtacaaattgaaggcgattatcgctggagctggcagccgcaagatatgagcaaaaaagccttggaagaatctgagcgcatcgcaaaagcggttactgatgccttgggcggttatgggatttttggggttgagcttttcatcaaaggcgatgaggtttttttctccgaggtttccccccgcccccacgatactggaatggtcaccttgatttcgcaggatttgagcgaatttgccctgcacgcaagagctattttggggttgcccgtcccaaacatagcacagcatggacctagtgcttctgttgctttgcgggtggatggcaaaagcgatttgatttcttactccggtttggaggaggctttgagcgagccggatacctcgctccgcttttttggcaaacccagcatcaacgggcatcgcaggctgggcgtggttttggcaagaggggcaagcgttgaaaaagccattgaaaaagccaaaaacgctacgagcaaaataaaagtggaattggggtaa

SEQ ID NO: 55974 - protein, 394 aa, Unknown
  Obtained from environmental sample
  DOMAIN (113)...(295): ATP-grasp domain
  misc_feature (1)..(394): Xaa is any amino acid
MIKLGTPFKANSKKALMLGSGELGKEVIIELQRLGIETIACDSYENAPAMQVAHRSHTLSMLDGNALRKVIEQEKPDYIIPEVEAIATDTLLELEKEGYNVIPTAKAAKLTMNREGIRRLAAEELKLKTSPYKFAETKEEFLAAIKEIGIPCVVKPIMSSSGRGQSTVKTEADVEHAWDYSQSGGRTGSGKVIVEGFVPFDYEITLFNGRHSKGTSFCAPIGHVQIEGDYRWSWQPQDMSKKALEESERIAKAVTDALGGYGIFGVELFIKGDEVFFSEVSPRPHDTGMVTLISQDLSEFALHARAILGLPVPNIAQHGPSASVALRVDGKSDLISYSGLEEALSEPDTSLRFFGKPSINGHRRLGVVLARGASVEKAIEKAKNATSKIKVELG

SEQ ID NO: 55975 - DNA, 303 bp, Unknown
  Obtained from environmental sample
  misc_feature (1)..(303): n is a, c, g, or t
atggttctgaacggagctatggaacaagaggaacttgcattgatgtctgttgacggccaggaaaccgtttacgactcggacggagagtcattgccggcttttatctttggtgatgatgattacgaagacgatgaagactttgaagatgacgaagactttgaagatgaagacgatgatgaagacgaagaagacgaagatgattatgacgacgatgacgatctggatgaagatgacgactacgaagatgacgaagaagactacgatgaagaagatgacgaggattacgacgacttcgatgaatga

SEQ ID NO: 55976 - protein, 100 aa, Unknown
  Obtained from environmental sample
  misc_feature (1)..(100): Xaa is any amino acid
MVLNGAMEQEELALMSVDGQETVYDSDGESLPAFIFGDDDYEDDEDFEDDEDFEDEDDDEDEEDEDDYDDDDDLDEDDDYEDDEEDYDEEDDEDYDDFDE

SEQ ID NO: 55977 - DNA, 384 bp, Unknown
  Obtained from environmental sample
  misc_feature (1)..(384): n is a, c, g, or t
ttggaaaagattttaatggacgatatgttatcaaaaactgaaaactcaatctcgtttcaacttgcaaaaccgttagccgaacttttgcaggcgcataacgggcaggatgtttccctgctggatattcgcagtattaatgattgggctgacttttttataattgccactgtctcaagcagaactcacatggatggtcttgaacggcacattaaggatttttgccgcgagaagggaatagaaatatttggcatctcaaccaaaagcacagacgatgagtggcggttaattgatttaggctcaataataattcacttgatgaacagtcacgcgcgggatttctatgaactggaaaaattgtggcgtaataatgccggcagtctgtaa

SEQ ID NO: 55978 - protein, 127 aa, Unknown
  Obtained from environmental sample
  DOMAIN (19)...(121): Domain of unknown function DUF143
  misc_feature (1)..(127): Xaa is any amino acid
MEKILMDDMLSKTENSISFQLAKPLAELLQAHNGQDVSLLDIRSINDWADFFIIATVSSRTHMDGLERHIKDFCREKGIEIFGISTKSTDDEWRLIDLGSIIIHLMNSHARDFYELEKLWRNNAGSL

SEQ ID NO: 55979 - DNA, 969 bp, Unknown
  Obtained from environmental sample
  misc_feature (1)..(969): n is a, c, g, or t
ttggggctgctgattacaaaaattaaccgtgttgaccgtatcgacagggtatacgattcatcaagaatagggagttatgaaaacgaaataggaaaacttctgggaatagaaattaatttttctatcgtatttacaaaagaaaatttgatatctcttgtagacattctggaaggagtggaaatttttattccaacgtctgtgtcatacagggaaaatgacactcttatcctgtttccttccggcataacaattcttgacggtgataaagccgccgtttacgcgtcatacagacttcccgatgaagacaatgaaatgatagtttttcgcaggcagcgttttttcacggggctgctggatcgcattgttagtatgaacgcaagttttaaaaatcctgacgcggcaaaattatactattcgctttttaagacaaacatgaaccgtcgtacattagttcagcttcttgacgaatttgtttctcttgacgcctatcgtaccaatatccagtccgtcgggggaaacttgcgggaggtgtcgggacagatgcttgttattccgcactgggacggaaaccttgtaaaagaagttgtacgacagacattaggctcgcttacccgccggacagaaagttcaggacaacggacctctaccgtagagatactaaacggaacggcgactaccggccttgccggcagaacggcggaaatgctgcgtagttttggctatgatataatttccgtaggcaacgcggatcgcagcgattatgaaaagaccgtggttatttacttttctcctgatgacgttatggcgaaggcatttgccgatgttataaactgcacaaatatcaggagcgaatttgttccgaatgacgaaccggaaaatcaactggatataagaccctttgattataaggcggatattaggttaattattggaaaagattttaatggacgatatgttatcaaaaactga

SEQ ID NO: 55980 - protein, 322 aa, Unknown
  Obtained from environmental sample
  misc_feature (1)..(322): Xaa is any amino acid
MGLLITKINRVDRIDRVYDSSRIGSYENEIGKLLGIEINFSIVFTKENLISLVDILEGVEIFIPTSVSYRENDTLILFPSGITILDGDKAAVYASYRLPDEDNEMIVFRRQRFFTGLLDRIVSMNASFKNPDAAKLYYSLFKTNMNRRTLVQLLDEFVSLDAYRTNIQSVGGNLREVSGQMLVIPHWDGNLVKEVVRQTLGSLTRRTESSGQRTSTVEILNGTATTGLAGRTAEMLRSFGYDIISVGNADRSDYEKTVVIYFSPDDVMAKAFADVINCTNIRSEFVPNDEPENQLDIRPFDYKADIRLIIGKDFNGRYVIKN

SEQ ID NO: 55981 - DNA, 339 bp, Unknown
  Obtained from environmental sample
  misc_feature (1)..(339): n is a, c, g, or t
atggttgaagcagcccataaattcaaactaaaaaaggatgacactgtccagattatcgccgggaaggataagggtagaaagggacgtatactcaaaatttttcgggatacagaccgcattgtggtagagggcgcaaatatcgttaaaaaggcgaaaaaacgccgcaatcagcaggacagaggcggcatcattgaagtagaggcggctgttcactcgtccaatgtagccatagtttgcaaaaaatgcgggccgacccggattggttacaaagttgagggagccgaaggttccaagaaaactaaaaccaggatttgcaggaaatgcggggaggcgctgtaa

SEQ ID NO: 55982 - protein, 112 aa, Unknown
  Obtained from environmental sample
  DOMAIN (10)...(43): KOW motif
  misc_feature (1)..(112): Xaa is any amino acid
MVEAAHKFKLKKDDTVQIIAGKDKGRKGRILKIFRDTDRIVVEGANIVKKAKKRRNQQDRGGIIEVEAAVHSSNVAIVCKKCGPTRIGYKVEGAEGSKKTKTRICRKCGEAL

SEQ ID NO: 55983 - DNA, 324 bp, Unknown
  Obtained from environmental sample
  misc_feature (1)..(324): n is a, c, g, or t
ttgcggcgttttttcgcctttttaacgatatttgcgccctctaccacaatgcggtctgtatcccgaaaaattttgagtatacgtccctttctacccttatccttcccggcgataatctggacagtgtcatccttttttagtttgaatttatgggctgcttcaaccatgttccgctcctacaatacctctggggcaagcgaaatgattttcatgaaatcacccttttcccgcagttcccgggcaaccggcccgaatatgcgcttccctttggggttctgcgccgcatctatgataacgcaggcattgtcatcaaaccgtatatag

SEQ ID NO: 55984 - protein, 107 aa, Unknown
  Obtained from environmental sample
  SIGNAL (1)...(22)
  misc_feature (1)..(107): Xaa is any amino acid
MRRFFAFLTIFAPSTTMRSVSRKILSIRPFLPLSFPAIIWTVSSFFSLNLWAASTMFRSYNTSGASEMIFMKSPFSRSSRATGPNMRFPLGFCAASMITQALSSNRI

SEQ ID NO: 55985 - DNA, 330 bp, Unknown
  Obtained from environmental sample
  misc_feature (1)..(330): n is a, c, g, or t
ttgatgttaagtccgaagcgtgttaggcatcgtaaggtacaacgcgggaatatgcccggaaacgcaacaaggggaaatactgttgctttcggtgattatggtcttgtttccatggacagaatgtggattaccaaccggcagatagaagccgcgcgtattgccatgaaccgccatatcaagcgcggtggtaagctttggattcggatttttccggacaagccgtattccaagaagcctgcggagacccgcatgggcaagggaaagggcgcgccggaatattgggtagcggtggaaagccagggacagtcatgtttgaactgggcggcatag

SEQ ID NO: 55986 - protein, 109 aa, Unknown
  Obtained from environmental sample
  DOMAIN (2)...(109): Ribosomal protein L16
  misc_feature (1)..(109): Xaa is any amino acid
MMLSPKRVRHRKVQRGNMPGNATRGNTVAFGDYGLVSMDRMWITNRQIEAARIAMNRHIKRGGKLWIRIFPDKPYSKKPAETRMGKGKGAPEYWVAVESQGQSCLNWAA

SEQ ID NO: 55987 - DNA, 735 bp, Unknown
  Obtained from environmental sample
  misc_feature (1)..(735): n is a, c, g, or t
atgggacagaaagttaatccgatagggttgagggttgggatcaatagaacatggctttccaggtggtatgtggatcccaaagagtatgccgatacccttcacgaagatctcaagctgcgcaagctcataatggatatgccggaaactaaaggtgccgacattgcggagctggaaattatcaggcatccccagcggattacaattaccatacacactgcaaggccgggagttataatcgggataaaaggcgcgaatatcgagaagataacatctgaactccagaagcgtgtcagcaaaaaagttcagattaaaataaaggaagtcagaaacgccgataataacgcgcagataatcgcccagaatgttgccaggcagcttctggcgcgctcaagtttcaggcgggccatgaagcaggccattaccaacgcgataaaaaaaggcaacgcccagggagtaaaaattcgcctttccggcaggctcggcggtgctgaaatgtcacgcacggaagaagccaaagaggggcgcataccactgcataccctccgtgcggatatagattttggttttgccgaagcccataccacctttggctctataggggtaaaggtctgggtgtacaacggtatgaaatacgggaaggaacaaaaggaagacgcaggggcattgctccgcaaacggcgggaacgagttcctgctcatagaaatgagaaccaaagaaccgagagccggttttaa

SEQ ID NO: 55988 - protein, 244 aa, Unknown
  Obtained from environmental sample
  DOMAIN (65)...(119): KH domain
  misc_feature (1)..(244): Xaa is any amino acid
MGQKVNPIGLRVGINRTWLSRWYVDPKEYADTLHEDLKLRKLIMDMPETKGADIAELEIIRHPQRITITIHTARPGVIIGIKGANIEKITSELQKRVSKKVQIKIKEVRNADNNAQIIAQNVARQLLARSSFRRAMKQAITNAIKKGNAQGVKIRLSGRLGGAEMSRTEEAKEGRIPLHTLRADIDFGFAEAHTTFGSIGVKVWVYNGMKYGKEQKEDAGALLRKRRERVPAHRNENQRTESRF

SEQ ID NO: 55989 - DNA, 432 bp, Unknown
  Obtained from environmental sample
  misc_feature (1)..(432): n is a, c, g, or t
atggcaacaacggcaaaagatgaaaatcccccctacagggccataaccagatatttgctggtatccccttacaaaatccgcccggtggcggatctggtaaggcgaaaaccttataccgaagcagtggctattctggaaaatatgccgcacaaaggcgccaggctaatcagaaagacaatggtttccgccgcttcaaacgccctaaaccgtgacaaaaagcttgatgaagagatgctctatataagggaaataatggttgacgaagggccaaggatgaagcgtgtttggttcaggggcagaggccgggcggatatgcttttaaagaggatgtgtcacatcactgttattgtagaccaggcggcaaatgccggagcgaagactgcaaaaaatgtcgcggctaaaaaacctgcttcgaaaaaggcggagaagtaa

SEQ ID NO: 55990 - protein, 143 aa, Unknown
  Obtained from environmental sample
  DOMAIN (14)...(119): Ribosomal protein L22p/L17e
  misc_feature (1)..(143): Xaa is any amino acid
MATTAKDENPPYRAITRYLLVSPYKIRPVADLVRRKPYTEAVAILENMPHKGARLIRKTMVSAASNALNRDKKLDEEMLYIREIMVDEGPRMKRVWFRGRGRADMLLKRMCHITVIVDQAANAGAKTAKNVAAKKPASKKAEK

SEQ ID NO: 55991 - DNA, 768 bp, Unknown
  Obtained from environmental sample
  misc_feature (1)..(768): n is a, c, g, or t
ttgtacgaagtagaaggtgacatactgtatgatcgcgtagaacaggaagaaaaagctgacatggaatttctgttagaggaatgcgttcaagtcggcgttgctttaaaggttactgacaataaaataattttatttgaagaggcagcctatgaatcgaagccggttattgaaactttcgataaagcggattacggcggccgtattttaagttattcattttctcaagatacaaacggatctgtttgtaaagtactttcaagatataaagatattaaaagcggctttctaattgccgttgattttatccctccaaacccgccagtaaccgggcagattgaatatttaaatcaacgccctggggatttaaggggtgatgattttcgcgaacctaaagaaaaggcgccgccaaacgtgttaccctcaatgttggggcctgacggatcgcttttacctgagtatcaagattttgggataaataaaaaatttaaagcctataacgacttaaaggatgattttgacaggcgaagatccgatgtttatgacagggcaatgcgggaggcaaaagccgcggcgcgcgaaagaaataaaaatgaatggacttgcacattaagattgagaggaaacctgaacatggttggcggtgtaaatatcggcattactggttttggtgcttataacggcaaatattccgtaattgacgcacaacataacataggcggtaaatttgaaaccgttataaaagcccgtaaagtgcttgaaggttattaa

SEQ ID NO: 55992 - protein, 255 aa, Unknown
  Obtained from environmental sample
  misc_feature (1)..(255): Xaa is any amino acid
MYEVEGDILYDRVEQEEKADMEFLLEECVQVGVALKVTDNKIILFEEAAYESKPVIETFDKADYGGRILSYSFSQDTNGSVCKVLSRYKDIKSGFLIAVDFIPPNPPVTGQIEYLNQRPGDLRGDDFREPKEKAPPNVLPSMLGPDGSLLPEYQDFGINKKFKAYNDLKDDFDRRRSDVYDRAMREAKAAARERNKNEWTCTLRLRGNLNMVGGVNIGITGFGAYNGKYSVIDAQHNIGGKFETVIKARKVLEGY

SEQ ID NO: 55993 - DNA, 1776 bp, Unknown
  Obtained from environmental sample
  misc_feature (1)..(1776): n is a, c, g, or t
gtgctgtgccgcaggctgaaaaacaatcctattcacgtgggggattcgggcgtcgggaaaacagccgtcaccgagggtctcgcacagcgcatagtcgcgggcaatgtgccggatacgctgaaagacttcagcatcatggccctggatatgggcgcgttgatcgcgggaaccaagtaccgcggtgactatgaggatcgggtcaaacgggttatagaggaactgctgaaaaaagaaaaagcgatcctttttattgacgagatacataccctggtcggcgccggcgccgtttcgggcagcgcgatggacgcgtccaatttgttaaaacccgcgctcacatcgggaaagctgcgctgtatcggctccacaacccatgaggagtacggtaaattctttgacaaggatcgcgccctttcccgacgcttccaaaaaatcgacatcaacgagccccccgaggacgatgccatcgcaatccttcacgggctgaaatcaaaatacgaggaattccacaaagtgcgctacagcgacgaagcgattgagggggcggtgcgcctctccgtccagttcatcaccgagcgccgcctccctgacaaagccattgacattatcgacgaagcangcgccttcgcccgcatcagggcggggcagtccgataaaaccgccgactctgccgataacaataatgccgagaccgacataacggacgaaaccaaaaccgacgacgcgaccgccaatgttgttgaaacaattgaaatcggcctgccgctcattgagaccgtcgtatcaaaaatagcccgcataccggaacgttcggtcggcgaaagcgaaaaagacaggctgcggctgctggaaactaaacttaaagagaaaatcttcgggcaggacagcgcgattgaagcggtggtaaaagccgtaaaacggtcgcgggcgggattccgggccgagggcaaaccggtggcgaatttcctcttcgccgggcccacgggcgtaggcaagacggagcttgcccggcaattagccgaaattatgggagtcgccatgttccgctttgacatgagcgagtaccaggaaaaatacaccgtatccaggcttataggctcgtcgcccggctacatcggctacgatgacggcggccagcttaccgactcggtgcgtaagcagccccacgccgtggtgctgttagacgaaatagaaaaagcccacccggatatttttaatatccttttgcagataatggactacgccactctcacggacaaccagggccgcaaggccgatttccgtaacgtcatccttataatgaccagcaacgcgggcgcgagggaaataggcagggaattaatcggttttggagagcggatccaggacgacagcgcggtggatgacgcggtggaaaggatcttcaccccggaattccgcaaccgcctggacgcggtggtgcgcttcgggcatctttcccgcgagataatgctttccattgtccgcaaggaaattgagctctttgccgcgcagcttgccgaaaaaaaggtttcccttaccgtcacggatccctgcctggaaaaactcgccgaagaaggctactcaaaggaattcggcgcccgcaacgccggccgcattatagaagaaaaaatcaagagcttctttgtcgatgaagtcctctttggcaaactctcgaacggcggcagcgcggttgtagactggaaagacggctaccaaataacaattaacgatgagtccccttcgacaggctcaggggactcagggctcgccggtcactga

SEQ ID NO: 55994 - protein, 591 aa, Unknown
  Obtained from environmental sample
  DOMAIN (262)...(513): Torsin
  misc_feature (1)..(591): Xaa is any amino acid
MLCRRLKNNPIHVGDSGVGKTAVTEGLAQRIVAGNVPDTLKDFSIMALDMGALIAGTKYRGDYEDRVKRVIEELLKKEKAILFIDEIHTLVGAGAVSGSAMDASNLLKPALTSGKLRCIGSTTHEEYGKFFDKDRALSRRFQKIDINEPPEDDAIAILHGLKSKYEEFHKVRYSDEAIEGAVRLSVQFITERRLPDKAIDIIDEAXAFARIRAGQSDKTADSADNNNAETDITDETKTDDATANVVETIEIGLPLIETVVSKIARIPERSVGESEKDRLRLLETKLKEKIFGQDSAIEAVVKAVKRSRAGFRAEGKPVANFLFAGPTGVGKTELARQLAEIMGVAMFRFDMSEYQEKYTVSRLIGSSPGYIGYDDGGQLTDSVRKQPHAVVLLDEIEKAHPDIFNILLQIMDYATLTDNQGRKADFRNVILIMTSNAGAREIGRELIGFGERIQDDSAVDDAVERIFTPEFRNRLDAVVRFGHLSREIMLSIVRKEIELFAAQLAEKKVSLTVTDPCLEKLAEEGYSKEFGARNAGRIIEEKIKSFFVDEVLFGKLSNGGSAVVDWKDGYQITINDESPSTGSGDSGLAGH

SEQ ID NO: 55995 - DNA, 501 bp, Unknown
  Obtained from environmental sample
  misc_feature (1)..(501): n is a, c, g, or t
gtgcgccagtccgaggttcatggcatggcgcagcggggcggagcggtactcgctcatctgcgtatttccgatgcggctattgccggcgaccttgttccaaagggcagcgcggatattatcatctcaatggagcctttggaaagcctccgctataccggttggcttgccccctcgggagcgctggtcacagccgccgaaccgtttgttaatatcggtaattaccctgaaacggagactgttatcgccgccatcaaaagctacccgcattgcaggatcattgaagcggcggcgctggcaaaagaggctggccttgcccgtgcggtgaatacggtaatggtcggcgcggcctcggcttttctgccgataaaagtgcaaacgctggaagacaccattgccggcgtatttgcggcaaaagaggcggcggtgctgacagctaacacaaaggcgtttcagttgggaagacaggcggcggcaaacgcgtctaaaggcgggaatatatga

SEQ ID NO: 55996 - protein, 166 aa, Unknown
  Obtained from environmental sample
  DOMAIN (1)...(155): Pyruvate ferredoxin/flavodoxin oxidoreductase
  misc_feature (1)..(166): Xaa is any amino acid
MRQSEVHGMAQRGGAVLAHLRISDAAIAGDLVPKGSADIIISMEPLESLRYTGWLAPSGALVTAAEPFVNIGNYPETETVIAAIKSYPHCRIIEAAALAKEAGLARAVNTVMVGAASAFLPIKVQTLEDTIAGVFAAKEAAVLTANTKAFQLGRQAAANASKGGNI

SEQ ID NO: 55997 - DNA, 1314 bp, Unknown
  Obtained from environmental sample
  misc_feature (1)..(1314): n is a, c, g, or t
atgacattccagtacagggaacctcaaattgaaaaaatgccccgaggcgatcttgaagcgctgcaattgcaaaaattaaaagacgaagttggatttgccctgcgtacttccttttacaaggagaggcttggtaaggcggggatcaaaagtacggacgacattaagaccttaggcgatctgaggaagatcccctttaccaccaaaaatgatctccgtgacggttttccatacggatttttaagcataccaaaagatgaagttgtcaggcttcacgcttcaagcggcactaccggcattcccaccactatttatttcagcagggatgatataaaacgctggtcgggttatatggcccgctgtattttcggctcaggatgcaccaaatccgacgtgttccagaatatgattacttacgggctgttcaccgggggcttaggcatgcaccagggcggcgaggaagtggggatgctggtaatcccttccggggcggggaacacggcgcggcagttccgcctgatgcaggatttcgggacaaccgtggtacacgccactcccagcttccttctccatgttgaaaccaaaatgaaagaagcgggcgtcaagcgggaaagcctatcccttaaaaaggcctttgccggcgcagagccgtactccgaagacacgcggcgacgcatagaaggcctgcttaatatcgacgtgtataattcctacggcctttccgagatgaacggacccggcgttgcctttgaatgtcagtgcaaggacgggatgcatatctgggaagacggctatatcgcagagatcgttaatcccgatactcttgaacctgtcaaagacggcgaaaccggagaactggtgcttactatactctgccgtgaggcgacgccgcttctccgctaccgtaccagggacctgacctctttttacactgaaccgtgcgcctgcggcagaacccaccgccgcctgcaccgcatcacaggacgcagcgacgacatgctgataatcaacggcgtaaacgtcttccccagccagatcgaggaagtgatcatgggcatgaaggaggtgggaaacaactatcttattgtggttgaaaaagacggcgctctcgacaagctgacggtaaaaaccgaagtcggcccggacatattcatggacgatgcccgccccctcaacgccctgaaggagaggataagggaaaccctccaggtgtccatttcgatcagccccagggttgaactccacgaaagcggcagtatggcggtttcggaaggcaaggcggtaagggtacaggataagcggccaaaagatgtgtaa

SEQ ID NO: 55998 - protein, 437 aa, Unknown
  Obtained from environmental sample
  DOMAIN (2)...(360): AMP-binding enzyme
  misc_feature (1)..(437): Xaa is any amino acid
MTFQYREPQIEKMPRGDLEALQLQKLKDEVGFALRTSFYKERLGKAGIKSTDDIKTLGDLRKIPFTTKNDLRDGFPYGFLSIPKDEVVRLHASSGTTGIPTTIYFSRDDIKRWSGYMARCIFGSGCTKSDVFQNMITYGLFTGGLGMHQGGEEVGMLVIPSGAGNTARQFRLMQDFGTTVVHATPSFLLHVETKMKEAGVKRESLSLKKAFAGAEPYSEDTRRRIEGLLNIDVYNSYGLSEMNGPGVAFECQCKDGMHIWEDGYIAEIVNPDTLEPVKDGETGELVLTILCREATPLLRYRTRDLTSFYTEPCACGRTHRRLHRITGRSDDMLIINGVNVFPSQIEEVIMGMKEVGNNYLIVVEKDGALDKLTVKTEVGPDIFMDDARPLNALKERIRETLQVSISISPRVELHESGSMAVSEGKAVRVQDKRPKDV

SEQ ID NO: 55999 - DNA, 321 bp, Unknown
  Obtained from environmental sample
  misc_feature (1)..(321): n is a, c, g, or t
ttggctaaccatcgcgaccacaaactctacaaccgctatttcaaaatgggtgcaggctcaatcttcacctttgaaatcaagggcgatgcggaaaaagccaaactctttaccgaaaaactggagctgttttcgctcttggtaaacgtagcggacgtgaagtcgctggtggttcatcctgcttccaccactcattctcagatgagcgaagaggagctgctagaaagcggaataaagcccaacacaataaggctttccataggcactgagcatattgatgacatcatagacgatttaaaacagggatttgaagcggtgaagtga

SEQ ID NO: 56000 - protein, 106 aa, Unknown
  Obtained from environmental sample
  DOMAIN (1)...(103): Cys/Met metabolism PLP-dependent enzyme
  misc_feature (1)..(106): Xaa is any amino acid
MANHRDHKLYNRYFKMGAGSIFTFEIKGDAEKAKLFTEKLELFSLLVNVADVKSLVVHPASTTHSQMSEEELLESGIKPNTIRLSIGTEHIDDIIDDLKQGFEAVK

SEQ ID NO: 56001 - DNA, 639 bp, Unknown
  Obtained from environmental sample
  misc_feature (1)..(639): n is a, c, g, or t
atgtctgatattgttgtaacaggaacttttacagatgattcctttgctatggacgtagctcagtttttgggtgtgcgtggcgatatttccgatgaggtgtcgcttaaagtttatgcaaacggcgaattttgccctcgctatatctccgatattgaagacttggaaagggtgggttgccatttagaaggcaaggttgtaattatatgctcggtttctctttccacaaggagcagaaacgactgcgctatgcgaaatatgattttagcaagagccgcaaaagacaacggcgcanagagggtggttttaatagaaccggatttgttttactccgcccaagacaggggtgcccaccgatttagcgttattgaaaaagacagagatatcaccgatttaaaaaaatttgacgggcaagcattcacctccctgctatatgcaaaactcttaaaagaagctggcgtggacacggtcataaccgttcacaaccattttcttaaggtagaatgtctgttcagagatatttttgaaaggcatttttcacaaccttgttcctgcggaaatttacgcgcattacataaaaacctcggactttgtgcaaacagggaaagatggcgacaatttgataatagtttctccagataa

SEQ ID NO: 56002 - protein, 212 aa, Unknown
  Obtained from environmental sample
  misc_feature (1)..(212): Xaa is any amino acid
MSDIVVTGTFTDDSFAMDVAQFLGVRGDISDEVSLKVYANGEFCPRYISDIEDLERVGCHLEGKVVIICSVSLSTRSRNDCAMRNMILARAAKDNGAXRVVLIEPDLFYSAQDRGAHRFSVIEKDRDITDLKKFDGQAFTSLLYAKLLKEAGVDTVITVHNHFLKVECLFRDIFERHFSQPCSCGNLRALHKNLGLCANRERWRQFDNSFSR

SEQ ID NO: 56003 - DNA, 651 bp, Unknown
  Obtained from environmental sample
  misc_feature (1)..(651): n is a, c, g, or t
ttgaaaggcatttttcacaaccttgttcctgcggaaatttacgcgcattacataaaaacctcggactttgtgcaaacagggaaagatggcgacaatttgataatagtttctccagataagggttccgcttcttttgggaaaagagtgtgcgacactttggatctgccggagtgcaaacgtataatcttggataaaaaacgcacgggcgagcgtgaagtgagcatggcgttgaatccagcaagcgaagttgacattggttatttaacgggtaaagatgttataatcttagatgatatggttcgcaccggttccaccattgttcaatgctgtgaatatctgaaaaagagcgcgaacccacgcagggtttgctttggggtgacgcatttttactcaagccacgaagcgagggaaaaactgaacagcccatttatagatgagataatgacaaccaacaccctgccagatattctgaaccgcgattgccagggacgcttgcgccgtaaaattgttgtgttaaaactaggtcagtggattgcccgttatattctccgtatgtttgatatggactacagctatttgagcaagcagttttatatggtggatatgtcgtctaaaaatccgcgttggccgccgccgagttttttgaaataa

SEQ ID NO: 56004 - protein, 216 aa, Unknown
  Obtained from environmental sample
  DOMAIN (7)...(147): Phosphoribosyl transferase domain
  misc_feature (1)..(216): Xaa is any amino acid
MKGIFHNLVPAEIYAHYIKTSDFVQTGKDGDNLIIVSPDKGSASFGKRVCDTLDLPECKRIILDKKRTGEREVSMALNPASEVDIGYLTGKDVIILDDMVRTGSTIVQCCEYLKKSANPRRVCFGVTHFYSSHEAREKLNSPFIDEIMTTNTLPDILNRDCQGRLRRKIVVLKLGQWIARYILRMFDMDYSYLSKQFYMVDMSSKNPRWPPPSFLK

SEQ ID NO: 56005 - DNA, 456 bp, Unknown
  Obtained from environmental sample
  misc_feature (1)..(456): n is a, c, g, or t
atggcgataatgcagaaagagcaaaaattttccgctatacacaaccgcaaggcctctcaccaatacgaggttttggattgttttgaagcgggaattatgcttgtaggctcagaagtgaaatccataagggctgggcatataagcctgagcgaatcttgggtggatatttctgaaaaaaacgagctttggttggtaggagcgcacataaacgaatattcgcaagcaaatcaattcaatcacattccagcaaggcgaagaaaactccttgtgcacaaacacgaaattgaaaaaatgcaaaaagctgttgaggtaaaagggcttacaataattcctctaaaactctatttcaaaaaacgcagagcaaaattggaaatcgcaatttgccgcggaaaaaatcagcgagacaaacgtcaagacttgataaaaaaagatgacgcaaaaaaagttgctgaataa

SEQ ID NO: 56006 - protein, 151 aa, Unknown
  Obtained from environmental sample
  DOMAIN (11)...(78): SmpB protein
  misc_feature (1)..(151): Xaa is any amino acid
MAIMQKEQKFSAIHNRKASHQYEVLDCFEAGIMLVGSEVKSIRAGHISLSESWVDISEKNELWLVGAHINEYSQANQFNHIPARRRKLLVHKHEIEKMQKAVEVKGLTIIPLKLYFKKRRAKLEIAICRGKNQRDKRQDLIKKDDAKKVAE

SEQ ID NO: 56007 - DNA, 1302 bp, Unknown
  Obtained from environmental sample
  misc_feature (1)..(1302): n is a, c, g, or t
atgtcaacagatgataaaaaaattatttactccatgcataaggtttccaaaaaacatggaactaaacaggtactaaaggatataagtatctcctactattacggcgcanaaatcggcgttatcggtcttaacgggtcgggtaagtcgagtcttttanaaattctctcgggcaaggataccgagttcgcaggggaaacaaccgtaagcccgggctatactatcgggtttcttgaacaggagccgtatcttgagccgggaaagaccgtaaaggaaattgtgtccgaaggagcaaaagaacttgtcgccctccttgcggaatttgacaaggtaagcgaagcgttcggggagccggacgccgattacgacaaacttggggcgaagcaggcggaattgcaggaaaaaattgaagccgccgacggctggaatttggacagccgacttgagcttgcgatggaagccctgcgatgcccggccggaagcgaggttgtcgatcatctttcgggcggagagagaaggcgcgtcgcgctttgccgcctgctgctgcagaagccggacattcttttgcttgacgagccgaccaaccacctggacgcggaaactgtagcctggctggagcggcacttgcgcgattacgccggcacggtcatcgcggttacgcacgaccgctactttttggataatgtcgcgggctggatactggaacttgacaggggagagggaatcccatggaaaggcaattattccggctggcttgagcagaaagaaaaacgtatggagcaggaagagaagggagagagcgacagacgtaaaactcttcagcgcgaacttgaatggatacgcatgagtcccaaaggacggcacgcgaagagcaaagcgcgtatcactcaatatgaaaaactttttcaggatgatgaaagggagcgttccaaaggcgcggcgcaaaacaataaaatcacaattccggcggggcctcatcttggcaaattggtaattgaggccgaaggcttgtcaaaatccttcggggaaaaactgttattcgactatatgagtttcacggtgccgccgggagcgtgcgtaggcattatagggcctaacggcgcgggaaagacgacattgttcaaattgataaccggaagcgagaagccggacgcgggagttctgcgtttgggagacagcgtaaaactcggctatgccgatcagatgcgcgccaatcttgacggcgatnaaacagtttgggaacagctttcagacgggcttgaccttatcaaacttggctcgggaacagggcgcgcggggaagtga

SEQ ID NO: 56008 - protein, 433 aa, Unknown
  Obtained from environmental sample
  DOMAIN (35)...(238): ABC transporter
  misc_feature (1)..(433): Xaa is any amino acid
MSTDDKKIIYSMHKVSKKHGTKQVLKDISISYYYGAXIGVIGLNGSGKSSLLXILSGKDTEFAGETTVSPGYTIGFLEQEPYLEPGKTVKEIVSEGAKELVALLAEFDKVSEAFGEPDADYDKLGAKQAELQEKIEAADGWNLDSRLELAMEALRCPAGSEVVDHLSGGERRRVALCRLLLQKPDILLLDEPTNHLDAETVAWLERHLRDYAGTVIAVTHDRYFLDNVAGWILELDRGEGIPWKGNYSGWLEQKEKRMEQEEKGESDRRKTLQRELEWIRMSPKGRHAKSKARITQYEKLFQDDERERSKGAAQNNKITIPAGPHLGKLVIEAEGLSKSFGEKLLFDYMSFTVPPGACVGIIGPNGAGKTTLFKLITGSEKPDAGVLRLGDSVKLGYADQMRANLDGDXTVWEQLSDGLDLIKLGSGTGRAGK

SEQ ID NO: 56009 - DNA, 822 bp, Unknown
  Obtained from environmental sample
  misc_feature (1)..(822): n is a, c, g, or t
atgaggccccgccggaattgtgattttattgttttgcgccgcgcctttggaacgctccctttcatcatcctgaaaaagtttttcatattgagtgatacgcgctttgctcttcgcgtgccgtcctttgggactcatgcgtatccattcaagttcgcgctgaagagttttacgtctgtcgctctctcccttctcttcctgctccatacgtttttctttctgctcaagccagccggaataattgcctttccatgggattccctctcccctgtcaagttccagtatccagcccgcgacattatccaaaaagtagcggtcgtgcgtaaccgcgatgaccgtgccggcgtaatcgcgcaagtgccgctccagccaggctacagtttccgcgtccaggtggttggtcggctcgtcaagcaaaagaatgtccggcttctgcagcagcaggcggcaaagcgcgacgcgccttctctctccgcccgaaagatgatcgacaacctcgcttccggccgggcatcgcagggcttccatcgcaagctcaagtcggctgtccaaattccagccgtcggcggcttcaattttttcctgcaattccgcctgcttcgccccaagtttgtcgtaatcggcgtccggctccccgaacgcttcgcttaccttgtcaaattccgcaaggagggcgacaagttcttttgctccttcggacacaatttcctttacggtctttcccggctcaagatacggctcctgttcaagaaacccgatagtatagcccgggcttacggttgtttcccctgcgaactcggtatccttgcccgagagaatttntaa

SEQ ID NO: 56010 - protein, 273 aa, Unknown
  Obtained from environmental sample
  misc_feature (1)..(273): Xaa is any amino acid
MRPRRNCDFIVLRRAFGTLPFIILKKFFILSDTRFALRVPSFGTHAYPFKFALKSFTSVALSLLFLLHTFFFLLKPAGIIAFPWDSLSPVKFQYPARDIIQKVAVVRNRDDRAGVIAQVPLQPGYSFRVQVVGRLVKQKNVRLLQQQAAKRDAPSLSARKMIDNLASGRASQGFHRKLKSAVQIPAVGGFNFFLQFRLLRPKFVVIGVRLPERFAYLVKFRKEGDKFFCSFGHNFLYGLSRLKIRLLFKKPDSIARAYGCFPCELGILARENX

SEQ ID NO: 56011 - DNA, 501 bp, Unknown
  Obtained from environmental sample
  misc_feature (1)..(501): n is a, c, g, or t
atgaaaagaaaacaagggacagggataaaagcctgggaattaacagacgagatatgggaagcagtacggcagcttattccagagagcaaacgggaggaaggaagaacctataaacggaaaccaggcgggggcaggaagcctttaactcctcgccaggtattggcaggaatctttttcgtgttgcggaccggcatacagtggaaggcgttgccaaaagaatatggggcggcaagcagcgtccatgaatatttcagcaaatgggcgcaggcaggattgttcatgcggttatggcaggaagggctgttgagctatgacctgcttcacgggctcggctgggaatggcaaagcgcggacggctgcatggtaaaagcgcccttggcccgggaatcggcgggaaggaaccctaccgatcgggggaaaaaaagggacgaaacgcagccttgtggtcgagtcacacggattaccggtaggtataatcgtcagcggggccaacacgcatga

SEQ ID NO: 56012 - protein, 166 aa, Unknown
  Obtained from environmental sample
  misc_feature (1)..(166): Xaa is any amino acid
MKRKQGTGIKAWELTDEIWEAVRQLIPESKREEGRTYKRKPGGGRKPLTPRQVLAGIFFVLRTGIQWKALPKEYGAASSVHEYFSKWAQAGLFMRLWQEGLLSYDLLHGLGWEWQSADGCMVKAPLARESAGRNPTDRGKKRDETQPCGRVTRITGRYNRQRGQHA

SEQ ID NO: 56013 - DNA, 309 bp, Unknown
  Obtained from environmental sample
  misc_feature (1)..(309): n is a, c, g, or t
atgtctcacgacgctttatctcttcacttggaaggtttagaggcagaaggctattctgtgccagaaccccgcactttggagcagataatgacagaatgggaggagtgggcggagtgggagaaaaattataaattcctggtcgttcctatcgccgcgtttccggcaaatgaaaagtccgtgcgtgttaatgtaatgcttccggagggtattctccgtcgtatagacgccgtttctaaaaaccgatcggcgttcctggcatacgcggcggagcgtatgttggacgaggaacccgtacacagacaaacataa

SEQ ID NO: 56014 - protein, 102 aa, Unknown
  Obtained from environmental sample
  misc_feature (1)..(102): Xaa is any amino acid
MSHDALSLHLEGLEAEGYSVPEPRTLEQIMTEWEEWAEWEKNYKFLVVPIAAFPANEKSVRVNVMLPEGILRRIDAVSKNRSAFLAYAAERMLDEEPVHRQT

SEQ ID NO: 56015 - DNA, 408 bp, Unknown
  Obtained from environmental sample
  misc_feature (1)..(408): n is a, c, g, or t
ttgggaggacgtatagcggaagaaatgatctcaggcgaatattccacaggcgcggcaaatgacttaaccaaagcgacagacattgcccgtaaaatgatcaccgattacggaatgagcgatcgtttcgccaacgttgcgctgacatcgcgcggtatgagcatgacagggcaggaaaggcaggaaccttctttccagcgcgaatacgctgaaagtacccagcagtacattgatgaagaagtcgcccgtatcattgaaagtgagtacgcaaaggcaaagaagatacttaatgaacagcataatattcttgataatgttgccgctgcgcttctggaaaaagaaacgctggacgagaaagaatttaaggtgttattagggctgtctcctaatttcaccgctattgaagtgtaa

SEQ ID NO: 56016 - protein, 135 aa, Unknown
  Obtained from environmental sample
  DOMAIN (1)...(123): Peptidase family M41
  misc_feature (1)..(135): Xaa is any amino acid
MGGRIAEEMISGEYSTGAANDLTKATDIARKMITDYGMSDRFANVALTSRGMSMTGQERQEPSFQREYAESTQQYIDEEVARIIESEYAKAKKILNEQHNILDNVAAALLEKETLDEKEFKVLLGLSPNFTAIEV

SEQ ID NO: 56017 - DNA, 1140 bp, Unknown
  Obtained from environmental sample
  misc_feature (1)..(1140): n is a, c, g, or t
gtgcgttgcgttcagaactatagcgcttccaacgcatactgggtaacgttatcaagcgccggtacaggcaattccggcggcggcagttacgagaaaggcgagacggttaccatatccgcggggactccgccgggcggtcagcagttttggaattggacaacgacaagcaccgccgtaacttttgtcaacgcgaacagcgcgacgaccacctttacgatgccggcgaacgcggtgagggttacggcgaactttgtcagttcaagcgttcaattgtatccgataaccgatgtcagggataataaaaagtacaatacggtaaagataggcagtcagacgtggatggcggagaatcttaattatgcgacgtcaagcggttcttggtgttccgctacgataaattccaattgcggaaagtacggtagattttacgattgggcgacggctgaggctgtttgtcctacgggttggcatcacccgtcccaagaggagtggggtacactggttgattatgcaggtggttattctaacgcgggaaagaagttgaaatcgaagacaggctggaactcttatggtggtattactgcgacggatgaatatggattttcggccctgcctggcggccgccacgacgtctttggcaatttctactatgccggctactacggctactggtggacggctacggagagcggctacgcctactaccggaacatgagctacgactacgaccgcgtggacgagaaccactactacaagagcggcgggttctcggtgcgcctagtgaaagactacgacttctcaacgatggagacggacacaggccagaggtggatagacgggaaatcgatttatcgcaaggtatttacggggacggttacggtcaacgctaaaaccctttcggagctaaatcttaccaccggaatcgcggcgcttgtgtcgtgcggcggatggtggcaggtaggcgcggttacccgtatgaatataggcgaattcgacaacaacacgccgaccgatatcaccactgcatattattcagtggtggctgttttaggcgcaggactgacaaactttaaatcctattcaccggaaaaccgaacaaacgcgccttatgagatatggattgaatatactaagcgataa

SEQ ID NO: 56018 - protein, 379 aa, Unknown
  Obtained from environmental sample
  misc_feature (1)..(379): Xaa is any amino acid
MRCVQNYSASNAYWVTLSSAGTGNSGGGSYEKGETVTISAGTPPGGQQFWNWTTTSTAVTFVNANSATTTFTMPANAVRVTANFVSSSVQLYPITDVRDNKKYNTVKIGSQTWMAENLNYATSSGSWCSATINSNCGKYGRFYDWATAEAVCPTGWHHPSQEEWGTLVDYAGGYSNAGKKLKSKTGWNSYGGITATDEYGFSALPGGRHDVFGNFYYAGYYGYWWTATESGYAYYRNMSYDYDRVDENHYYKSGGFSVRLVKDYDFSTMETDTGQRWIDGKSIYRKVFTGTVTVNAKTLSELNLTTGIAALVSCGGWWQVGAVTRMNIGEFDNNTPTDITTAYYSVVAVLGAGLTNFKSYSPENRTNAPYEIWIEYTKR

SEQ ID NO: 56019 - DNA, 1290 bp, Unknown
  Obtained from environmental sample
  misc_feature (1)..(1290): n is a, c, g, or t
atggaaaaaccattaaaacaaaacagtgacagaacaaatcctgtactgctaagcgcgcgcacgattgtcaaggaatacgcgaaagcaacaggggccaggatcagcatccacgatcaaaattacgaaccaatcaggaaatccgaaaatgaattttccgatggattgttcgatgaattgttcaatggtgataattcttgccttctttgcgtaaggaaccaaaacctttccggtcagtccgtgaacctgtgcagggaaatgcatataaacgccattaaagagggccagcggctcggcactgcccatacctatacctgcccttcggggttcattttctggacaagcccaatctttcttaacgggcattttgcaggcgctcttttagggggcggactcttaaagggagaatcacagaaaattaaagcgctgactgaactattgtttatatgcgcccagtccatttctataggaagcaacggttttaacaaggaaaccagacaccggattttgcattactctttgctttctgaaaaaattgaagaattaaaaacccaatattcccaggacgacctaaagccagaatatcctttggataaggaaaaaatgttccttgacgttcttggcagcggtgacaatgaatcggcaaagcaaatactaaatgaaatcctggccctccttattttcgcaaatccaaatcagttcaagtacgttcagtacagggctcttgaactggcagtcctcatttcccgtataggcgccaattttagcttcaccatgaacgcaatgctggaaaacgggaacctgtacacaaagctaatccaggaagccaaaaacacggaagaacttgcctatgccatgtaccgcattgtggatgacatggcggagcagatacacggtttacagggcatacagcacgtgtcggtgcttaaaaaggcggaagatttcatccttgaaaatttatcgaggaaaatcagccttaaagagatatccaaagcggcgggattttcatccccctattttagtaccctgttcaaggaagagatgggcgaaaacttttcaagctacctgaaccgtctaagggtaaaaaaagcgtccgcgctgttgaccagcacaaatcttagcttaagcagaattgccgtgtcatgtggtttcaaggatcaaagctggttttcaaaaatattcaagcactataccggaatatgtcccggaaaataccgtagccagggcgggaaaattacgccaaaaattcctgaaaccaggttttccgaggactttccggttgaagttgggtaa

SEQ ID NO: 56020 - protein, 429 aa, Unknown
  Obtained from environmental sample
  DOMAIN (362)...(406): Bacterial regulatory helix-turn-helix proteins, AraC family
  misc_feature (1)..(429): Xaa is any amino acid
MEKPLKQNSDRTNPVLLSARTIVKEYAKATGARISIHDQNYEPIRKSENEFSDGLFDELFNGDNSCLLCVRNQNLSGQSVNLCREMHINAIKEGQRLGTAHTYTCPSGFIFWTSPIFLNGHFAGALLGGGLLKGESQKIKALTELLFICAQSISIGSNGFNKETRHRILHYSLLSEKIEELKTQYSQDDLKPEYPLDKEKMFLDVLGSGDNESAKQILNEILALLIFANPNQFKYVQYRALELAVLISRIGANFSFTMNAMLENGNLYTKLIQEAKNTEELAYAMYRIVDDMAEQIHGLQGIQHVSVLKKAEDFILENLSRKISLKEISKAAGFSSPYFSTLFKEEMGENFSSYLNRLRVKKASALLTSTNLSLSRIAVSCGFKDQSWFSKIFKHYTGICPGKYRSQGGKITPKIPETRFSEDFPVEVG

SEQ ID NO: 56021 - DNA, 840 bp, Unknown
  Obtained from environmental sample
  misc_feature (1)..(840): n is a, c, g, or t
atgggacagataagcggcaacattcaaaaactcaacgagcatgtggaacatcagacacagagcgtcgcccaatcgtcctcggctgttgaggaaatgctggccaatatacagaacgttacccaaacccttttcagaaatacggacaaggtaaacgaattgacggaagcctccggcgagggccgcggcgggttacagcatgtcgcgtcggatgttcaggaaatcgccgaagaatccgaaggcttgctgcatattaacacggtaatggagaacattgccagcgagaccaacctcctttcgatgaacgccgccattgaagccgcccacgccggagatgcgggcaagggtttcgcggtcgtggccggagaaatccgcaagctggcggtaagctccagtgagcagtcaaaaaccgttgtcgcggtgctgaataaaattaaagattctattaacaaaatttccggttccaccggcagcgcattggaaacatttgaaaccattgagggcgggatcaagacggtgtccgatcaggaaggaaacatccgcagcgccatggaagaacagggcgagggaagcaagcagatacttgaagccatcggccagctcaatgaaattacacagcaagtcagaaacagttccgtggagatgcttgagggcgcgaaggaaattatcagcgaaggcaggaacctggaaaaggctaccggggaaattaccggcggaatggcggagatggccgtaagcgcgggccagatcgacgccgccatgaacgaagtaaacagcatcagcggacaaaataaagaaattattgataatttggttgtggcggtatcgaagtttaaggtttaa

SEQ ID NO: 56022 - protein, 279 aa, Unknown
  Obtained from environmental sample
  DOMAIN (16)...(245): Methyl-accepting chemotaxis protein (MCP) signaling domain
  misc_feature (1)..(279): Xaa is any amino acid
MGQISGNIQKLNEHVEHQTQSVAQSSSAVEEMLANIQNVTQTLFRNTDKVNELTEASGEGRGGLQHVASDVQEIAEESEGLLHINTVMENIASETNLLSMNAAIEAAHAGDAGKGFAVVAGEIRKLAVSSSEQSKTVVAVLNKIKDSINKISGSTGSALETFETIEGGIKTVSDQEGNIRSAMEEQGEGSKQILEAIGQLNEITQQVRNSSVEMLEGAKEIISEGRNLEKATGEITGGMAEMAVSAGQIDAAMNEVNSISGQNKEIIDNLVVAVSKFKV

SEQ ID NO: 56023 - DNA, 588 bp, Unknown
  Obtained from environmental sample
  misc_feature (1)..(588): n is a, c, g, or t
atgccggcaaaagtacttgttaaaaagacaaaaaagaactctcgaaaacctgttaaaaaaatcacattagacgatttattaaaatcccaggacgaagcatgggcggctataagggaaactcaacaagcccacaaagaaactgaaaaagctataaaggaaacccagaaaaatatcggcggacttagcaactcattaggctctattgttgagcgtatattgactccaggcctccccaaaaaatttaaaaaatttggcttcagctttaatcgaatagccagttatagttattcgtcaggcgtatacgcccagattgacggcatgcttgaaaacggcacgcaggcaattgcggtagaagtaaaaacaaaattgcggaaagcggatattgacgatcatcttgtacgcatggaaaaaatacgaaaacacgccgatgaacacggcgacaaaaggcagttcatgggagctatggcaactttcgttacagacgaaactgccaaaaattacgccttagaaaatgggctttttgtcatagaaccttctggcgaagatgttaaagttacaaaaccggaaacagaaccgcgggtttggtaa

SEQ ID NO: 56024 - protein, 195 aa, Unknown
  Obtained from environmental sample
  misc_feature (1)..(195): Xaa is any amino acid
MPAKVLVKKTKKNSRKPVKKITLDDLLKSQDEAWAAIRETQQAHKETEKAIKETQKNIGGLSNSLGSIVERILTPGLPKKFKKFGFSFNRIASYSYSSGVYAQIDGMLENGTQAIAVEVKTKLRKADIDDHLVRMEKIRKHADEHGDKRQFMGAMATFVTDETAKNYALENGLFVIEPSGEDVKVTKPETEPRVW

SEQ ID NO: 56025 - DNA, 483 bp, Unknown
  Obtained from environmental sample
  misc_feature (1)..(483): n is a, c, g, or t
atggcaaaaacagaaggggatatcaactttccccaggaattattaacatttatagaagaatggaaggttaaaccggggagtcttatcatgattctccacaaaacccaggaaacctatgggtatatttcccgccctgccgcggaacaattagcccgacttacgggaatttcccttgcccgaatatacggtgttatcactttttatcacttttttaagaccagtatgccggggaaacacaaaatttccgtatgtttggggacagcctgctaccttaagggcagtcaggacctaatggacgagaccagaaacctgctcgggcttgagcctgacggagtaacccaagacggcaaattttcggtagacccggtgcgctgtgtcggctgttgcggtcttgcgcccgtgcttacggtcggcaacgatacctatggcaagctgaccaaagatatgattcctgaaatcatagccaaatatcaaaacaaataa

SEQ ID NO: 56026 - protein, 160 aa, Unknown
  Obtained from environmental sample
  DOMAIN (8)...(158): Respiratory-chain NADH dehydrogenase 24 Kd subunit
  misc_feature (1)..(160): Xaa is any amino acid
MAKTEGDINFPQELLTFIEEWKVKPGSLIMILHKTQETYGYISRPAAEQLARLTGISLARIYGVITFYHFFKTSMPGKHKISVCLGTACYLKGSQDLMDETRNLLGLEPDGVTQDGKFSVDPVRCVGCCGLAPVLTVGNDTYGKLTKDMIPEIIAKYQNK

SEQ ID NO: 56027 - DNA, 393 bp, Unknown
  Obtained from environmental sample
  misc_feature (1)..(393): n is a, c, g, or t
atgggaaaattgagtcttgacgacttaaaaaaattaagagaagaaaaaaaagccgagtttaaaaaacgcgatgaagacggcgttgaaacacggattattatcggtatgggaacctgcggtattgccgccggcgcgaaacaaacatgggacgcttttatcgccggaataaaagataaaaatcttaaaaattgcgttgtaaagcaaactggttgcatggggctgtgccattccgagcctaccgtggaagtcattgttcccggtatgcaacccgttatttacggcatggtggatcctgaattgacaaaatcgatcattcagaaacatattattggcagggaattgttaggtgaaaatatccttgagcgccccgccaccgatattttagcttcataa

SEQ ID NO: 56028 - protein, 130 aa, Unknown
  Obtained from environmental sample
  misc_feature (1)..(130): Xaa is any amino acid
MGKLSLDDLKKLREEKKAEFKKRDEDGVETRIIIGMGTCGIAAGAKQTWDAFIAGIKDKNLKNCVVKQTGCMGLCHSEPTVEVIVPGMQPVIYGMVDPELTKSIIQKHIIGRELLGENILERPATDILAS

SEQ ID NO: 56029 - DNA, 942 bp, Unknown
  Obtained from environmental sample
  misc_feature (1)..(942): n is a, c, g, or t
gtggtcagattcggccgagactggagaaggcctgtataccggagctaccgcgatctttccgggaacaatacgctcaaacatccaaacgaagccgagttgactaaaattttccacagcttaaaaaaattcagaaaagaagacatatacaactgtacctgctgcggttacggaagctgtaaagcgatggcgacggcgattcacaacaaacttaacaaaccggaaaactgcgcccattatattctcgccctgctcacggaaaaaaccaataccgaggaacttaaccgccagcttgaggaacacattggcgaggcgtcagagcttattgagggaataaataatttaataaacaagctgaacgccgcgatcaattcacaggcggaaacaatcgcccagtcttcggtttcaaccgaaaaaatgatcacctcgctcaaggaaacttcggaaatttcccgaagcaaacaggagtctataaaagggttgatagaaaataccgccaaaagcgaagaatccatgcgggagacgattcattcaattgatgatatttccaaatcggtggaaggcatagcgcaggcgattaaaataatcagttcaatagcggctaacaccaatttattatccatgaacgcggcgatagaatccgcgcacgcgggcgaagcgggcaggggttttagcgtggtcgccggcgagatacgccgcctttccgagactaccagggaaaattcggtgaacatttccaagaccctgagaagcatcattgacggggtagccgttaccgaaaaacagtcggacgacaccggaacgcgtattaacaatatgtcaaaagaaatcagcagttttgccgaaaccatatccggtttaatcaataccttcggcgaactttcggcgcaagcggtgaaattacctccgctctggataaccttcaaagtcaaagcgacatggtaa

SEQ ID NO: 56030 - protein, 313 aa, Unknown
  Obtained from environmental sample
  DOMAIN (102)...(310): Methyl-accepting chemotaxis protein (MCP) signaling domain
  misc_feature (1)..(313): Xaa is any amino acid
MVRFGRDWRRPVYRSYRDLSGNNTLKHPNEAELTKIFHSLKKFRKEDIYNCTCCGYGSCKAMATAIHNKLNKPENCAHYILALLTEKTNTEELNRQLEEHIGEASELIEGINNLINKLNAAINSQAETIAQSSVSTEKMITSLKETSEISRSKQESIKGLIENTAKSEESMRETIHSIDDISKSVEGIAQAIKIISSIAANTNLLSMNAAIESAHAGEAGRGFSVVAGEIRRLSETTRENSVNISKTLRSIIDGVAVTEKQSDDTGTRINNMSKEISSFAETISGLINTFGELSAQAVKLPPLWITFKVKATW

SEQ ID NO: 56031 - DNA, 366 bp, Unknown
  Obtained from environmental sample
  misc_feature (1)..(366): n is a, c, g, or t
atggtaaaatccgactatgccgagatactgacaatgacggaaaaactacgcacggcaatgattgatttgactatgctgtccaagaaaaaagtccttgttgttgatgatgaagaacctatccttgtcatgacaaagggtatgctgggtgaagattataacgttactacaatcaattccggcaaagtggctttggacttgttcctgcaggggtatacacctcatctgattttgctggatttgtatatgcctgaaatgggcggctgggatacctttctcagaatacgcaacataagccaattgcaccgcatcccgatagcgatatacactacatcggatgacccgaaagacaaggaaaaagcgggatga

SEQ ID NO: 56032 - protein, 121 aa, Unknown
  Obtained from environmental sample
  DOMAIN (29)...(121): Response regulator receiver domain
  misc_feature (1)..(121): Xaa is any amino acid
MVKSDYAEILTMTEKLRTAMIDLTMLSKKKVLVVDDEEPILVMTKGMLGEDYNVTTINSGKVALDLFLQGYTPHLILLDLYMPEMGGWDTFLRIRNISQLHRIPIAIYTTSDDPKDKEKAG

SEQ ID NO: 56033 - DNA, 1812 bp, Unknown
  Obtained from environmental sample
  misc_feature (1)..(1812): n is a, c, g, or t
gtggtgggcttggaagccgccgcgtggcgctggtttggcagaagttcaaacgatctttcatgggcggaagcggcagtgctcgcgacgcttccaaacagtcccgctctcatacacccgggacgaaaccgcgaaactttaaaagcaaaaagagattcactgttaaataaactttttaaaaaaggatactttgacgaggaaactcttgccctcagcgtggcggaaccgcttcccggcgagccgctccccctgccgcgccttgcccctcatttgcttgacaggcttgttttggaagctgcgaaaaaatcttcgttaaaaaaaaccgccgccttcgttactacggtaaatcgcgacttacaaatacgcgtaacggatattctaaaccgcgcgtcagaccgttttgcgcttaacggaatttttaatggcgcttgcgtcgtgctaaatacgcaaacaggcgaaatagcggcttatgtgggcaacacaaatacgctccatgcctccgatgtagatattccgtcttccccccgcagttcgggaagtttgttaaaaccttttctttatgccgccatgctggatgcgggagacatacttccgtcatctttggtaagcgacattccgacccgtattggaagtttcagtcccgagaacatgagcagaaattatttaggcgtagttcccgccgacgaagcattgtcgcgttccctcaatgttcccgcggcccgtaatcttcgtattttcggcgttgaaagattccttcaattcctccgctcattgggtcttacaaccctctttcgccccgccaacgagtacggtcttccgttaattcttggcggcgcggaagttactctttttgaaataacaaaactttacgccgccctgggacgcgcaacagacccttcctccaaagactcaaaattaatttcttccggcgcggcatggctcactttagaagccttggtcaacgcggcgcgtcccggagaggaatccatatggcgcgaatacgccggagcaaggcacatcgcgtggaagacaggaacaagttacggttttcgggacgcttgggctgtgggcgtaactcccgaatggacggtaggcgtctggataggaaacgcgacgggcgagggacggcctgaacttcgaagcgccgttacttccgcccccgtactctttgaaattttttccgttctaagttccattggcgggaacagaaacacatggttcggcaaacccgcgaaagaattagcgcaagcggaagtttgcgcgtcttcaggttttccggcttccgttaattgcgctgacacaaaatatgttgacatacccaaagacgcgcccgccgcgaagccgtgccggttctgccagacaataattctggacgcttctcttacccatcgcatagttctcggctccggcgtttctgcagcggcggtggaacaaaagtggtttgttcttccccccgcggaagaatggtattaccgccgctggaatcttgattacaaacctctgccgccgtttttaaattccaaagatttgtcaaaccgcggcgagggagtgcttgcgctttttaatcctgagcccgacagcaaggtttatgttccgagggaattggacaacagcgagggtaaaattgttttttccgccgcgcatcgtgatggagaggagataatttattggcatcttgatgatgagtttttgggttatacgcaaacttttcatgaaatggaagcgcgtcctttgccgggggcgcgtactttgacacttgttgattcgaaggggaatatgatagttaggcggtttactgtgttggaggggaagtaa

SEQ ID NO: 56034 - protein, 603 aa, Unknown
  Obtained from environmental sample
  DOMAIN (141)...(390): Penicillin binding protein transpeptidase domain
  misc_feature (1)..(603): Xaa is any amino acid
MVGLEAAAWRWFGRSSNDLSWAEAAVLATLPNSPALIHPGRNRETLKAKRDSLLNKLFKKGYFDEETLALSVAEPLPGEPLPLPRLAPHLLDRLVLEAAKKSSLKKTAAFVTTVNRDLQIRVTDILNRASDRFALNGIFNGACVVLNTQTGEIAAYVGNTNTLHASDVDIPSSPRSSGSLLKPFLYAAMLDAGDILPSSLVSDIPTRIGSFSPENMSRNYLGVVPADEALSRSLNVPAARNLRIFGVERFLQFLRSLGLTTLFRPANEYGLPLILGGAEVTLFEITKLYAALGRATDPSSKDSKLISSGAAWLTLEALVNAARPGEESIWREYAGARHIAWKTGTSYGFRDAWAVGVTPEWTVGVWIGNATGEGRPELRSAVTSAPVLFEIFSVLSSIGGNRNTWFGKPAKELAQAEVCASSGFPASVNCADTKYVDIPKDAPAAKPCRFCQTIILDASLTHRIVLGSGVSAAAVEQKWFVLPPAEEWYYRRWNLDYKPLPPFLNSKDLSNRGEGVLALFNPEPDSKVYVPRELDNSEGKIVFSAAHRDGEEIIYWHLDDEFLGYTQTFHEMEARPLPGARTLTLVDSKGNMIVRRFTVLEGK

SEQ ID NO: 56035 - DNA, 525 bp, Unknown
  Obtained from environmental sample
  misc_feature (1)..(525): n is a, c, g, or t
ttggaggctttgggctttaaagtcataacgccgcctttgacgggattcgacggttacggcgtcggcattgtttgcggacgcggcgattatccgattatcgcggtcgatatagacattacagatccggctttatcagagaaaatgcgcgggtacgtcgcaacgttgacgggaacatcggcgccgtaccgcgtaggcaatgcgcccaagtgtattatagtttgccggacggcaaagacaacgatgaagaacggttcgcgaaaatacggctgcggccgcgtggagatattgggcttaaattgtcagttcgtcgcggcggggatccatccggtcacggagaaagaatacgaatggccggacaaatcaatcttcgagataccggcgtcagagctacctttgctgacggatgggcaaattaaacagatcatccacgaattcgagagtctcgcggagagtcgcggcatggcgccgatcccctcgaaaaccaagtcagataataccgcgcggaaaaggactacgcgcaattga

SEQ ID NO: 56036 - protein, 174 aa, Unknown
  Obtained from environmental sample
  misc_feature (1)..(174): Xaa is any amino acid
MEALGFKVITPPLTGFDGYGVGIVCGRGDYPIIAVDIDITDPALSEKMRGYVATLTGTSAPYRVGNAPKCIIVCRTAKTTMKNGSRKYGCGRVEILGLNCQFVAAGIHPVTEKEYEWPDKSIFEIPASELPLLTDGQIKQIIHEFESLAESRGMAPIPSKTKSDNTARKRTTRN

SEQ ID NO: 56037 - DNA, 600 bp, Unknown
  Obtained from environmental sample
  misc_feature (1)..(600): n is a, c, g, or t
atgtcgcaatacgcgatggctgaccggcacaaggctcacgatctttgggattcggcggtcgagcgcggcgagacgtacggcttggagatgagaacgtttatcgcgtgcgactgcataaaaagaatgtggcgccgcgccaatcccgcaatagaagatttctgggcggctgtggaaaacgcggcgctgtcggtgataaacgacaagagcgcggacagctatcgcgtcttaggcaaactcgaattctcccgcgttgaaaagaattggctgcgcatcctcctgccttccgggcgctatttgtgttatgccggagcaaagagcgacggagggaaaatccgctacctcggcaacgacacctacacgcgccgctggggctatcaatccacatacggcgggaaactcgcggaaaacatcgtgcaggccgtctgccgcgacatcttggcgcacggtatggccgaggccgacgataaaggctttaaggtggtgctgtcgatacatgacgagctgataactgaagcgccggaaagcggcacggaatactattatcattcggcgggaatagagaacatacgcgcttggaggctttgggctttaaagtcataa

SEQ ID NO: 56038 - protein, 199 aa, Unknown
  Obtained from environmental sample
  misc_feature (1)..(199): Xaa is any amino acid
MSQYAMADRHKAHDLWDSAVERGETYGLEMRTFIACDCIKRMWRRANPAIEDFWAAVENAALSVINDKSADSYRVLGKLEFSRVEKNWLRILLPSGRYLCYAGAKSDGGKIRYLGNDTYTRRWGYQSTYGGKLAENIVQAVCRDILAHGMAEADDKGFKVVLSIHDELITEAPESGTEYYYHSAGIENIRAWRLWALKS

SEQ ID NO: 56039 - DNA, 924 bp, Unknown
  Obtained from environmental sample
  misc_feature (1)..(924): n is a, c, g, or t
atggccggcggccgaggacaggcgctgcttgtctgcgggagcgacaagcgcggaacaatttacggtattttcgcgttatctgaatacatcggcgtttccccgttgcacttctggggggacgtagagccgcaaaaacgtaaagaccttataatagaaaaagatatagagaccgtttccaaagagccgagcgtaaaataccgcggattttttatcaacgatgaatggccttgctttgggacatggacattcgggcattttaaaggttttacagcggaaatgtacgatcatgtttttgaacttttactgcgccttaaaggaaattacctgtggccagccatgtggacatcttcattcgctctggacggaccgggaaaccttaacgaggaattagccgacatttacggtatacttgttggcggctcgcatcatgaaccgtgccttcgcgcaagcgaggaatgggacaaggtaagaggaccgaattcaatttacggcaatgagtggaattattataaaaataaaaacggacttttgaagtactgggaagacgctcttataagaagcggcaagtacgaaaaaataatcacgataggaatgcgcggggagcgcgacagttccatgttaggcgacaattcatcgcttaaagaaaatattgatttattaaaagatattattaaaaatcagcgcgatttaataaaaaagcacgttaacccgaatattgatgaagtcccgcaggtcatcgctctttacaaggaagttgaagaatacttttacggncaagaaggagcagagggtttaaaagactgggacgagcttaacggcgttatctgtatgttatgtgaagataacttcggtttttatgcgcactctgccaactgcggatattcgcggggcgtaaggcggctttggtatgtactaccattttga

SEQ ID NO: 56040 - protein, 307 aa, Unknown
  Obtained from environmental sample
  misc_feature (1)..(307): Xaa is any amino acid
MAGGRGQALLVCGSDKRGTIYGIFALSEYIGVSPLHFWGDVEPQKRKDLIIEKDIETVSKEPSVKYRGFFINDEWPCFGTWTFGHFKGFTAEMYDHVFELLLRLKGNYLWPAMWTSSFALDGPGNLNEELADIYGILVGGSHHEPCLRASEEWDKVRGPNSIYGNEWNYYKNKNGLLKYWEDALIRSGKYEKIITIGMRGERDSSMLGDNSSLKENIDLLKDIIKNQRDLIKKHVNPNIDEVPQVIALYKEVEEYFYGQEGAEGLKDWDELNGVICMLCEDNFGFYAHSANCGYSRGVRRLWYVLPF

SEQ ID NO: 56041 - DNA, 990 bp, Unknown
  Obtained from environmental sample
  misc_feature (1)..(990): n is a, c, g, or t
ttggtatgtactaccattttgattaccacggcgggacctatttcctatgagtgggtaatgtcaacgtcttatgagcggacatgggaacagatgtgcatggcttatgattacggaataaaagatatatggatngtaaacgtaggcgatataaaatttaacgaagtccctcttaattattttatggatcttgcatacgatttngaaaaatggggaacaaaagcgcctaaccgcatagacgaatatacgtctctttggtttaacaaaaatttcccgagtgtgaaaaaagaaacacgcgaaaaaatggcggacgttctgcaaggatttttaagactgaacgcagcaaggcgtcctgaagcgcttaactccgacatttacaacccgtgccattatcatgaagcggacagaatattgcttcttgcggaaaaaatagattcgctaaacgaagaaatatattcctcgctaagcaaaagcgaaaaaaacgcgtattacagcatgatatatttcccggcaaaatccagcgttaatttgttaaaaatgcacttatacgccggaaaaaacaggcatttcgccggacagggaaagaaactcgccaataaatacgccgatcttgtaaccgcctgcatagaaaaagatcgctctcttaaaaatgaattccatgattttaacggcggaaaatggtcaggcatggaacttgaacagcacataggttttacaaaatggaacgaggataattgcagataccccgtaagaattcaagttgaacccgcttataagccgcgcttggttgtttcaagaaaagacagagaaggaatctacactaaaacttacggtcccccaatgacagtcatagttgatgattttcttttcgccggaaatgacgaggtgatactggaaatcgccaatgacggaataggcaaacttgattatacaatagaatttgataaagaatacccgtggcttgaaatcagtttcaaaaaaaggaacggttga

SEQ ID NO: 56042 - protein, 329 aa, Unknown
  Obtained from environmental sample
  misc_feature (1)..(329): Xaa is any amino acid
MVCTTILITTAGPISYEWVMSTSYERTWEQMCMAYDYGIKDIWXVNVGDIKFNEVPLNYFMDLAYDXEKWGTKAPNRIDEYTSLWFNKNFPSVKKETREKMADVLQGFLRLNAARRPEALNSDIYNPCHYHEADRILLLAEKIDSLNEEIYSSLSKSEKNAYYSMIYFPAKSSVNLLKMHLYAGKNRHFAGQGKKLANKYADLVTACIEKDRSLKNEFHDFNGGKWSGMELEQHIGFTKWNEDNCRYPVRIQVEPAYKPRLVVSRKDREGIYTKTYGPPMTVIVDDFLFAGNDEVILEIANDGIGKLDYTIEFDKEYPWLEISFKKRNG

SEQ ID NO: 56043 - DNA, 585 bp, Unknown
  Obtained from environmental sample
  misc_feature (1)..(585): n is a, c, g, or t
ttgaaggtaaccgcaaaagttataaatattgaattacctgaaaaaacatttttggaaaacaacaatgtaatagcgattaacgcgaatcatttctgcggtaaaaaagacgtttccaaaggcgcttttatagagcttaaaaattacggcagaagcggctgcggcatgaaagtatttcccgttacttcagattttgaagaaagtgaagaaaaaccgtccctcacataccgtttcctaatcgaaaaaagcggcgagtatgcgatagaagtatggacgacgccggttaactcggtgcaaaacaagcgtccgttaagatgccagcttgaaacttccaaaggcgaaaagcggataattgtaacggttcccgatgatttccgggcgggaagtcccggcgacgcaagatggtgtcagggagtgttggacaacatccgtataactaaaacgtcatttaattttgaaaaaggcgttcaggaaatttccgtaagcgcgttggaagcgggacttgtactggagagaattataatctatcccaagaataatccgccgcttaaatcgtacttgggtccgttggaaagcttttttcggtag

SEQ ID NO: 56044 - protein, 194 aa, Unknown
  Obtained from environmental sample
  misc_feature (1)..(194): Xaa is any amino acid
MKVTAKVINIELPEKTFLENNNVIAINANHFCGKKDVSKGAFIELKNYGRSGCGMKVFPVTSDFEESEEKPSLTYRFLIEKSGEYAIEVWTTPVNSVQNKRPLRCQLETSKGEKRIIVTVPDDFRAGSPGDARWCQGVLDNIRITKTSFNFEKGVQEISVSALEAGLVLERIIIYPKNNPPLKSYLGPLESFFR

SEQ ID NO: 56045 - DNA, 414 bp, Unknown
  Obtained from environmental sample
  misc_feature (1)..(414): n is a, c, g, or t
atgatccagaaaggccatcgcgtccacgtggcatccgaggccgcccggcggcgtgattaccggaattccccgtttgtcaagctccttcaccatgtaatcgatgaatatcggcccttggcttatcatatcctcgtccagcgtctcgtccagacccaccgctatggcctccatttcacgcaccgacataccgccgtaggtcaaaaagccctcgaagagcggcaccagctcgcgcagcctcaaaaagatatcgtgatcgttcgtgcaaatgccgccgccgcgggcgaaaccgagtttacgcgccgaaaagtagatgatgtcggacagctcggcgaacttcaaaactatctcgtgcagcgtcatcttcttgcagcgctcctcgcggcgcttgttgaaatacaggttgtcggccaatag

SEQ ID NO: 56046 - protein, 137 aa, Unknown
  Obtained from environmental sample
  misc_feature (1)..(137): Xaa is any amino acid
MIQKGHRVHVASEAARRRDYRNSPFVKLLHHVIDEYRPLAYHILVQRLVQTHRYGLHFTHRHTAVGQKALEERHQLAQPQKDIVIVRANAAAAGETEFTRRKVDDVGQLGELQNYLVQRHLLAALLAALVEIQVVGQ

SEQ ID NO: 56047 - DNA, 558 bp, Unknown
  Obtained from environmental sample
  misc_feature (1)..(558): n is a, c, g, or t
gtgcgtataaaaatttgcggattgtcccgcgaacaggatatcgactatgtaaacgaggggcatcccgattacgcgggtttcgttttcgcgcaaagcaaacggcaggtaacgccgggcacggcggagcatttgcgctcccgccttgcggacggcattgtacccgtcggtgtttttgtggacgctaaaattgacgagattaccgcgctttaccgaagcggcgtaatttccatcgcgcagcttcacggcggcgaggacgacgattacataatcaagctgaaggaaaaaaacagcggccttcccgtgattaaggtctataagtttttaacaataaagcgcaaaaaaaaaccggcagaaaaggaagaggttaaacaagattttgcgtattccgcgtactcgggaattataaacaataaaaactcggattatatccttattgattctggagcgggatcgggaaaaactttcaattgggagcttcttaaaaagttaaaaattgaaaaaccgtggtttcttgcgggaggcatcaatcttgacaatatcggcaaggctcttgcctaa

SEQ ID NO: 56048 - protein, 185 aa, Unknown
  Obtained from environmental sample
  DOMAIN (3)...(185): N-(5'phosphoribosyl)anthranilate (PRA) isomerase
  misc_feature (1)..(185): Xaa is any amino acid
MRIKICGLSREQDIDYVNEGHPDYAGFVFAQSKRQVTPGTAEHLRSRLADGIVPVGVFVDAKIDEITALYRSGVISIAQLHGGEDDDYIIKLKEKNSGLPVIKVYKFLTIKRKKKPAEKEEVKQDFAYSAYSGIINNKNSDYILIDSGAGSGKTFNWELLKKLKIEKPWFLAGGINLDNIGKALA

SEQ ID NO: 56049 - DNA, 699 bp, Unknown
  Obtained from environmental sample
  misc_feature (1)..(699): n is a, c, g, or t
atgttgtgggggactttccccgaaacagggattgtcatttttgagggcggcctgccttttatcgtggacctgcttcaggggcaaaagaccgggtactttctggatcaaagggataaccgcctgctcgccgcgcgatacgccgccatgctgcggaaagaagcgggaaccgctctgaaaattcttgacgcctgctcgtatacgggcggcttcggccttcatgcgattggttcagacgggaagcttaccatgctggacgcgtcggcggcggcgctcgagaccggcggaaggaacgccgcgcttcagggcgttgaagatcgcgtaacgctgacgcaagccgatgttttcgacgggcttaaagatttaacgcgccgtaaagaacaatttgacatggtaatactcgatccgcccgccttcgcgaagtcgcgctccgcccttggggaagccctgcgcggctacaaggaaataaacctgaaggccatagggcttgtccgccccggcggaatacttgtaagctgttcatgcagtcaggctgtagacgaaattacttttaagcgcatgatggtcgaagccgccgccgacgcgggccgacgccttatacaggttgatttccgcttccaggcgcaggatcaccccgtgcttgccggttatgacgaatcgtcgtacctcaaatgcgggttttaccgcacccttgagaattag

SEQ ID NO: 56050 - protein, 232 aa, Unknown
  Obtained from environmental sample
  DOMAIN (38)...(200): Methyltransferase small domain
  misc_feature (1)..(232): Xaa is any amino acid
MLWGTFPETGIVIFEGGLPFIVDLLQGQKTGYFLDQRDNRLLAARYAAMLRKEAGTALKILDACSYTGGFGLHAIGSDGKLTMLDASAAALETGGRNAALQGVEDRVTLTQADVFDGLKDLTRRKEQFDMVILDPPAFAKSRSALGEALRGYKEINLKAIGLVRPGGILVSCSCSQAVDEITFKRMMVEAAADAGRRLIQVDFRFQAQDHPVLAGYDESSYLKCGFYRTLEN

SEQ ID NO: 56051 - DNA, 1668 bp, Unknown
  Obtained from environmental sample
  misc_feature (1)..(1668): n is a, c, g, or t
atgaaggttcataacgattttacgctgtattggagggtgtttccttcggggaaaaaggttgtgtattactacgcttatgacgaaagcggcaagcgactgatggggcgttccacaggggaaaccaatttgacatcggcaagggtgaagtgcaataagcttttgaaggaaggcgagctggttcccaataaaaaccatgtgccgactttcgccgaatatgccgagggctggtgggagtgggaaacctgcgcctacctaaagaagcggcgcaagcggtacagcctgacacagacctacgccgacaataataaaaagaatttgaaaaaccacctgctgccgttctttggcaatatgcccatgaacaaaatcacaaaaatcgaagtcgaagattttttcgatgcgcttatcgaaaaagaatatcaaaacacatccatcaacggcttttacggcacgctgaaaaccatgctcattgaagcggtagagcgaaacataataccaaaagacccgacagacaaaatggggcgtttggtaaatgacaggcgggccattaagattatcacgccggaagaatttaagaaactgtttgtcggcgattggcggcgggtgtgggaaagcgacaggctttcgtacacggctaacaagctggcggctttgacgggcatgagggcatccgaggtggtagggctaaaaggaagttttgtatacgacgagcatatttatctgtgcatgcaatacgacgattacggataccgccctacaaaaacaaaagacaagcacaatatacccctgacttccgacatgataaacgagctaaaagaactcaagcgcatgaatggggacggctttgtgttttcgcttgacggcggcgcaacgcctatttgccgaaataccgtgtacaagcatttccaccgggcattgcggaatatagggattacagaagacgagatttccgagcgccatctgcatttgcacgcatggaggcatttctttaataccgaaatgctaaaaggcggccttaccgttacgcaagcccaggccgtaaccgggcataagagcgagcggatgacggaatggtattgccattttgacccgaccgaattcgcaaaggcgaaagaagtgcaggaagccttgctgcgccctgcccagaaaaaagcggccaaagaagaaaaggcaggggcaaaaacttccggcaataaggacaaagccgttaaagtaattcctttcccccgaaaagaaaacaaaacagccggagaagaaacgcaagcaagcttaattcttccccttcccattttcaaggctcctgccggactgcggcgggagcttctttttttgccctttcaacattttccattttttttcttaaattgcaggtttgtcccatttctatctgcaaccgggcatgggatttttaaggcaggcatgggagaaagcatggaagaatacctgacgattttcgaggttgcggaattgaccaagtacacggtagggacgctgcggaaatttgtgcagaaaaggcgggtggcctttcacaagtgggggcgctcgctacggttcaggcgcgcggagattgaactatggatgaagatgggctgcgggaaagcggtataccttcctgccgatggggacggccaaacgaaagcaagcgcaatggaaatcggggctgaatcatga

SEQ ID NO: 56052 - protein, 555 aa, Unknown
  Obtained from environmental sample
  DOMAIN (195)...(368): Phage integrase family
  misc_feature (1)..(555): Xaa is any amino acid
MKVHNDFTLYWRVFPSGKKVVYYYAYDESGKRLMGRSTGETNLTSARVKCNKLLKEGELVPNKNHVPTFAEYAEGWWEWETCAYLKKRRKRYSLTQTYADNNKKNLKNHLLPFFGNMPMNKITKIEVEDFFDALIEKEYQNTSINGFYGTLKTMLIEAVERNIIPKDPTDKMGRLVNDRRAIKIITPEEFKKLFVGDWRRVWESDRLSYTANKLAALTGMRASEVVGLKGSFVYDEHIYLCMQYDDYGYRPTKTKDKHNIPLTSDMINELKELKRMNGDGFVFSLDGGATPICRNTVYKHFHRALRNIGITEDEISERHLHLHAWRHFFNTEMLKGGLTVTQAQAVTGHKSERMTEWYCHFDPTEFAKAKEVQEALLRPAQKKAAKEEKAGAKTSGNKDKAVKVIPFPRKENKTAGEETQASLILPLPIFKAPAGLRRELLFLPFQHFPFFFLNCRFVPFLSATGHGIFKAGMGESMEEYLTIFEVAELTKYTVGTLRKFVQKRRVAFHKWGRSLRFRRAEIELWMKMGCGKAVYLPADGDGQTKASAMEIGAES

SEQ ID NO: 56053 - DNA, 744 bp, Unknown
  Obtained from environmental sample
  misc_feature (1)..(744): n is a, c, g, or t
atggcggtttgttatatgctcgttatcataatcatcgttattaattttgttattgaggcaacactggaaccgcttaaccgaggaataaaaaaaatgaatcaaatgtttaccgacttggatttgaaaccgggggaagataaacatcataaaaatgaagccgaatcactaaataactttttacacttgaccataattgaccagcttaccggtatttacaatcggcggtatcttgacggcagtttaaagaagataataaaactgcattcccataccgaaagcagtttaagcgtactaatgatagatatcgatcattttaaaaaatacaacgacacttacggtcatgacgcgggcgataattgtctcaaaacagtcgcgggtattctttccgaatgcgtaataaggaaagaagattttatagcaagatacggcggcgaggaatttaccgtcgttctaccgaataccgacgagaacggcgctaaactggtcgcggaaagaatgttggaaaaagtgcgcgaacgcaatatacctcacgaggcgaacgataccgctggttatgtgactgtctccattggcggcgcaaccgatatcatcaatcatttgcagcatggaagcaattatatcaaagccgccgatnaagcgttatacgaatcaaacaaaacgggcgcaacagatacaccgcatgaaaattatgaatatgaaacgggatgctcgccgctcctcatacggaggaattttatagtttaa

SEQ ID NO: 56054 - protein, 247 aa, Unknown
  Obtained from environmental sample
  DOMAIN (59)...(224): GGDEF domain
  misc_feature (1)..(247): Xaa is any amino acid
MAVCYMLVIIIIVINFVIEATLEPLNRGIKKMNQMFTDLDLKPGEDKHHKNEAESLNNFLHLTIIDQLTGIYNRRYLDGSLKKIIKLHSHTESSLSVLMIDIDHFKKYNDTYGHDAGDNCLKTVAGILSECVIRKEDFIARYGGEEFTVVLPNTDENGAKLVAERMLEKVRERNIPHEANDTAGYVTVSIGGATDIINHLQHGSNYIKAADXALYESNKTGATDTPHENYEYETGCSPLLIRRNFIV

SEQ ID NO: 56055 - DNA, 789 bp, Unknown
  Obtained from environmental sample
  misc_feature (1)..(789): n is a, c, g, or t
atgagaagcgcaaagcccaccggaaaattttcgctcggcatgttcacgctgaccgtcatattcttatatttgccgcttgttatcttagtcgtctactcgttcaacaacagtaagatgatggcgtggggcggcttttcgctgcgctggtacactgagttgtttttcagttcggagaacctgtggcactcgttttggaacagcgccgtaatagccgtaacctccgcgacggtcagcacggcaatagggacgcttggggcgataggactctactggtacaatttcaagttcaagaaagtaataagcgttgcggcgtttattcccatgttaattccggagataataataggcgtgtccttgttgatattcttcgccgggattaagttacaactgagtttattcacgatatttttggcgcatacgactttcaacatcccgtttgtactgatggttgtgatggcgcgtttggaggagttcgatttcacgataatagaggccgcctacgacttaggagccggagagctgcaagccctctcaaaagtaatcctgcctgcggcctttcccggtataatatcgggttttctgatagccgtaacgctatcgctggaggactttgtgataacgttcttcgtctccggccccggttcgtcaacgctgccgctgcacatctattccatgatccgcttcggcgtatcgccggtaataaacgcgttgtcggtagtggtgatagctggtaccgtggtattggcggctttgtcgagaaatgtggtgaagtatatgtttcagaggtaa

SEQ ID NO: 56056 - protein, 262 aa, Unknown
  Obtained from environmental sample
  DOMAIN (60)...(261): Binding-protein-dependent transport system inner membrane component
  misc_feature (1)..(262): Xaa is any amino acid
MRSAKPTGKFSLGMFTLTVIFLYLPLVILVVYSFNNSKMMAWGGFSLRWYTELFFSSENLWHSFWNSAVIAVTSATVSTAIGTLGAIGLYWYNFKFKKVISVAAFIPMLIPEIIIGVSLLIFFAGIKLQLSLFTIFLAHTTFNIPFVLMVVMARLEEFDFTIIEAAYDLGAGELQALSKVILPAAFPGIISGFLIAVTLSLEDFVITFFVSGPGSSTLPLHIYSMIRFGVSPVINALSVVVIAGTVVLAALSRNVVKYMFQR

SEQ ID NO: 56057 - DNA, 768 bp, Unknown
  Obtained from environmental sample
  misc_feature (1)..(768): n is a, c, g, or t
atggccgagactggacaaaaggaagagcagtttttggattcttccgcaaacaggggaacagggtttcnggcttttcttccccgccgggacgaaagggcggtacatctgctcaaagtactgcgtaaacaagaaggagacagttttgacgcgggaatcctggaaaagaaactcggaacgggagtaatcgaagaaataaccgccgacgggatcgttgtccgccttacgatagatcaggaaccgcttccccggactcccctgcgtcttggggtaggttttccccggcccattcagcttaggcggctgttgcgggactgcgcctgccttggccttgcggcgatagaccttatatgcacggatctgggggaaaaaagctacagggatacgaagctgttaactgacggcggggccagggcggctcttgtcgaaggagcggccctggcgcgggatgtccttctcccggaactggcggtgtatccccgccttgccgcatggctgcaaacacccgcgctgcgaagcgggacagctttgttcgcggcggacaatgtacagcccggcggcagttttgccggtttagccccgattcatccaaaggaaaacaacattgttctggctgtcggttccgaacggggctggagcggccgggaacgggaactgctggaaaatgccggttttacccggctttctatgggaaagaggatcctccgtaccgaaacagcctgttctgcggcggcagttcttttaatggaaaaaatggggttgttggattaa

SEQ ID NO: 56058 - protein, 255 aa, Unknown
  Obtained from environmental sample
  DOMAIN (25)...(249): Protein of unknown function (DUF558)
  misc_feature (1)..(255): Xaa is any amino acid
MAETGQKEEQFLDSSANRGTGFXAFLPRRDERAVHLLKVLRKQEGDSFDAGILEKKLGTGVIEEITADGIVVRLTIDQEPLPRTPLRLGVGFPRPIQLRRLLRDCACLGLAAIDLICTDLGEKSYRDTKLLTDGGARAALVEGAALARDVLLPELAVYPRLAAWLQTPALRSGTALFAADNVQPGGSFAGLAPIHPKENNIVLAVGSERGWSGRERELLENAGFTRLSMGKRILRTETACSAAAVLLMEKMGLLD

SEQ ID NO: 56059 - DNA, 825 bp, Unknown
  Obtained from environmental sample
  misc_feature (1)..(825): n is a, c, g, or t
ttgctgaacggcgtataccgcttcagcggaccgtccttcggcggagtagagacggcaagacgtatgctgcacgaggctttaggcgaggagaaaggcgaggccctgctccaaaaaaccattcacggcctaccccaaaatattttcggctttttggaggaattcacaccggaacagatagtcttcctgctaaaagacgaaagcccggtaacgtcggccctggttctggcaaggctttccccggaagtttccgcaaagacgctggcaaaattcccgcctgccctcaagccggagattctcatgaagatcgcccaccagagcgaagtgatgccggaggttctggaacaagtcgccggggcaataagggaaagggcgcggcatcttggcagcggaaaagatgatattgaaattgacggaatgcaggcccttacggcgattcttaaacaaggggactatacctttggcgaccggattataagcgagttgcaaacggacagccccgagattagcaaaaaactgaaagacaggctgtataccctggacgacgtgcttgaggctttcgacaagccgcttgccgaaaaactcgcgaccatgaccgagcaggatatcgccattctgctgaaaggcaggagtcccgaattctgcgaaaaaatactttcaaatgtttcatcccggcggcgcgatttaatccgcgaggaaggggatataatcggccctatttccaaacgggaaagccttgaggcggcaagcgattttctcgcgtggttcaggctggcgcgcgctaacggcgagctggcgctaaagagcgatgaggattgggtagtataa

SEQ ID NO: 56060 - protein, 274 aa, Unknown
  Obtained from environmental sample
  DOMAIN (158)...(267): FliG C-terminal domain
  misc_feature (1)..(274): Xaa is any amino acid
MLNGVYRFSGPSFGGVETARRMLHEALGEEKGEALLQKTIHGLPQNIFGFLEEFTPEQIVFLLKDESPVTSALVLARLSPEVSAKTLAKFPPALKPEILMKIAHQSEVMPEVLEQVAGAIRERARHLGSGKDDIEIDGMQALTAILKQGDYTFGDRIISELQTDSPEISKKLKDRLYTLDDVLEAFDKPLAEKLATMTEQDIAILLKGRSPEFCEKILSNVSSRRRDLIREEGDIIGPISKRESLEAASDFLAWFRLARANGELALKSDEDWVV

SEQ ID NO: 56061 - DNA, 1536 bp, Unknown
  Obtained from environmental sample
  misc_feature (1)..(1536): n is a, c, g, or t
atgaaaccaccgaaaacacacggctttttttacgttttattttttattgtaataagtacaggtttgatgtacacggcgtgtaagaaaaaaaaagaaccttttgagatacccagagacgaaaacggattaataacattgataacatcagagttgtcttataattatgatgataatgatgattacatatacagattggagcggacgcctgtaaaggataaaattaatccgatagacgaaaacccgataaaactgccgttcactacaaacgctcataaaaaatatttggacgatcccttgacatttgtaaatcttcccgacggaggcattccccaaggtcctaccgccgttgtaggaagcgatgtctgtcttttttatccgatagaaactgtttctataatggaagatttgaagaaattgcctgccggcgaaagaattcccttttcaacaattattcctttgggaaaagaactgaagtgcagtaattcaaaacattatgctaacgtgtttgagtttcagggcaattataattatttttaccagacaacatggaatggaaaacaaggcattgtatttggggcggatctgtatcatgtatgggaagatattagtacttccaacgaagaaaacagagtgaattccatattatataaagacaacggatttttcaaatctttttattctgttacaggttacgatgccataagagaggatattcaaaatgaacttaaaacaaacggtctgtcttttcaggaagtaaaaaaatcggagtatcgtctgtcctttgactatcctgacgatatgataagcctttacataaaaatagatgatggctctgttgttatgtcaaatgttaaggtaactcccgtttttattacaaccgatcttgccgcccactcaaaccatttggtttttgacaggcttcttcagtattgcgaggaagaatattttttcccgcaattgcatacgttaataaatgaatacattaaaaccatcgagcagaaaaagggagaaatccccgatactgtatacaatacaagtatgctctatttccttacagcaaaagcattgctggctttggctcccaaaaaagttgaaaatgaggaaaattatagaaaaactatcgtgtacaatgatgttaacgccgaagaagttctcagtaagtacccgcagcaggttgtaaaagaaattgaacaaatgaacgcccagagatttgattcatcggctgttttccccggcatgaaagaagattattcacaatacaaagtaagagggcattatacaaagaacggagtgcttggcgcttatttccgcgcgcttatgtggttcggcagaattaattttaatcttggcggcgaaagcgacagcgcanaaaacgccgctgaaaaacttgctcccgcggctctntttattaccgacctaacggaaaattccccgcaaataaaaaaactctggcagtccctttttgatcccattacggaacttataggcgtatctgatgatataagtttttatgaacttgctccgctttggaaataa

SEQ ID NO: 56062 - protein, 511 aa, Unknown
  Obtained from environmental sample
  misc_feature (1)..(511): Xaa is any amino acid
MKPPKTHGFFYVLFFIVISTGLMYTACKKKKEPFEIPRDENGLITLITSELSYNYDDNDDYIYRLERTPVKDKINPIDENPIKLPFTTNAHKKYLDDPLTFVNLPDGGIPQGPTAVVGSDVCLFYPIETVSIMEDLKKLPAGERIPFSTIIPLGKELKCSNSKHYANVFEFQGNYNYFYQTTWNGKQGIVFGADLYHVWEDISTSNEENRVNSILYKDNGFFKSFYSVTGYDAIREDIQNELKTNGLSFQEVKKSEYRLSFDYPDDMISLYIKIDDGSVVMSNVKVTPVFITTDLAAHSNHLVFDRLLQYCEEEYFFPQLHTLINEYIKTIEQKKGEIPDTVYNTSMLYFLTAKALLALAPKKVENEENYRKTIVYNDVNAEEVLSKYPQQVVKEIEQMNAQRFDSSAVFPGMKEDYSQYKVRGHYTKNGVLGAYFRALMWFGRINFNLGGESDSAXNAAEKLAPAALFITDLTENSPQIKKLWQSLFDPITELIGVSDDISFYELAPLWK

SEQ ID NO: 56063 - DNA, 960 bp, Unknown
  Obtained from environmental sample
  misc_feature (1)..(960): n is a, c, g, or t
atgatggtaagcggtcttgatatcatgaaggtattcgggtcaaaaaccgcggactacttgttaaatgaaagcgaatactcaaaaaattcaggaatggaaagcctattaaattcgttacagcagaatttgtctaagataaaagaagattattggttttcgacatattacacaaacatattataccagataaggactcaggctctttttgaaaacggatcgggtttttattttactgaaaaacccaactggaatttaaaagtaatgaactccgcccacggaacatgggcggaacttcgtcatgatacaattctttatgtaaaacaaagcgccgccgaaagagccggggacggatacgagccgacattcagaataaaacctcttccgaaacctatccattatcttgagccgaacacgcctttctggactgtttccgccataggaattcaaaagttatacgcaatattggaaaaatacaaatttcttgacgganaatcagcccgggttttaacgggcatgcatgaattatttgtaaaggcggccgctgtttcagccctggaagcggaagacaaacaggtttccgcctccgatcttgagtggatcggtaatattcccaatcaactggcggttcatgtgttatcactgttcgcaagcagcggcagcggcagttatttgaatgatccggaaccactgcgaatggcgcttgtggcggacgtttttaccaacggagaaatcggactggttctggaaaccgcggttggtattccctaccggctctatatcccccttaacgacaagcagggcggaaagcggatagcgacaggctacggtttcagttattacgaattcacccagcccatgtctgacaggcttaacaatgaacaatggaaagccattgtgtattccgataatcccgacatgaaaaagtaccttcccttctggatgcagggaaagattaaatag

SEQ ID NO: 56064 - protein, 319 aa, Unknown
  Obtained from environmental sample
  misc_feature (1)..(319): Xaa is any amino acid
MMVSGLDIMKVFGSKTADYLLNESEYSKNSGMESLLNSLQQNLSKIKEDYWFSTYYTNILYQIRTQALFENGSGFYFTEKPNWNLKVMNSAHGTWAELRHDTILYVKQSAAERAGDGYEPTFRIKPLPKPIHYLEPNTPFWTVSAIGIQKLYAILEKYKFLDGXSARVLTGMHELFVKAAAVSALEAEDKQVSASDLEWIGNIPNQLAVHVLSLFASSGSGSYLNDPEPLRMALVADVFTNGEIGLVLETAVGIPYRLYIPLNDKQGGKRIATGYGFSYYEFTQPMSDRLNNEQWKAIVYSDNPDMKKYLPFWMQGKIK

SEQ ID NO: 56065 - DNA, 753 bp, Unknown
  Obtained from environmental sample
  misc_feature (1)..(753): n is a, c, g, or t
atgcccattaaataccaaaacaaaatcagcgaggtggataaactaaaagaggaaatagattcctaccgcccttttggagaaaatctgctaactgaacttaaaaagttttatagaataggctttacatattcaagcaatgccttggaaggcaactcgcttacggaatctgaaacaaaggttgttattgaaaatggactgacaataggcggcaaaagcattagagaacataacgaagctttggggcatagcgatgcttactctcttttgaatgaattaacaaaaaatgagcagattaccgaaaacgatgttcttgaactgcacagattattttatcacagaatagacgatgaaaaagctggcaaatatagacaggaacaggtttttatttctggtactgattatttaccgccaaaatacaaggaaatcccagatttaatgaaagattttttttcaaaaatgccggaatggaaaagggctttgcaccccataacttttgcagctaaattacacgagcgcattgcaagcatacatccatttatagacggaaacggaagaaccgctcgtttggttatgaatctcgcactgctgcaagctggttatcccatcgcagttattccgccagtgctcagaagcgattatatatacctcataagtttggcaaacaaaggcgattgcgaacctttttttgactttatttcaagcgttgaatacgaaagcgcaaaggaatatttgagaatggtaaagcatttttaa

SEQ ID NO: 56066 - protein, 250 aa, Unknown
  Obtained from environmental sample
  DOMAIN (103)...(223): Fic protein family
  misc_feature (1)..(250): Xaa is any amino acid
MPIKYQNKISEVDKLKEEIDSYRPFGENLLTELKKFYRIGFTYSSNALEGNSLTESETKVVIENGLTIGGKSIREHNEALGHSDAYSLLNELTKNEQITENDVLELHRLFYHRIDDEKAGKYRQEQVFISGTDYLPPKYKEIPDLMKDFFSKMPEWKRALHPITFAAKLHERIASIHPFIDGNGRTARLVMNLALLQAGYPIAVIPPVLRSDYIYLISLANKGDCEPFFDFISSVEYESAKEYLRMVKHF

SEQ ID NO: 56067 - DNA, 462 bp, Unknown
  Obtained from environmental sample
  misc_feature (1)..(462): n is a, c, g, or t
gtggttgtggaaataaatcatttgattgcaaaaaatgcaaatttgaatacatcaaaaattgacaaaggcttgataataaacattcccattgatattcgcgttgtaataaactggaatatgaacaacacagatattgacttgcacgtgaaagacccaagtggcgaagaatgttatttcaagaacaaagaaactaaaactggcgggcgtataagcgcagatatcacaggtggctatggtcctgagcaattccttttgaaaaaagcgataaagggaaaataccagatttatgtgaattactacggcgaccgacaatttactacggcgggtccctcaaccattatggcggagattttcacaaaatacgccgacaaaaccgagcaacgcaaagttgtatctctgcaaatgtctaaggcagagaaaaaagaggataaaaaagtagaggtagctgagtttgagttttaa

SEQ ID NO: 56068 - protein, 153 aa, Unknown
  Obtained from environmental sample
  misc_feature (1)..(153): Xaa is any amino acid
MVVEINHLIAKNANLNTSKIDKGLIINIPIDIRVVINWNMNNTDIDLHVKDPSGEECYFKNKETKTGGRISADITGGYGPEQFLLKKAIKGKYQIYVNYYGDRQFTTAGPSTIMAEIFTKYADKTEQRKVVSLQMSKAEKKEDKKVEVAEFEF

SEQ ID NO: 56069 - DNA, 1710 bp, Unknown
  Obtained from environmental sample
  misc_feature (1)..(1710): n is a, c, g, or t
atgttgccttttttgctccgaaattacaagccttcacgagcattgaatttcgcattgccagcccctgccgatattcctcaagttattatgcaaccggctcagggcagttattattttttggcatcggttgcaccaaaaatggaaccgaaaaaaaagcaatggggcaacgatttggcaattatttgggacgtatcacttagcggttcgcaacgcaatttgcaacgcgagattgaaatgctggatattatttttgccgaaaagaaaaatgcaaatattcatctctattttttgaacaacacatttaaaaaaataaccaagggtaattggaaagaattaaagaacattctggaaaaagcggtttatgatggcggaaccaatttttcaaaaatcaacttgaaagatattgaaggggatgagattttatttttctccgatggaatttcaactttgagcgatgccgattttttaaaaaatgccaattcaaatcgccctatacattgtgttgtttcctcttcaaaatccgattacagcgcgatgaggttgattgctggcaaaacaaaaggcaaatttataaatatcaacgttttatccaacgaagaattaaaaaacgaattgctgaacgaaactctgcaatttttgggaattgagagtggaaatgctgtacgcgaggcatatccgagcatagcaacgcctgtgtatggcaatttttctgtggctggtatttctgagacaaatgaaactgaactcacgctgctttttggttttggaaataagattgaaaaaaaaataaaagtgaaattagaagcaaaaaatgcgagcaatcagggaaatgtgtatagaatttgggcgcaaaagaaaattgcagagcttgacttgaactacgaaaagaaccgtgccgaactcacggaacttgggaagcagttcagcattgtaacgcgaaacacatcgctgattgtgcttgaaaccgttgaggactatatacgctataacattgaaccgcctgccgaattgcaagacgaatatctgcgcaggctaaaagaacgcgaaggacgggtacgtaatgataatgataagagcaatatgctaagcacggcactctcggctgccgaaaatctaaaaaaatggtggaatatagattttaaacctattaaaccaaaataccctcaaccggataatgtggagaaacgtttgagtgttgtttcatcaagtagtagtgctacaagtactacaagtactaccaatactgcaagagccaccaataaggttaaatccaaaagaggcgatgtggatcttttcactgcggctggaggcaaggatattgcttgcacagctggtttcaacgatgaattgacaattatagcgcgacgagatgcccataccttggttaaaggtccctgccaaggctgggtgaacaattcagaaatagaaagggttttgcaaggtccaggcgacagaggtatgaagatagaggcagtggacgttgtggggtggatggataatccaagtgcggtatttgttttggatcaagatgcttatgcttttgaaggcattaacctaaatccaggctacccatcttatccgcatgaacggtcaatcggaaaagcctctcanacaaccaaaagttctcaaccaaccatcacaattaaacccattaaaaaagataatgagtatttgaaaaaattgacgggaaaagttgcggaagatatctga

SEQ ID NO: 56070 - protein, 569 aa, Unknown
  Obtained from environmental sample
  misc_feature (1)..(569): Xaa is any amino acid
MLPFLLRNYKPSRALNFALPAPADIPQVIMQPAQGSYYFLASVAPKMEPKKKQWGNDLAIIWDVSLSGSQRNLQREIEMLDIIFAEKKNANIHLYFLNNTFKKITKGNWKELKNILEKAVYDGGTNFSKINLKDIEGDEILFFSDGISTLSDADFLKNANSNRPIHCVVSSSKSDYSAMRLIAGKTKGKFININVLSNEELKNELLNETLQFLGIESGNAVREAYPSIATPVYGNFSVAGISETNETELTLLFGFGNKIEKKIKVKLEAKNASNQGNVYRIWAQKKIAELDLNYEKNRAELTELGKQFSIVTRNTSLIVLETVEDYIRYNIEPPAELQDEYLRRLKEREGRVRNDNDKSNMLSTALSAAENLKKWWNIDFKPIKPKYPQPDNVEKRLSVVSSSSSATSTTSTTNTARATNKVKSKRGDVDLFTAAGGKDIACTAGFNDELTIIARRDAHTLVKGPCQGWVNNSEIERVLQGPGDRGMKIEAVDVVGWMDNPSAVFVLDQDAYAFEGINLNPGYPSYPHERSIGKASXTTKSSQPTITIKPIKKDNEYLKKLTGKVAEDI

SEQ ID NO: 56071 - DNA, 513 bp, Unknown
  Obtained from environmental sample
  misc_feature (1)..(513): n is a, c, g, or t
atggacagggtaaagtcgtatttaaagagttttgacaggggccgcatggaagactgggctgtcgcaaaaacaaaagaatttatcaaagacgcgcagaattccgggtttgatactgcggtgttacaatggagccttaataaattcagttttggtccgcttccgttgaattatgcgggagtagatctttttacctcacttgaatctttttcggattcaggcattccccggcaggagcttcaatctttatcccgcaatgaaaatttctggaagatcgctttttccgcgaaactgaatactccttcggagccgcttgttcagggagacaatgtacttgtgctctttcctgttgaagaaacaaatattgatgaaactaccaaagagaatattgcgtcttcatatacatcttactgggtaaatatgttagctgaacaatctcttcagccgtattttatgagtaatccaaggctggatgatcgtttttgggatacattttttaaatacttttcaccgtaa

SEQ ID NO: 56072 - protein, 170 aa, Unknown
  Obtained from environmental sample
  misc_feature (1)..(170): Xaa is any amino acid
MDRVKSYLKSFDRGRMEDWAVAKTKEFIKDAQNSGFDTAVLQWSLNKFSFGPLPLNYAGVDLFTSLESFSDSGIPRQELQSLSRNENFWKIAFSAKLNTPSEPLVQGDNVLVLFPVEETNIDETTKENIASSYTSYWVNMLAEQSLQPYFMSNPRLDDRFWDTFFKYFSP

SEQ ID NO: 56073 - DNA, 1518 bp, Unknown
  Obtained from environmental sample
  misc_feature (1)..(1518): n is a, c, g, or t
atgcagggacggccattcgtccgtaacggtataacgcttctttcgggatatgatcctgttatgcgctgtgagcgaattgcggatgctgtctctgtcagggataaaaccctttacttttgtccatcgccgctgtattgttacggtcttgaaaaatttttattgcggcttggcgcgcaagctcccaattctgccgtgctgtgtgttgaagcagatccggaactttatgaattatcaaaaaccggtttaacttcttttctttcaagcaatagaatgtttcgcttaactgatatttgcgaagccgcgaatttatgcgctttagtccgtgaattatggggtgcaagagcattccgtcggattgaaattgtaaagttaacaggcggctggcagctttcagacagtttgtatgattctctttttgaggcgcttcgccgtgaaattgccgtagactggggtaatgccatgactcttgcaaagcttggacggctgtacattcgcaatgcgcttagaaatctttcccttttaccgcgttttcaatcaattgcaaatctttcattcggttcttctccgttacttgttctgggcgcaggcccgtctcttgatgagacccttgatgcgcttgaacatcatttttccggtaatcttcactacccgaataaacgtccctttaaaattgtctgcgttgatacctgccttggcgcattgaaagacagaaacattgtccccgaccttgtagttatactcgaaagccaatactggaatntgcgggattttatcggctgtaaaggctggaatgtaaggagcgcaatagatctttcggcttatcctgcatctgcgcggattctttccggcgaaggctttatttttatgacgccgtggacttcgcttcgtatctttgaaaggttaaaggattccgggctttgccctttagttatttcaccgttaggttctgtgggcttaactgcggcggaagctgcaaggcgcataagccgcggcaaaataattttaagcgggctggatttttcctttactgcggataaatatcatgcccgctccacgcccggacaccgcagccgtcttaatgcgcaaaaccgcatgaagggaattgccaatactgcggcttttgacgcggcttcttttacagccgtttcaaaagccggagtaaatattaaatcaagccatgttatgcgaaattacagagacctttttgaacaggaatttgcaggcgatccgcgcctgtttgacataacgggcacggggcttccgcttgggattaaaacgctttcgtatgaagaagcggtatcggtcttaagcgccgatacgggaaataacacgcttaaaagcgaagacgctcgggcgcgggaaaaaccggagaaagaaaaggcgttgttaacggaaaaactgaaaatatttataaatgatgaaaaaaaacgtttaattgaattaaggaatattcttacaggtgaagccgcgccggatcaaatgcggcttaatgctattatgacgactcggccgatctga

SEQ ID NO: 56074 - protein, 505 aa, Unknown
  Obtained from environmental sample
  DOMAIN (162)...(340): Protein of unknown function DUF115
  misc_feature (1)..(505): Xaa is any amino acid
MQGRPFVRNGITLLSGYDPVMRCERIADAVSVRDKTLYFCPSPLYCYGLEKFLLRLGAQAPNSAVLCVEADPELYELSKTGLTSFLSSNRMFRLTDICEAANLCALVRELWGARAFRRIEIVKLTGGWQLSDSLYDSLFEALRREIAVDWGNAMTLAKLGRLYIRNALRNLSLLPRFQSIANLSFGSSPLLVLGAGPSLDETLDALEHHFSGNLHYPNKRPFKIVCVDTCLGALKDRNIVPDLVVILESQYWNXRDFIGCKGWNVRSAIDLSAYPASARILSGEGFIFMTPWTSLRIFERLKDSGLCPLVISPLGSVGLTAAEAARRISRGKIILSGLDFSFTADKYHARSTPGHRSRLNAQNRMKGIANTAAFDAASFTAVSKAGVNIKSSHVMRNYRDLFEQEFAGDPRLFDITGTGLPLGIKTLSYEEAVSVLSADTGNNTLKSEDARAREKPEKEKALLTEKLKIFINDEKKRLIELRNILTGEAAPDQMRLNAIMTTRPI

SEQ ID NO: 56075 - DNA, 1749 bp, Unknown
  Obtained from environmental sample
  misc_feature (1)..(1749): n is a, c, g, or t
ttgttagggcatgaaacgaacatcaaagctataagaaaaaaaagaaccggttttacatttttcttcataaattcccccataatacaatattttatagaacagaattatgtgttttttccgattgtcttttgtacatttcagtacaatttaagctttctattaaaaagtcggtattattcaaaaggttgtcagaataagttttttaaagatttaaaattaaataagagaaatttgtttatttttatggaggaaataatgataaagaccaaattcagtaaaattctcggagttatggcattaatagccgtaattttcattggttgttccagccccgacggcggcggcggtaatgatgttaaagttaccggcgtctctcttaaagcgggagaaagcacatccggttccagcataatctatcttggcagcactcaagcccatttgcccgcttcagtaattcttaccgcaacggtagaaccggcggacgcgacaaacaaagcggttacatggtcgatagattctgaaacctatgttaccctgagcggaaccaccggcgcatcggtaacggtgacggcaaaggcgcttggcggcccgacaactgttactgttacaacggctgacggtggctttaccgaaacatggaaaattactgtagctgacccggcgagctatgtcccggttagcaacatttcaattaccagcaccggcccatttgtttttaccaaaccggtaggcggcgttttcgaaccagagtcacttcaacttgaatatacgataactcccgaaaacgcgacagacaaaggcgtatcatgggaatcttctgatgaaaaagtggtaacagtagataataacggcttggtaacccctttaaagaacggcacggcggagattactattaccagtgatgaagaaattacaattacagatcaggtaacggtaaaggtaaatgatgaatcggttgaggatgttcatgtaacagatgtcaccattacacttgccgatggcactgcagtgtctagtaccggcttggcttttgaaaaatcgtttggcggtgatttttctccggagaatatacacttgagcgtcagcgtactccctgccgatgcatcggataaaacggtaacatggtcgtcttcagatgaagacgtagtaaccgtgaccggaaccggcgtagtaaccccgataggcaacggtgaagcgataattacagctatcagcaatgatgacaataccaagaaagacaccgtaaatgtaacggtgactgtaggcatcgcgccgtctcagtttacacttaaactcgttaaccagagctcaagccccgctgaaggaacaaccactacattgccggaaatggatgtgactaccaagcggtatactgttgcaaacgcatttaccgattttacttctcccacgactgctagtccttctaccccatggagtggagccggatgggctgagggtgatgccaataacggcgttatcggcaccactgtcgtatatcttgataaggagctgggtaataacgcgagtatcagcgcaagggtacggataatacaaacctacggaaccggggctacttccggcggccttatctttggaatgttcaaaaatcctgttggagcatccgacatcaaattcagcgggattcggttaactaattcaaacgccgaaatacgtatgtatactacaaggaacaacagcggaacaataggtaatagcgcagcttcatttctactctctcggccgatctga

SEQ ID NO: 56076 - protein, 582 aa, Unknown
  Obtained from environmental sample
  DOMAIN (120)...(215): Bacterial Ig-like domain (group 2)
  misc_feature (1)..(582): Xaa is any amino acid
MLGHETNIKAIRKKRTGFTFFFINSPIIQYFIEQNYVFFPIVFCTFQYNLSFLLKSRYYSKGCQNKFFKDLKLNKRNLFIFMEEIMIKTKFSKILGVMALIAVIFIGCSSPDGGGGNDVKVTGVSLKAGESTSGSSIIYLGSTQAHLPASVILTATVEPADATNKAVTWSIDSETYVTLSGTTGASVTVTAKALGGPTTVTVTTADGGFTETWKITVADPASYVPVSNISITSTGPFVFTKPVGGVFEPESLQLEYTITPENATDKGVSWESSDEKVVTVDNNGLVTPLKNGTAEITITSDEEITITDQVTVKVNDESVEDVHVTDVTITLADGTAVSSTGLAFEKSFGGDFSPENIHLSVSVLPADASDKTVTWSSSDEDVVTVTGTGVVTPIGNGEAIITAISNDDNTKKDTVNVTVTVGIAPSQFTLKLVNQSSSPAEGTTTTLPEMDVTTKRYTVANAFTDFTSPTTASPSTPWSGAGWAEGDANNGVIGTTVVYLDKELGNNASISARVRIIQTYGTGATSGGLIFGMFKNPVGASDIKFSGIRLTNSNAEIRMYTTRNNSGTIGNSAASFLLSRPI

SEQ ID NO: 56077 - DNA, 684 bp, Unknown
  Obtained from environmental sample
  misc_feature (1)..(684): n is a, c, g, or t
atggggaactcttttggcggtgttatttttcacgaggcttgcggccacccgctggaaacggaatctgtgcgcaggcaggcaagccctttttgcggaaaacttggcgagcaagtggcgcaaagcgtgttaactgccattgacgatggcactttgagtggagtttggggaagccttgaaatagacgatgagggtaccccaacccaaaaaaccttgttgattgaaaacggaattttgaaaaactttttgagcgaccgagttggagccaaagaattagggcttcctttaaccggcagtgcaagaagagaatcttacaaatacgcccctgttagcagaatgagaaacactttcatagcgccgggtaattcaagcctgcaagatatgctagccacagttgaccatgggttttacgctgcgaaaatggcgggcggctctgttaatccggcaacgggggaattcaattttgcggtggaagagggctatgaaatcaaaaacggcaaactgggcgatgcggttcgtggggcaacgctcatagggcttggtcacgagattttgccaaaaataagcatggtgggcaacgaccttgaactagctgccggaatgtgcggagcaagctccggtcacattcctgtcactgttgggcaaccttcaattaaggtagattctattctggtaggtggacgttga

SEQ ID NO: 56078 - protein, 227 aa, Unknown
  Obtained from environmental sample
  misc_feature (1)..(227): Xaa is any amino acid
MGNSFGGVIFHEACGHPLETESVRRQASPFCGKLGEQVAQSVLTAIDDGTLSGVWGSLEIDDEGTPTQKTLLIENGILKNFLSDRVGAKELGLPLTGSARRESYKYAPVSRMRNTFIAPGNSSLQDMLATVDHGFYAAKMAGGSVNPATGEFNFAVEEGYEIKNGKLGDAVRGATLIGLGHEILPKISMVGNDLELAAGMCGASSGHIPVTVGQPSIKVDSILVGGR

SEQ ID NO: 56079 - DNA, 501 bp, Unknown
  Obtained from environmental sample
  misc_feature (1)..(501): n is a, c, g, or t
atgcttgatttttccgtcactttttttatcacgattattaatatcaccattttgttttttgtattgcgaaagctattgtggaaaccggtaacgaaattcatggctgtaagagcggagcgcatcagggaatcaattgcccaatccgaaaaagacaagctcgacgcaaaggccttgcttgcccaatatgaagcgaagataaaaaccgcagaaactgaggctcaagctattatcagcaaggcaagggagaaggccgaggctgaagcggaaagaataattgccgaaggccgcgcctctgtggaagaaactctggcaaatgccaaaaaacagctcgaagtggaacgcaaagcggcgctggtaattttcagacaggaagcggcggagcttgtggttgcggcaacaggccgcctcgtgggtcgtgaaataaaaagcgaagacaacaagcagtatgccgctatgttaataaacgaggcttctgctttttacaaagcggacgaagactaa

SEQ ID NO: 56080 - protein, 166 aa, Unknown
  Obtained from environmental sample
  DOMAIN (7)...(138): ATP synthase B/B' CF(0)
  misc_feature (1)..(166): Xaa is any amino acid
MLDFSVTFFITIINITILFFVLRKLLWKPVTKFMAVRAERIRESIAQSEKDKLDAKALLAQYEAKIKTAETEAQAIISKAREKAEAEAERIIAEGRASVEETLANAKKQLEVERKAALVIFRQEAAELVVAATGRLVGREIKSEDNKQYAAMLINEASAFYKADED

SEQ ID NO: 56081 - DNA, 702 bp, Unknown
  Obtained from environmental sample
  misc_feature (1)..(702): n is a, c, g, or t
atggcaaattacgggaatctaaccagggttctggaagaacaaataaaaaactgggacagcaaagccgtaaccgagtccacgggatttgtggtacaggcgggatacggtgttgtaaccatacacgggctttcaagggcaatttacggggaacttttggaatttgcttccggcgcagtcggtattgctcttaaccttgaagaagacggggttggatgcgtcttgctttcaggggaagacgacgtaaaggacggggaagaagttaagggcaccggtcaggtagtgtccgtgccttcaggcgattcccttatcggcagggtgctaaacccgctgggcaagcccatagacggcaaagggccaatccagagcgaagagtggctgcccgtggaggccccggccgcgccggtaattgaacgcggcagcgtggacaccccaatgcaaaccggtatcctttcggtagactcgatgatccccatcgggcgcggacagagggaacttatcataggcgacaggcagaccggcaaaaccgccctcgccatcgacgccattgtcaaccaaaaaggcaaggacatgtattgcgtttactgcgccatcggtcaaaagtcatcatcggttgccgcgattatcaaaaacctggaaaaaagcggggctatggattatacctttgtggtgcttgctgcggcctctcggccgattctgacctag

SEQ ID NO: 56082 - protein, 233 aa, Unknown
  Obtained from environmental sample
  DOMAIN (147)...(233): ATP synthase alpha/beta family, nucleotide-binding domain
  misc_feature (1)..(233): Xaa is any amino acid
MANYGNLTRVLEEQIKNWDSKAVTESTGFVVQAGYGVVTIHGLSRAIYGELLEFASGAVGIALNLEEDGVGCVLLSGEDDVKDGEEVKGTGQVVSVPSGDSLIGRVLNPLGKPIDGKGPIQSEEWLPVEAPAAPVIERGSVDTPMQTGILSVDSMIPIGRGQRELIIGDRQTGKTALAIDAIVNQKGKDMYCVYCAIGQKSSSVAAIIKNLEKSGAMDYTFVVLAAASRPILT

SEQ ID NO: 56083 - DNA, 885 bp, Unknown
  Obtained from environmental sample
  misc_feature (1)..(885): n is a, c, g, or t
atggacagaacttgcccgccgccaatcgagtatgagaaagagtatttttttgaatcatacaaaaggcagtacggcaaaacctatcttgaagacttccccaatcttgtcgcaatggcaaaacgcaggctaaaggttatttcgcaaaaacttcacacaaagagcgcagagagcggttactaccctcctattgttcttgatattgggtgcgcttacggagcgtttcttttggcggcgaaagaagaagggtttttgccgtttggaattgatccggcgcaggacgcggtgcgttatgtgcaagaaacattaagtattccggcagttcaaggttttttccctgattatccgctttctacgtccaattcacagctctatgacgttgttacattgtggtatgttatcgaacattttacagactgcgccgccgtattgaccgaaataaaaaaactgctaaaacccggcgggattttggcgttttcaacgccatcgttctcaggtatcagcgggtgtaaatcgcttcacgggtttttggaaaacagcccgcctgatcattttacaatctggtcgcccaaaatgtgtaaaaaggcgcttgccctcgcgggttttaaagtaaaaaaaatagtaatgagcggctgccaccccgaacgtttcccgctcctgggaaaattcaccgaagacaaaaaaggatgcttgtatagcctgcttatggctgtcagcaaaattttacatctgggagatacttttgaggtttacgcgaaaagaaaatattaccacgaaccacacgaacaccacgaacttttagtacatatcttgtcgttgttcgtattggttcgtggcagaaatattagaataattatttttggcatagaaaatccacacgtttcataa

SEQ ID NO: 56084 - protein, 294 aa, Unknown
  Obtained from environmental sample
  DOMAIN (65)...(158): Methyltransferase domain
  misc_feature (1)..(294): Xaa is any amino acid
MDRTCPPPIEYEKEYFFESYKRQYGKTYLEDFPNLVAMAKRRLKVISQKLHTKSAESGYYPPIVLDIGCAYGAFLLAAKEEGFLPFGIDPAQDAVRYVQETLSIPAVQGFFPDYPLSTSNSQLYDVVTLWYVIEHFTDCAAVLTEIKKLLKPGGILAFSTPSFSGISGCKSLHGFLENSPPDHFTIWSPKMCKKALALAGFKVKKIVMSGCHPERFPLLGKFTEDKKGCLYSLLMAVSKILHLGDTFEVYAKRKYYHEPHEHHELLVHILSLFVLVRGRNIRIIIFGIENPHVS

SEQ ID NO: 56085 - DNA, 1254 bp, Unknown
  Obtained from environmental sample
  misc_feature (1)..(1254): n is a, c, g, or t
atgggacaatacgacagttgggattatttaaccaactttataaaaaagaatattgggaattttcaagatgaattggcaaagcccccatttgccataaaaaccaaacaacatacggtttgtcctaatctatatatgtttaaatacagccagttcgagtcggattttaccaatcctattgtccgctgttgccgtggctcagtgtacgatattcgcgatgacggaacggtccgtcccctgcttatgcctttttttaaatttgccaattatggagaggctggcgcggacccaatcgactggaacaacggtttgtatgtgcgcgaaaaacttgacggttccctcatcaaactgataaaggttacggagcgcgaggggttttccaatgagtatgatttgtggactaccaatggcagttttgaaattgacacggaagtacctgaattttatccggttgagaacgatgaaaaccttccaccgccgcatacctttgcctcacttcgcgattacgccctgcgcggtcatgaggatgaaataaagcgtctgccgcaattgtggacttttatgttcgagctgacatccccctataacaaaataattgttccctatcacgaaacaaaactgacactgcttggatgtcgcgatccgcagggtacggaacatactcccgaatgggcggttaaaaatttctcccttacttttgacactccaaaaattcatccgttaaaaaacatagatgaagtcattgcgcactgtaaggccattgacactaatgatcgcgaaggcgttgtagtgcaggatgggaattttaacagagtaaagataaaatccgaacattaccgcagtctttcttcgttaaaaggggaagatcatttttctgacgaaaaactgtttacggctatcaaggaagagtggattgacgacgcgcttgccgcatggcctgaaattaaaaaacgtaccgatgaaattatcgcggagtgggtggatttcaggcataaagtgattgcactttgcaaaaaggcagaatgtttttatcaaacctgtaaaaatgaataccctgacgacccaaaagaggcgaaaaagcgttatgcgctagttgtcatgggaaaatacaaaacgttttccacgtttctttttgaaacggtaaaggaaaacggcgatattgagcctgattttaataagattgggtataaggaattaagaagctattggatgccggcaatggagggcgtagggcaggggaacaattttgaagagtaa

SEQ ID NO: 56086 - protein, 417 aa, Unknown
  Obtained from environmental sample
  misc_feature (1)..(417): Xaa is any amino acid
MGQYDSWDYLTNFIKKNIGNFQDELAKPPFAIKTKQHTVCPNLYMFKYSQFESDFTNPIVRCCRGSVYDIRDDGTVRPLLMPFFKFANYGEAGADPIDWNNGLYVREKLDGSLIKLIKVTEREGFSNEYDLWTTNGSFEIDTEVPEFYPVENDENLPPPHTFASLRDYALRGHEDEIKRLPQLWTFMFELTSPYNKIIVPYHETKLTLLGCRDPQGTEHTPEWAVKNFSLTFDTPKIHPLKNIDEVIAHCKAIDTNDREGVVVQDGNFNRVKIKSEHYRSLSSLKGEDHFSDEKLFTAIKEEWIDDALAAWPEIKKRTDEIIAEWVDFRHKVIALCKKAECFYQTCKNEYPDDPKEAKKRYALVVMGKYKTFSTFLFETVKENGDIEPDFNKIGYKELRSYWMPAMEGVGQGNNFEE

SEQ ID NO: 56087 - DNA, 1587 bp, Unknown
  Obtained from environmental sample
  misc_feature (1)..(1587): n is a, c, g, or t
ttgaatgtaaaattggttttaaacagcacaagcgccggtaatgtcggagcggttgcgggttttgccgaatccggaagcggcggcagcataaccatagacattgattacaaaaatcctaaagataaagggcctaatatcacccttaccaatctggcgattgacggagtaacggttaccgctaacgtgagcggcaacacaagcggaacaggcggcttaaatattggcggcatgacaggttctaacttgaacaataccatgagggatattattgtttccgtcggcggggtttcatttgacataaccggtaattcaggcaataccaatattggaggcgttatcggctatgcgaataattcaagcatggaagattgttcctttacaaatggagctatcggaacagacggcgatgtcggcataattaaaaatttaaaagacgatgcatggataaattttggcgggcttattggtatttcttatgtcgatgacggagatgtttatatcaacaattgccatgtgcgcggaaacgtcggcgtcaaagtcgagtcctatggcaatataaatatcggcggcgtttttggcagttcaatatacgaaaaaagcaccgttacaataaccaacagtttttttgaggaaggtaatattacggcatccaataattcaggcgcaatccagtcaggcgggtttagcggcattatttatgaggaagactattggactaagcctgtaagtgaacgattaaacagccattataccaataattgcggagtaatggcgggaactgttaacatttatgtagaagtatacggaaaatatattactgccggaggttttacctcgtcatttataggtgatatttccaactgtttcagccgggcaaatgttatttccagaggaagcggcgattatgaggaaggagaagatccttatacttatacacatcaaacaggcggttttaccggcgctcttgctccgggggctacgctctcgtcatgttacgcgactgggactgtttactcgacgcacagtggcaatagacaattacttgccggcggctttgtaggcagttccgcgggagtaatagagaactgttacgcgttagggaatgtgttggcggataaaaccgccggaacttacgattcatccgccggagggttggtaggatcgacttggggaggaagtataaaacattcctttagcgcggggaaagtaatttcacaatctaaagaaagtcccgctaacgccggaggtgttgttgggaatttatatagcgcttcgatcagctatacggcggctttaggtacgagtgttaccgccaagagcggctcttctatgaacgcggggcgtataacaagcaataatacttcaagtcttagttttaattacgcgctgttaaaaatgctcgttgaaaaaagtgaatatgaagaaactaacccggaaccgctatctactgttaccaacgcgaatggcagtgacgggcaggacgcagatcgcgctgtcttctttactcaagcattctggaaaacgacattaggttttacttctgcatgggattttaatctggtcgcgaaagacggccatccgcgctag

SEQ ID NO: 56088 - protein, 528 aa, Unknown
  Obtained from environmental sample
  SIGNAL (1)...(22)
  misc_feature (1)..(528): Xaa is any amino acid
MNVKLVLNSTSAGNVGAVAGFAESGSGGSITIDIDYKNPKDKGPNITLTNLAIDGVTVTANVSGNTSGTGGLNIGGMTGSNLNNTMRDIIVSVGGVSFDITGNSGNTNIGGVIGYANNSSMEDCSFTNGAIGTDGDVGIIKNLKDDAWINFGGLIGISYVDDGDVYINNCHVRGNVGVKVESYGNINIGGVFGSSIYEKSTVTITNSFFEEGNITASNNSGAIQSGGFSGIIYEEDYWTKPVSERLNSHYTNNCGVMAGTVNIYVEVYGKYITAGGFTSSFIGDISNCFSRANVISRGSGDYEEGEDPYTYTHQTGGFTGALAPGATLSSCYATGTVYSTHSGNRQLLAGGFVGSSAGVIENCYALGNVLADKTAGTYDSSAGGLVGSTWGGSIKHSFSAGKVISQSKESPANAGGVVGNLYSASISYTAALGTSVTAKSGSSMNAGRITSNNTSSLSFNYALLKMLVEKSEYEETNPEPLSTVTNANGSDGQDADRAVFFTQAFWKTTLGFTSAWDFNLVAKDGHPR

SEQ ID NO: 56089 - DNA, 495 bp, Unknown
  Obtained from environmental sample
  misc_feature (1)..(495): n is a, c, g, or t
atgaattccattgttcagatgacggatatcaccaaacgctttggtaatgtgattgcgaataaccgctgcacattctctgtccgggaaggtgaaatacactgtctgttaggtgaaaatggggcgggaaagacgactctgatgaatatcctttttggcatgtaccatgctgacagcggagatatatatatcaggggtgaaaaatgccgtattaacaataccggcgacgccttccgccgcggacttggcatgatccaccagcattttatgctcattcccaatatgacggtattgcagaatattgttcttgggcaggagataggtaatttcaaattgaattacggtgaaagccgccgtcaaatacatgaaatcactgaaaagtacgggctggaactggatttggacgcccgggtagaaaatatctctgtcggcatgaaacagcgggtggaaattgtgaaaacccctgtaccggggcgcggatgttctggttctggatga

SEQ ID NO: 56090 - protein, 164 aa, Unknown
  Obtained from environmental sample
  DOMAIN (30)...(164): ABC transporter
  misc_feature (1)..(164): Xaa is any amino acid
MNSIVQMTDITKRFGNVIANNRCTFSVREGEIHCLLGENGAGKTTLMNILFGMYHADSGDIYIRGEKCRINNTGDAFRRGLGMIHQHFMLIPNMTVLQNIVLGQEIGNFKLNYGESRRQIHEITEKYGLELDLDARVENISVGMKQRVEIVKTPVPGRGCSGSG

SEQ ID NO: 56091 - DNA, 573 bp, Unknown
  Obtained from environmental sample
  misc_feature (1)..(573): n is a, c, g, or t
ttgcaggtaaaccngtttggctataacataacttatgacatcgttcttcgcatggtaggtataagcgctgaaaaagctcggttggtcatgtatgaagaattcggcactaattttccctacgacacgattcgcattgaatttagaaggcttgtacaagaagaagttgataaaaacggagttcccttaaagcccggtcttatatacctgcttgaccgtctttccgccgcaaagataccttttggcgttgcgacttcttcgcgcactgccacggcaactaatatgctcagtaaagccggtataatcgatcgttttgcggcaattacctgcggtgaggaagtcacaaacggcaaacccgccccagatatttttcttctcgcggcaaaaaaattaggacacccccccagtacctgcgtcggctttgaagactctcccccgggtcttctaggactacataccgccgggatacgctcaatcttcattaaagaccttatcgaaccgtccccggaagtacttgccaccgtctggcatcgttgtaatgatttgacggaggctgtggcattattcggcctgtaa

SEQ ID NO: 56092 - protein, 190 aa, Unknown
  Obtained from environmental sample
  DOMAIN (1)...(163): haloacid dehalogenase-like hydrolase
  misc_feature (1)..(190): Xaa is any amino acid
MQVNXFGYNITYDIVLRMVGISAEKARLVMYEEFGTNFPYDTIRIEFRRLVQEEVDKNGVPLKPGLIYLLDRLSAAKIPFGVATSSRTATATNMLSKAGIIDRFAAITCGEEVTNGKPAPDIFLLAAKKLGHPPSTCVGFEDSPPGLLGLHTAGIRSIFIKDLIEPSPEVLATVWHRCNDLTEAVALFGL

SEQ ID NO: 56093 - DNA, 948 bp, Unknown
  Obtained from environmental sample
  misc_feature (1)..(948): n is a, c, g, or t
atgaaaaacacttggaaaaaagtcaagaagttcgtaagggcatacgaagaggaagacgcgtgtttagtatttgacgacaccataattgaaaaaacgtacatggacgaaaatgaaataatatgctggcattttgatcacaaagaaaacaaagccgtaaaaggagtcaatttgttgagcgctttttaccatagtgaaaaaaacggacaatcggtacgcctgccaacgggttaccgggtgatagcaaagacggaagaatataccgacgaaaaaagcggggagcggaaacgaagaagcccaattacgaaaaacgagatgatgcaggaaatgataaagcggcacatgcaaaacaaggtcaaattcacctatattttggcggattcgtggtattcatccgccgaaaacatgaggtttatagataaaagggggaaagtatttatatttgagctgaaagagaaccggcaggtaacggacagtgagaaggaaagaaatcaaggggggttcgagaggctggatacattggaattaccggaaggcaagcccgtgaaagtttggataaaggatttggaatttccggttaagatattcaaacaagtctttataaacaaagacggaacaaacgggcagcgatttctggtaacaaatgaattaagcttaacggaaaaacaattcaagacgctctacaaaaaacggtggggcgttgaagagtatcacaagagtttaaaacaaaatgcgtcaattgggaattcgccggcgcataccgaaagaacgcagagtaatcatatattcgccgcgatattgggctatgtaaaactgagaagtaaagcaggcaacaaacctcaaccattttgcaatgaaagcaaaaatatacatggcttcaatgatgacggcaaaggttacatttcaggaactctggaaaaacactcaaaaccttgcttttgcgtaacatga

SEQ ID NO: 56094 - protein, 315 aa, Unknown
  Obtained from environmental sample
  DOMAIN (21)...(270): Transposase DDE domain
  misc_feature (1)..(315): Xaa is any amino acid
MKNTWKKVKKFVRAYEEEDACLVFDDTIIEKTYMDENEIICWHFDHKENKAVKGVNLLSAFYHSEKNGQSVRLPTGYRVIAKTEEYTDEKSGERKRRSPITKNEMMQEMIKRHMQNKVKFTYILADSWYSSAENMRFIDKRGKVFIFELKENRQVTDSEKERNQGGFERLDTLELPEGKPVKVWIKDLEFPVKIFKQVFINKDGTNGQRFLVTNELSLTEKQFKTLYKKRWGVEEYHKSLKQNASIGNSPAHTERTQSNHIFAAILGYVKLRSKAGNKPQPFCNESKNIHGFNDDGKGYISGTLEKHSKPCFCVT

SEQ ID NO: 56095 - DNA, 834 bp, Unknown
  Obtained from environmental sample
  misc_feature (1)..(834): n is a, c, g, or t
gtggaagcggtaagaacgatggacaaaatagcgtgcgtcattgagcagtcacaggaattccgtacacgcatgatgaatttccacgaggaatgtcattccgaagtgcataacccaaaagaagatatgggcatcatcatgtcgcggtcaggagttgaaaccgcgacggcggtaaacgcgaaagtcattgttacgccgactcgcagtggcaataccgcgcgaatcctcagcgtattcaggccggacgaacctatccttgccgtaacgacagataaacgctctgaacgttttatgcagttatactggggcgttaatacctgtatcactccggaagtcggcgattcggacagcatgatacgcaataccatggatgttgtttcaaagaccggcgtagtaaacatatcggataaaatagtcctcattgccggcctgccgcttgaaagcccgaacatgataaataccgtccgcgtcgtcattatcgggacggttctcgcgcgttcaagcggcggaggttacgcaagtcctgacaatatccgcgtgcaaggcaagataatccacgccgcagatgccgatgatgccagtaaaaaagtcaattcttccggcggcgacggaatacttgtttgcaaagagattaccgatgaatatatgcctgttctccgtacggntaaaggggttatttgcgaaggagtttcggttatcagtgaagagaagttgcgcgtcatcaatcccaatcttgtctggcttacccacatcagagacgcggcaaaaaaacttgaatccggattaacggtaacaatagacggaaaagaactgtttgtttatgagggcgcgatttaa

SEQ ID NO: 56096 - protein, 277 aa, Unknown
  Obtained from environmental sample
  DOMAIN (46)...(158): Pyruvate kinase, alpha/beta domain
  misc_feature (1)..(277): Xaa is any amino acid
MEAVRTMDKIACVIEQSQEFRTRMMNFHEECHSEVHNPKEDMGIIMSRSGVETATAVNAKVIVTPTRSGNTARILSVFRPDEPILAVTTDKRSERFMQLYWGVNTCITPEVGDSDSMIRNTMDVVSKTGVVNISDKIVLIAGLPLESPNMINTVRVVIIGTVLARSSGGGYASPDNIRVQGKIIHAADADDASKKVNSSGGDGILVCKEITDEYMPVLRTXKGVICEGVSVISEEKLRVINPNLVWLTHIRDAAKKLESGLTVTIDGKELFVYEGAI

SEQ ID NO: 56097 - DNA, 1323 bp, Unknown
  Obtained from environmental sample
  misc_feature (1)..(1323): n is a, c, g, or t
atggccctcgttagcaacacattctttgacagcgtaaagctgatagccgcagaaaagggcatccctgaggaagaagttttcggcgcggtagaagagtcgctggtcaaagcggcagaaaaatattttcacagccaagagttctttgggaatttccaagcccagatggacagggacactggcgagttccatgtctatgctttaaaaactgtcgtgctggacgttgaagaagaggatttagaaatcagcttggaagaggcccaggccctcaatccagacgcttccgaaggcgacacgctgtggcttccgcaagacactactcagcttgggcgcatcgccgcccaggccgccaaacaggttcttgtccagaaagttcgtgaggccgaaagggacagaatatataccgaatttgtgaaccgcttaggcgagatagtcgtagccgaggttaagcgctttgagaagaattcaatcgtgatggaaatagatcgcgtcgaggccatgctgaggcgctcggagggcctgcgcggagaccgcttcgacaaaggccagcgcctcaaggtcgtcatttcccaagtagataaaagctccaaagatccccagatacaggtcagtaggactgacccaaggctcttggtaaatctctttgacagcgaggtacctgaaatccacgatggcaccgtagtcatcaaaagctgcgtgcgcgaggccggggacagggcaaaggtgtcagtccacagcgttgatccagacgttgatccagtaggcgcctgcgtggggctcaagggcagccgtgtgcaggccataatccgcgaactgaaaaatgaaaaaatagacatcgtccgctacgatgaagaccctgcaaaatatatcgccaatgccctaaacccagctagaaccctcaaagtgactgtcacagacccagataagcgcagggtagaggtgatggtagaggaagatcaactgtccgtggccataggcaagaaggggcagaatgtccgtttggcggcaaaattgactggctggaacattgatgtacgcagcaatgaagaaaaacgccaagaagcggcggcggcaatggcggacgcgctgccagagccagaacaagtggagggcgaggctttggcgcctagttccaccatcttggatgagctaggcggtgtagaggggctggatgcccaaatcgctgcaagcctagccgccgcaggctttcccagcgcaaaatccttgtacaacgcgaccgccgaacagctgctcggcgtggaaggcatggacaaagaattggcctttcgtttaattgacactgttcaagaaaggtttgatggttga

SEQ ID NO: 56098 - protein, 440 aa, Unknown
  Obtained from environmental sample
  DOMAIN (137)...(203): S1 RNA binding domain
  misc_feature (1)..(440): Xaa is any amino acid
MALVSNTFFDSVKLIAAEKGIPEEEVFGAVEESLVKAAEKYFHSQEFFGNFQAQMDRDTGEFHVYALKTVVLDVEEEDLEISLEEAQALNPDASEGDTLWLPQDTTQLGRIAAQAAKQVLVQKVREAERDRIYTEFVNRLGEIVVAEVKRFEKNSIVMEIDRVEAMLRRSEGLRGDRFDKGQRLKVVISQVDKSSKDPQIQVSRTDPRLLVNLFDSEVPEIHDGTVVIKSCVREAGDRAKVSVHSVDPDVDPVGACVGLKGSRVQAIIRELKNEKIDIVRYDEDPAKYIANALNPARTLKVTVTDPDKRRVEVMVEEDQLSVAIGKKGQNVRLAAKLTGWNIDVRSNEEKRQEAAAAMADALPEPEQVEGEALAPSSTILDELGGVEGLDAQIAASLAAAGFPSAKSLYNATAEQLLGVEGMDKELAFRLIDTVQERFDG

SEQ ID NO: 56099 - DNA, 831 bp, Unknown
  Obtained from environmental sample
  misc_feature (1)..(831): n is a, c, g, or t
ttgcgggagatagggaacgactctttcactgagccgttttgtccgactgccgcttattttgccgccagggaaaaaatagccgccttcgattatgaaaaattgtgggaaacaatctggaggggaagtatgccacgcttatacgcggatccttcctttcctcatgaagcgttttattcagcctatatccgtacttacatagaaagggatgtacgctcaatcgtcaatgtaggggacgagaagaaatttatttcttttatccgaggcgcggcggcaaggacagcccagatgcttaacatatccaaacttgccgaggatacggatatttcccgaacaagtgccgaacgctggctttccgttttgataagcgcaaacctggtttttctgctccgcccctttcatgttaatatcaacaaaagggaaataaaagcgccgaaactgtattttctggatactggccttgcggcgtatttaaccggctgggatacgccgcaggtactccgaaaaggtgcaatggggggcgcgttttttgaaacctttgtcattgccgagattatcaaaagctatattaacaagggcagtgcgccccctctttattattaccgcgataaggaacagcgggagatagaccttttgatctggagaaatgggcgactctttcccctggaaataaaaatgaccgccaaccctgaaaaaaaacatatagcggctttcaaagtactggacaccctgccagcgccgtataagcggggcgaaagcgggcttgtatgctgctacgaagaacttgtctctttgggcgttaaagataaggttataccgttccggtatctatag

SEQ ID NO: 56100 - protein, 276 aa, Unknown
  Obtained from environmental sample
  misc_feature (1)..(276): Xaa is any amino acid
MREIGNDSFTEPFCPTAAYFAAREKIAAFDYEKLWETIWRGSMPRLYADPSFPHEAFYSAYIRTYIERDVRSIVNVGDEKKFISFIRGAAARTAQMLNISKLAEDTDISRTSAERWLSVLISANLVFLLRPFHVNINKREIKAPKLYFLDTGLAAYLTGWDTPQVLRKGAMGGAFFETFVIAEIIKSYINKGSAPPLYYYRDKEQREIDLLIWRNGRLFPLEIKMTANPEKKHIAAFKVLDTLPAPYKRGESGLVCCYEELVSLGVKDKVIPFRYL

SEQ ID NO: 56101 - DNA, 435 bp, Unknown
  Obtained from environmental sample
  misc_feature (1)..(435): n is a, c, g, or t
atgcttaatatagaaaagatacgaaacggaattgtaattgatcatattaaagcgggccaggggattcgcattttcaactggcttggtctggacaaagcgccttataccgtggcttttgttgtgaacgccacctccaacaaaatgggaaaaaaggacctcatcaaaatcgatgaaaccatttcaattaactttgatcttctgggccttattgatcccaatatcaccgtgaaaatcatcaaggacgaaaagatcatggagacaagaaggctgaagcttcctgagaaggtggaaaacgtgatcatctgcaagaacccccgctgtataacttcaacggaaaaatatatcccgcatatttttcacctggaggatcctgaacacaggacttaccgctgcgagtactgcgatgagatacgttatgcgggggattttaggtaa

SEQ ID NO: 56102 - protein, 144 aa, Unknown
  Obtained from environmental sample
  DOMAIN (2)...(92): Aspartate carbamoyltransferase regulatory chain, allosteric domain
  misc_feature (1)..(144): Xaa is any amino acid
MLNIEKIRNGIVIDHIKAGQGIRIFNWLGLDKAPYTVAFVVNATSNKMGKKDLIKIDETISINFDLLGLIDPNITVKIIKDEKIMETRRLKLPEKVENVIICKNPRCITSTEKYIPHIFHLEDPEHRTYRCEYCDEIRYAGDFR

SEQ ID NO: 56103 - DNA, 933 bp, Unknown
  Obtained from environmental sample
  misc_feature (1)..(933): n is a, c, g, or t
ttgggagggactatgctgaagggacgaaatttaattgagcctcttgattttacaaaggaagaaatggaggcgctttttactaaggccggggaaattgaaaagaaaccggcgtcatttcgggagcattgccggggaaacattttggcaacccttttctttgagccaagtacgagaacaaggctttcttttgaggcggccatgctgcgcttgggcggtagctgcctgggctttgcggaaccaggctccagctccgtcgctaagggcgagtgtcttgcggacacgataaggacagtggcctgctacgcggacgtgatcgttatgcgcaacccaaaggaaggcgcggcccttttggcttcgcgttattcggaaatcccagtgatcaacgcgggggacggcgggcatcaccatcctacccagaccctgacggatctgctgacgattcgccagctcaggggaaaaatcggaaacctgacagtcgggttttgcggggatctaaaatttggccgcacagtccactcacttgcgcataccctgagccggtacgaggggataaaaatggtttttatctctccgcctgaattaaagatccccgattaccttaaaacgcaggcgctggcaaaaaacaatatctcatatactgaaaccgataaccttgaagaggtgataggggaactggatattctttacatgaccagggttcaaagggaaaggttttttaacgaggaagattatctgcgcctgaaggacacttatattttaaacgcggaaaaaatgaaatccgcgaaaaaagatatgatgatccttcaccctcttccacgagtaaacgaaattgaccttgagcttgatgaagatccacgggcgatgtattttaagcaggcaaaatacggcatgtatgtaaggatggcgttactgtcgtcggttctgacggcatag

SEQ ID NO: 56104 - protein, 310 aa, Unknown
  Obtained from environmental sample
  DOMAIN (154)...(307): Aspartate/ornithine carbamoyltransferase, Asp/Orn binding domain
  misc_feature (1)..(310): Xaa is any amino acid
MGGTMLKGRNLIEPLDFTKEEMEALFTKAGEIEKKPASFREHCRGNILATLFFEPSTRTRLSFEAAMLRLGGSCLGFAEPGSSSVAKGECLADTIRTVACYADVIVMRNPKEGAALLASRYSEIPVINAGDGGHHHPTQTLTDLLTIRQLRGKIGNLTVGFCGDLKFGRTVHSLAHTLSRYEGIKMVFISPPELKIPDYLKTQALAKNNISYTETDNLEEVIGELDILYMTRVQRERFFNEEDYLRLKDTYILNAEKMKSAKKDMMILHPLPRVNEIDLELDEDPRAMYFKQAKYGMYVRMALLSSVLTA

SEQ ID NO: 56105 - DNA, 315 bp, Unknown
  Obtained from environmental sample
  misc_feature (1)..(315): n is a, c, g, or t
gtgtccgcaagacactcgcccttagcgacggagctggagcctggttccgcaaagcccaggcagctaccgcccaagcgcagcatggccgcctcaaaagaaagccttgttctcgtacttggctcaaagaaaagggttgccaaaatgtttccccggcaatgctcccgaaatgacgccggtttcttttcaatttccccggccttagtaaaaagcgcctccatttcttcctttgtaaaatcaagaggctcaattaaatttcgtcccttcagcatagtccctcccaaaaaaaaccgcccctctgggggcggtttatattag

SEQ ID NO: 56106 - protein, 104 aa, Unknown
  Obtained from environmental sample
  misc_feature (1)..(104): Xaa is any amino acid
MSARHSPLATELEPGSAKPRQLPPKRSMAASKESLVLVLGSKKRVAKMFPRQCSRNDAGFFSISPALVKSASISSFVKSRGSIKFRPFSIVPPKKNRPSGGGLY

SEQ ID NO: 56107 - DNA, 996 bp, Unknown
  Obtained from environmental sample
  misc_feature (1)..(996): n is a, c, g, or t
atgtcccaggttttggatgactcagaaggcgcgggacttggacttgtgattctggtacttatgcttaaaaaaatgggtcttgacgaggactgttttgatattctgggaaccgacaaggaaaccattgctcgtcttgttattcctctggatcagacacgccttgaaaatctttcggccctttctactaccattgtggataacataacctccctgccccaattcccggaaaatatccttttggtacagaagctaataaacgatcccaaatcggagatggccgatattgcgcggcagatctccatggatcctgctcttacaggggatcttttgaagatcgtcaattccgcgcaatatatgctttcaaagaaggtggacagtattgccgatgctgttaagatggtcggaattaggggcatcaaaaacctgctttactcctacggtacgcagaagatcctcggcgatgatactgttgataaaaagaacctctgggagcatagctacaaaaccgccttctttgcctataacctggtcaagaatttccgcagggatcgtaacctgttggatgatgcctatgtcggcggaatactacatgacatggggaaaatcgttttctccaacgttcatcctgatctgctgaataagataaagggcttttgttctgacaggggtatgcctgcttcaacctttgaggatctttccgcaggcatgaaccatgcggaaatcggcgcccttattgccgataaatggaacttcccgcaagcccttgttgtttgtatccgctatcatcatgatcccgcttctgctccggaggagcacaaggatttggtagatacggtctaccttgccaacatgttctgcgagcttgaaaccgggggcgtaacctttgaccagcttgagccttctgtgcttgagaatttcggtcttacaaccaaaaagcaggtggaaagcctgttggaaaggttctccagaggctttaaaaaagaagccaaccaatag

SEQ ID NO: 56108 - protein, 331 aa, Unknown
  Obtained from environmental sample
  DOMAIN (162)...(284): HD domain
  misc_feature (1)..(331): Xaa is any amino acid
MSQVLDDSEGAGLGLVILVLMLKKMGLDEDCFDILGTDKETIARLVIPLDQTRLENLSALSTTIVDNITSLPQFPENILLVQKLINDPKSEMADIARQISMDPALTGDLLKIVNSAQYMLSKKVDSIADAVKMVGIRGIKNLLYSYGTQKILGDDTVDKKNLWEHSYKTAFFAYNLVKNFRRDRNLLDDAYVGGILHDMGKIVFSNVHPDLLNKIKGFCSDRGMPASTFEDLSAGMNHAEIGALIADKWNFPQALVVCIRYHHDPASAPEEHKDLVDTVYLANMFCELETGGVTFDQLEPSVLENFGLTTKKQVESLLERFSRGFKKEANQ

SEQ ID NO: 56109 - DNA, 624 bp, Unknown
  Obtained from environmental sample
  misc_feature (1)..(624): n is a, c, g, or t
atgcgaggcaaacttgcgtttataaaatcaacattagataaattatatccaaatccgcctatacctcttgcttatacggatgcattttcttttttaattgcggttgtgctttctgcgcaatgcaaagattccgttgtcaatacagtcacgccaagccttatggctaaagccccaagcccgcaaaaaatggcagagctttctgaacagcaaatttactctcttataaaattgtgtggattggctaaaaataaaagcaggtttttaaaggaactctcaaaaataatagttgaaaagcacgggggaaaagtacctaattcatttgaagagttggagacattgcctggtgttgggcacaaaacggcaagcgttgttatgtctcatatttttggagttcctgcttttcccatagacactcacatacataggcttgctcatagatggggcttaagcgatggcagttctgttctgcaaacggaaaaagatttaaaagccgcttttccaaaaaatgaatggataaagaggcatttgcaatttatttattatggtcgggagttctgccctgcgcgagggcatgatttgaaaaaatgcactatatgcgcggctttgaaccaaagcctgctctag

SEQ ID NO: 56110 - protein, 207 aa, Unknown
  Obtained from environmental sample
  DOMAIN (98)...(127): Helix-hairpin-helix motif
  misc_feature (1)..(207): Xaa is any amino acid
MRGKLAFIKSTLDKLYPNPPIPLAYTDAFSFLIAVVLSAQCKDSVVNTVTPSLMAKAPSPQKMAELSEQQIYSLIKLCGLAKNKSRFLKELSKIIVEKHGGKVPNSFEELETLPGVGHKTASVVMSHIFGVPAFPIDTHIHRLAHRWGLSDGSSVLQTEKDLKAAFPKNEWIKRHLQFIYYGREFCPARGHDLKKCTICAALNQSLL

SEQ ID NO: 56111 - DNA, 315 bp, Unknown
  Obtained from environmental sample
  misc_feature (1)..(315): n is a, c, g, or t
atgatgtcaaaaggcgcgaaaatggatacggggctcttcgtggcgacgcttttgctgttgggcttgggcatcgtactcgtttacagttcttcttttgccgtggcctacggtaaaaatatcggagggaattatttcctgttccgtcaagtgactagggcgcttatagcccttttgctcttcacattttttataaacgtagactatcgttttttgagcaagtacagcggggcgatctatgtattcgcggtcatccttctcgccggtgtgctgtttcttccggagagtcaggcggtaacggcgcgaaacgttggataa

SEQ ID NO: 56112 - protein, 104 aa, Unknown
  Obtained from environmental sample
  SIGNAL (1)...(29)
  misc_feature (1)..(104): Xaa is any amino acid
MMSKGAKMDTGLFVATLLLLGLGIVLVYSSSFAVAYGKNIGGNYFLFRQVTRALIALLLFTFFINVDYRFLSKYSGAIYVFAVILLAGVLFLPESQAVTARNVG

SEQ ID NO: 56113 - DNA, 543 bp, Unknown
  Obtained from environmental sample
  misc_feature (1)..(543): n is a, c, g, or t
atgacagattggccgagccggatagagatactaggccgtggcgcacctgtatctgcggctcttgtcttttccccggaggggtattacaggaccgccgaatcgtttaccgagggaacccagttccgtttcgtcgtaggggcgggagaaagcgcctatgtatattcctttgcggtctcaaagccctcgcgggacaacaatttttattcgcctgtcctgttgttcccgcagaccggcgtctcgccgctgcttaattaccgcgacagcgccgtggtgctgcccggcgaggataagacattagccctggacgcggaagcaggcatggaatacctggtgacgctttactcaaaacaacccctggacatacaggccattatgcggcgctttgtttcaactaaaggcaatccaggagaacgactgacagcggccctgggcagcaatcctttgctctccatttcgtataacgccaaagaagcaacctttaccgcgtcaacggatgatgcccgagccgtcgccgccctggtagtggcgattgaacacaagtaa

SEQ ID NO: 56114 - protein, 180 aa, Unknown
  Obtained from environmental sample
  misc_feature (1)..(180): Xaa is any amino acid
MTDWPSRIEILGRGAPVSAALVFSPEGYYRTAESFTEGTQFRFVVGAGESAYVYSFAVSKPSRDNNFYSPVLLFPQTGVSPLLNYRDSAVVLPGEDKTLALDAEAGMEYLVTLYSKQPLDIQAIMRRFVSTKGNPGERLTAALGSNPLLSISYNAKEATFTASTDDARAVAALVVAIEHK

SEQ ID NO: 56115 - DNA, 399 bp, Unknown
  Obtained from environmental sample
  misc_feature (1)..(399): n is a, c, g, or t
atgggagtacgcctgccgcgccggaacttcacgcctctttttataggcgagcgtatttccacaagtcaggcaaataacaacggcaacttcccttacaattacggcaacaagggcttgtttcgcaaaattaccgtaagctccggctctttccctcccaacgcgtggggcatgtacgatatgcacggtaatgtctgggagtggtgctgggattattacagtctcccaaaggaaaccccgttatcagatccaatcgggcccgcttccggcgcgcacaggataaaccgcggcggaggctgggcatcccccgctaaatcattacgttcggctctccgctcaggcgacttccccgaaaccgcgggtaatagcatgggcttccgtatagcaaagaatagggactag

SEQ ID NO: 56116 - protein, 132 aa, Unknown
  Obtained from environmental sample
  DOMAIN (1)...(129): Domain of unknown function (DUF323)
  misc_feature (1)..(132): Xaa is any amino acid
MGVRLPRRNFTPLFIGERISTSQANNNGNFPYNYGNKGLFRKITVSSGSFPPNAWGMYDMHGNVWEWCWDYYSLPKETPLSDPIGPASGAHRINRGGGWASPAKSLRSALRSGDFPETAGNSMGFRIAKNRD

SEQ ID NO: 56117 - DNA, 1389 bp, Unknown
  Obtained from environmental sample
  misc_feature (1)..(1389): n is a, c, g, or t
atgaaatcatctccgtcggttaaagtatttttaattaccctcggactccttctttacgcacccgcggtctcgcaagcctcggggccgcgttatgcgctggttatcggcaacggcggctaccgccatgtggacagccttgcgaacaccgtaaacgacgcgaccggcattgccaaaaaacttacgggactgggctattcggttgaagtcctcttcgacagcgatctggccggaatgaccagggcggtgagcgcgtggattcggcagctctccacggatcgggcaagcgaaggattcttctggtacgccggccacggaatacaggtagccggggaaaattaccttttgcccgttgatataaacgcggaagacgaggctggcattgtctacggttcttatccgctgggacggcttctcctctcgctggaacagaccgcccggaacaaactcaatgtagtggtgctggacgcgtgccgggacaacccttttaaaaatcttccgggcggaagccgggggctttcccggggtttcactaccgttgagcatccgccccaggatattttcgtcatgttttccacttctccgggcacaaccgccgcggacggagacaacggacaaaacagcccttttgccgaggcttttctcaagtacatggactccgatgagatccttccggtaatggccggccttgtaacccgcgaaaccatgcggctgacgggtggcaagcaacggccttaccaaaacggcagcatagtgagtgaactctactattcgctctcttctggagcgcccgcgcgtgaactgccgacagggtctaacacggcgtctctttccaccgctccttcgggcgcgccgccctcgggcgtactgcccgttgcgaatccgccttccgtcgccgtgccttctccggctatggcggctatccccgccggaagttttacaatgggcagccccgtaatagagcttgatcgggacccgtttggggaaaccaggcaccgggtcaatatgagcgccttttacattgcctcaaaagaattgagcgtcggcgaattccgccgcttcgtcgaaaacacgggccatgttaccacagccgagaccgacggcggggcgcaagcctacgatgaggcgaaaggcgaatgggttttccgcgccggggcaaactggcgtaatcccggtttcaggcagggggacgatcatccggtggtttgcgttagctggtttgacgcggtgaagtactgcaactggctttccgccaaagaaggccttaaaccggcgtatactattaccggccaaaccgtaaactgggacaggagcgcgaacggttaccgcctgcccaccgacgctgaatgggagtacgcctgccgcgccggaacttcacgcctctttttatag

SEQ ID NO: 56118 - protein, 462 aa, Unknown
  Obtained from environmental sample
  SIGNAL (1)...(26)
  DOMAIN (300)...(462): Domain of unknown function (DUF323)
  misc_feature (1)..(462): Xaa is any amino acid
MKSSPSVKVFLITLGLLLYAPAVSQASGPRYALVIGNGGYRHVDSLANTVNDATGIAKKLTGLGYSVEVLFDSDLAGMTRAVSAWIRQLSTDRASEGFFWYAGHGIQVAGENYLLPVDINAEDEAGIVYGSYPLGRLLLSLEQTARNKLNVVVLDACRDNPFKNLPGGSRGLSRGFTTVEHPPQDIFVMFSTSPGTTAADGDNGQNSPFAEAFLKYMDSDEILPVMAGLVTRETMRLTGGKQRPYQNGSIVSELYYSLSSGAPARELPTGSNTASLSTAPSGAPPSGVLPVANPPSVAVPSPAMAAIPAGSFTMGSPVIELDRDPFGETRHRVNMSAFYIASKELSVGEFRRFVENTGHVTTAETDGGAQAYDEAKGEWVFRAGANWRNPGFRQGDDHPVVCVSWFDAVKYCNWLSAKEGLKPAYTITGQTVNWDRSANGYRLPTDAEWEYACRAGTSRLFL

SEQ ID NO: 56119 - DNA, 648 bp, Unknown
  Obtained from environmental sample
  misc_feature (1)..(648): n is a, c, g, or t
atggctatggatttggccgcatttcagcgtttttcccgtacatttaaacaaggagaaatcatattctccgagttcgagcttggcgatacattttatcttatccagtccggcagggtgcagcttgtaaaacttgtcggagacatcgaaagaactttggatattcttcaaccttccgaaatgttcggcgaaatggcaattttggaaaactctccccgctcggcgacagccatcgcccttgatgaattaaaagttttggaatttaactctcagaattttgaaatcctactcctaggaaatccgcagattgcgttaaaacttcttaaaatgttctgcaaacgtatatacgattccaaacgccgctttatgatccttactctgccggaaccgcaggcaaaaatcgcggacgtattccttatgcttgatgaaactcagcctgacattgacaagacgagcgagcggcgcgaatttaaaaccactgtggaaggagtagcgcactgggcgggaatgagcgtaaacgaagtacgggacattctcggtcactttgttaaccaacgtcgcgtggagattttcccggatcgcattaccgttaaaaacatcaatgacttctcgcgctttgtcagctccagacgcaacgcaagagccatttaa

SEQ ID NO: 56120 - protein, 215 aa, Unknown
  Obtained from environmental sample
  DOMAIN (12)...(101): Cyclic nucleotide-binding domain
  misc_feature (1)..(215): Xaa is any amino acid
MAMDLAAFQRFSRTFKQGEIIFSEFELGDTFYLIQSGRVQLVKLVGDIERTLDILQPSEMFGEMAILENSPRSATAIALDELKVLEFNSQNFEILLLGNPQIALKLLKMFCKRIYDSKRRFMILTLPEPQAKIADVFLMLDETQPDIDKTSERREFKTTVEGVAHWAGMSVNEVRDILGHFVNQRRVEIFPDRITVKNINDFSRFVSSRRNARAI

SEQ ID NO: 56121 - DNA, 810 bp, Unknown
  Obtained from environmental sample
  misc_feature (1)..(810): n is a, c, g, or t
atgctcgggaagaaaacgccnatggctctttcagataccagcgtaatgatatttacagttcccgaatttgaagccgtcgctatggctaattccagaataataatgaaaatgttaaaagttttttccaaccaaatgaggcgcgttcataaacaagtatccaaagttatggcaaaggaagaacagtcgccagcggacggtctttttaacattggcgaattttatttaaagaacaaacgcttttctcacgcgaaacatattttcagccgttatctgacattttatccttcgggaaaaaacgctattcaggcggcaaaaaatcttgagatagcggaaaacgcccttacccgttacggcgacggcaagggaccgggagtttccgtaagttccgccgttcctgtgggaacagccgctcccacatcgcagaaagatttggataaagcaaacaagtcgtattatgacgctatcggacttgtttcgcaggggaaatatcaagaagcgtttatgacttttaaagtaattgtagacagtaaagtcgatcaggaatggacggcaaaagcgtcttttgaaatcggacgatgtttattccttatgaacaaatacgaagacagcattaaattttatacaaatatgctgactcagttcccgaaacatcccgaattaatcgaaaccatgtttatcatgggtcagtgtaacgaaaaggtcggcagaaaagatcaggcggtggcattctacaaaaaaattatttcaatgggcggagacgagtccactatagaaaaagtaaagcgggcgttaagcgccttaggagcgtaa

SEQ ID NO: 56122 - protein, 269 aa, Unknown
  Obtained from environmental sample
  DOMAIN (184)...(217): Tetratricopeptide repeat
  misc_feature (1)..(269): Xaa is any amino acid
MLGKKTPMALSDTSVMIFTVPEFEAVAMANSRIIMKMLKVFSNQMRRVHKQVSKVMAKEEQSPADGLFNIGEFYLKNKRFSHAKHIFSRYLTFYPSGKNAIQAAKNLEIAENALTRYGDGKGPGVSVSSAVPVGTAAPTSQKDLDKANKSYYDAIGLVSQGKYQEAFMTFKVIVDSKVDQEWTAKASFEIGRCLFLMNKYEDSIKFYTNMLTQFPKHPELIETMFIMGQCNEKVGRKDQAVAFYKKIISMGGDESTIEKVKRALSALGA

SEQ ID NO: 56123 - DNA, 660 bp, Unknown
  Obtained from environmental sample
  misc_feature (1)..(660): n is a, c, g, or t
gtgttggacgaccattgtctgtttgttcactgtatcgcttttagtgatgaagatataaaaaagaccgcaaaagccggagcaagcngtttcatggggtgcgggttttccaatatgttcatgtttaatgtgactgcgaaaatacgaaaaatgatcaaggcgggagttaatcttacaatcggaacagattcatccgcttcaggttcagcaaatattcttgaggaaatgaaatacgacaggaaattgtatcaacaactttacggcgaagatcttcccgcaaaaaaaatcttcgagatggtcacgattaacgcggcaaaagcatttagaatgcaggacagggtcggcgctttggaagaaggtttgttaggtgatattatcgtcatgaaggctaaaaatagcgatccgtatgaaaactttgtaaacgccggtatgaaagatatagaatttcttgcgcttgcgggaaagccgatttacggcgagatgcgttttatggatatttttaacggaaaactgccctcagattatacgcaaataaaagttggaaacagggagatgtttgtaaaaggcgatcctgccggactttacaacgaagtgagaaagaaaataggctttaaaaagattttggattatttaccgtttgagccggcacaggaaggagcgtaa

SEQ ID NO: 56124 - protein, 219 aa, Unknown
  Obtained from environmental sample
  misc_feature (1)..(219): Xaa is any amino acid
MLDDHCLFVHCIAFSDEDIKKTAKAGASXFMGCGFSNMFMFNVTAKIRKMIKAGVNLTIGTDSSASGSANILEEMKYDRKLYQQLYGEDLPAKKIFEMVTINAAKAFRMQDRVGALEEGLLGDIIVMKAKNSDPYENFVNAGMKDIEFLALAGKPIYGEMRFMDIFNGKLPSDYTQIKVGNREMFVKGDPAGLYNEVRKKIGFKKILDYLPFEPAQEGA

SEQ ID NO: 56125 - DNA, 429 bp, Unknown
  Obtained from environmental sample
  misc_feature (1)..(429): n is a, c, g, or t
ttgaggttaattatgggaattaaacaaatatcagtttttctggaaaacacgacgggcaggttaagcgaggttacaaaaactctcgccaacgccggagtaaaccttagggcaatcagtattgccgacaccgcggactttggaattttacgcatcatcgccgataagaccgaaaaggcggttgaaactttgacacaggcgggatttaccacgcggcagaccgacgtggtagcggtggaaattgaagacgtgccgggcagccttgccaaactgatggaactgttccagcagtcgctggtaaatatcgagtatctttatgcttcgcttgaaggacaggtgggaaaggcagtagtcattttcaagttgaaggatcatgaaaagggacagcaaatactgagcgcaaaaggctttaaattagcggataacttctaa

SEQ ID NO: 56126 - protein, 142 aa, Unknown
  Obtained from environmental sample
  DOMAIN (8)...(75): ACT domain
  misc_feature (1)..(142): Xaa is any amino acid
MRLIMGIKQISVFLENTTGRLSEVTKTLANAGVNLRAISIADTADFGILRIIADKTEKAVETLTQAGFTTRQTDVVAVEIEDVPGSLAKLMELFQQSLVNIEYLYASLEGQVGKAVVIFKLKDHEKGQQILSAKGFKLADNF

SEQ ID NO: 56127 - DNA, 1101 bp, Unknown
  Obtained from environmental sample
  misc_feature (1)..(1101): n is a, c, g, or t
ttgcgggtaaattatccccacggtcttcgcgcctctcaacaggaaaggattgtggaagtccacatgagttccggcactaccggaaaacccgtagtcaatgagtacaccattaaagacattgacatttggcgggagtcaatggccagaaccctgtcgggagccggctgtacgcgcgatgacattgttcagaactgctacggctacgggcttttcacaggcggaccgggggcgcattatggcgcgcttactatcggcgcggaagtcctgcccatgtccagcggcaataccgagcgacagcttatggttatgcgcgattttggttcgaccatgcttacctgcactccatcttatgccctctacctcgccgaggaagccgctgaagccggaatagaccttcataaacttcctatcaacaaaggctgtttcggcgcggaaccgtggagcgaaaatatgcgcgttcaaatcgaagaccgttttggcatgaaagcctacgacatatacggtctgacggaaattatcggaccgggagtttcttttgaatgtgaggcccagcatggacttcatatcaatgaggattttttctatccggaaattatcgatccaaacacgggaaaatcactgtatgccggagaaaaaggcgagcttgtcttcaccacaataacaagggagggtactccgctcctgcgctaccgcacaagggacatcaccttcttaattgaagaaccctgctcatgcggacgcacgacaagacgaatgcaccgtctctttggcagaacggacgacatgttaattatccggggcgtaaatgtattcccaagccagatcgagcaggcgcttatcgaaatcgaaggaacggagccgcagtacctcatcattgtcagccgtggcgaaagccatcttgacgaagtggaattgcaggtcgaagttaagaaagaacttttcagcgatgagacccgcggtcttgaaagtcttcgcaaccgaattgaacatgtaatgaagagcaagctgcaaatcggtctgaaagtaaaactggttgagcccaaaactattgaacgttcaatcggaaaagcaaagagagttatcgacaatcgtaaaatttaa

SEQ ID NO: 56128 - protein, 366 aa, Unknown
  Obtained from environmental sample
  DOMAIN (1)...(290): AMP-binding enzyme
  misc_feature (1)..(366): Xaa is any amino acid
MRVNYPHGLRASQQERIVEVHMSSGTTGKPVVNEYTIKDIDIWRESMARTLSGAGCTRDDIVQNCYGYGLFTGGPGAHYGALTIGAEVLPMSSGNTERQLMVMRDFGSTMLTCTPSYALYLAEEAAEAGIDLHKLPINKGCFGAEPWSENMRVQIEDRFGMKAYDIYGLTEIIGPGVSFECEAQHGLHINEDFFYPEIIDPNTGKSLYAGEKGELVFTTITREGTPLLRYRTRDITFLIEEPCSCGRTTRRMHRLFGRTDDMLIIRGVNVFPSQIEQALIEIEGTEPQYLIIVSRGESHLDEVELQVEVKKELFSDETRGLESLRNRIEHVMKSKLQIGLKVKLVEPKTIERSIGKAKRVIDNRKI

SEQ ID NO: 56129 - DNA, 1707 bp, Unknown
  Obtained from environmental sample
  misc_feature (1)..(1707): n is a, c, g, or t
atggcccggtctggacgtgtcgcccaacagattatatctgtatccgcctcgctaatccccttcctggaacatgacgacgccaaccgcgccctcatgggttcgaacatgcagcgccaggcggtgccgctggtgttccccgaagcgcccagggtcggcacggggatggaggcgaaatgcgcctacgattccggcgtgcttgtaaaggcctgcagaagcgggaccgtattgcgcgtaacatcccatgagatcattataaagccggataaacccggcgccttaaaacctttgtcgcaggttctgatagacgaagagggcaatgatgtttataaactggtaaaatttcagcgcaccaaccaggacacctgctataaccagaggcccattatcaaggtgggcgaaaaaatcctggcagggcaggtaatcgccgacggtcccgccacccagaacggggagcttgccttgggcaggaatattctcgtgggctttatgccctggaacggctacaattacgaagactcgatccttatctccgagcgcgtggttaaggaagacatgtttacctctatccatataaaggaatttccgaccgaggtaagggagaccaaactggggccggaaaaaatcaccgcggagattccgaatacttccgataaaagcctgagcaatctggacaaggaaggcataatctgcatcggcgcgagagtccgctccggcgatatactcgtgggaaaggtaacgcccaaaagcgagaccgagacgacgccggaattcaagctcctcaattcgatcttcggggagaaggccaaggaagtgcgtgattcctcacttaaagtggatcacggtattgaggggacggtgattgacatacagaggctcaagcggacggaaggggatgatctcagccccggcgttgacgaagtggttaaagtgcttatcgccaccaagcgcaagctccgcgaaggcgacaaaatgaccgggcggcacggcaacaagggcgttgtcgcgcgcatacttccggaagaggatatgccctacatggaagacggaaccccgcttgatatttgccttacccccctgggtgttccctcccgtatgaacataggccagcttctggaaaccgaacttggatgggcgggctcgaccctggacgaatggtattcatcgcctgttttccagtccccttctaccgaacagattgaagaaaaactcaaagaggcgggcctgcccgtgacgagcaagaccatgctccgcgacggcagaaccggcgaatattttgtaaacccgattttctgcggggtgatttacttcctcaaactccatcaccttgttgatgacaaaatgcacgcccgcagcaccggcccctattcgctggtgacccagcagccccttggcggcaaggcccagttcggcggacagcgccttggcgagatggaagtttgggctttggaagcgtacggcgcggcgcatactttgcaggaactgctgacgatcaagtcggatgacatgaccgggcgttccaaaatttacgaggccattgtaaagggggagccttccacaacggcgggtattcccgaatcgtttaacgttcttgtgcaggaactgagggggcttgcgctggatcttgcgatttttgacaataatagcaaacagattccccttaccgaaaaagatgaagagctgattgcgaagtcgaagagtaatttctaa

SEQ ID NO: 56130 - protein, 568 aa, Unknown
  Obtained from environmental sample
  DOMAIN (470)...(546): RNA polymerase Rpb2, domain 7
  misc_feature (1)..(568): Xaa is any amino acid
MARSGRVAQQIISVSASLIPFLEHDDANRALMGSNMQRQAVPLVFPEAPRVGTGMEAKCAYDSGVLVKACRSGTVLRVTSHEIIIKPDKPGALKPLSQVLIDEEGNDVYKLVKFQRTNQDTCYNQRPIIKVGEKILAGQVIADGPATQNGELALGRNILVGFMPWNGYNYEDSILISERVVKEDMFTSIHIKEFPTEVRETKLGPEKITAEIPNTSDKSLSNLDKEGIICIGARVRSGDILVGKVTPKSETETTPEFKLLNSIFGEKAKEVRDSSLKVDHGIEGTVIDIQRLKRTEGDDLSPGVDEVVKVLIATKRKLREGDKMTGRHGNKGVVARILPEEDMPYMEDGTPLDICLTPLGVPSRMNIGQLLETELGWAGSTLDEWYSSPVFQSPSTEQIEEKLKEAGLPVTSKTMLRDGRTGEYFVNPIFCGVIYFLKLHHLVDDKMHARSTGPYSLVTQQPLGGKAQFGGQRLGEMEVWALEAYGAAHTLQELLTIKSDDMTGRSKIYEAIVKGEPSTTAGIPESFNVLVQELRGLALDLAIFDNNSKQIPLTEKDEELIAKSKSNF

SEQ ID NO: 56131 - DNA, 513 bp, Unknown
  Obtained from environmental sample
  misc_feature (1)..(513): n is a, c, g, or t
atggcagatgttctttccagagaggaaattgaccggcttctagccgcgataaatggagacgaatcggagccggaaaagacgcaaacaaactcagattcgcgcaaaatcaaaatatatgattttaagcggccggataaattttcaaaagagcaaataagggcggtttcaattatccatgaaactttttcccgtttaacaagcgacagcctttccgcccaattactgaaaacggctcacgttcacgtcgcttcggtagacgagcttacctatgaggaatttatccgcaccctgccggttcccacaactttggcggtttttgatatggagcctctcaaggggggcgcagttcttgaaattgatccctgtacaacattcgcgattattgacaggatttgcggcggaagaggcagagcaacaaaagattatcatgaactgacggagattgaaacttccatcatggaagacgttattgtccgaatattggataatttaatgaagcatgccgtacggtag

SEQ ID NO: 56132 - protein, 170 aa, Unknown
  Obtained from environmental sample
  DOMAIN (39)...(165): Flagellar motor switch protein FliM
  misc_feature (1)..(170): Xaa is any amino acid
MADVLSREEIDRLLAAINGDESEPEKTQTNSDSRKIKIYDFKRPDKFSKEQIRAVSIIHETFSRLTSDSLSAQLLKTAHVHVASVDELTYEEFIRTLPVPTTLAVFDMEPLKGGAVLEIDPCTTFAIIDRICGGRGRATKDYHELTEIETSIMEDVIVRILDNLMKHAVR

SEQ ID NO: 56133 - DNA, 342 bp, Unknown
  Obtained from environmental sample
  misc_feature (1)..(342): n is a, c, g, or t
atgcgcgaacacacaaaaaacggcgcctttatcctttccacctacccaaaccctatggcaaaggaaatcgccctttcccaccatgaaaaatggaacggcacgggctatcctttccggcttgagggggaaatgatccctatttccgccaggattgttacaatagcggacgtttacgacgcccttcgcatggaacgaagctataaaccggcgttaaaacacgagatgacaaaacaaaaaataatggaacaaagcggcgctctttttgatccgaaccttattgaggtttttaatgaaatatccgacgacttcgccaatatttacgattcttacgctgacaaataa

SEQ ID NO: 56134 - protein, 113 aa, Unknown
  Obtained from environmental sample
  DOMAIN (1)...(61): HD domain
  misc_feature (1)..(113): Xaa is any amino acid
MREHTKNGAFILSTYPNPMAKEIALSHHEKWNGTGYPFRLEGEMIPISARIVTIADVYDALRMERSYKPALKHEMTKQKIMEQSGALFDPNLIEVFNEISDDFANIYDSYADK

SEQ ID NO: 56135 - DNA, 324 bp, Unknown
  Obtained from environmental sample
  misc_feature (1)..(324): n is a, c, g, or t
atgttcctcagggattgcatcacaaaatacttcaaggagaagaaaatcgagaccaacttgaagtacatagaccccagctacacaatccgcgcgcgggtatccaatccgatagattccatctattgcgctcgcttgggcaccaacgccgtccacgccgcgatgtcgggcaggacgaagatgctcgtgagcaacgtcaacgacaccttcgtgcacatcccgacggaactcgcggtggcaaagcgcaactgcatagatccggagagcgatctgtggagggacgttatagaggcgacgggaatgccgcatttgatgataaacaggtaa

SEQ ID NO: 56136 - protein, 107 aa, Unknown
  Obtained from environmental sample
  misc_feature (1)..(107): Xaa is any amino acid
MFLRDCITKYFKEKKIETNLKYIDPSYTIRARVSNPIDSIYCARLGTNAVHAAMSGRTKMLVSNVNDTFVHIPTELAVAKRNCIDPESDLWRDVIEATGMPHLMINR

SEQ ID NO: 56137 - DNA, 456 bp, Unknown
  Obtained from environmental sample
  misc_feature (1)..(456): n is a, c, g, or t
ttgtgcccgggcctaaacgacgtgatccgcgctctggtgcacgcgctctggtatcagtacggggtgcgcaaaatctccggcataaagtacgggtataggggtttcctgcatgaatttgaccacccngttcgtacagctcaagccggagaccgtcatgaacattcaacgcttgggcggcactgtgctgggctcttcccgcggaaacggcgagcgtaccgtcgagatagtcgacaggatagagatggagggcataaaccagctctacacgataggcggcgacgggactcagcgcggcactctgcgtatcgccgaggaggtggagcggcgcgggctcaacgttgccgttgtgggcgtccccaagacgatcgacaacgacttgagcttcatagaaaagtctttcggcttcgagaccgccgtttcggaggcggttcaggctgtcgccgacgcgcacattga

SEQ ID NO: 56138 - protein, 151 aa, Unknown
  Obtained from environmental sample
  misc_feature (1)..(151): Xaa is any amino acid
MCPGLNDVIRALVHALWYQYGVRKISGIKYGYRGFLHEFDHPVRTAQAGDRHEHSTLGRHCAGLFPRKRRAYRRDSRQDRDGGHKPALHDRRRRDSARHSAYRRGGGAARAQRCRCGRPQDDRQRLELHRKVFRLRDRRFGGGSGCRRRAH

SEQ ID NO: 56139 - DNA, 378 bp, Unknown
  Obtained from environmental sample
  misc_feature (1)..(378): n is a, c, g, or t
atggatttaaacaatatagacaatatacaagcgttagactttactatacccacgctcggccccggcaagaggccgtcgcctatcaacctttccacccaccgcggggacaagatcgccaacttcgtgcgggacgacgagtacataatcttcgacataagagccaaagccggcaccacggtcgagtacacgcgcaagcagctgatcgagcgggcggggccgcgtgagtcgatcttcttcaaccccgacaaggtccacgccgccatcgtgacatgcggcggctttgtgcccgggcctaaacgacgtgatccgcgctctggtgcacgcgctctggtatcagtacggggtgcgcaaaatctccggcataaagtacgggtatag

SEQ ID NO: 56140 - protein, 125 aa, Unknown
  Obtained from environmental sample
  misc_feature (1)..(125): Xaa is any amino acid
MDLNNIDNIQALDFTIPTLGPGKRPSPINLSTHRGDKIANFVRDDEYIIFDIRAKAGTTVEYTRKQLIERAGPRESIFFNPDKVHAAIVTCGGFVPGPKRRDPRSGARALVSVRGAQNLRHKVRV

SEQ ID NO: 56141 - DNA, 1524 bp, Unknown
  Obtained from environmental sample
  misc_feature (1)..(1524): n is a, c, g, or t
gtgatcggaactttccattcactctgcgcttcgattttgcgtgaacaatataccgaagccggccttccttctgattttaagattctgtccgaaaccgaaagggacgatcttcttgcgaaaatatgcgccgcagccaacaacaaagccctcagtcccagacgcctgggcgaatatatcgaggaaaaaaaacgatacctgctccttcccggagaaaagccggaagacctcagccgtatcctgcccgcttctctggtttcactcatccctgaggatgattcgagggatgatagcgttaacgaacacgcttatgctgaataccgtaagcagttacattctttgggcgctgttgactacgacggactcattgccggcacagtaaggctgttggccatgaaggaagatatacgaaaatactattgtcaaaaatttaattttatttttgttgatgaataccaggacatcaattttgcccaatacgcccttatccggctgctggttcataatgaaaaagataccccctccctatgggtcatcggagatcccaaccaggccatttacggtttccgcggctctgacaaggcgttcattgaccgttttctgcaggattaccctggagcgggccgttttgaattgcgaaaaagtttccgctgtgccgagcctattatcaaggccgcgagctgtctgactcaaacagaactaaaaggcgccgatgatgtttcttccgcgcctgtcagccttttccggcgaatatacccgacagataaatccgaggccgaaggcatagcccgcatcatcgcgtcgcttgtcggaggaacaagcttttttgcgctcgattcgaagacaaccaaaagcatagattcaaacaatgcggactttagcccttctgactgcgcggttcttgtgcgggcatcggcgttgacggagccaatagccaaagcgctcaatgaccacggcataccgtttgaaattgccggagctcaaacatggtgggaagaagaacctgttaaaactcttttagaaaatctgcagacacaacagtcggaagatatacgtgccgtatgggattctatgaaggtaaaaaacaaaaatcccgcgcagactgaaacagttgaacaccttatacgccttgcaggtttattcggaaatacacagtcacttctggattgcctgtccacgggacagggactcccggacagaccccgcgagggagtcaaggtgatgaccattcacgcctcaaagggtctggaatttgatcatgtttttgtcgccggcctggaagaaacaatactccccttcaccctctacaatgaccatcctgacattgaagaagaacgacggcttctctatgtggcaatgaccagggcgcgccggggtttatggctttcctgttcagcttcccgtaattaccgcggacgtgtattaaagaactcacccagccgttttctttcggaactggaaacacttgtcccccttgttacagaggagcgccaatccaaatgggacgggcagatgagcttgttttaa

SEQ ID NO: 56142 - protein, 507 aa, Unknown
  Obtained from environmental sample
  DOMAIN (1)...(435): UvrD/REP helicase
  misc_feature (1)..(507): Xaa is any amino acid
MIGTFHSLCASILREQYTEAGLPSDFKILSETERDDLLAKICAAANNKALSPRRLGEYIEEKKRYLLLPGEKPEDLSRILPASLVSLIPEDDSRDDSVNEHAYAEYRKQLHSLGAVDYDGLIAGTVRLLAMKEDIRKYYCQKFNFIFVDEYQDINFAQYALIRLLVHNEKDTPSLWVIGDPNQAIYGFRGSDKAFIDRFLQDYPGAGRFELRKSFRCAEPIIKAASCLTQTELKGADDVSSAPVSLFRRIYPTDKSEAEGIARIIASLVGGTSFFALDSKTTKSIDSNNADFSPSDCAVLVRASALTEPIAKALNDHGIPFEIAGAQTWWEEEPVKTLLENLQTQQSEDIRAVWDSMKVKNKNPAQTETVEHLIRLAGLFGNTQSLLDCLSTGQGLPDRPREGVKVMTIHASKGLEFDHVFVAGLEETILPFTLYNDHPDIEEERRLLYVAMTRARRGLWLSCSASRNYRGRVLKNSPSRFLSELETLVPLVTEERQSKWDGQMSLF

SEQ ID NO: 56143 - DNA, 522 bp, Unknown
  Obtained from environmental sample
  misc_feature (1)..(522): n is a, c, g, or t
atgtcagatcggccgagactgaaaataccttttttcccgttgaattcgcgggaacttgccggcaggcttgatcttacaatagacggcgctgacgaggttgatccgcaaagttaccttattaagggcggcggcggcgctatgcttattgaaaaaatcgccgcttacgcttccgccgcttttgccattacggttgacgaatcaaaaatcgttgatagtttggggaccggttttcccgttcctgtggaagtgatccctgaggcgaggaccagcgcgtgcatggcgcttgaggctatgggcgcgacagtcactttacgcgaagccttacgcaaagccggccctgttattaccgagcatgggaatctgatactggacattcgctttgcaaaacccgtcgatcccgtggcaatggagcgtgagataaattttattcccggtgtcgtggagaatggttttttcacgcgcaatcgtccggctgtctatatcgcgcgtatggacggaaatattgaggtaagagggaaataa

SEQ ID NO: 56144 - protein, 173 aa, Unknown
  Obtained from environmental sample
  DOMAIN (6)...(168): Ribose 5-phosphate isomerase A (phosphoriboisomerase A)
  misc_feature (1)..(173): Xaa is any amino acid
MSDRPRLKIPFFPLNSRELAGRLDLTIDGADEVDPQSYLIKGGGGAMLIEKIAAYASAAFAITVDESKIVDSLGTGFPVPVEVIPEARTSACMALEAMGATVTLREALRKAGPVITEHGNLILDIRFAKPVDPVAMEREINFIPGVVENGFFTRNRPAVYIARMDGNIEVRGK

SEQ ID NO: 56145 - DNA, 873 bp, Unknown
  Obtained from environmental sample
  misc_feature (1)..(873): n is a, c, g, or t
atgagagtctttcttatttgtctggaagaagaaaaagaaaatgcctttctgctttctgctttccttgaaaaaacaggtatttacacggaaaagctccttattaaaaccagggatgaagggttgaaactcattacagattacacccacgttgtaattctttcggcgcttgggccgggatggatagattttcttgcggggtttttctgcggttcgcatcttcctattcttgtattaggggaaaaagctatcgaaagcattccggctgtatttgccttttgctttaaattttttgacactgaagaaaaattacatgactatttcaccgaagaattaaaaattttcaaaaaaaatgaagccgtgtgggagacaaatcatattaagcaagccctgcttgacaagggcattcccacgacaattgaggctcttgcccagtgtgttgccgaaaataaagttgacgaagtttctctttttatagccgcgggtttcttgcccgacgcaaaagataaaaaaggaattcccctgctttgtatttccgccagaaacgggcatgtaaacacccttgagttattgctccgttccggagctcaagtggatatcatagccgatgacaggaaatctaccgctcttattgacagcgctatgggaagatataaagatgtgatcaaaacccttattgaagccggagcggacgtgaatgcaaagaatggggacggacagaccgcgctgattatcgttgtgggagccggggatgtggaaattactgaaatgttggttaaggccggggctgaccctgacattgaggatgcttttggcgttagcgcaagaatgtatgctaacatctttaagaacgataaaataaaagcccttttttaa

SEQ ID NO: 56146 - protein, 290 aa, Unknown
  Obtained from environmental sample
  DOMAIN (204)...(236): Ankyrin repeat
  misc_feature (1)..(290): Xaa is any amino acid
MRVFLICLEEEKENAFLLSAFLEKTGIYTEKLLIKTRDEGLKLITDYTHVVILSALGPGWIDFLAGFFCGSHLPILVLGEKAIESIPAVFAFCFKFFDTEEKLHDYFTEELKIFKKNEAVWETNHIKQALLDKGIPTTIEALAQCVAENKVDEVSLFIAAGFLPDAKDKKGIPLLCISARNGHVNTLELLLRSGAQVDIIADDRKSTALIDSAMGRYKDVIKTLIEAGADVNAKNGDGQTALIIVVGAGDVEITEMLVKAGADPDIEDAFGVSARMYANIFKNDKIKALF

SEQ ID NO: 56147 - DNA, 789 bp, Unknown
  Obtained from environmental sample
  misc_feature (1)..(789): n is a, c, g, or t
ttgaaggttattgtgggtctttacgaaggctcaaaatcatggaagaaagctgaagaagcgggctttcaagtgatgacggcgaaggacgcggcgcaggcggcggactttattatgattttgattaatgatgaaaaacaggcggctctttacagggagtcaatcgcgtcggcgttgaaaaaggggaaaaccctgtctttcgcccacgggttcaatattcactttgggcagatagttccgcctcaggatgtcaatgttgtgatgatagcgcccaaggggccgggtcataccgtacgcgaacagtacaaaaacggagcgggcgttccctgccttattgcggttcatcaggacgcaagcggagacgcgaaaaaattggcgctggcgtatgcggcaggcattggcggagcgcgggcgggagttttagagacaacatttaaagaagagaccgagaccgatcttttcggcgagcaggctgtcctttgcggaggcgtatccgcgctgatgaaggcgggttacgaggtgcttgtggaagcggggtatcagccggagagcgcgtactttgaagttatgcacgagatgaagctcatcatcgatcttgttaacaggggcggactttcatttatgcgctattcaatttccgatacggctgagtacggcgactatgttacggggccgaagatcattacagatgaaacgaagaacacgatgcggcaggtgttaaaaaatattcagaacggcagtttcgcgcgggaatggatacttgaaaatcaggtgaaccgcccgtttctttaa

SEQ ID NO: 56148 - protein, 262 aa, Unknown
  Obtained from environmental sample
  DOMAIN (144)...(261): Acetohydroxy acid isomeroreductase, catalytic domain
  misc_feature (1)..(262): Xaa is any amino acid
MKVIVGLYEGSKSWKKAEEAGFQVMTAKDAAQAADFIMILINDEKQAALYRESIASALKKGKTLSFAHGFNIHFGQIVPPQDVNVVMIAPKGPGHTVREQYKNGAGVPCLIAVHQDASGDAKKLALAYAAGIGGARAGVLETTFKEETETDLFGEQAVLCGGVSALMKAGYEVLVEAGYQPESAYFEVMHEMKLIIDLVNRGGLSFMRYSISDTAEYGDYVTGPKIITDETKNTMRQVLKNIQNGSFAREWILENQVNRPFL

SEQ ID NO: 56149 - DNA, 1479 bp, Unknown
  Obtained from environmental sample
  misc_feature (1)..(1479): n is a, c, g, or t
atgagcaataatgagcaagcgccgactaaccttatacctctggaaattttagacaccactctgcgggacggcgctcagggagagggcataactttttccgtgcaggacaagcttgacgtggtccgcgcccttgatgatttgggaatctcatggatagaggcggggaacccgggaagcaatccgaaggatatggaattcttccgtcttgccggaaacctcaaccttaaacacgcgaaactctgcgccttcggttctacccgtaaaaagggagtgaaggctggcgaggactcaggtttgttaagcctgctcgacgcgcagactcaggaggtagtgatcttcggcaagagctgggatcttcatgtgacggaagtgctgaaggtaagtcatgaagaaaaccttgcaatgattgcggatacaatagcgtttctgaaagaaaaggggcggcaggttttttacgacgcggagcatttctttgacggctggaaggcaaatcgcgagtacgcgcttaaaactctgaagacggcaaagtccgccggagcggatcgcattatattgtgcgacacaaacggcggcgcgtttcccaacatgatagagaaggcggttaaggatgccgcttttaatcttgattgcggacattttcttcccgccgcggtgccggatacagcgaaaaaagattttctcggcattcacgcgcacaacgacgcggacatggcaagcgcgaacacgataaccgccgtccttgccggatgcagacacattcagggaacccttgtcggtttcggcgagaggtgcggcaacacaagcctcgcggcggttatacccagccttgaactcaagcttggtttccgctgtctgcctgaggggaagatggaaaagatttccgagataaccagaattatcgcggagacggcaaatgtcgccgtgccgggcagtatgccatatgtgggaagccacgcttttacccacaaggcgggaatgcacgcggacggaattttgaaattgagcaagtcatttgaacatatcgatccttctctcgtggggaacgacagacatatcgtaatgagcgaagtcggcggacgttccgcgattgcggagagggcgaaaaaaattgactcttctcttacgagggatcatcctgtaacggcggcgcttgcgcaaaagctgaaaaatcttgaggcggagggctggcagtttgaaggcgcggacggcagtttcgatcttttggttcgccgcgaacttggccgctacaagccgctgtttaatatcgaggcttatcgcgtggtaagcgaacatcccacgggagagacaatctcttgttctcacgcgtgggtcaaagtgcatgttgacggtcaggaggagatcgccgctgccgaaggagacggacctgtcaacgcgatggacggcgcgcttcgcagggcgctgaaacaatttttccctgaactgaaagaagtgcgacttaccgatacaaagtcagggtaa

SEQ ID NO: 56150 - protein, 492 aa, Unknown
  Obtained from environmental sample
  DOMAIN (399)...(491): LeuA allosteric (dimerisation) domain
  misc_feature (1)..(492): Xaa is any amino acid
MSNNEQAPTNLIPLEILDTTLRDGAQGEGITFSVQDKLDVVRALDDLGISWIEAGNPGSNPKDMEFFRLAGNLNLKHAKLCAFGSTRKKGVKAGEDSGLLSLLDAQTQEVVIFGKSWDLHVTEVLKVSHEENLAMIADTIAFLKEKGRQVFYDAEHFFDGWKANREYALKTLKTAKSAGADRIILCDTNGGAFPNMIEKAVKDAAFNLDCGHFLPAAVPDTAKKDFLGIHAHNDADMASANTITAVLAGCRHIQGTLVGFGERCGNTSLAAVIPSLELKLGFRCLPEGKMEKISEITRIIAETANVAVPGSMPYVGSHAFTHKAGMHADGILKLSKSFEHIDPSLVGNDRHIVMSEVGGRSAIAERAKKIDSSLTRDHPVTAALAQKLKNLEAEGWQFEGADGSFDLLVRRELGRYKPLFNIEAYRVVSEHPTGETISCSHAWVKVHVDGQEEIAAAEGDGPVNAMDGALRRALKQFFPELKEVRLTDTKSG

SEQ ID NO: 56151 - DNA, 609 bp, Unknown
  Obtained from environmental sample
  misc_feature (1)..(609): n is a, c, g, or t
atgaaattttcaattgcggtaattcccggagacggaatagggccggaggtaatagcgcctactcttaaagttcttgacgctgttgggaacaaatacggccacgaattcaaatatgtagagcttgaagcgggcgggcttgctatcgatcacacgggagagccgctcccccagaaaactcttgaaactgcgaaacaatgcgacgcgcttctattgggagcggtcggcgggccaaagtgggatacgcttccggggcatctgcgtcccgagagagcgctgttgggtcttcgcgcggggcttggcgttttcgctaaccttcgtccggcggctttgctccctcaattaaaatccgcctgccctgttaaggacgaggtgctaatcgcaagtaacagcgaaggaaaagccgcttttgatttattgattgtaagagaattaacgggcgggctttacttcggcaaacgcggaagattggacgaaccttcaaacggtcacagcccaggctcagcttttgataccgaaacatattcgtggatggaaatagagcgcgtgcttcgcgcgggttacgaagcggcgaagggagacgaaaaaacttgngtgtctcggccgatctga

SEQ ID NO: 56152 - protein, 202 aa, Unknown
  Obtained from environmental sample
  DOMAIN (4)...(202): Isocitrate/isopropylmalate dehydrogenase
  misc_feature (1)..(202): Xaa is any amino acid
MKFSIAVIPGDGIGPEVIAPTLKVLDAVGNKYGHEFKYVELEAGGLAIDHTGEPLPQKTLETAKQCDALLLGAVGGPKWDTLPGHLRPERALLGLRAGLGVFANLRPAALLPQLKSACPVKDEVLIASNSEGKAAFDLLIVRELTGGLYFGKRGRLDEPSNGHSPGSAFDTETYSWMEIERVLRAGYEAAKGDEKTXVSRPI

SEQ ID NO: 56153 - DNA, 819 bp, Unknown
  Obtained from environmental sample
  misc_feature (1)..(819): n is a, c, g, or t
atgcgccagtacaacgacataaagtcccgcaaccccgacaccgtcctcctctaccgtatgggcgacttctacgagatgttcaacgaagacgccaagatcgccaacaaagtactcggcataacactcacgtcccgctatcagggcggccccgaaaataccgcgctcgccggattcccgcaccacgcccttgaccgctacgcgaacaagctcgtccgcgccggttacaagatcgccatctgcgaacagaccgaagaccccaagtccgccaaggggcttgtcaaacgcgacgtcgtggaggtcatcaccgccggcacggccacggaggacagcttcattgaggaacgcgccaacaatttcatcgccgccgtctattactccgcaaaatcaaacgtctgcgggctggccgtatgcgatttgtcaacgggattcttccaagtggacgagatggaacgcgaggcggctgaacacgaactcgtccgcgtcgaccccggcgagattctcgtcgcgaccgagcaggccgaaacattggagcaatgcacgcgctcgctctatcgcaggatatacatctccaaatacgaagactggaaattcgatacggacaccgccacggaggcgttaaccaaacactttgacatagcctccgttcaaggcctcgggcttgaggggatagagtgcgccgtgcgcgctggcggggcgctcatccgctacctcaaggagcagaagaagagcgatctgcgccacatcaccgcgatagccccccgcgccgccaaacagttcgcggaactcgacccgtccaccatcagaaatttgaactcttaa

SEQ ID NO: 56154 - protein, 272 aa, Unknown
  Obtained from environmental sample
  DOMAIN (118)...(252): MutS domain II
  misc_feature (1)..(272): Xaa is any amino acid
MRQYNDIKSRNPDTVLLYRMGDFYEMFNEDAKIANKVLGITLTSRYQGGPENTALAGFPHHALDRYANKLVRAGYKIAICEQTEDPKSAKGLVKRDVVEVITAGTATEDSFIEERANNFIAAVYYSAKSNVCGLAVCDLSTGFFQVDEMEREAAEHELVRVDPGEILVATEQAETLEQCTRSLYRRIYISKYEDWKFDTDTATEALTKHFDIASVQGLGLEGIECAVRAGGALIRYLKEQKKSDLRHITAIAPRAAKQFAELDPSTIRNLNS

SEQ ID NO: 56155 - DNA, 1245 bp, Unknown
  Obtained from environmental sample
  misc_feature (1)..(1245): n is a, c, g, or t
atgaaaataaaagaacttttaacaacaattgattatgacattttttcgaaaacaggggacctgcgtatattcagcgctccgggaagaaccgagcttgccggaaaccatactgaccataacagaggtaaagtattagccgcctccattcatttggaaaataacgccgttgtgcagaagcgcagcgacaataccgtgtttttccgctcaagcaattttccggacgtaatagtaaagctgacagacgaatccggcgcgcccgatttacagcccaaaccgtcagaacacggaacaaccgaagcgcttatcaggggaatcgccgccgccttcgcaaacgccggatgcgctatcggcggattttcagctaacgcgtcgtctgacgtgttatccggttccggcctatcgtcatcggcagcgctggaaatgcttttatgccgtatatttgattctttgtacggagaaggaaaacgctctcctttggaaatcgcgcaaatcggcaagtttgctgaaaacgtctacttcggaaaaccctgcgggctgatggatcaaatcgcctgcgctgttggcggcgcggtctccattgattttgccaacgaggctcatcctgaaataaagcaaatcacatttcgatcccgccgccgctggtacgctctttgcgtagtgaacacaggcggcagtcacgccgaccttaccgctgattacgcttccatcccggcggaaatgaaagctgtcgctgcatttttcggcaaatccgtactcggcgaattggagaaagaaactgtcctttcccgcgccgccgaaacgcgaaaatcattgggagacagagcatttttacgcgtcattcacttttttaatgaaaacgaaagagtagacgcaatgaccgaagctttattgaaaatggaaaaaaccgccgccgccgataaacagcaggtaataaattattacttggatttagtaaatgaatcaggcgattcctcatgggagctattacaaaacgtttactcccctgccagctctcaagatcaaggtattgccgcagctctcgcactgacaaaagatttttttcgtaggcataaacttcgcggcgcttgccgagttcacggcggcggtttcgccggaactattcaagcatacatcccgcttgatgcaatggatttttaccgtaaaaacatcgaagcggtattcggcaatgactcattaacagtgttaaagataagatcaaaaggcgtaacagaattggtattttaa

SEQ ID NO: 56156 - protein, 414 aa, Unknown
  Obtained from environmental sample
  DOMAIN (120)...(189): GHMP kinases N terminal domain
  misc_feature (1)..(414): Xaa is any amino acid
MKIKELLTTIDYDIFSKTGDLRIFSAPGRTELAGNHTDHNRGKVLAASIHLENNAVVQKRSDNTVFFRSSNFPDVIVKLTDESGAPDLQPKPSEHGTTEALIRGIAAAFANAGCAIGGFSANASSDVLSGSGLSSSAALEMLLCRIFDSLYGEGKRSPLEIAQIGKFAENVYFGKPCGLMDQIACAVGGAVSIDFANEAHPEIKQITFRSRRRWYALCVVNTGGSHADLTADYASIPAEMKAVAAFFGKSVLGELEKETVLSRAAETRKSLGDRAFLRVIHFFNENERVDAMTEALLKMEKTAAADKQQVINYYLDLVNESGDSSWELLQNVYSPASSQDQGIAAALALTKDFFRRHKLRGACRVHGGGFAGTIQAYIPLDAMDFYRKNIEAVFGNDSLTVLKIRSKGVTELVF

SEQ ID NO: 56157 - DNA, 858 bp, Unknown
  Obtained from environmental sample
  misc_feature (1)..(858): n is a, c, g, or t
ttgctcacaagcattgagaatccgccgcgtctttcactggcaggggctcagtcaaagtttgcggtatataaatcagatggaaaatattatcgttcaagtgatgttaaccctacaactcatataattaaaattaccaataaaagatttcctgatttactaaaaaacgaattattttgcatgaaacttgcaaaggttattttatctaatgttcctgaaattgaactatttgaaacggaaagtcgtccgtatcttgaaattacaagatatgacagatatattaaaaatagagttgttcagcgtatacatcaggaagatttctgtcagtcgcttggtattgtttccggtaaaaaatatcagacaggcggcggggcgaaattaaagaactgttacaaaatcattaatgaattttctgaaaatcgtctctcggatattatccgttttacggaatggattattttcaattatttaatcggcaatacagacgctcacgcaaaaaatttgtctttgcttcacagtgattcaggagttaaacttgccccgttttatgatttactttcaaccgaagtttaccctgaaagtatcattgaccatgaaatggctatgcttataaatggcaaggggaaatatagctccctaagacctaaagattttatcgcgttatttgaaaatttagaacaaaatgctacaaatatgatgaagactatattatttaaatttgcgaacattgtccctatggctgaaaagcttcgtgaaaatatgcctgatccggatataccaatctataataaaattatcgcgattatcaaaaaacgcttttccgttttatttgggtatattcatttagcctgtttgaaatga

SEQ ID NO: 56158 - protein, 285 aa, Unknown
  Obtained from environmental sample
  DOMAIN (12)...(91): HipA-like N-terminal domain
  misc_feature (1)..(285): Xaa is any amino acid
MLTSIENPPRLSLAGAQSKFAVYKSDGKYYRSSDVNPTTHIIKITNKRFPDLLKNELFCMKLAKVILSNVPEIELFETESRPYLEITRYDRYIKNRVVQRIHQEDFCQSLGIVSGKKYQTGGGAKLKNCYKIINEFSENRLSDIIRFTEWIIFNYLIGNTDAHAKNLSLLHSDSGVKLAPFYDLLSTEVYPESIIDHEMAMLINGKGKYSSLRPKDFIALFENLEQNATNMMKTILFKFANIVPMAEKLRENMPDPDIPIYNKIIAIIKKRFSVLFGYIHLACLK

SEQ ID NO: 56159 - DNA, 2262 bp, Unknown
  Obtained from environmental sample
  misc_feature (1)..(2262): n is a, c, g, or t
atgaaggatgaattcgccgcgttacacgcaagcggatggcatatagccgtggcggcggaatccgaagtgcaggccgagcgcataaagtcgatgcttgtcccgcatgaatccctttccataatcgccctgccgctttcctcgggtttctccctgccggaaatcaaactcatggtaatccaggagaacgagatattcggccgcagaaaacgtccgccccgttccctaaagaccgtccgctcaagccccatcgacactttcgtggaactcaatccgggcgattatgttgtgcatgttaaccacggcataggcctgttcaagggcattgagcggatcaacgccctgggtttcgagcgcgattacattcagctcgagtatgcgggggatgagactgtttttgtgccggtggaacagttgaacatggtacagcgttatatcggcaatgaaggcaatgccccgaggctggacaccgttggatcaaaaagctgggagaaccgcaagggcagggtaaagaaatcggttgaagacatagcccaaaggctcctggaattgtactcaaagcgtaaacaggcggcgggctatgcttttccgaaagataccgaatggcagaccatgttcgaggcggcttttccctttgaggaaaccgaagaccaactgcgttgtgtggaagaaataaaaaaggacatggaaagcccccaccccatggaccggctggtctgtggcgatgttggctacggcaaaaccgaagtcgcggtgcgcgcctgctttaaggcgatcatgggcggcagacaggcggcgtttctcgcccctaccacgatcctgtccgagcagcattacgagaattttcaggaacgcttttcccgcttcccggtacatatcgccatgctctcccgctttgttgaccgcaaaaaaaccagagccattctggaacaactgaaaaagggcgaagtggatttattgataggaacccaccggatcatccagcgtgatgtgcaattcaagaacctgggcctgattattattgacgaggaacagcgtttcggcgtcaaggacaaggagcggcttaaagagcttaaaaccaacgttgactgcctgaccctctcggcaacgcccattccccgcaccctccatatgagtctgttaaaaatccgggacatgagccttttggctactccccctcccggccgcctccccattgaaacctttatcggggaatacaacgaagagcggctggcccaggctatccgaagcgaggtggaacggggtggccaggtttttttcctgcacaaccgggtggaatccctgcgggatacccggcttaaaattgagcgccttgtgccggagatgctggtcgaaaccgcccacggccagatggacgcccgcgatcttgaagatattatgcaccgttttgtccatggcggttttcatgtgctggtctccaccacgatcatcgagaacggcatcgacattccgaatgtaaacacaatcatcatagaccgcgccgatatgtacggagtatcgcagttataccagttaaggggcagggtaggaaggtcagaccgcgtagcgtacgcctaccttttctatcccgaacaaaaagcgctttcagaaatagccatgaaacgtttgcagacaatttccgattttaccgagcttggttcaggtttcaaaatagccatgaaagatatggaaattcgaggggcgggaaatcttttaggcagggaacaatccggcgacatttattccgtaggttttgatttatatgtgaaacttttggaagaagccgtgaaacgtcttgaagactcaaattacgaatcggaaacagaaacacttcttgaacttgaatacacaggcttcattcccgactcctacatcgactccccccagcaaaaaatggaagtttacaaaatgatagccgcgatacgcgacaaagaagacttggagcgcgtatactcggaattgttagaccgcttcggtccgctccccgatgaagccgcctccctgcttgccttagccgaaatcagaataatatgccgccaattaacagtctcggtactaaaagaaagagccggcgttgtaaggatagagttcgccaaggcggcgcgcgtaaacgtagaccgtcttatccgcatgatgcagcaatccgccggcaaagtaaaacttgaccccaaaaaagcaaacgtaatccttcttacaacagggagcataggtttaaaagaaaaaagcgaattcatccgtgaaaaactatcgtctcttgccggctaa

SEQ ID NO: 56160 - protein, 753 aa, Unknown
  Obtained from environmental sample
  DOMAIN (210)...(372): Type III restriction enzyme, res subunit
  misc_feature (1)..(753): Xaa is any amino acid
MKDEFAALHASGWHIAVAAESEVQAERIKSMLVPHESLSIIALPLSSGFSLPEIKLMVIQENEIFGRRKRPPRSLKTVRSSPIDTFVELNPGDYVVHVNHGIGLFKGIERINALGFERDYIQLEYAGDETVFVPVEQLNMVQRYIGNEGNAPRLDTVGSKSWENRKGRVKKSVEDIAQRLLELYSKRKQAAGYAFPKDTEWQTMFEAAFPFEETEDQLRCVEEIKKDMESPHPMDRLVCGDVGYGKTEVAVRACFKAIMGGRQAAFLAPTTILSEQHYENFQERFSRFPVHIAMLSRFVDRKKTRAILEQLKKGEVDLLIGTHRIIQRDVQFKNLGLIIIDEEQRFGVKDKERLKELKTNVDCLTLSATPIPRTLHMSLLKIRDMSLLATPPPGRLPIETFIGEYNEERLAQAIRSEVERGGQVFFLHNRVESLRDTRLKIERLVPEMLVETAHGQMDARDLEDIMHRFVHGGFHVLVSTTIIENGIDIPNVNTIIIDRADMYGVSQLYQLRGRVGRSDRVAYAYLFYPEQKALSEIAMKRLQTISDFTELGSGFKIAMKDMEIRGAGNLLGREQSGDIYSVGFDLYVKLLEEAVKRLEDSNYESETETLLELEYTGFIPDSYIDSPQQKMEVYKMIAAIRDKEDLERVYSELLDRFGPLPDEAASLLALAEIRIICRQLTVSVLKERAGVVRIEFAKAARVNVDRLIRMMQQSAGKVKLDPKKANVILLTTGSIGLKEKSEFIREKLSSLAG

SEQ ID NO: 56161 - DNA, 912 bp, Unknown
  Obtained from environmental sample
  misc_feature (1)..(912): n is a, c, g, or t
atgatcatcactacaaacgtccttcagattttgcttaccgaattcaagagagaatttgccgagcaaattcaatcgctggaagccgaaagcttccacaagatcggcgcgaccctcatcaattcaaacacaagccgcaacacctacggctggctgggaagcttcccccagctccgcgagtggatcggcgacagggcgtttgaaaacatcaaagccagttcctacgtcatcgaaaacaaaaagtacgaggcgaccctcaaagtagagcgcacggacatcgaagacgacaatttgggggtataccggcctatggctaaggctatggccgatgagtatatagcctttttaaaccgcagccttgccaccctcctcaaagacgggtttgctaccgcctgctacgacgggaaaaacttttttgacgagcaccccgtttttgccaaggcggacggaaccggaggctcctcagacgtttccaatatctacggcgatcccgaagccgaaggcagcccgtggtttctcctctccctctcaggctccctcaagccgcttatcatccagcagcgcaccacgccggaattcgagcacatcaccgataccaaaaatgacatggtttttataaaagaccaatacctctacggcatccgctaccgggggagtttcggctatgggttctggcagcaggccgtcgcgtcaaaagaggagctgaccccggcaaactatgaagccgcccggcttatgatgcgtcagttcaagagagacggtggcgatccgttgggaatagtcccaactcatctggtagttaacgctgacaatgaatctgccgcccgtaaaattcttgaggcgcagttaatcgacggaggggattcaaacattaattaccatactgcggaacttattgtgtcgccgtggttatag

SEQ ID NO: 56162 - protein, 303 aa, Unknown
  Obtained from environmental sample
  misc_feature (1)..(303): Xaa is any amino acid
MIITTNVLQILLTEFKREFAEQIQSLEAESFHKIGATLINSNTSRNTYGWLGSFPQLREWIGDRAFENIKASSYVIENKKYEATLKVERTDIEDDNLGVYRPMAKAMADEYIAFLNRSLATLLKDGFATACYDGKNFFDEHPVFAKADGTGGSSDVSNIYGDPEAEGSPWFLLSLSGSLKPLIIQQRTTPEFEHITDTKNDMVFIKDQYLYGIRYRGSFGYGFWQQAVASKEELTPANYEAARLMMRQFKRDGGDPLGIVPTHLVVNADNESAARKILEAQLIDGGDSNINYHTAELIVSPWL

SEQ ID NO: 56163 - DNA, 513 bp, Unknown
  Obtained from environmental sample
  misc_feature (1)..(513): n is a, c, g, or t
atgttgctctgtttgttgggagcaataaccgcgaatatatataataaaaggagaacaacacgaaaaatgacagatatagaacttggccctatccgtcccccgtcagaatcacaaagcctgttgatacgagtaacaagaggctgccattggaataaatgctttttttgcggattatacaaaggcatgaaatacagcgtcagaccgacagatgatattttagaagatattaaaacaagcgcagaactatataatggtatgtcttttacgtcttgttttcttcaagacgcagatgccataaatgttccgaccgaagatttgttacgaatactggacaaattaagaacctgttttccgtcacttaaaaccattacaagttatgcacgttgcgacagcattttaagaaaaagtgaaagtgaattgacaacattgagagaagcagggcttaaccatttatatcgtggaattgagaccggctctgatacgatatatttatattttatctttttctattaa

SEQ ID NO: 56164 - protein, 170 aa, Unknown
  Obtained from environmental sample
  misc_feature (1)..(170): Xaa is any amino acid
MLLCLLGAITANIYNKRRTTRKMTDIELGPIRPPSESQSLLIRVTRGCHWNKCFFCGLYKGMKYSVRPTDDILEDIKTSAELYNGMSFTSCFLQDADAINVPTEDLLRILDKLRTCFPSLKTITSYARCDSILRKSESELTTLREAGLNHLYRGIETGSDTIYLYFIFFY

SEQ ID NO: 56165 - DNA, 1038 bp, Unknown
  Obtained from environmental sample
  misc_feature (1)..(1038): n is a, c, g, or t
atggaaaagataaggaacctcgtcggaataataaaatataaaataaacgggcttgaccatacaagttatgaactttcctcaaacatgggcaaaacttcagatgcggtgaaacaaataacattgaatcttgacaacatggaaaaacttatggaaaaacaggaaaacggggctattgaagcaggcatggccgtaagtgaaattaaaacgaatataaacagtcttagaaatatgatagaagaacagactgaaagcgtgaatatgtcgtcttccgccatagaagaaatgacggctaacattcactcggtaacgcaaacgctggtggaaaattcaagaaatgtcggcgaattgaccgaggcgtcgcaaataggcaaaaagggagtccagacagtagcgcaggaaatacaagagatagcccatgaatccgaggggcttatggaaattaactcggttatagaaaatattgcaagccagaccaatttactttcgatgaacgcggcgatagaagcggcccacgccggagagacgggaaagggctttgccgttgtagcaggggagattcgcgcgcttgccgaatcgtcaagccggcaggcaaaaaccacaacagacatgttaaaaaaaataaaatcgtcaatagacaatattacaaaatcctcagacgaagtgttacagaggttcggcgccatagactcaaaagtaaaaacggtttcagaacatgaacaaattattctaaacgccatggaagagcaggaatcgggcggaaaaaaaatactggaatccataagccgtctgcgggatataacgtcttcggtaaagaaagggtctgataacatggaatcgtccggagagactttagtcagagaaacggatgaatttatcaaaacaagcaaagaaacggtagacggaatgaacgaaatattgaaaggcattaaccagataaatgcttctatcggtcatgtaaacgatatgagtatggaaaacaacaggaattttgaatcattaaaatttgaaacaggaaaatttattgttgacgaaagatga

SEQ ID NO: 56166 - protein, 345 aa, Unknown
  Obtained from environmental sample
  DOMAIN (79)...(293): Methyl-accepting chemotaxis protein (MCP) signaling domain
  misc_feature (1)..(345): Xaa is any amino acid
MEKIRNLVGIIKYKINGLDHTSYELSSNMGKTSDAVKQITLNLDNMEKLMEKQENGAIEAGMAVSEIKTNINSLRNMIEEQTESVNMSSSAIEEMTANIHSVTQTLVENSRNVGELTEASQIGKKGVQTVAQEIQEIAHESEGLMEINSVIENIASQTNLLSMNAAIEAAHAGETGKGFAVVAGEIRALAESSSRQAKTTTDMLKKIKSSIDNITKSSDEVLQRFGAIDSKVKTVSEHEQIILNAMEEQESGGKKILESISRLRDITSSVKKGSDNMESSGETLVRETDEFIKTSKETVDGMNEILKGINQINASIGHVNDMSMENNRNFESLKFETGKFIVDER

SEQ ID NO: 56167 - DNA, 630 bp, Unknown
  Obtained from environmental sample
  misc_feature (1)..(630): n is a, c, g, or t
atgcctttcaatatttcgttcattccgtctaccgtttctttgcttgttttgataaattcatccgtttctctgactaaagtctctccggacgattccatgttatcagaccctttctttaccgaagacgttatatcccgcagacggcttatggattccagtattttttttccgcccgattcctgctcttccatggcgtttagaataatttgttcatgttctgaaaccgtttttacttttgagtctatggcgccgaacctctgtaacacttcgtctgaggattttgtaatattgtctattgacgattttattttttttaacatgtctgttgtggtttttgcctgccggcttgacgattcggcaagcgcgcgaatctcccctgctacaacggcaaagccctttcccgtctctccggcgtgggccgcttctatcgccgcgttcatcgaaagtaaattggtctggcttgcaatattttctataaccgagttaatttccataagcccctcggattcatgggctatctcttgtatttcctgcgctactgtctggactccctttttgcctatttgcgacgcctcggtcaattcgccgacatttcttgaattttccaccagcgtttgcgttaccgagtga

SEQ ID NO: 56168 - protein, 209 aa, Unknown
  Obtained from environmental sample
  SIGNAL (1)...(25)
  misc_feature (1)..(209): Xaa is any amino acid
MPFNISFIPSTVSLLVLINSSVSLTKVSPDDSMLSDPFFTEDVISRRRLMDSSIFFPPDSCSSMAFRIICSCSETVFTFESMAPNLCNTSSEDFVILSIDDFIFFNMSVVVFACRLDDSASARISPATTAKPFPVSPAWAASIAAFIESKLVWLAIFSITELISISPSDSWAISCISCATVWTPFLPICDASVNSPTFLEFSTSVCVTE

SEQ ID NO: 56169 - DNA, 1188 bp, Unknown
  Obtained from environmental sample
  misc_feature (1)..(1188): n is a, c, g, or t
atgaaaataggttttaagcttacggctcttatgaccgctcttggaatatttgccgtcgcttccgtttccattactttgcttttaaggtcgcaggccagcataacaaaactttccgaacaatacgccgtttccatggcaaatgattcggcggctgatattacaaattttattgacgcttatatgcacagggtagaaaccctctctgatgttatggaacagtaccgttacatgataattgctaaccgccgtactttttttaattttattctagaaggccttacgcgngaaaaccccgaaattatcgctgcatggtgcgtatgggaaccggacgttttggaaggcgatgaccagcagtatatagggacaaaaggaaccggctccgacgggcgtttttctccttattattactgggacggcgggaaagtctatttaaatgtcctggaagatcttgaagaccccgcttaccttttggctaaaaattcaggcaatccgataattttggatccctatgagtataacgtaggtgggaagaaggtattgatgacctcaatttgcgtcccgatacatgtcaatggcaaaaccgtgggggttgttggctttgacctcccccttacagaaatacaggaaatatcgcaaacccaaaagccttttcccgattccgtaaccgctgtattcagcaacaatggcacggttaccgcctgcttcgatccgagccgcatcggaaaaaacatgagggataccgaagcggacatggcaggcccgtacctcaatgatttcgtaaacgccgttaaagcgggtacccctttttcatttacaaattacattgcggcgatgaaaacggacatgacaatattcctgattcccattactctcggatctacgaagacctcctggagctacgcggtagccattatgcgcaatacgataatggccccggtcaaccaaatgattgtgttagccatagcggtaagcgtagcggtattaggcctgctggttttggcgtccttgttcctgtcccggtccatcagcaagccaatcgtcaaggtagcggttaccctcaaagacatatccgaaggcgaaggcgatttgaccaagcgaatagttgtcaaatctgccgatgaaatcggagaccttggccgcttgctacacctcacgatgaaaaaatcangaaccttgtgggaaacataa

SEQ ID NO: 56170 - protein, 395 aa, Unknown
  Obtained from environmental sample
  SIGNAL (1)...(23)
  DOMAIN (166)...(245): Cache domain
  misc_feature (1)..(395): Xaa is any amino acid
MKIGFKLTALMTALGIFAVASVSITLLLRSQASITKLSEQYAVSMANDSAADITNFIDAYMHRVETLSDVMEQYRYMIIANRRTFFNFILEGLTRENPEIIAAWCVWEPDVLEGDDQQYIGTKGTGSDGRFSPYYYWDGGKVYLNVLEDLEDPAYLLAKNSGNPIILDPYEYNVGGKKVLMTSICVPIHVNGKTVGVVGFDLPLTEIQEISQTQKPFPDSVTAVFSNNGTVTACFDPSRIGKNMRDTEADMAGPYLNDFVNAVKAGTPFSFTNYIAAMKTDMTIFLIPITLGSTKTSWSYAVAIMRNTIMAPVNQMIVLAIAVSVAVLGLLVLASLFLSRSISKPIVKVAVTLKDISEGEGDLTKRIVVKSADEIGDLGRLLHLTMKKSXTLWET

SEQ ID NO: 56171 - DNA, 699 bp, Unknown
  Obtained from environmental sample
  misc_feature (1)..(699): n is a, c, g, or t
atggaaaaaacttcgacagccgtgaatcagatttcatctaaccttgacaatatagaaaaccttgtagtcaaacaggaaaacggggcgttagtggcgggtgaggcggtcgggattattaaaaaaaacattgacagccttaacaaaatgatagaacaacaggctgaaagcgtggatatgtcgtcctccgcgatagaagaaatgacagctaacatccgttcagtaactcaaacgcttgcggaaaacagcaaaaacgtcggcgtgttggttgaagcgtccgagaacggcaggacaggactccaaacagtcgcgcaggaaataaaggaaatagcccatgattccgaaggactgctggaaataaactcggtaatgaacaacatcgcaagccagacaaatctgctttcgatgaacgccgctattgaagccgcccatgccggagaagccggcaaaggcttcgccgtagtcgccgatgaaatccgcaagctcgccgaatcgtcgggacaacagtcaaaaaccacagtggtgatgcttaaaaaaataaaagcgtctatagacagcatcacaaaatcgtctaacgacgtattggatcgttttggggctatagactcaagcgtaaaaacagtttcagaacacgaacaaaacattttgcacacaatgcaagaacaggaaatcggagggaagcaaatttctcggccgatctga

SEQ ID NO: 56172 - protein, 232 aa, Unknown
  Obtained from environmental sample
  DOMAIN (51)...(232): Methyl-accepting chemotaxis protein (MCP) signaling domain
  misc_feature (1)..(232): Xaa is any amino acid
MEKTSTAVNQISSNLDNIENLVVKQENGALVAGEAVGIIKKNIDSLNKMIEQQAESVDMSSSAIEEMTANIRSVTQTLAENSKNVGVLVEASENGRTGLQTVAQEIKEIAHDSEGLLEINSVMNNIASQTNLLSMNAAIEAAHAGEAGKGFAVVADEIRKLAESSGQQSKTTVVMLKKIKASIDSITKSSNDVLDRFGAIDSSVKTVSEHEQNILHTMQEQEIGGKQISRPI

SEQ ID NO: 56173 - DNA, 426 bp, Unknown
  Obtained from environmental sample
  misc_feature (1)..(426): n is a, c, g, or t
gtgtgcaaaatgttttgttcgtgttctgaaactgtttttacgcttgagtctatagccccaaaacgatccaatacgtcgttagacgattttgtgatgctgtctatagacgcttttatttttttaagcatcaccactgtggtttttgactgttgtcccgacgattcggcgagcttgcggatttcatcggcgactacggcgaagcctttgccggcttctccggcatgggcggcttcaatagcggcgttcatcgaaagcagatttgtctggcttgcgatgttgttcattaccgagtttatttccagcagtccttcggaatcatgggctatttcctttatttcctgcgcgactgtttggagtcctgtcctgccgttctcggacgcttcaaccaacacgccgacgtttttgctgttttccgcaagcgtttga

SEQ ID NO: 56174 - protein, 141 aa, Unknown
  Obtained from environmental sample
  misc_feature (1)..(141): Xaa is any amino acid
MCKMFCSCSETVFTLESIAPKRSNTSLDDFVMLSIDAFIFLSITTVVFDCCPDDSASLRISSATTAKPLPASPAWAASIAAFIESRFVWLAMLFITEFISSSPSESWAISFISCATVWSPVLPFSDASTNTPTFLLFSASV

SEQ ID NO: 56175 - DNA, 690 bp, Unknown
  Obtained from environmental sample
  misc_feature (1)..(690): n is a, c, g, or t
gtgttaaaatcttcttctttcaaacaccttgatgtagtagcggcgtttttcgtctcaattctcgttatcagcaatattgcatcctcggcgaaaattgtcgatgtcggcataacgctgtttaccattccgcttgcttttgacggcggcacgcttctgtttccatttgtctatgtgttaggcgacgtgcttaccgaagtttacggtttcaggacggcgcggcgcgttatcctgacaggtttcgcggtgatggttcttgccgcgctggtnttcttcgtgctggggctcttgccgccggaagcgggatgggaagcggagaccggcgggaacatggcgtttaacgcaatattaggcggaatgagctacggcggcattgtgcttgccagccttgcggcgtatcttgccggcgaattgtccaattcgctgatcctttcaaaactgaaggtaaaaatgaaggggcgcctcctttgggtgcgcaccataggttccactcttgtcggagaattgcttgattcgttgatttttattttgattgcctcaatcgcgggcgttttcccatgggaaattttttggtctcttgtgataacaaattatatactaaagtgcgccatagaagcgattgtaacgcctttcacatattggctttccgctttcttaaaacggaaagaaggaattgacgtgtatgacgtgtaa

SEQ ID NO: 56176 - protein, 229 aa, Unknown
  Obtained from environmental sample
  DOMAIN (39)...(201): Uncharacterized ACR, YhhQ family COG1738
  misc_feature (1)..(229): Xaa is any amino acid
MLKSSSFKHLDVVAAFFVSILVISNIASSAKIVDVGITLFTIPLAFDGGTLLFPFVYVLGDVLTEVYGFRTARRVILTGFAVMVLAALVFFVLGLLPPEAGWEAETGGNMAFNAILGGMSYGGIVLASLAAYLAGELSNSLILSKLKVKMKGRLLWVRTIGSTLVGELLDSLIFILIASIAGVFPWEIFWSLVITNYILKCAIEAIVTPFTYWLSAFLKRKEGIDVYDV

SEQ ID NO: 56177 - DNA, 1926 bp, Unknown
  Obtained from environmental sample
  misc_feature (1)..(1926): n is a, c, g, or t
atgatggccgagagtaggccgttctccctgtatctgcttgatacaaacgtggaagaaaatgcccctgatattcgcaatgttaccgcgtcgctgtacggcggcgacaaggaaacccgtatgcagcaggaggttcttctgggcataggcgggattcgcgccctgcgcgccctggggatcaaccccgccgctacccacatgaacgaaggccatgcggctttcctcgggctggaacgcgtccgcgaaatcatgactgaaagaaatttcacctttgaagaggcaagagaagcgatctggccgaccaatatctttaccacccacacgccggttccggccggtaatgagcgttttgacatcagcctggttgaaaaatatttccgctcctggccgcaggtgctcggcatatcatggaaggattttcttggccttggaaggataaatgtcaacgacgacaaagaaactttctgccttaccgtgcttgccctgaagatggcggcttacgccaacggcgtcgccaaactgcacggggttgtttcccgcgatatgtggcagggtctctggccgggagttccgataaacgaagttcccataggccatgtcaccaacggcgtgcatccgcgcacctgggtttccagcggtatgatcgagcttttggaccgctattttggcccccattttgagaacaagcctacagatctggcgatttgggatcgcatggacagaatcagtgacgaagagttatggcgtacccatgaacgccgccgtgaaaaacttgtcgcctttgtgcgcgagcgcattaacgcgcagtatgtccgcacgggagccgcgcggcttaagcaggcggaagacgccctttcgccctacgcgctcaccctttgtttcgcgcgccggtttgccacttataaacgcggcaacctcctgttacgcgatcccgaacgtttgctgaaactggtaagggatcacgaccgccccattcagttgattttcgccgggaaagcgcacccgcacgacatgccgggcaaggatcttatccgcgaaatagtccactttgccgaaaaatacgacgtatcaagcagaatcatatttgtcgagaactacgacatgaacgtcgccaaatatttaacctcaggcggagacgtgtggcttaacaccccgcgccgcccgatggaagcgtccggcaccagcggcatgaaagccgcgatgaacggcgtccttaactgctcgattttggacggctggtgggacgaagcgtactgccccgaagtaggatgggctataggccacggcgagcaataccacgacgacaaccttcaggatgatgttgaaagcaaggcgttatacgatcttctggagagggaaattattccgctgttctaccagagagggcgcgacggcctgccccgcgaatggataaaactgatgaaagactgcatgaagcgtatagggcagtccatgtcatgccaccgcatgttaatggattactcgaataatttttatttcccggcgcttaaaaattaccgccgtttcagcaaagacggctatgccgaagccaaatcgttggcggcttatttcaacaaactgcagcagtcatggggcaacctgaaaatagtcaagctggaatcaaacgcaaagccgataatgcaccgcggcgacactcttgccgttaccgcttacatcgatcttggcaacattttgccggaagaagtgcaggttgaactctaccacggcacggtatccagccagaacaaggaatttgccaacgcaacaaagaccgaaatgaagtgggttaaggccgacggaaacttgaatttattccaggttcgcgtggaatgtgttgataccggaatgcaggggcatacagttcgtattctgcccaagcatgacgcgctgattcatccttaccgccccggatttgttaaatgggcttag

SEQ ID NO: 56178 - protein, 641 aa, Unknown
  Obtained from environmental sample
  DOMAIN (9)...(485): Carbohydrate phosphorylase
  misc_feature (1)..(641): Xaa is any amino acid
MMAESRPFSLYLLDTNVEENAPDIRNVTASLYGGDKETRMQQEVLLGIGGIRALRALGINPAATHMNEGHAAFLGLERVREIMTERNFTFEEAREAIWPTNIFTTHTPVPAGNERFDISLVEKYFRSWPQVLGISWKDFLGLGRINVNDDKETFCLTVLALKMAAYANGVAKLHGVVSRDMWQGLWPGVPINEVPIGHVTNGVHPRTWVSSGMIELLDRYFGPHFENKPTDLAIWDRMDRISDEELWRTHERRREKLVAFVRERINAQYVRTGAARLKQAEDALSPYALTLCFARRFATYKRGNLLLRDPERLLKLVRDHDRPIQLIFAGKAHPHDMPGKDLIREIVHFAEKYDVSSRIIFVENYDMNVAKYLTSGGDVWLNTPRRPMEASGTSGMKAAMNGVLNCSILDGWWDEAYCPEVGWAIGHGEQYHDDNLQDDVESKALYDLLEREIIPLFYQRGRDGLPREWIKLMKDCMKRIGQSMSCHRMLMDYSNNFYFPALKNYRRFSKDGYAEAKSLAAYFNKLQQSWGNLKIVKLESNAKPIMHRGDTLAVTAYIDLGNILPEEVQVELYHGTVSSQNKEFANATKTEMKWVKADGNLNLFQVRVECVDTGMQGHTVRILPKHDALIHPYRPGFVKWA

SEQ ID NO: 56179 - DNA, 840 bp, Unknown
  Obtained from environmental sample
  misc_feature (1)..(840): n is a, c, g, or t
atggattctaacataaaagacaaacttctttttccgcgtaaagacgcttctgtttctttaacgagggaggaaataaaaaccgcggacgaatattgtaaggcttatatatctttcttaaataacgcaaaaactgaaagagaagcggtaagcgccgcagtcgcgctggcggaaaaaaaaggttttattccatggaaaaaaggcatgaaaataaaaagcggcgataaaatctatttcagtcgccgcggaaagactttggttctttgtaatattggtaaaaaaaattttgcccaaggcatttctattgtcgcttctcatatagactccccgcggcttgattttaaaatgcggcctatatatgaagattccggtatggctttttttgacacccattattacggaaaccttaaaccttatcagtggacgggtattcctcttgcccttcacggtttttttatccttaaagacgggcaagagcttaatataaaaattggcgaagatcatgacgacccgcgtttctttattgcggatctccttccacatcttgcggaaaagcagatgaaaaaatccgtaaaaaacgctgtttcggcggaaaaccttgatattcttgcgggactcaattccgcgccgggcgagaacggcgcaggagcggttaaacttaatatactcagacttatgtacgaaaagtacggaattaccgaaaaagaccttgtatcggcggaggtttgcgctgttccggcattcgccgcttcggatatcggacttgacaggagcatggtaggaggctatgcccaggacgataaggtatgcgcttactccgctcttaccgcattcctttcgtaa

SEQ ID NO: 56180 - protein, 279 aa, Unknown
  Obtained from environmental sample
  DOMAIN (38)...(278): Aminopeptidase I zinc metalloprotease (M18)
  misc_feature (1)..(279): Xaa is any amino acid
MDSNIKDKLLFPRKDASVSLTREEIKTADEYCKAYISFLNNAKTEREAVSAAVALAEKKGFIPWKKGMKIKSGDKIYFSRRGKTLVLCNIGKKNFAQGISIVASHIDSPRLDFKMRPIYEDSGMAFFDTHYYGNLKPYQWTGIPLALHGFFILKDGQELNIKIGEDHDDPRFFIADLLPHLAEKQMKKSVKNAVSAENLDILAGLNSAPGENGAGAVKLNILRLMYEKYGITEKDLVSAEVCAVPAFAASDIGLDRSMVGGYAQDDKVCAYSALTAFLS

SEQ ID NO: 56181 - DNA, 591 bp, Unknown
  Obtained from environmental sample
  misc_feature (1)..(591): n is a, c, g, or t
atgcgcttactccgctcttaccgcattcctttcgtaagtgagcctgaatacacctcatgtctggttctcgccgacaaggaagaaaccggttcttttgggatcagcggtatgaagtcggcttttttcttaaggtttatcaatgaactgcttgaagccgccggagaagctgctaatgagcgcgaggttttctcaaattcgttttgcgtttccgctgatgttaatacctgctggtatcctctttataaagaagtgttagacgaacacggagacgcaagattaaaccacggtgttatactttttcgttattggggagaaaaagggaaagaaaatacaaacgacgctgacgctaaaactaccgcggcgttaataaaaattcttgatgaagatcaaatactatggcagacaggagaaggaggaaaagttgactcaggagcaagtggaactatgtcacggtttttcacaaaccttgatattccttccattgacctcggcgtacctcttctttcaatgcactctcctcttgaagcagccgcaaaagccgacatatacatggcgtatagggctttcacggctttcttcaaaagacgctaa

SEQ ID NO: 56182 - protein, 196 aa, Unknown
  Obtained from environmental sample
  DOMAIN (2)...(193): Aminopeptidase I zinc metalloprotease (M18)
  misc_feature (1)..(196): Xaa is any amino acid
MRLLRSYRIPFVSEPEYTSCLVLADKEETGSFGISGMKSAFFLRFINELLEAAGEAANEREVFSNSFCVSADVNTCWYPLYKEVLDEHGDARLNHGVILFRYWGEKGKENTNDADAKTTAALIKILDEDQILWQTGEGGKVDSGASGTMSRFFTNLDIPSIDLGVPLLSMHSPLEAAAKADIYMAYRAFTAFFKRR

SEQ ID NO: 56183 - DNA, 1755 bp, Unknown
  Obtained from environmental sample
  misc_feature (1)..(1755): n is a, c, g, or t
atggcggggcgacgggtgctgctttcccgcattgatgaaatgcagacgaccaaccacgcgaaattcggcaacggagcgatcaaggacggcgagagcgaagatgtccgcgtgtggatagacgtaatgaacgaggccggcggaagatcgatactcccctttgacaacatgatagccgccgacgcctttctctgggccgcgtaccgcgatgataccctgttagttgaaaagctgaaggacattacccaggagacttacggcggtgtccgggggcgttacgggacaataggccggggcgcggttattaaaagctgcgccattataaaggacaccgctgtcggcgactatgcttacataaaaggcgccaataaacttaaaaacctgacgatacattcatcggccgacgagcctactcagataggggagggcgtggagatggtgaacggcattgtcggttacgcctgccatgttttttacggcgccaaggcggtgcgctttgtcatcgggcggaactgcaatctgaaatacggggcgcggctgatccattcggtgttaggcgataattcaacggtgtcctgctgcgagatcctcaataacctgatctttccggtacatgaacagcaccacaacaattcttttttaatcgcgagccttatacaggggcagtccaacatcgcggcggcggccaccattggcagcaaccataacagcagggccaacgacggcgaattgcgcgcgaaacgggggttttggcccggactggcggtgacattaaaacacccgagcgtctttgcctcgtttgtcatcatcgccaaaggggaatacccttcggaactcaatatccccctgccgttctccctggttgccaacaatgtccatcaaaaccggctggaactgtcgcccgcgtacttctggcttcataacctctacgctcttgaacgcaattcatggaaagcaaaaaaccgcgacaaaagaaaaataaaaattcagcgcattgaaaccgactatcttgcgcccgacacagcggaagaaatcatcgccgccttgtcgctccttggcggcttgctcggcgaagcgggcttctcgccgatggacttggcgggcgaagacggaacagaagtgcgtcatattcattgccgccaatttgaacacagcaaaagagaccagatagtcataaagccgttggaagcgattgccgcctatcggcagatgctttgctattacgcggtaaaaaccattgcgtcgtttttggattcgcagcaggatttggattttaacggtttgagtaaactgcttggcgatacttatcgtgtcaaagactgggtaaacgcaggcggacagatagttcccgctttccgtatggacgctcttcgcaaggaaataggagaaggcaaatataaaaattgggacgagattcacaatgtatacgactcctgggacgaagcatatccgcttgataaatgccgccatgcgtgggcggttcttgcgttccttcaagggacagacaaaattccggacgtatccattttaaaaaaagagtttgccgaggttttggaaacacgccgctggatagaaaagcagatatttgaaagcagggcgaaggactaccgtaataattttaaaaaagccacattccgtaatcatgcggaaatggaacaggtgctaggaaaacccgagaataatctttttattaaacttgttaaagaagagggtaacaattttaaagagatgattattagagcaagcgaaaagttgtga

SEQ ID NO: 56184 - protein, 584 aa, Unknown
  Obtained from environmental sample
  misc_feature (1)..(584): Xaa is any amino acid
MAGRRVLLSRIDEMQTTNHAKFGNGAIKDGESEDVRVWIDVMNEAGGRSILPFDNMIAADAFLWAAYRDDTLLVEKLKDITQETYGGVRGRYGTIGRGAVIKSCAIIKDTAVGDYAYIKGANKLKNLTIHSSADEPTQIGEGVEMVNGIVGYACHVFYGAKAVRFVIGRNCNLKYGARLIHSVLGDNSTVSCCEILNNLIFPVHEQHHNNSFLIASLIQGQSNIAAAATIGSNHNSRANDGELRAKRGFWPGLAVTLKHPSVFASFVIIAKGEYPSELNIPLPFSLVANNVHQNRLELSPAYFWLHNLYALERNSWKAKNRDKRKIKIQRIETDYLAPDTAEEIIAALSLLGGLLGEAGFSPMDLAGEDGTEVRHIHCRQFEHSKRDQIVIKPLEAIAAYRQMLCYYAVKTIASFLDSQQDLDFNGLSKLLGDTYRVKDWVNAGGQIVPAFRMDALRKEIGEGKYKNWDEIHNVYDSWDEAYPLDKCRHAWAVLAFLQGTDKIPDVSILKKEFAEVLETRRWIEKQIFESRAKDYRNNFKKATFRNHAEMEQVLGKPENNLFIKLVKEEGNNFKEMIIRASEKL

SEQ ID NO: 56185 - DNA, 1218 bp, Unknown
  Obtained from environmental sample
  misc_feature (1)..(1218): n is a, c, g, or t
atggaagaaggggaaaacataataaaatcagtaataaaaagatccggcatgataatacctgaattttttcaaatagcccaaaaggcctttgcaaaaaaagacatgaaggaattaaacttctcaaaaaaagaaattaccgagtacatgacggaatgtagaaggctgaaccagttttacaaagacaccttacggacaattcacggcgatcttaagaactacatagatctgaaaaatcatttaatatcaaaggatatggattatcttgaagacaaggattgttcaactattcgtaaacggataatgagggcattaaaaaatatccatatacatcccgacgaaatactggctttttcggaaaaatttcttcaggcttcaagaaagatcaaaaaatacgtcaaggaacaggaacgtcttcaaaagcacctgaaagttgtttcccttaaagagcttcgcactttagggcgttatcttacaataaaggacgagcgggaaagagtagaggcggaactgggtcttccttccgatgaaataaaggaaaagataaaacttgttcaggttacccaaaaaaaattaaggactttggaagccgaatttgaggaaactaccgataacatcaacgatatggcgggtgaaatacagcgcggacgcgtaatgatgaagaacgcgaaagacaggcttataaaggcaaacttaaggcttgtagtctccatcgcgaaaaagtacacaaacaggggacttcatttctttgatcttgtccaggaaggaaacataggccttataaaagctgtagaaaaatttgaatatcaaaagggatttaagttttcaacttatgccacatggtggataaggcaggccataacccgctccatttcggatcaagcgcggactatccgcgttcccgtgcacatgatagagcagattaacaaagtagtccgcgaatcaaggcagcttttacagtctttgggccgcgagcctacggacgaggaaattgccgaaaaactcggctggaccgccctgagggtaaaatccgtaaagaacgtggcgcgcgagcctatcagccttgaaaccccaataggcgaagaagaagattcgcttttaggcgactttatcgaggacaaggacgtgaaaaccccgcgatcctcaccgcccatancctgctgcaggaggaagtcgccggcgtgctttccaccctgccagaacgggagcaggaagtgctga

SEQ ID NO: 56186 - protein, 405 aa, Unknown
  Obtained from environmental sample
  DOMAIN (226)...(296): Sigma-70 region 2
  misc_feature (1)..(405): Xaa is any amino acid
MEEGENIIKSVIKRSGMIIPEFFQIAQKAFAKKDMKELNFSKKEITEYMTECRRLNQFYKDTLRTIHGDLKNYIDLKNHLISKDMDYLEDKDCSTIRKRIMRALKNIHIHPDEILAFSEKFLQASRKIKKYVKEQERLQKHLKVVSLKELRTLGRYLTIKDERERVEAELGLPSDEIKEKIKLVQVTQKKLRTLEAEFEETTDNINDMAGEIQRGRVMMKNAKDRLIKANLRLVVSIAKKYTNRGLHFFDLVQEGNIGLIKAVEKFEYQKGFKFSTYATWWIRQAITRSISDQARTIRVPVHMIEQINKVVRESRQLLQSLGREPTDEEIAEKLGWTALRVKSVKNVAREPISLETPIGEEEDSLLGDFIEDKDVKTPRSSPPIXCCRRKSPACFPPCQNGSRKC

SEQ ID NO: 56187 - DNA, 447 bp, Unknown
  Obtained from environmental sample
  misc_feature (1)..(447): n is a, c, g, or t
atggcaactgaaaacgattttgacaaactgcggacgctgcaggacatcctttcgcaaaaaatcaagctggaacatgagattcaggaaatacccaaacagcttggaaatcttgaggaagcgcataacaggacgcggaaagcgtttatcaacaaaaatctggaatacgaaaaaatcaagagcgccgaagaagaagccagggcaagtttgagggaagccgaagccgcaagggaaaaagcggagcgcaccatttccgagatcaacacccagcgggaatacgaggcgcttgacaaggagcgcaacaccgccgaaaagaacgagcagcaattcggcaaagaagtccagttgaaagaaaaggcccttatggatcttgacgagcagataaagcagcatgccgcccttattgagcagcaggaaaaggaactggcggaaaaactgggcggggattga

SEQ ID NO: 56188 - protein, 148 aa, Unknown
  Obtained from environmental sample
  DOMAIN (3)...(148): Uncharacterized ACR, COG1579
  misc_feature (1)..(148): Xaa is any amino acid
MATENDFDKLRTLQDILSQKIKLEHEIQEIPKQLGNLEEAHNRTRKAFINKNLEYEKIKSAEEEARASLREAEAAREKAERTISEINTQREYEALDKERNTAEKNEQQFGKEVQLKEKALMDLDEQIKQHAALIEQQEKELAEKLGGD

SEQ ID NO: 56189 - DNA, 459 bp, Unknown
  Obtained from environmental sample
  misc_feature (1)..(459): n is a, c, g, or t
atgccgcccttattgagcagcaggaaaaggaactggcggaaaaactgggcggggattgacgctgaaatcgccataaagaaaaaacagatagaaaccctgttaaagaaagaaaaaaacctgtccggagatctggatccggaggttgtgttcaaatttgagcgtatcctcaggaataaaatgggcctggggattgtcgcaataaaaggcaatgtctgtcagggctgccatatgattcttccggcgcagttttccaataatgtccgtcttggcgaagaatttattttctgcccttattgctcgcgcatactttactacgaagagtcaaccgaaggcgaagacattttctttgacagtgatgacgccggcgcgttggaagaaactgacgaaatagacgaagatgaattcgaggaggatgacaaagaggaagaaaaggcaaatatcgactttgaagacgtctaa

SEQ ID NO: 56190 - protein, 152 aa, Unknown
  Obtained from environmental sample
  DOMAIN (1)...(107): Uncharacterized ACR, COG1579
  misc_feature (1)..(152): Xaa is any amino acid
MPPLLSSRKRNWRKNWAGIDAEIAIKKKQIETLLKKEKNLSGDLDPEVVFKFERILRNKMGLGIVAIKGNVCQGCHMILPAQFSNNVRLGEEFIFCPYCSRILYYEESTEGEDIFFDSDDAGALEETDEIDEDEFEEDDKEEEKANIDFEDV

SEQ ID NO: 56191 - DNA, 1539 bp, Unknown
  Obtained from environmental sample
  misc_feature (1)..(1539): n is a, c, g, or t
ttgccttcgagagatgtgccggatgccgcccaagaacatatccttacgataaaacaagcgggcgcaaatcttttgtccatcatcaatgatattcttgatttttcaaaaattgagagcggaaaattggaaatcattcccgtaaaatatatgctttcatctttgattaacgacaccgtaaacattatccgtatgcggtttaaagaaaaacccttgaggttttttaccaacatagacggaagtattcccaacaacctttacggagacgaaccgcgtctgcggcaaattactcttaaccttctgaccaatgcggtaaagtatacggaaaaagggtatatcggtttgatcattaccataaataaacgtaacgacaaacaaatctggcttaagatagaggtaatcgataccggaaaaggaataaaaccggaagatcagaaaaaacttttcggcgagtttgttcaggtagacacgcgtgaaaacaagggaatagaagggacgggacttgggcttgcaattaccaaacgcctgtgtctcgccatgggcggagatataaccgtggaaagcgaatacggcaagggaagcgtattcacggtaattgttcctcagaacattgaatcgcaagagccctttgccgaggtagaagaaccgcagagaaagaaagtgctggtctatgaaggcagagctgtctatgccaacgctgtgtgctggtctttggaaaacatgaaagttccccataccgtggtaacaaataaagaagattttgccgccgccctgtacaaggaagaatggtcttatgtgttttcaggctacggtctttatgaaaatattaaaccgcttatagaacagaacgattccaatttctgcggaggcaaaaagccgcctatggctttgatgatagaatggggaacggaagcctacatacccggcgtacgttttctgtccataccggtgcagtcccttgctattgccaatattttaaacggcagggaagacattaaaggatacagtaaaagttccaacactgtccgattcacattcccgcgtgcgcgtattcttgtagttgacgacattgcgactaaccttaaagtagccgagggtctgcttgcgccctaccgcacaacagtagacacatcccttaccggtttgcagtcgttagaaatggtaaaacaaaacgaatacgacatagtattcatggatcacatgatgcccgttatggacggaattgaaactacagccgctatccgcgcatgggaaaaagaacagcataagaaacaacgaattcctattatcgctctcactgcgaatgcagttgtcggtatgagagaaatgtttttggaaaacggcttcgatgattttatttccaaacccatagacattttcaagttagatgaaatgcttgaccgctggataccgaaagaaaaaagagacacccggaaaaacgcatcaagcggcaacggcgcatcaagcgacaacgcccgcagcggcaacggcgcatncagcgccgtagatgacacccaaaaaagcagcagtaaaatccgctaa

SEQ ID NO: 56192 - protein, 512 aa, Unknown
  Obtained from environmental sample
  DOMAIN (348)...(466): Response regulator receiver domain
  misc_feature (1)..(512): Xaa is any amino acid
MPSRDVPDAAQEHILTIKQAGANLLSIINDILDFSKIESGKLEIIPVKYMLSSLINDTVNIIRMRFKEKPLRFFTNIDGSIPNNLYGDEPRLRQITLNLLTNAVKYTEKGYIGLIITINKRNDKQIWLKIEVIDTGKGIKPEDQKKLFGEFVQVDTRENKGIEGTGLGLAITKRLCLAMGGDITVESEYGKGSVFTVIVPQNIESQEPFAEVEEPQRKKVLVYEGRAVYANAVCWSLENMKVPHTVVTNKEDFAAALYKEEWSYVFSGYGLYENIKPLIEQNDSNFCGGKKPPMALMIEWGTEAYIPGVRFLSIPVQSLAIANILNGREDIKGYSKSSNTVRFTFPRARILVVDDIATNLKVAEGLLAPYRTTVDTSLTGLQSLEMVKQNEYDIVFMDHMMPVMDGIETTAAIRAWEKEQHKKQRIPIIALTANAVVGMREMFLENGFDDFISKPIDIFKLDEMLDRWIPKEKRDTRKNASSGNGASSDNARSGNGAXSAVDDTQKSSSKIR

SEQ ID NO: 56193 - DNA, 582 bp, Unknown
  Obtained from environmental sample
  misc_feature (1)..(582): n is a, c, g, or t
gtgccgggagccatctcccgggtgaagttcagggacggtgtttttgttacggagactatcggaaacaaagagcctttgggtatctgcggatccggcgttgtggacatggtaagccaggggcttaattccgggtatatccagccaagcggaagattttcttccaaagttattaacaatgaaataccgcttgccaaaacaacggacggccgggacatagttttctgccagaaggatgtgcgggaagtgcagttggggaagagcgccatccgttccggtcttgacgccctccttaatcacgcgggccttggctataatgacatacaaaccttgtatattgccggaggcttcggctttaacctcgacatggaaagcgcggcaagaatcggccttatcccccctgccctgcttccaaaggtttcgcttgccggaaacagcgcgcttggaggcgcggtaaaataccttctcggttctgacggggaagaaacgcttgacaatatagtcaaacaatccgaggaattcagccttcccgaagacaggtattttaacgatcattttatcagcaacgtaaactttgagaaataa

SEQ ID NO: 56194 - protein, 193 aa, Unknown
  Obtained from environmental sample
  misc_feature (1)..(193): Xaa is any amino acid
MPGAISRVKFRDGVFVTETIGNKEPLGICGSGVVDMVSQGLNSGYIQPSGRFSSKVINNEIPLAKTTDGRDIVFCQKDVREVQLGKSAIRSGLDALLNHAGLGYNDIQTLYIAGGFGFNLDMESAARIGLIPPALLPKVSLAGNSALGGAVKYLLGSDGEETLDNIVKQSEEFSLPEDRYFNDHFISNVNFEK

SEQ ID NO: 56195 - DNA, 729 bp, Unknown
  Obtained from environmental sample
  misc_feature (1)..(729): n is a, c, g, or t
atgggtcgtaatgtgttcaggctccatgaaatgaccggaattacgggcggcaagattcttttagcgataaaagaaaaagaagaacacggtacatatatgaaagcccttgaggaaatcggtgtttctcatcgttctgccgtaagatacacgcactttgcaaaaaggttcggcaaatacgccaacttggcgtatttgaacggttcaaaactgtcggctttagaagaccttagtgacatagagcttaaaaaacttgatgccggggaggaagtaaaaggtcttacattagatgcaattgaatatctacccgcccctgaagttcgggaaaaactgcgttctgcggagaaaaagatcgaaaggattaaagacgcgcataagaaagaagtagaaaagctgaacgagataatcagcgatctgaaaattcgtgcagaggaccccatgcagcttacaaaggcgcaaaaggccgcaagagaactaaggacgcttaccggggtttacagcatggcgctttcaaaaatctctgccggtttccgcgaagcgatgtcgatacttgccgaaggcgaaaaaatccccggtatcggcgtacaggaacttaacgcctggctgaacgagtttgtccccgataccgcgaccatccatgacctctttaatcaatggcaggcagggtttgacgatcccagccctattgttgacaacttcaatgacattattgagggaagagtgaatgtatga

SEQ ID NO: 56196 - protein, 242 aa, Unknown
  Obtained from environmental sample
  misc_feature (1)..(242): Xaa is any amino acid
MGRNVFRLHEMTGITGGKILLAIKEKEEHGTYMKALEEIGVSHRSAVRYTHFAKRFGKYANLAYLNGSKLSALEDLSDIELKKLDAGEEVKGLTLDAIEYLPAPEVREKLRSAEKKIERIKDAHKKEVEKLNEIISDLKIRAEDPMQLTKAQKAARELRTLTGVYSMALSKISAGFREAMSILAEGEKIPGIGVQELNAWLNEFVPDTATIHDLFNQWQAGFDDPSPIVDNFNDIIEGRVNV

SEQ ID NO: 56197 - DNA, 732 bp, Unknown
  Obtained from environmental sample
  misc_feature (1)..(732): n is a, c, g, or t
atggctttaactgagaaccaagctaggaacgaacaaatcagcgcggttcaatcatttcttcagcaacgggctgaattggaatccgataactacggggaacgaatagcatttttggagcaacagagagaagaacttcgttccttgtacgctgagggctccaatgagagagtcgccattgaaattgcggcgactcaagcgattaaaaacgctcatcaagatttggcggattttgaaaaagaattattggagaaaaaactaacggcgttcgctggtttcttcaatggtttggggcaactgatggagctcgctggtgagaaaaatcggagcgcggcgataatagctaaaggtttagcttccgctgaggcggcgattaactcatacttagcgttcaccaaagcgttggcttccgctccatatccttacaacatagttgcgtcagctggtgtgttggcttcaggtttagctcaacaaatgaaaataatatccaccccaatcccaagtgcggagactggtggtagattcatagttcctcaaggcaatggagttgatggacacttgtataaatttaatcaaggtgaagaggttcaagttactccaagaagccaggttggaagaggtgatggaaacttcaatttcaatttggttgttgatgggagtgtaattgctcaggtggtcaacaaacaagcaagagcgggagaactgtacactctcggccgaatctgtacttggtaa

SEQ ID NO: 56198 - protein, 243 aa, Unknown
  Obtained from environmental sample
  misc_feature (1)..(243): Xaa is any amino acid
MALTENQARNEQISAVQSFLQQRAELESDNYGERIAFLEQQREELRSLYAEGSNERVAIEIAATQAIKNAHQDLADFEKELLEKKLTAFAGFFNGLGQLMELAGEKNRSAAIIAKGLASAEAAINSYLAFTKALASAPYPYNIVASAGVLASGLAQQMKIISTPIPSAETGGRFIVPQGNGVDGHLYKFNQGEEVQVTPRSQVGRGDGNFNFNLVVDGSVIAQVVNKQARAGELYTLGRICTW

SEQ ID NO: 56199 - DNA, 534 bp, Unknown
  Obtained from environmental sample
  misc_feature (1)..(534): n is a, c, g, or t
atggccgagacggttaagaaaagacggtctgagaaagccaaagaagaacctgcggtaaaagtaaaaccggaaccgacagcgaaacctaaaataaaagctgcagaaaaaccggctgagaaagttaaagaagagcctgcggtaaaaactaaacaagaaccagtggcgaaaccaaaaataaaaactgcagaaaaaccggttgagaaagttaaagaagagcctccggtaaaagcaaagccggaaccggctgtgaaacctaaaacaaaagctaaagaaaaacctgttaaaaaaccggccgcgaaacctgaaaagccaactgcgaaaaaaaccagtgtgaaacctgaatcaaaagcggcagcgaagccaaaggtaaaaccaaaaacaaaggcggatgcaaaggaaaaagcaaagcctgttaaagcaaaagcgaatgtaaagccgaaggcaaaaacgaaaccggcagcgaagaccggaacaaaaaccggaggaaaacccaagggaaaaacagcttcaaaggccaagagtaagaaaaaatga

SEQ ID NO: 56200 - protein, 177 aa, Unknown
  Obtained from environmental sample
  misc_feature (1)..(177): Xaa is any amino acid
MAETVKKRRSEKAKEEPAVKVKPEPTAKPKIKAAEKPAEKVKEEPAVKTKQEPVAKPKIKTAEKPVEKVKEEPPVKAKPEPAVKPKTKAKEKPVKKPAAKPEKPTAKKTSVKPESKAAAKPKVKPKTKADAKEKAKPVKAKANVKPKAKTKPAAKTGTKTGGKPKGKTASKAKSKKK

SEQ ID NO: 56201 - DNA, 660 bp, Unknown
  Obtained from environmental sample
  misc_feature (1)..(660): n is a, c, g, or t
atgaatgataaggaattgactttctctgaaaaggaagatatttattataaaataaaaaattttaagttccgtactgaattttatacaagagaaaatcgtttagacgaagtagcgagttgggctgtttggaatccttctgatctgaatgatacaaaaattattgaaaaaccggagtcaataaataaattaaaaccaaattatgtttttgttttattgaattttgcgggaaatggagatgtagattttgaagaccccgcatggaaatcatggaagaatttccatagtaattctcggatggataagagactatttaatgttttaaagcatccgaaatacgaaggagcatatatgactgatataataaaatgtgttgaaacaaaaggtgaagggggattaaggaaaaagttgaataataaagaaattaatatggaaactcaagtaaatatatttaccaaagaaattagtattttggataaaaataataatattgaattattcttgctaggaagattaactgaagaaatttataataattatatggtagaaaaaataagaaataatatcaaagctacatatattatacatccttcaccggaaggcatacggaataataccgttttttatgaaaaaatcaggtctcaattaggaataaataagtaa

SEQ ID NO: 56202 - protein, 219 aa, Unknown
  Obtained from environmental sample
  misc_feature (1)..(219): Xaa is any amino acid
MNDKELTFSEKEDIYYKIKNFKFRTEFYTRENRLDEVASWAVWNPSDLNDTKIIEKPESINKLKPNYVFVLLNFAGNGDVDFEDPAWKSWKNFHSNSRMDKRLFNVLKHPKYEGAYMTDIIKCVETKGEGGLRKKLNNKEINMETQVNIFTKEISILDKNNNIELFLLGRLTEEIYNNYMVEKIRNNIKATYIIHPSPEGIRNNTVFYEKIRSQLGINK

SEQ ID NO: 56203 - DNA, 753 bp, Unknown
  Obtained from environmental sample
  misc_feature (1)..(753): n is a, c, g, or t
atgaaaacaccgccacaatttaccattattcatgaagatgttaatatcatagcagttaataaaaccgccggaatttcggtgggcggcgaccgatgggacgaatccaaagacaggctggacagactggtcgctgaaattataaaccctccatcgaaaatttttaccgtacaccgtatagactgcgatacctccgggctggtggtattcgcgaaaaacgaggaagcccaccgccgtctttcaatcgcctttgaagggcgggatgtcacaaagcggtacatcgccattgtccacggccgcccctgttggcaggaaacgacctgcgatcttcccctaattccaaacggcaataagctccaccagactataattgacaaataccagggtaaaaagtcccttacccgctttgtgcttctggagagcgcggggaattacagcgtcattgaagccctgccggaaaccggcagaacccaccagatacgcgtacacgccgcggctctgggccatcctgttgtatgcgattcaatgtacggaaaaggcaagccggttatgctttcggaaataaaaaggaactggcacggcgacccttatgaagaaaaacccctattggcgcggcttggccttcatgccgccgaactcgccttgccagcggaatccatcagtctcaatgccccgcttcccagggatatggccgctctaatcaatcaaatgaagaagatgggaccgggaagctcagtttacgaaccaaaaccttag

SEQ ID NO: 56204 - protein, 250 aa, Unknown
  Obtained from environmental sample
  DOMAIN (15)...(165): RNA pseudouridylate synthase
  misc_feature (1)..(250): Xaa is any amino acid
MKTPPQFTIIHEDVNIIAVNKTAGISVGGDRWDESKDRLDRLVAEIINPPSKIFTVHRIDCDTSGLVVFAKNEEAHRRLSIAFEGRDVTKRYIAIVHGRPCWQETTCDLPLIPNGNKLHQTIIDKYQGKKSLTRFVLLESAGNYSVIEALPETGRTHQIRVHAAALGHPVVCDSMYGKGKPVMLSEIKRNWHGDPYEEKPLLARLGLHAAELALPAESISLNAPLPRDMAALINQMKKMGPGSSVYEPKP

SEQ ID NO: 56205 - DNA, 642 bp, Unknown
  Obtained from environmental sample
  misc_feature (1)..(642): n is a, c, g, or t
ttgaatgacaaggaaaggctgctcatagcgtgtctgcgccggggtgacagtaccgaagcccagagtatagcgcgggatctattggctgatttcagtaattcggctgagggtgattttgaatacttcaaaatgaaggcgatagaactggtagttctggtttcaagaaccgggacaaattccgaaaacgaagcggaacttgttgaaacgaacagccgtaatataaagcagcttgaggattccaataccgccggggaattggctgataacgtctgtctgattcttgaaaggatggccgggaaaattttctcttttcaggggattcgccacgcatcagcgctcaggaaagccgagcgctttatttgggagaattacaccaggaagatcagcctgaaggagattgccgacgcatccgggctttcagcgccttatttcagtacggtattcaagaatgaaatgggcgagaacctttcaaattatcttaacaggcttagggtggaaaaagccttgatgatgcttggtgaaaccgattctcccattaacaagatttcggcggactgtgggtttgaagatcaaagctggttttcaaaagtattcaaaagttataccggtattagtccatacgaataccgtaagtatggctga

SEQ ID NO: 56206 - protein, 213 aa, Unknown
  Obtained from environmental sample
  DOMAIN (167)...(211): Bacterial regulatory helix-turn-helix proteins, AraC family
  misc_feature (1)..(213): Xaa is any amino acid
MNDKERLLIACLRRGDSTEAQSIARDLLADFSNSAEGDFEYFKMKAIELVVLVSRTGTNSENEAELVETNSRNIKQLEDSNTAGELADNVCLILERMAGKIFSFQGIRHASALRKAERFIWENYTRKISLKEIADASGLSAPYFSTVFKNEMGENLSNYLNRLRVEKALMMLGETDSPINKISADCGFEDQSWFSKVFKSYTGISPYEYRKYG

SEQ ID NO: 56207 - DNA, 672 bp, Unknown
  Obtained from environmental sample
  misc_feature (1)..(672): n is a, c, g, or t
atggaagcggttatagaggccgtttcgtcgcccgatcccaatgtgcgctcttcggcggttgcagcgctggctcccttttcgggggaggtgacggaaaacgcaatattggaagcgttcagggattcttactaccgcacacgcattggtgcggcccaggccgcaggaaaacgccgtctggaaagcgcggttccctacttgcgctacagagctgaaaacgacgatgttcccaacgtaaaagacgaggcaataaaagccctgggcgcgattaacaacgaggaagcgatgggcattcttgattcgctcttttccgagcggaaaaattccgaccgcgtaaggataatggcggcggatatgcttctgcaaaacaacgctgatgtttacggttcccgcgtatttgccgaaatgggagacgcgaagcttaaaaaccagacggccctgtacaacgggttcgtgcggacaatgacaaccgcaaaagccccttctctggaacccacggttcttagcctgattagcggcggaggggtaatcgaaaaatcccttgccctggatatcatattgaacaacgaatttcgccagttggctgatgaaattcgctcgttattggacgagaagaaacacagcgcaagcattgcccgcaaggcacagagtaccctggaaaagctgggtttgtaa

SEQ ID NO: 56208 - protein, 223 aa, Unknown
  Obtained from environmental sample
  misc_feature (1)..(223): Xaa is any amino acid
MEAVIEAVSSPDPNVRSSAVAALAPFSGEVTENAILEAFRDSYYRTRIGAAQAAGKRRLESAVPYLRYRAENDDVPNVKDEAIKALGAINNEEAMGILDSLFSERKNSDRVRIMAADMLLQNNADVYGSRVFAEMGDAKLKNQTALYNGFVRTMTTAKAPSLEPTVLSLISGGGVIEKSLALDIILNNEFRQLADEIRSLLDEKKHSASIARKAQSTLEKLGL

SEQ ID NO: 56209 - DNA, 645 bp, Unknown
  Obtained from environmental sample
  misc_feature (1)..(645): n is a, c, g, or t
atggcgttacaatcatcttttaccagggaacaggcttggaatttattcttgaaatttaacaaagacccctttcatattcagcacgctctgaccgtggaaggtgttatgaggtggtatgccaaagaattgggctttggcgacgaggcggacttttgggcaattgtgggcatgcttcacgacattgactttggcgaatacccggaagaacactgcgtaaaggcccgtcaattgcttacggacgcaggtgccaacgaagagctcattcacgcggtttgcagccacggctggggcatgacaggcgccaaagaaaaacctgaacgccttatggaaaaggtgctctatgccgcggatgagcttacaggccttatttgggcagtcgcgataataaggccctccaaaagcgtgatggacatggaattgaaatccgtcaagaaaaaatacaaaactttgaattttgccgcaggatgtaaccgggaaacaatagatagtggcaccgccgaaatgggttgggagcaggtcaaactcgttgagcaggcaaatctggaggagagaagttgcgacagcggaaatataacgcttgtatggagagctggggatagaggtagatcggttaaggccttgaccatagtaggtactctcacataa

SEQ ID NO: 56210 - protein, 214 aa, Unknown
  Obtained from environmental sample
  DOMAIN (25)...(122): HD domain
  misc_feature (1)..(214): Xaa is any amino acid
MALQSSFTREQAWNLFLKFNKDPFHIQHALTVEGVMRWYAKELGFGDEADFWAIVGMLHDIDFGEYPEEHCVKARQLLTDAGANEELIHAVCSHGWGMTGAKEKPERLMEKVLYAADELTGLIWAVAIIRPSKSVMDMELKSVKKKYKTLNFAAGCNRETIDSGTAEMGWEQVKLVEQANLEERSCDSGNITLVWRAGDRGRSVKALTIVGTLT

SEQ ID NO: 56211 - DNA, 609 bp, Unknown
  Obtained from environmental sample
  misc_feature (1)..(609): n is a, c, g, or t
atgagaaaaaaagccctgataaaatcgctgttttttggcattcctgcgcttacagcatttattacttttgcccgtcttatgcaagtagattcagcaaaaaccaatattgaggacttagaatcggcggtgcaaattgaccaaaatgataccgaagctaaatggctttttgaagaagtccgacaaaacgaggataaagaaatgaatgatatttatgaccaggctattgagaatttttccgcagttctaaaaattaaacctgataatcaaaatgctctgtataagcgaggatttgcgtatttcagaaatggcaattatgatcaggctatcgaggatttttccgcaattctaaaaattaaacctgataatcaaaatgctctgtacttccgaggacttgcatatagactcaaaaacaactatgaccgagccattgaggactttaatgttgctattcagattaaaccagatgaccaccaagccttaaccgaccgaggacttgcgtatgttttcaaaggcgattatgatcaagctatagaggacatttcaacagctatcaagattaaacctgattaccacatcgccctatatcaccgaggatttgcgtattactga

SEQ ID NO: 56212 - protein, 202 aa, Unknown
  Obtained from environmental sample
  SIGNAL (1)...(24)
  DOMAIN (157)...(190): Tetratricopeptide repeat
  misc_feature (1)..(202): Xaa is any amino acid
MRKKALIKSLFFGIPALTAFITFARLMQVDSAKTNIEDLESAVQIDQNDTEAKWLFEEVRQNEDKEMNDIYDQAIENFSAVLKIKPDNQNALYKRGFAYFRNGNYDQAIEDFSAILKIKPDNQNALYFRGLAYRLKNNYDRAIEDFNVAIQIKPDDHQALTDRGLAYVFKGDYDQAIEDISTAIKIKPDYHIALYHRGFAYY

SEQ ID NO: 56213 - DNA, 687 bp, Unknown
  Obtained from environmental sample
  misc_feature (1)..(687): n is a, c, g, or t
atggtaaaaacgcttagaaaaactatccctaatttaacgctcgttggcggaaatgtggcaacagcagagggagttagggaacttgcgaaatgcggcgcagatgttgtgaaaatggaaattggacccggctctatttgcaccaccagagttgtggcaggtgttggagttccgcaattcacggcaatttttgaatgtgccgaagaagcggtgaaacaaggtgttggcataattggcgatggaggaataaaatactctggcgatattgttaaagccttggcagcaggcgcacacgctgttatgctgggcagcctttttgcaggtacagaagaaagccccggagaaataattttggcagatggtcgcacattcaaaagctaccgcggtatgggttccattggagccatgaaagagggttccaaagaccgctacttccaatccgaggttggagatgaatcaaaatttgttcccgaaggcattgaaggcagggttccatacaaaggtccactcaaagaattggtttatcaattaacaggcggaattcgtagcggtcttggctatgtgggagctgcggatttggcagatctcagagcaaaagcacgttttgtgcaaataacgagtgcggggttaaaagaaaaccacccgcacgatataaccataacaaaagaagcacctaattatagggcgtga

SEQ ID NO: 56214 - protein, 228 aa, Unknown
  Obtained from environmental sample
  SIGNAL (1)...(22)
  DOMAIN (1)...(215): IMP dehydrogenase / GMP reductase domain
  misc_feature (1)..(228): Xaa is any amino acid
MVKTLRKTIPNLTLVGGNVATAEGVRELAKCGADVVKMEIGPGSICTTRVVAGVGVPQFTAIFECAEEAVKQGVGIIGDGGIKYSGDIVKALAAGAHAVMLGSLFAGTEESPGEIILADGRTFKSYRGMGSIGAMKEGSKDRYFQSEVGDESKFVPEGIEGRVPYKGPLKELVYQLTGGIRSGLGYVGAADLADLRAKARFVQITSAGLKENHPHDITITKEAPNYRA

SEQ ID NO: 56215 - DNA, 381 bp, Unknown
  Obtained from environmental sample
  misc_feature (1)..(381): n is a, c, g, or t
atgaattttgaagatatattgaacaaatgggaaaaaaacaaccggatatatgacaaagatacggaatccgaaagcgagcatatcagcccgtatgaaagaagaagccgtttaagaaataaaaaacctgacgctgaactggacatacacggcctcacccgtgatgaggcatggaaggcgctggaaattttttttaacgattcaaaagggaaagggcttgaaaagctcctgattatccacggaaaggggaatcactcaacaggcgaagcggtgcttaaacgcgttgtaatggattttattgaacgctgcccattcgcaggcgaaagcggcaggggaaaagccgcggcaggcggcgaaggcgcgacctgggtactgttaaaataa

SEQ ID NO: 56216 - protein, 126 aa, Unknown
  Obtained from environmental sample
  DOMAIN (46)...(126): Smr domain
  misc_feature (1)..(126): Xaa is any amino acid
MNFEDILNKWEKNNRIYDKDTESESEHISPYERRSRLRNKKPDAELDIHGLTRDEAWKALEIFFNDSKGKGLEKLLIIHGKGNHSTGEAVLKRVVMDFIERCPFAGESGRGKAAAGGEGATWVLLK

SEQ ID NO: 56217 - DNA, 2871 bp, Unknown
  Obtained from environmental sample
  misc_feature (1)..(2871): n is a, c, g, or t
atggtaacgcttgatatcgaccacccggacgtagaaaagtacataaactggaaagcggcggaggagcataaagtcgcctccatggtaaccggttctttgatactgaaaaaacatatcgacgcgattaagagggctttgtccggtttcagggggcctgaggacgataaatttaacaccgagaaaaatcacgagcttgcaatggttctgcgggcggctttaggggataaaatccctccgtcctacctgtaccagcagcttcgccgcctcgagcagggcgatgaagaggttgatgtttcccagtactccaccgcctgggacgacgaggcttataataccgtatcgggtcagagttccaacaacagtctgcgccttagcgatgattttatgaaggcggtgctgaatgacgacgactggcagttaaaaagccgcacggtgggagatactgtaaaaaacgtaaaggcgcgcaaactttggtcggatatagcaaagacaagctggcagtgcgccgatcccgggcttcaataccacacgacaattaacgactggcacacatgccccgccggcggcgagatacgcgcctccaatccctgttctgaatatatgttccttgacgataccgcgtgtaacctcgcgtctgtaaacctcgccgctttatacgataaaagaaaaaaagaatttaatgttgacggataccttcacgcgattgacatctggacgacaattcttgagatctccgtagtaatggcgcagtttccctcacagcgcatcgcggagctttcttacctgtaccgcaccctcggcctcggttacgcaaaccttggaaccctgcttatgcttatgggcctggcctacgattccgccgaaggcagggcggtggcgggggcgctttcggccctgctttcaggcgaggcgtattcccagtccgcccgtatggccgccgaactggggcctttcttccgttacaaagaaaattccgccaatatgcttcgcgttatacgcaaccacaggcgggccgcgtacaacagccccgaggccgagtatgagggcctgcacaccataccctgcgggatcgatcagacaaactgcccggcatacctgctggacgcggcaaaagccgcctgggatcgcgcgctggaactcggcaaggcccacggctaccgtaacgcccaggtcagcgccatcgccccaaccggcactatcggcctgttgatggactgcgacaccaccggcgtcgagccggattacgcccttgtaaaattcaagaaactcgccggaggcgggtacttcaaaattatcaaccaatcggtgccgctcgctctggaagccctgggttattcgccccaattaatagaagaaattatcgcgtatgccaccggttataaaacgcttaacggcgcgccctatatcaatcccgacacgcttaaggcaaaatcttttaccccggaggcgattgccgccgccgaggacgcggtcaaaacagccctgaacctggaaggtgtttttaccccctggacgcttggcagggattttgttgaaaaaatccttcgcattccggaatctacatggtccctgcagggcttcagcctccttaagcacattggattcagcgcggaggatattgcggacgctgaactgtacgcctgcggaaccatggggcttgaaaacgcccccggcctgaaacaagagcattacgcggtttttgacaccgcgacaccgtccggcaagaacggcaagcgttcgattccctggacggcccatatcggaatgatggcggctgtgcagccctttatttccggggctatttcaaagacgattaatatgcccaactcggcaaattacgaagacgtgaaaggcgcgtatatgctttcgtggaagcacggccttaaagcggtggcactgtaccgcgacgggtcaaaactttcacagccgctttcatcattcgccccgggaaccgaccagttagccgacaccatactcaaggttgaacggggtcttgatatgccgccgccgcagattgtcgatcggagagcccctgcccgcgggctgcggaggctcctgccaagcagaagaatgggttacacgcagaaagcgaaaataaacacccacacaatctacatccgcaccggcgagtacgaagacggcagccttggcgaaatcttccttgacatgcaccgcgagggcgcggccttccgcagtctgctgaacagtttcgccattaccgtctcgcttggattacagtacggcgtgccgctggaagaatacgttgacgctttaaccttcagcaagtttgagccgaacggcccggtgcagggtcatgattatgtgaagatgacaaccagcgtgattgattacatcttccgtgacctggcgataagctatcttaaacgctacgatctcggtcaggtgaagcctgaagacctcatccccaccgcgaccaagagcgatatagcggactcaggcgaggcaaaacaacgcgccggcgacaaacagagcgccgggttcaggccatatcccgcggccagtggagcggctttaccgaccggatccgctggtctgctgccggagcaaaaaacgactcccccggcctcccacggtctttccggcagggctgaaggcctcaaggaaactacaaaaggattggctggaagcgccgagacatatcgccaggcaatttccacgcagaccgtccagccgcctgttcaggtgcttgcccaaccccgcccggaacagagcgaattgactaaaatcgcccaagcccgcatcaaaggttatgagggagatccatgcccctcctgcggttccttcactttgatacgaaacgggacctgtatgaaatgccatacctgtggcggcacgaccgggtgctcgtaa

SEQ ID NO: 56218 - protein, 956 aa, Unknown
  Obtained from environmental sample
  DOMAIN (22)...(499): Ribonucleotide reductase, barrel domain
  misc_feature (1)..(956): Xaa is any amino acid
MVTLDIDHPDVEKYINWKAAEEHKVASMVTGSLILKKHIDAIKRALSGFRGPEDDKFNTEKNHELAMVLRAALGDKIPPSYLYQQLRRLEQGDEEVDVSQYSTAWDDEAYNTVSGQSSNNSLRLSDDFMKAVLNDDDWQLKSRTVGDTVKNVKARKLWSDIAKTSWQCADPGLQYHTTINDWHTCPAGGEIRASNPCSEYMFLDDTACNLASVNLAALYDKRKKEFNVDGYLHAIDIWTTILEISVVMAQFPSQRIAELSYLYRTLGLGYANLGTLLMLMGLAYDSAEGRAVAGALSALLSGEAYSQSARMAAELGPFFRYKENSANMLRVIRNHRRAAYNSPEAEYEGLHTIPCGIDQTNCPAYLLDAAKAAWDRALELGKAHGYRNAQVSAIAPTGTIGLLMDCDTTGVEPDYALVKFKKLAGGGYFKIINQSVPLALEALGYSPQLIEEIIAYATGYKTLNGAPYINPDTLKAKSFTPEAIAAAEDAVKTALNLEGVFTPWTLGRDFVEKILRIPESTWSLQGFSLLKHIGFSAEDIADAELYACGTMGLENAPGLKQEHYAVFDTATPSGKNGKRSIPWTAHIGMMAAVQPFISGAISKTINMPNSANYEDVKGAYMLSWKHGLKAVALYRDGSKLSQPLSSFAPGTDQLADTILKVERGLDMPPPQIVDRRAPARGLRRLLPSRRMGYTQKAKINTHTIYIRTGEYEDGSLGEIFLDMHREGAAFRSLLNSFAITVSLGLQYGVPLEEYVDALTFSKFEPNGPVQGHDYVKMTTSVIDYIFRDLAISYLKRYDLGQVKPEDLIPTATKSDIADSGEAKQRAGDKQSAGFRPYPAASGAALPTGSAGLLPEQKTTPPASHGLSGRAEGLKETTKGLAGSAETYRQAISTQTVQPPVQVLAQPRPEQSELTKIAQARIKGYEGDPCPSCGSFTLIRNGTCMKCHTCGGTTGCS

SEQ ID NO: 56219 - DNA, 1077 bp, Unknown
  Obtained from environmental sample
  misc_feature (1)..(1077): n is a, c, g, or t
atggtagcaaggggagatcttggcgtacagctccccaccgagcagattcccctcgcgcagaaacacattatcaatgtgtgcaggagggccggaaagcctgtcattaccgcgacacagatgctggaatcaatgattgtgaatccgcgccccacccgcgcagaactgaccgatgttgcgaacgcaatactcgacggaaccgacgcgatcatgctttccggtgaaacatcagcgggcgcgtatcccatagaagcggtaaaaacgatggacaaaatagcatgtaccattgagcagtcggatgaattccacaaacgcatgagaaatttccacgatgaatgtcattctgaagtgcataacccaaaagaaaatctgggcgttatcatgtcgcgagcgggggttgaaatcgcgacatcggtaaaggcaaaagccatagttactccaacccgcagcggcaatacagcgcgaatcctcagtgtattcaggccggatgaacctatccttgccgtgactaccgatgagcgttctgaacgtattatgcagttatactggggcgttaatacctgtatcaggtcgaaagtcgatgactcggaaagcatgatacaaaacaccattaaggttgtttccgataccggagttgccggcatatcggataaagtagtgcttattgccggccttccgcttgaaagcccgaacatgataaacaatatacgcgtcgtaattatagggacggttcttgcgcgttcaaacgccggcggtttcgcgaatcccgacattacacgcgcccatggcaagataatccacgccgatacgccggatgaagcccgcaaaaaaatcatgtcttcaggaggcggcgacataattatttgcaaggaacttaccgaagaatacgtttccgttatcagcatggtaagcggaatcatttgcgagggagtttcggtaattgtcgaacagaagttacgcattttcaatcccaatcttgtctggcttacccacataagggacgcggcgaagaaactcgaaaacgggttaacggttacgatagacgggaaggaactgcttgtgtatgaaggggcgatttaa

SEQ ID NO: 56220 - protein, 358 aa, Unknown
  Obtained from environmental sample
  DOMAIN (1)...(105): Pyruvate kinase, barrel domain
  misc_feature (1)..(358): Xaa is any amino acid
MVARGDLGVQLPTEQIPLAQKHIINVCRRAGKPVITATQMLESMIVNPRPTRAELTDVANAILDGTDAIMLSGETSAGAYPIEAVKTMDKIACTIEQSDEFHKRMRNFHDECHSEVHNPKENLGVIMSRAGVEIATSVKAKAIVTPTRSGNTARILSVFRPDEPILAVTTDERSERIMQLYWGVNTCIRSKVDDSESMIQNTIKVVSDTGVAGISDKVVLIAGLPLESPNMINNIRVVIIGTVLARSNAGGFANPDITRAHGKIIHADTPDEARKKIMSSGGGDIIICKELTEEYVSVISMVSGIICEGVSVIVEQKLRIFNPNLVWLTHIRDAAKKLENGLTVTIDGKELLVYEGAI

SEQ ID NO: 56221 - DNA, 867 bp, Unknown
  Obtained from environmental sample
  misc_feature (1)..(867): n is a, c, g, or t
ttgaagacattgcctgtgacaacggcgttgaaacgctggctcggcgctatgatgaatgacgaatgtgtaagcctgcgttgcagcgaatttacggaagatgaagctgcctttttgtctccccgcggcgtaaaatcaatactgattgttcccgtttttgcggaacgcaacctttggggcgttactacctttcatgataacgccgaagaaagggattttgacgatgaatgcatcgccatgctgcggtcaaccgcccgtttatgcgtaaacatgctgcagcgtaccgaaatggagaatgtcctgtccaatgcggaaaagaaagcaagggaactcaaaattgaagcggagaaaataaactacgatgcgttgaccggtatttacagcaggcggtattttgatgaaagtatgaagcgaattataaattctttatcccgatcagacagtttagtaagcctgctgatgatcgacattgacttttttaagcggtacaacgatacttacggtcatatcgaaggcgataaatgcctcaaaattgtcgcgcaaactctttcccagagtataacaagggcagatgactttgtagcgaggtatggcggggaagaattcgtcgttgtcctgcccaataccaacgaacagggcgcgatgctggtcgctgaaaaactgcttaacaatattaggaaatgcaatataccgcatgaacaaaacgaggcggcggattgcgttactatttccatcggggccacgaccggtaaagcggtgcatacgcaaagtgcggatgattttgtaagaaaggctgacgaaatgttgtataaatccaagcaaggcggacgtaacaggtattcatttaccgtaaaaccagatgataaataa

SEQ ID NO: 56222 - protein, 288 aa, Unknown
  Obtained from environmental sample
  DOMAIN (113)...(278): GGDEF domain
  misc_feature (1)..(288): Xaa is any amino acid
MKTLPVTTALKRWLGAMMNDECVSLRCSEFTEDEAAFLSPRGVKSILIVPVFAERNLWGVTTFHDNAEERDFDDECIAMLRSTARLCVNMLQRTEMENVLSNAEKKARELKIEAEKINYDALTGIYSRRYFDESMKRIINSLSRSDSLVSLLMIDIDFFKRYNDTYGHIEGDKCLKIVAQTLSQSITRADDFVARYGGEEFVVVLPNTNEQGAMLVAEKLLNNIRKCNIPHEQNEAADCVTISIGATTGKAVHTQSADDFVRKADEMLYKSKQGGRNRYSFTVKPDDK

SEQ ID NO: 56223 - DNA, 1002 bp, Unknown
  Obtained from environmental sample
  misc_feature (1)..(1002): n is a, c, g, or t
ttgactcgtgtcgagggagttgaagctgttggcgccacaggggatcccctgccaggggaatggtaccgggttctgacagaagacggcattaccggctactgcttttcttaccggttaaagttattcgatcacactggaggctctcttgccgcaattgtgcaagaccagcaggagcctgaagatcccaacctggacaggcttttatcccgtacttggtctgctgattcctatgggaccatggtaagtacaggtaagattgatataaacgaactttcgcaccactggttttttgatcctgggcaggatacaggcattgctgtaatcaaaaccaaagatctggaacttagttttgaatatgtcaagattcgctcgacaggcacacaatcctggcgttttgaagggacgcctttgcagatgaacttgcgttctgataccacactggcggtacagttcaccggagaaaacggggtgctgagaaccctgctttttgtggccctgccctcttctgtcgacgatatcattttgcaagaaacagcccgccgggaagaacttttccgtgctatttacgagcatgggccgatatacagcagcagcaattacggcattcttaacttcagcgaagacggatatttcacctggagcggctattctcttttggttcctcaagtgatttctccgtcggctctgggaagcggcgttctggatatgcggctacatgtatccgatgttctgagcagtcgttatgacggggcgtttaccatgcgttttgacggaatcggcggcatcaggacaacaacggattttatttacgccattgatccgcagggccttagaatggaatacgtgccggaaacaagcctggatggagttactgttgtcaggcgggcttcttctcccgttgtggtttacttctttagaaacgacgttcaggacgacagctctcccctctttctgcaagactatcagggagaagacagcgattcggaattcctttttgagtag

SEQ ID NO: 56224 - protein, 333 aa, Unknown
  Obtained from environmental sample
  misc_feature (1)..(333): Xaa is any amino acid
MTRVEGVEAVGATGDPLPGEWYRVLTEDGITGYCFSYRLKLFDHTGGSLAAIVQDQQEPEDPNLDRLLSRTWSADSYGTMVSTGKIDINELSHHWFFDPGQDTGIAVIKTKDLELSFEYVKIRSTGTQSWRFEGTPLQMNLRSDTTLAVQFTGENGVLRTLLFVALPSSVDDIILQETARREELFRAIYEHGPIYSSSNYGILNFSEDGYFTWSGYSLLVPQVISPSALGSGVLDMRLHVSDVLSSRYDGAFTMRFDGIGGIRTTTDFIYAIDPQGLRMEYVPETSLDGVTVVRRASSPVVVYFFRNDVQDDSSPLFLQDYQGEDSDSEFLFE

SEQ ID NO: 56225 - DNA, 591 bp, Unknown
  Obtained from environmental sample
  misc_feature (1)..(591): n is a, c, g, or t
atggcctttgtccagttttccagggtctgccttgcttttggtgatcgtgacatactaaaagacgtaagtctcaatcttgcctccggttcccgtgcggctctggcgggggccaacggggcgggcaaatctactttaatgaaggtcatcgccggaaaactcccgtccgattcaggcgagcgttccgtgcaaaaaggctgccgcgtttcttacctgccgcagtctggcatagtgcaccggggcaaaaccttaagggaagaagccgaaaccgcctacgaaagcatcttgcttctcattgcgcgggttgaagaattgggcagggagcttgaaaaaaccacaggggactctggtcgtacacgcacgcttttggaagagcatcaccgcttattgaacgaagttgaaaattcaggctattaccgccgtgacgcggtaatagcccaggttctttcagggctgggattttccgaaagcgatgcggagagggaaaccggcgagttttcaggcggctggcagatgcgcatcgccctggcaaaaattctctgggnaatcccgacatcatgcttttggacgagccgaccaactacctggacatag

SEQ ID NO: 56226 - protein, 196 aa, Unknown
  Obtained from environmental sample
  DOMAIN (29)...(196): ABC transporter
  misc_feature (1)..(196): Xaa is any amino acid
MAFVQFSRVCLAFGDRDILKDVSLNLASGSRAALAGANGAGKSTLMKVIAGKLPSDSGERSVQKGCRVSYLPQSGIVHRGKTLREEAETAYESILLLIARVEELGRELEKTTGDSGRTRTLLEEHHRLLNEVENSGYYRRDAVIAQVLSGLGFSESDAERETGEFSGGWQMRIALAKILWXIPTSCFWTSRPTTWT

SEQ ID NO: 56227 - DNA, 1479 bp, Unknown
  Obtained from environmental sample
  misc_feature (1)..(1479): n is a, c, g, or t
atgcttttggacgagccgaccaactacctggacatagaagcccgcgcctggcttgaaaactggctggctaaatttccgggcggctgtctgctggtttcccacgaccgctacttccttgatgttaccgtcaacgaggtctacgaaattttccagggcaatcttaaacgctacgcgggcaactacagcgcttatgaaaaaacgcggcagctggaactcgccgctgttatgaaacggtatacggaacagcaggaggaaatcgccaaaaccgaggcgttgatccgccgcttccgttacaaagcaaccaaggcggcctttgcgcaagagcttatcaaacggctggaaaagatggagcgtatagaaatccccgaaaacctgaaaaagataaacataacttttccgccgccgccccattcgccgcgggtcgcgctgaccattgaaggccttggcaagagctacggcacaaagagggtgcttggcggactggatctgaccattgattccggcgaacggctggtagtcgcgggtcctaacggagcgggcaagacgaccctgctgcgaatactttccggcaatgacactgattttgaaggctctgtaaaattcggctcaggtattagcgccggctatttttcgcaggatgccgccgaggcgttgaacggaagcgaacaggtgcttgagttcatggaagcccaggcccccacggcgctaatccccaaaatacgcgatatgcttggggcgtttctctttcgcggcgacgatgtatacaagcctgtctcggtgctttccggcggggaaaaaagccgcctcgccctgctgcatatgctccttaagcccctgaacctcctgattctggatgagccaaccaaccacctcgacctccattcaaaggacgtactgctggaaactttaaatcaattcaaaggaacgataattttcgtctcccacgaccgcgccttcatggaagccctgtccaccaagacactggagctttctcccggtgaaggcgcttcgtcgtcccgaacgaggcttttttatgggaattacgggtactatctggagaagatagggaatggggagtggggagtagggagtggggttctgggttcgggaactggggtaaaacaaaaaagcgatgagcagaacagggaactgggaacggggaacagcggaagaggcgataacaaaaccagtggtagtaacggcaacgatattcaaaaaagcgcgatggaacagagggcgcagaacaagcaacgtcaggcggagatacggcggctccagcggcaggaagccgagttgctcaacgccattgacgggcttgaaaacgaaaaatcccgattggaagcggaactgtcccttccggcggtttattcaaacggggaaaaggcacgggccgttaaacaaaaactggacgaatgtaccgccgcgcttaaagccaagacggctgaatgggaggcagtggcggcgttaattacaatgtaa

SEQ ID NO: 56228 - protein, 492 aa, Unknown
  Obtained from environmental sample
  DOMAIN (168)...(333): ABC transporter
  misc_feature (1)..(492): Xaa is any amino acid
MLLDEPTNYLDIEARAWLENWLAKFPGGCLLVSHDRYFLDVTVNEVYEIFQGNLKRYAGNYSAYEKTRQLELAAVMKRYTEQQEEIAKTEALIRRFRYKATKAAFAQELIKRLEKMERIEIPENLKKINITFPPPPHSPRVALTIEGLGKSYGTKRVLGGLDLTIDSGERLVVAGPNGAGKTTLLRILSGNDTDFEGSVKFGSGISAGYFSQDAAEALNGSEQVLEFMEAQAPTALIPKIRDMLGAFLFRGDDVYKPVSVLSGGEKSRLALLHMLLKPLNLLILDEPTNHLDLHSKDVLLETLNQFKGTIIFVSHDRAFMEALSTKTLELSPGEGASSSRTRLFYGNYGYYLEKIGNGEWGVGSGVLGSGTGVKQKSDEQNRELGTGNSGRGDNKTSGSNGNDIQKSAMEQRAQNKQRQAEIRRLQRQEAELLNAIDGLENEKSRLEAELSLPAVYSNGEKARAVKQKLDECTAALKAKTAEWEAVAALITM

SEQ ID NO: 56229 - DNA, 1353 bp, Unknown
  Obtained from environmental sample
  misc_feature (1)..(1353): n is a, c, g, or t
atgttcccaatatatagtaagcgcagattttttgcgaaacttgtatataaatttttctcaaatccaatagaatttctttttaaaatgacgccaaaaagaataggattatttttccatgtgttaaaaacagaaggaaccgccggagcttcaaggcgtgtaaataaacacatggaagataaaaaattaccggaatattctcaggaaataaaattaatatcagataatgaaaatcaaacaaatatcaatgattataaattaattgaatttaaaaaagaaagtaacctcgttgtttccattattattcctgtttataatcaatttaattatacatataactgcttaaaatcaataatagaaaattccggtgataaagttaattatgaaattattatagcaaatgactgttcaacagaccttacaactcagatagaaaaagtagttaaaaatataaatgttattactacaacagaaaatataaggtttttaaaaaattgtaataatgcggcaaaatatgcaaaaggaaaatatattctgtttttaaataatgatactcaagtacaagaaaattggttgttgccattagttgaattaattgaaaaggatgaaaaaataggagcggttggttcaaaacttgtatatgagaatggaatgcttcaggaagcaggcggtatattctggaatgacgcttctgcttggaattacggtagaatgggtgatccggctttaccggaatttaattatgtaaaagaagttgattatatatccggcgcggctttaatgataaaaaagtcaatctgggataaactcggtggttttgatgagagctttgttcctgcatattatgaagacgctgatatttgtttttcaataagaaagatgggctataaagttatgtatcaacccgcctctgttgtggttcattttgaaggaatatcaaacggaactgatatttcggagggacaaaaacgatatcaagttataaaccaaaaaaagtttttagagaaatggaaaaccattcttgaaaatgaaaactttccgaatggggaaaatgttttctatgcaagagatcggagtagaaacaaaaaaacaattcttttcgtagaccattatgttcctatgtacgataaagatgctggttcaagagcaatttttcattatgttaatttatttgttgattatggatacaatgtaaaatttatcggtgataatttttataaacatgaaccgtatactacagttttaaatcacttggcgtggaagtattatatggaagttattattttaatattgggcatcatggataaacaaatagtagtatataatctggctattctaacagacgcaaatgcttga

SEQ ID NO: 56230 - protein, 450 aa, Unknown
  Obtained from environmental sample
  DOMAIN (98)...(269): Glycosyl transferase family 2
  misc_feature (1)..(450): Xaa is any amino acid
MFPIYSKRRFFAKLVYKFFSNPIEFLFKMTPKRIGLFFHVLKTEGTAGASRRVNKHMEDKKLPEYSQEIKLISDNENQTNINDYKLIEFKKESNLVVSIIIPVYNQFNYTYNCLKSIIENSGDKVNYEIIIANDCSTDLTTQIEKVVKNINVITTTENIRFLKNCNNAAKYAKGKYILFLNNDTQVQENWLLPLVELIEKDEKIGAVGSKLVYENGMLQEAGGIFWNDASAWNYGRMGDPALPEFNYVKEVDYISGAALMIKKSIWDKLGGFDESFVPAYYEDADICFSIRKMGYKVMYQPASVVVHFEGISNGTDISEGQKRYQVINQKKFLEKWKTILENENFPNGENVFYARDRSRNKKTILFVDHYVPMYDKDAGSRAIFHYVNLFVDYGYNVKFIGDNFYKHEPYTTVLNHLAWKYYMEVIILILGIMDKQIVVYNLAILTDANA

SEQ ID NO: 56231 - DNA, 918 bp, Unknown
  Obtained from environmental sample
  misc_feature (1)..(918): n is a, c, g, or t
ttggttgaatccgctgacaaagacgcttttgaaggctttgatcccttaagcggggtaggtcaggataaagcgtccggcgaggccgcaggggataatcttgatacccttgatgacatcgatgatttctctttccctgatttggacaatgctcttggcgaatcgccgaaagataaaaaagccccgtccggtaaggccggtaaagccggcaggagaaaggacaggcaaaaaggcgaaataccgatccccgaagatgaaaaagatatagagcttaacgacagcgagcttggttatttacaggaaactctggccggatatccgcttaatctccgcatcgcctgcgaggaaataatcgctgaacaggatgttcgtccggaacagatggtaaggctgataaggaatcttatccggggcgctccagcgagggaaaccgcgcaactggccagcgaaatactggataggccgattaccataccaagaggctttgaaaaaagctcggtcgaggcgctggaagccgagaaagcgacttttgcctatatctttatccacaatttccttcccgtgctgcggcttgttttgataataggaactgtggcggcctgtgctttcttccttacctataaatttgtgtatattccccttaaagcggaatccatttataaaatgggttatgagctgataccgaaaggcgaataccagcgcgccaatgaacgttttagtgaagcttttaacacacaccgcaagaaagactggttttttaaatacgccgacgctttcaccaaagaacggcagtatatctatgcggaacagaaatacgatgagctattgcgttattatccccgcgacaaactcggagttctggcttacgcccactggaaacgaaatacctgcggaattatgccaaggcggacagccttttaa

SEQ ID NO: 56232 - protein, 305 aa, Unknown
  Obtained from environmental sample
  misc_feature (1)..(305): Xaa is any amino acid
MVESADKDAFEGFDPLSGVGQDKASGEAAGDNLDTLDDIDDFSFPDLDNALGESPKDKKAPSGKAGKAGRRKDRQKGEIPIPEDEKDIELNDSELGYLQETLAGYPLNLRIACEEIIAEQDVRPEQMVRLIRNLIRGAPARETAQLASEILDRPITIPRGFEKSSVEALEAEKATFAYIFIHNFLPVLRLVLIIGTVAACAFFLTYKFVYIPLKAESIYKMGYELIPKGEYQRANERFSEAFNTHRKKDWFFKYADAFTKERQYIYAEQKYDELLRYYPRDKLGVLAYAHWKRNTCGIMPRRTAF

SEQ ID NO: 56233 - DNA, 462 bp, Unknown
  Obtained from environmental sample
  misc_feature (1)..(462): n is a, c, g, or t
ttggcgaggataatgcccaatacgccggccttaatctctaaaggcatgatcgcccttgccgtatcacccgaagtctccggcgaaaaagccgacgccctggaggcaatgctcaagggagctggcagtgttgacagggtttctgaaaattattttaacgccattaccggcctttccggttccggccccgcgttcgcgttcctgttcattgaggccctcgccgacgggggagttttagccggtctgccccgcgacaaggccctgtgttacgcggcccagaccgtgctgggttcggcggcgatggttatggaaaccggcaaacatcccggcgaactgaaagacatggtcgcctctcccggcggcactaccatcgccggagtcgccgcgcttgagtcaagcagtttccgggccgcggcgatacaggctgttgaagccgcgtggaagcgggcaatggaattgagttaa

SEQ ID NO: 56234 - protein, 153 aa, Unknown
  Obtained from environmental sample
  DOMAIN (1)...(137): NADP oxidoreductase coenzyme F420-dependent
  misc_feature (1)..(153): Xaa is any amino acid
MARIMPNTPALISKGMIALAVSPEVSGEKADALEAMLKGAGSVDRVSENYFNAITGLSGSGPAFAFLFIEALADGGVLAGLPRDKALCYAAQTVLGSAAMVMETGKHPGELKDMVASPGGTTIAGVAALESSSFRAAAIQAVEAAWKRAMELS

SEQ ID NO: 56235 - DNA, 744 bp, Unknown
  Obtained from environmental sample
  misc_feature (1)..(744): n is a, c, g, or t
ttgcagcaagggatcaaactgtacgatgacgcaattcaacggcggctgctgtccccctcgccccaatacggaagattctacgcggggcttggcgacctggagtattttgtaaagacaggggatatggaagccgccctgcgctattataacatggcgcagcagaacggatgggcgcctcctgatatgcaataccgcatgggcgccgcttattatcagcttggcgactggcggaacgcgctggagaatttctttaccgcttcctcaaagctgccccagaaccgccgcatattgtttgcgcttggaaactcggcccttaaacgcggcgattattttgccgcccagggttatttcagccgcctgcttgacatgcttgaacgccatcgcacccgtctgcccttgctgctgcccaatgaccgccccgaatatctggatcttgccgaacgtctgatgatggcccgcaacaatgccggcgttgccaacgagatgctcgccgcccggaccggaagcagggcttatcattcacgcgcaatgtctttatactcggagtcgcagcgcgcctgggattcccttacacgcgatcccagttcaatggttcgttcagccagcacgtctctgccatacctcaatatgaggaacgttctttatccacggcaaggttatgagcctcagatgtatatgcgtatagatagggaagcctcggaatcctcacgctgggagcagcttgcgccctctttcaaagactaa

SEQ ID NO: 56236 - protein, 247 aa, Unknown
  Obtained from environmental sample
  DOMAIN (60)...(93): Tetratricopeptide repeat
  misc_feature (1)..(247): Xaa is any amino acid
MQQGIKLYDDAIQRRLLSPSPQYGRFYAGLGDLEYFVKTGDMEAALRYYNMAQQNGWAPPDMQYRMGAAYYQLGDWRNALENFFTASSKLPQNRRILFALGNSALKRGDYFAAQGYFSRLLDMLERHRTRLPLLLPNDRPEYLDLAERLMMARNNAGVANEMLAARTGSRAYHSRAMSLYSESQRAWDSLTRDPSSMVRSASTSLPYLNMRNVLYPRQGYEPQMYMRIDREASESSRWEQLAPSFKD

SEQ ID NO: 56237 - DNA, 900 bp, Unknown
  Obtained from environmental sample
  misc_feature (1)..(900): n is a, c, g, or t
ttggcgggctctgttttctaccttacctataaatttgtgtatatcccccttaaagcggaatctatttataaaatgggttatgagcggattccggaaggtgaataccagcgcgccaatgaacgttttgatcaagctttcgccatacaccgtaaaaaagactggttctttaaatacgccgacgctttcatcaaagaacggcagtatatatacgcggaacagaaatacgacaagctattgtattattatccccgtgacaaactcggagttctgtcttacgcccaactggaaacgaaatacctgcgaaattacgccaaggcggacgaactcttaagacatcaaattctggattataatccgaatgatcctgatgccctgcttgcccttggtgataacaaccttgcctggggagagattgattcttcaaaatatgaggatgcccgtttcgcgtatgcccgtctgcttgatatgttcggccaggtgccgtggatattggaacggatgatgaagtactttatcaggaccgacaacctaaaagaggtgcttccgatctggcaatggtttgacgctgatcccagaaaaagacccctgggggcggagacactttcggaactgggcggctaccttttggacaaacagcttgaggatgtccggngcgttcccaatgaatatgttcaatatattgagggtgtccgcgacatactgctgcgggcagtgcagcaggatccttccttgcctgaaccgcactatcatcttgccccgtattataaaaatcttggcaatgatcatgaggaaagggttaccctggagatcgcccttgaccgcttgaaaaagcggaggaaggcaatctgcgccgtcttactaaccgcattgacgcctaccagcgttatgctgacaatctga

SEQ ID NO: 56238 - protein, 299 aa, Unknown
  Obtained from environmental sample
  misc_feature (1)..(299): Xaa is any amino acid
MAGSVFYLTYKFVYIPLKAESIYKMGYERIPEGEYQRANERFDQAFAIHRKKDWFFKYADAFIKERQYIYAEQKYDKLLYYYPRDKLGVLSYAQLETKYLRNYAKADELLRHQILDYNPNDPDALLALGDNNLAWGEIDSSKYEDARFAYARLLDMFGQVPWILERMMKYFIRTDNLKEVLPIWQWFDADPRKRPLGAETLSELGGYLLDKQLEDVRXVPNEYVQYIEGVRDILLRAVQQDPSLPEPHYHLAPYYKNLGNDHEERVTLEIALDRLKKRRKAICAVLLTALTPTSVMLTI

SEQ ID NO: 56239 - DNA, 519 bp, Unknown
  Obtained from environmental sample
  misc_feature (1)..(519): n is a, c, g, or t
atgggttacattgttttcgcgcgtaagtggcgccccaaaacgttcggcgacatgatcggccaagagcatatcgtcgatacgttgcgccgcgccatagagaaggacagggtcgcccacgcctacgtgttcaccggaacgcgcggggtgggcaagactaccgccgcccgcatactcgcccgcgccctgaactgcgaaaagggccccacccctacgccgtgcggcgagtgcccggcctgcaaagacatcctgaacaattccagcttggacgtgatggagatcgacggcgcctcaaacaacggcgtggacgacatccgcgaattgcgcgaaaacatcgggtacacctcgatgggcggacgctaccgcgtggtggtgatagacgaggtccacatgctaaccaagagcgccttcaacgccctgctcaaaacccttgaggagccgccgcagaacgtgatcttcatcctcgccaccacggagcatacgaagatcccgtccacgatccactcccgctgccagcaatag

SEQ ID NO: 56240 - protein, 172 aa, Unknown
  Obtained from environmental sample
  misc_feature (1)..(172): Xaa is any amino acid
MGYIVFARKWRPKTFGDMIGQEHIVDTLRRAIEKDRVAHAYVFTGTRGVGKTTAARILARALNCEKGPTPTPCGECPACKDILNNSSLDVMEIDGASNNGVDDIRELRENIGYTSMGGRYRVVVIDEVHMLTKSAFNALLKTLEEPPQNVIFILATTEHTKIPSTIHSRCQQ

SEQ ID NO: 56241 - DNA, 1251 bp, Unknown
  Obtained from environmental sample
  misc_feature (1)..(1251): n is a, c, g, or t
gtgatgggtactacggttttatttaagcctacggcggtacagcgcaaagccctgtcacttttgaaaagcggggcaaaacatattttgcttttcggcggctcccgttcagggaaaactacggtactggttatggcgattatttaccgggctttgcggtttgccggctcaaggcatttggtttgccgctatagggctaaagacgctcgctcgtctgtcatgcgggaaaccctgttgccgtggctcgataatactgtcgggaaggacggctacacataccttgcccatgaaagcatgataacgctttttaacggctcggaaatctggattggcggcctgggcgatagggagcaggcggacaagatactcggacacgaatacagcacaatttattttaatgagattagccagctttcctatgccgccgttacgactgcttactcgcgattggcaatgcgtgttaaaggttgccgtaaccttttttactatgactgcaatccgggcagccccttgcattgggcttacaaagtatttgttttgaaacgccaatttcttactggcgaaccgctggaaaaatcggaactgtatcaatccatgctgctcaatccggaggataacagggaaaacttgccggaagattatatagccgacattcttgatgttcttcctgaaaaacaaaaggcaaggtttagggatggcttgtgggttaaggccgagggcgttatctatgacaggtttgatgaaacgatgattgttaatgccgccaatttgccaaaagaatttgaccgatacgccgccgggcaggatttcggattgaacatcacgtttgttttgatgacctggctcggcgatgtgatttacgtcctgggcgattatggcgcatataacatgactacccaaagctttaacgaggaagtaaccgcaaggggcttgatggattgccctgacgggtgctttccaggggaaagcttagggcttcctgtttattgcgatccggctggcggcgaaagaatccaggaaataaccgggggcgttaaagcaaataacagcgttgacagcggcatagattatataaacgcaaaaatagaacggcatcaatttttcgtttctgaaaagtgtaccggggtgctttcggagatttgggattactgtcgagatgaagctgggcagattgtaaaggtcaacgaccattttcttgacgctctgcggtatgcggtgttctcggatgttcagcagggggtaatactctcgtga

SEQ ID NO: 56242 - protein, 416 aa, Unknown
  Obtained from environmental sample
  DOMAIN (29)...(408): Terminase-like family
  misc_feature (1)..(416): Xaa is any amino acid
MMGTTVLFKPTAVQRKALSLLKSGAKHILLFGGSRSGKTTVLVMAIIYRALRFAGSRHLVCRYRAKDARSSVMRETLLPWLDNTVGKDGYTYLAHESMITLFNGSEIWIGGLGDREQADKILGHEYSTIYFNEISQLSYAAVTTAYSRLAMRVKGCRNLFYYDCNPGSPLHWAYKVFVLKRQFLTGEPLEKSELYQSMLLNPEDNRENLPEDYIADILDVLPEKQKARFRDGLWVKAEGVIYDRFDETMIVNAANLPKEFDRYAAGQDFGLNITFVLMTWLGDVIYVLGDYGAYNMTTQSFNEEVTARGLMDCPDGCFPGESLGLPVYCDPAGGERIQEITGGVKANNSVDSGIDYINAKIERHQFFVSEKCTGVLSEIWDYCRDEAGQIVKVNDHFLDALRYAVFSDVQQGVILS

SEQ ID NO: 56243 - DNA, 1095 bp, Unknown
  Obtained from environmental sample
  misc_feature (1)..(1095): n is a, c, g, or t
gtgcggtcgaggatctccggtgtttcatccgcggaagtagatcgcgttattggctgcgccatagaccacggtgttaacatcctggactgctgtatgcccggccttgaagtgcagaagaatatcaaccaggcgttgcggggcaaacgcgataagatgatcatccaggggcatatcggttcaagcgctacaagcggccaatatgacgttagccgggacatcggcacttgcaggaaaaacttcgaaaatctactaaaggggctttctactgattatatagatttcggtatgtttttctttgtcgataccgacaaggacttttccctttgttttgaggacgaactgttgcaatatgtgcttggcctgaaagaacggggcgcaatccgcgccataggcgcaagctgccacaacagcgaaatagcggggcgcatcgccgaaaccggaatagtggaccttattatgttcagtgtgaatcctgtttttgatatgactccggttaactccgatatttatgaaatccttgataatgccaaacttaaagagaattacacccttgccattgatcctgaacgcctgcgcttttaccggatctgcgaacagcggcaggtttccataacggttatgaaaaccctccttgcggggaaattgctttccgcggaattctcacccctgggcaaggccatgacagccagtcagtgcattcattacgcccttacccgtcccgctgtcgccagcgttcttttggggtgcaagagcgaagctgaatttaagcacgctctttactatcttgaagcaagcgaagctgaacgtgattatagcgggcatatcagggattttaagggagccttatgcggctgtctttactgcaatcactgccagccgtgcccgtcaaatattgacattgcggcagtgacccgctatgccgacattgccgaactaaacgccatgaatataccccctacggtattgcagcattataaagcccttgagcgccacggttcggactgtgtttcctgtacccaatgcgagagcagatgcccgtttggaataccggtaatcgggaatatgaaaaaagcggtaacgctttttggtgtataa

SEQ ID NO: 56244 - protein, 364 aa, Unknown
  Obtained from environmental sample
  DOMAIN (328)...(351): 4Fe-4S binding domain
  misc_feature (1)..(364): Xaa is any amino acid
MRSRISGVSSAEVDRVIGCAIDHGVNILDCCMPGLEVQKNINQALRGKRDKMIIQGHIGSSATSGQYDVSRDIGTCRKNFENLLKGLSTDYIDFGMFFFVDTDKDFSLCFEDELLQYVLGLKERGAIRAIGASCHNSEIAGRIAETGIVDLIMFSVNPVFDMTPVNSDIYEILDNAKLKENYTLAIDPERLRFYRICEQRQVSITVMKTLLAGKLLSAEFSPLGKAMTASQCIHYALTRPAVASVLLGCKSEAEFKHALYYLEASEAERDYSGHIRDFKGALCGCLYCNHCQPCPSNIDIAAVTRYADIAELNAMNIPPTVLQHYKALERHGSDCVSCTQCESRCPFGIPVIGNMKKAVTLFGV

SEQ ID NO: 56245 - DNA, 1392 bp, Unknown
  Obtained from environmental sample
  misc_feature (1)..(1392): n is a, c, g, or t
atgacggatgaattcacaaggaatctctgctttaggcgcggttgtttaaaacctacggcgataacgccgcaggcgatacgcggtctttttgaggaagctaacgcctcaaacaactgcgccggcatcatcacatggatgcatacattctctccttcaaaaatgtggatacaggggcttgcgcttaaccgcaaaccgcttcttcatctccatacgcaatttaaccgggatatcccatggtcttcaattgacatggattttatgaacctgaaccagtcggcgcacggcgaccgcgagcacgggtatattcatacaaggatgaagctgccccgtaaagtagtcgccggtttctggcaggataaggaacttcgccgccgcatggacgtgtggatgcgcgccgcagccgcgagaaaagacggaatggattccaccgttatgcgatttggagacaatatgcgggaagtggctgtaaccgaaggcgacaaagtcgaggcacaaatcaagttcggctggcaggtgaatacatggggcataggcgaccttgccgcccgttacgcgaaaatcgacgatacatgggcggaaaaactggtggaagaatacgccgcaaaatacgagcttgcgcctgaacttaaacaggcaggcaaagccagaagcgcgatgcttgaacaggcaaaaatagaaatcgcccttaaagaaatgcttgaaacagaacacgcgggagcttttaccactaccttccaggacctccacggactgccgcaattgcctggtcttgcctgccagcggctcatggaacagggttacggcttcggcgcggaaggggactggaaacaatccatgctgacccgctccgccaaagtcatggcttcggggctgcccggcggcgtttcctttatggaagattacacctaccactttgaacccggtaaagaagcggctttgggcgcccacatgcttgaggtatgcccttccatcgcggacggcaaagcgcgtatcgaagttcatccgctgggaataggcggcaaggcggatccggcccgcatggtgtttgacgccgcccccggccccgcggtgctggcgacgcttattgatcttggcagccgtttcagaatgattgttaatgaaattgaaactgtcaagatcgataacgcaatgccgaaactgccggttgcccgcgccctctggaagccgtatcccagcctgagcggcgccgccgaagcctggataatatcaggcggcacgcaccattcggtatacagcgccgcgcttacagcggagtatttccgcgattgggctgagatgagcggcattgagtttgtgctaatcgaccgtgatacaaaaccggcgcgtttgcaggatgagctgcgccgaaacgacgcctggtggtcgcgataa

SEQ ID NO: 56246 - protein, 463 aa, Unknown
  Obtained from environmental sample
  DOMAIN (1)...(463): L-arabinose isomerase
  misc_feature (1)..(463): Xaa is any amino acid
MTDEFTRNLCFRRGCLKPTAITPQAIRGLFEEANASNNCAGIITWMHTFSPSKMWIQGLALNRKPLLHLHTQFNRDIPWSSIDMDFMNLNQSAHGDREHGYIHTRMKLPRKVVAGFWQDKELRRRMDVWMRAAAARKDGMDSTVMRFGDNMREVAVTEGDKVEAQIKFGWQVNTWGIGDLAARYAKIDDTWAEKLVEEYAAKYELAPELKQAGKARSAMLEQAKIEIALKEMLETEHAGAFTTTFQDLHGLPQLPGLACQRLMEQGYGFGAEGDWKQSMLTRSAKVMASGLPGGVSFMEDYTYHFEPGKEAALGAHMLEVCPSIADGKARIEVHPLGIGGKADPARMVFDAAPGPAVLATLIDLGSRFRMIVNEIETVKIDNAMPKLPVARALWKPYPSLSGAAEAWIISGGTHHSVYSAALTAEYFRDWAEMSGIEFVLIDRDTKPARLQDELRRNDAWWSR

SEQ ID NO: 56247 - DNA, 501 bp, Unknown
  Obtained from environmental sample
  misc_feature (1)..(501): n is a, c, g, or t
atgcatgggggcgaagagtatctttggctgaacccggagctgatcaaattgagcttgcgcgtttcctcgccggggcttgatgtagaccttatcatcgggcatcatccgcatgttcttcagcgtacagaaacatttatccgccccaatggaaagaaaactttgtgcttttactccttgggtaattttgtttccaaccaaagagaaaaagaaagaatactgggcgcgctaatgctggtcacttttacaaaagaaggcttggtccttttgccatatgagctttctatttctaattacgcaatgatccctgttatctgccattttgaaagtaattataagaatataaaagtttatccgttatactcatatacgcaggaacttcttgataaacattttcttttacagtttgataaaacgatggatatgaattatttttattccgtattgacaagactggaaacaaaaatgatcatgcacgatccgttccctgtcagtaatcaatga

SEQ ID NO: 56248 - protein, 166 aa, Unknown
  Obtained from environmental sample
  misc_feature (1)..(166): Xaa is any amino acid
MHGGEEYLWLNPELIKLSLRVSSPGLDVDLIIGHHPHVLQRTETFIRPNGKKTLCFYSLGNFVSNQREKERILGALMLVTFTKEGLVLLPYELSISNYAMIPVICHFESNYKNIKVYPLYSYTQELLDKHFLLQFDKTMDMNYFYSVLTRLETKMIMHDPFPVSNQ

SEQ ID NO: 56249 - DNA, 582 bp, Unknown
  Obtained from environmental sample
  misc_feature (1)..(582): n is a, c, g, or t
atgaggctggatacgtctacggggcttaccgcggctgaacttctggcgcgtcttcctgagagggaattggcggacttgctctacaacaacgccgatgagcgttattcccgccgcattgcctcgctgattgttaacgaaagacagaaatcgacaataacgacaacttcggctcttgccaacctggtagcaagagcggttccagcgtcttacaggcacggaccggtacacccggcgaccaagacattccaggctttaagaattgcgacaaacggagagctttcacggcttccgtcgatccttgaggcggcgttaaggcttatcgagccggggggacggctcggtataatcagtttccactccatagaagacaggattgtaaagaatttcctgcggactatgaataaagactgtatttgcccgccaaatgcgccgatctgtaaatgtgggggacaccgctcaatcaatatcctgacaaaaaagggtattacgcccggaaaggacgagattgagcggaatcctccttccagaagcgcaagattgcgcgtcgcggaaaaaatattagaaaggagcgataatgattaa

SEQ ID NO: 56250 - protein, 193 aa, Unknown
  Obtained from environmental sample
  DOMAIN (1)...(186): MraW methylase family
  misc_feature (1)..(193): Xaa is any amino acid
MRLDTSTGLTAAELLARLPERELADLLYNNADERYSRRIASLIVNERQKSTITTTSALANLVARAVPASYRHGPVHPATKTFQALRIATNGELSRLPSILEAALRLIEPGGRLGIISFHSIEDRIVKNFLRTMNKDCICPPNAPICKCGGHRSINILTKKGITPGKDEIERNPPSRSARLRVAEKILERSDND

SEQ ID NO: 56251 - DNA, 1062 bp, Unknown
  Obtained from environmental sample
  misc_feature (1)..(1062): n is a, c, g, or t
gtgatttccagcgaggttgatccttcctataaaggttattcccgcatgtatatacgcatgggggattcggcaagcgcccgaataccagccaaagtcattggctgggacaaggccatggatttagccatcataaagacagagattgttcccgaatacgtttattcagtggcggactggataatacccaatgtcggggaaaccatttacgccattggctcgccggtagggttggaaaaaacagtaacccagggaattgtatcagctttgggacgaaggcttgtacagattggagacgtcattcaaatagacgccgcggtaaacagggggaattccggtgggccggttgtggacatggcaggacggctggtcggcatagtttttgccgggattgaacagtaccagggactaaacttcgccgttcccgccgaaagactggcggcggctctgccggcaatgatcgcgggtggaaaagcggaaaggccctggcttggcctttcgctgtgtgaaagcatcgacggggctgaaattctctacgtggctccctttactcctgcggcggaacagcagatccgcgaaggttcaatcataaaggctataaacggggaaatggtcaaaacgccccagggagcgcttatcccggcactgcaagacataatcttccctttaagccccggagagctggtaactctggagcttgagcttccccaggggaaaactgtgaggcatataataaagcttgcaagccggcccgaagttcccatggcggacgccgctaaaaaggataccaaagaacgcattacagggcctcttttcggccttgtcctaaccacccagacaggaggcggtgctttttcaaaatacctggtgaaaaaagtagtccgcggttcgattgctgatgaagctggtctttccgaaagcgatcctgtggcaatccgcggctttaaggtctttgagaaagacggctatgccctgcttgacattgacgtgaaaaagcggcgcatgggttatattgaaaccagcatgcgcctacccgccttgctggatacccccgatacgctgtaa

SEQ ID NO: 56252 - protein, 353 aa, Unknown
  Obtained from environmental sample
  DOMAIN (3)...(149): Trypsin
  misc_feature (1)..(353): Xaa is any amino acid
MISSEVDPSYKGYSRMYIRMGDSASARIPAKVIGWDKAMDLAIIKTEIVPEYVYSVADWIIPNVGETIYAIGSPVGLEKTVTQGIVSALGRRLVQIGDVIQIDAAVNRGNSGGPVVDMAGRLVGIVFAGIEQYQGLNFAVPAERLAAALPAMIAGGKAERPWLGLSLCESIDGAEILYVAPFTPAAEQQIREGSIIKAINGEMVKTPQGALIPALQDIIFPLSPGELVTLELELPQGKTVRHIIKLASRPEVPMADAAKKDTKERITGPLFGLVLTTQTGGGAFSKYLVKKVVRGSIADEAGLSESDPVAIRGFKVFEKDGYALLDIDVKKRRMGYIETSMRLPALLDTPDTL

SEQ ID NO: 56253 - DNA, 678 bp, Unknown
  Obtained from environmental sample
  misc_feature (1)..(678): n is a, c, g, or t
atgaaagattcaaaagacgatgctattgaaaatgaaggtaatttcacacccgaagccgccgcgtctgtctttaattcctgcattcgtttttgcgacgtgataattaccggaaaagaagccgcaatcggccttaaatacgacgaagaaaatatgtttgccccgatggttgtttttcttgaaaaaggcgcttcggcggacgcccttgtctgggtggcgggaaatcttggcgttccggtaataaaaaatatcgctttggcgaagaaccttgcttcccactgcaaagccggggacgcgatcacggaagctacatacagggatgtttccctggcccttgttaaactggattcaaacaagtttcaaaggaagtcgcctgcgtccggaaatggacgccagggcctaccagtcaaaattccacgacccgtatcccttgaaatgggagaagcacttttctcattaaccggagaagagccaggcagggacaagctccttgctcagccgttaaatgcaatacgaaaaagattaatccggcttttgggtatttccctcccggccctccgaatttcaaaaagcgataaactcaaagatgatgagtacagaattctcttcaaggggcttgaagccggcaggggcaggctggaacttgttggtaccaaaaagcacgctttgtacatactgtga

SEQ ID NO: 56254 - protein, 225 aa, Unknown
  Obtained from environmental sample
  misc_feature (1)..(225): Xaa is any amino acid
MKDSKDDAIENEGNFTPEAAASVFNSCIRFCDVIITGKEAAIGLKYDEENMFAPMVVFLEKGASADALVWVAGNLGVPVIKNIALAKNLASHCKAGDAITEATYRDVSLALVKLDSNKFQRKSPASGNGRQGLPVKIPRPVSLEMGEALFSLTGEEPGRDKLLAQPLNAIRKRLIRLLGISLPALRISKSDKLKDDEYRILFKGLEAGRGRLELVGTKKHALYIL

SEQ ID NO: 56255 - DNA, 438 bp, Unknown
  Obtained from environmental sample
  misc_feature (1)..(438): n is a, c, g, or t
atgatgaatttaggtttattaggtccgggtcttgtaatgggcatcgcggctgtcggatcagccatcggtattggttttgccggttcggctacaataggcgcttggaaaaagtgttatatagccaataaacaggctcccatgatgctgctggcttttgccggtgcgcctttaacacagactttttacggttttatccttatgggtcagatggcgactgccgctcaggctgcgactgaaaacgcatggctttatatcggttacggtgtcgcttccggtctcgctatggcgttttccgccattgtacagggcaaagtaggcgccgccgccgccgatgcccaaggtgaaacaggcaaaggttttgcccagtacatcgcagtagtaggtatcgccgagacaatcgcccttttcgcgatggtcttaacgatgatcagcctgtag

SEQ ID NO: 56256 - protein, 145 aa, Unknown
  Obtained from environmental sample
  SIGNAL (1)...(27)
  misc_feature (1)..(145): Xaa is any amino acid
MMNLGLLGPGLVMGIAAVGSAIGIGFAGSATIGAWKKCYIANKQAPMMLLAFAGAPLTQTFYGFILMGQMATAAQAATENAWLYIGYGVASGLAMAFSAIVQGKVGAAAADAQGETGKGFAQYIAVVGIAETIALFAMVLTMISL

SEQ ID NO: 56257 - DNA, 1056 bp, Unknown
  Obtained from environmental sample
  misc_feature (1)..(1056): n is a, c, g, or t
atgccggggacaacagcgggagcaacaggaacgggcatacagagaaagacagtactgcttgagaatcaaagtgcgacaatagacgttccacgtgaccggaacggaacatttgaacccgtaataattccaaagcatgaaaagcgtgtcccgctgttcaacgatcaaattatttcgatgtattcatttggaatgactgatcgtgatataaaggcacatctggaaaaaatatacaacgtagaagtatcgccggatctgataagccgtgtaacaaatgcggtgttggaagaagtaaaggaatggcagaatcggcctttagaaaaatcatatgcgattgtgtatttggacgctcttagggttaaaggcaaggaagacggaaaaagctgcttaaagagcgtttataccgcccttgcggtcaattttgaagggaaaaaagaagtattagggttatggatagcggaaaacgagggggctaaattctggatgggcgtattaaccgaacttaaaaaccgcggcgttcaggacatactcatcgcttgcatggacgggcttacgggtttccccgaggcggtgcggtcaatatatcctaacacccgagtccagctttgcattgtccacatggtacgcaattcgacaaagtttgtatcttataaagacctgaaaaaagtatgcgccgatttgaaaacaatctatacagctaacagcgaggaagccggacatgatgctttggaagatttcggcaagaaatggaatgacaaatatccgatgatatataaatcatgggagcagcactggggggacttaaacgaattttttaagtacccgcctgaaattcgccgggctatttatacaactaacgccattgagtcaatgaattaccagcttcgtaaagttactaaaaaccgctcgtcattttcaacagacgatgctataattaagctactgtatttggcgatcaggaatgcttcagaaaagtggactatgccgataagggcatgggggcaggctcttaaccagtttgccattgaattcgggaaagaacgagtttcgttcttatga

SEQ ID NO: 56258 - protein, 351 aa, Unknown
  Obtained from environmental sample
  DOMAIN (1)...(328): Transposase, Mutator family
  misc_feature (1)..(351): Xaa is any amino acid
MPGTTAGATGTGIQRKTVLLENQSATIDVPRDRNGTFEPVIIPKHEKRVPLFNDQIISMYSFGMTDRDIKAHLEKIYNVEVSPDLISRVTNAVLEEVKEWQNRPLEKSYAIVYLDALRVKGKEDGKSCLKSVYTALAVNFEGKKEVLGLWIAENEGAKFWMGVLTELKNRGVQDILIACMDGLTGFPEAVRSIYPNTRVQLCIVHMVRNSTKFVSYKDLKKVCADLKTIYTANSEEAGHDALEDFGKKWNDKYPMIYKSWEQHWGDLNEFFKYPPEIRRAIYTTNAIESMNYQLRKVTKNRSSFSTDDAIIKLLYLAIRNASEKWTMPIRAWGQALNQFAIEFGKERVSFL

SEQ ID NO: 56259 - DNA, 1665 bp, Unknown
  Obtained from environmental sample
  misc_feature (1)..(1665): n is a, c, g, or t
atggccgagcggccgagcggcacgagcggccgaggcccagtggacagcgccggaaaggtaaccattctggcagttggttccaccgtcatttccgccgagaaagcggctgacgcaatttacgcccacgcccgaacaacttacacgctgacggttaatcacaagcccggttcggcagaaaaccccttcctcgttaccaacgaagccgatctccgcaaggtcggaacaggcgctgacggctggacgctttcggcgcactacaggcagatagcgaacatcaccatgacgggaggcaacttcacgacgattggcgataacaccaacagattcacaggcgtgtatgacgggggcgagtataccatcaccggcttgaccgtaaccgccacgacctataatcaaggtttattcggcgttatcggcgcagacagcacggtgaaaaacgtgaaccttagcggcacgataacccaaaccggagacaataatggtgtgggaaccggcggcattgcgggcttaaactatggcacggttgacaactgcgtctttagcggaaccgtcagcggattaaccagtaatcaggttggcggcattgtcggaagtaatcaaagcacgggcacggtaaaaaacagcggaaacaacgcaacggtaaacggcagaaataataccggcggtgttgtggggttgaatcaaggcggcactgtcgaaaactgttacaacaccggagacgttatcggcgtcagtacggtcggcggtattaccaataacagcagcggcggcacggtgataaacagcagaaacaccgcaacggtaaccggcaatactaatgtcggcggcattgcgggaataaatcaggcgaagattgacaactgttacaacacgggagccattaacgccgccgaacaagccggcggtatcgcaggaggtaataccggaagcggtgtttatataaagaactcttataacacgggcaatgttaccagctccgatagctccaccagcgccggaggcattgccgcagtgaaccaatcaggcgcaacggtagaatactgctacaataccggcaacgtttcgggaaccggcggggtcggcggcatagtgggatacaccaacaccggaagcgccattcaaaactgcgtatcgctcggcgcaagggtaacaggcaacggtactggtaacggtcgcatagccggaactaacagcagtactatcaccggcaacttagcccgtatagatatgaaagtcggcataagcggctcagaggcgttagtaactacaggagcggcaggaaataatgcaggcgcaaatgtcagtttggggactgcgctgtcctctgttttcaacacaaactggctctccacgctttggactatacctacaggcaatttgacaataaacggcaatttgcccacgctcaaaacaaatacgcaaagccccgctcccacgcttccggcggagtacacggtactcggcacggcggataatcccttcctcgttaccaacgaagccgatctccgcaaagtcggaacaggcactgacggctggacgctttcggcgcactacaaacagacacaggacatcgccatgacgggcggcaactttacgaggattggcaatagcaccaccaaattcacaggcgtgtatgacgggaacgaaaaaaccatcaccggttga

SEQ ID NO: 56260 - protein, 554 aa, Unknown
  Obtained from environmental sample
  DOMAIN (270)...(295): The GLUG motif
  misc_feature (1)..(554): Xaa is any amino acid
MAERPSGTSGRGPVDSAGKVTILAVGSTVISAEKAADAIYAHARTTYTLTVNHKPGSAENPFLVTNEADLRKVGTGADGWTLSAHYRQIANITMTGGNFTTIGDNTNRFTGVYDGGEYTITGLTVTATTYNQGLFGVIGADSTVKNVNLSGTITQTGDNNGVGTGGIAGLNYGTVDNCVFSGTVSGLTSNQVGGIVGSNQSTGTVKNSGNNATVNGRNNTGGVVGLNQGGTVENCYNTGDVIGVSTVGGITNNSSGGTVINSRNTATVTGNTNVGGIAGINQAKIDNCYNTGAINAAEQAGGIAGGNTGSGVYIKNSYNTGNVTSSDSSTSAGGIAAVNQSGATVEYCYNTGNVSGTGGVGGIVGYTNTGSAIQNCVSLGARVTGNGTGNGRIAGTNSSTITGNLARIDMKVGISGSEALVTTGAAGNNAGANVSLGTALSSVFNTNWLSTLWTIPTGNLTINGNLPTLKTNTQSPAPTLPAEYTVLGTADNPFLVTNEADLRKVGTGTDGWTLSAHYKQTQDIAMTGGNFTRIGNSTTKFTGVYDGNEKTITG

SEQ ID NO: 56261 - DNA, 1029 bp, Unknown
  Obtained from environmental sample
  misc_feature (1)..(1029): n is a, c, g, or t
gtggtggtattggacgcctgcaggaacaaccctttcaggaacatgccggcaagaaaccgcagtctttcaaggggcttaagcgttattcacaatttaccgccggatttgtttatcatatattccacgaccgcgggcgatgtcgccgcggacggggccgccgggaaacgcaacagcccgtttaccgaggcgttcatccgcaacatggaaagcaacgaggacttgagcatagtagtcaggaacatcacccgcgagaccttgcggatgacggataacaaacagcgcccgtatcaggaagggagcattatcagcctggattattattcgttaaacccccgcaaagggaatactaacactaacaacaataccaacaataccaatgccaataccccgactgtgcagaaggaagacgcagaggtttattacaaacggggcgaagaatttagaaacgcccgtgaatgggacaaggcgattgccgagtatacccgcgcgataagcattaatccgaattatatgcttgcgtactggaatcggggttggacttatgaacaaaaaagggaatgggatcaggcgttggcggattatactgcggccctcagattaaatcccaatgaagccagattggttgtgggtattggtgtttattactctcaaacaggagatcgagatcgtgcgatagctcagtataatgaagctatcagaatgaagccggattatgctcgggcatattataatcgtggtgaagcctataggatgaagggcgattacgataaagcgattgccgattgcgataccgcaatcaggcttgatcccaaactacattttgcttatggggtacgcggagaggcatatcgcttgaagggaaactatacaaaggcattaagcgatttaaacgaagctatcagattagaccctaactgggcatgggcatacgatgtacgcgccacgatttacaaagatcagggcaaaaacagtttggctaacgccgatacccgcacgtataacagattaagagcggcagggtactggtag

SEQ ID NO: 56262 - protein, 342 aa, Unknown
  Obtained from environmental sample
  DOMAIN (205)...(238): Tetratricopeptide repeat
  misc_feature (1)..(342): Xaa is any amino acid
MVVLDACRNNPFRNMPARNRSLSRGLSVIHNLPPDLFIIYSTTAGDVAADGAAGKRNSPFTEAFIRNMESNEDLSIVVRNITRETLRMTDNKQRPYQEGSIISLDYYSLNPRKGNTNTNNNTNNTNANTPTVQKEDAEVYYKRGEEFRNAREWDKAIAEYTRAISINPNYMLAYWNRGWTYEQKREWDQALADYTAALRLNPNEARLVVGIGVYYSQTGDRDRAIAQYNEAIRMKPDYARAYYNRGEAYRMKGDYDKAIADCDTAIRLDPKLHFAYGVRGEAYRLKGNYTKALSDLNEAIRLDPNWAWAYDVRATIYKDQGKNSLANADTRTYNRLRAAGYW

SEQ ID NO: 56263 - DNA, 1581 bp, Unknown
  Obtained from environmental sample
  misc_feature (1)..(1581): n is a, c, g, or t
ttgccaatagcaaattttattaaccaacaattaaaagcggaggtaccggacggaactttgcttgtctgtgcggcaagagcagccggagtcgccattgaaacgccctgcaacggcgccggaacctgcggcaaatgcagggtgcgccttgccgaaaaccaacaggacgtactggcctgccaaaccgcggtagagggcgatattgacatactctattgcgaaaagacggcggaaaaccgcaatgtccgcattctctcatcgggccatacctttgattacgcaataaagccttatattacaaagaaatttaacaagcggaaaacaaaaatattcggcggtaatactttactgggaaccgaagacggcgataccacagatcttatatacggcatcgcgttggacatcggaacaacaacgatggtcgcggagctttacaatctgacggacgggaagcttcttgccgctgaaagcatgctgaatcctcaaagcgcgttcggccaggacgtgttgtcgcgcatccatttcgcgggagaaaaaacagggcttaacaccctttatgaatcatttttaacagcgtttggaaccttgcgtgattcactcacgaacacggcgaaggttgacccaaagcgcatatatgaagttgtgttttccggcaataccgctatgctgcaccttgccacaaatacagacccctcgccgcttggcaaatatccctatctttcaaatataaagggaggggaaagtatacccgcaacggggcttggaatctcaaacttcggactggtttatctgccgccgattatttccgcgtttgtcggcgcggacataacgtcgggaatttttatatcaaagttgaaagagaagaaagggaaaactctttttattgacataggaacaaacggggaaattgtaatggcgaataacggtcgtcttgccgctacatccaccgctgctggtcccgcgtttgagggaatgaacatcgcgtgcggcatgcgcgcggctccgggcgcggtggaacaatttacgattgatgaaaacggcggctttagttttaaaactatcggcggcaataaagcaacaggcatttgcggaagcgggcttttggatattacgggagaacttgtaagaacaaaagtaattgaaaaaacaggcagattcgcgaagactaacccattactcaaagagcataacggcaaaccggcgttttttattacagacgatgtatttcttacattgcaagacgtgcgtcaggtgcagttagctaagggtgcgatacgttccggcattaccgcgctgttgaattcgttgggtatcggcgcggacgatattgacgaagcgttgatagccggctcctttgggtatcatctttcggaaagcagtctgctcaatataggactgcttcctcccgagctaaagggaaaaataaagttcttaggcaacacatcgcaatccggcgcggcggcttttttgctgaacgctgatttcagagaaaccattccgcaaataattgacggcgttgaaaaaatagaacttgccaacacgccgcgctttgacgaccttttcgtgcagtcgctgggattctga

SEQ ID NO: 56264 - protein, 526 aa, Unknown
  Obtained from environmental sample
  DOMAIN (5)...(65): 2Fe-2S iron-sulfur cluster binding domain
  misc_feature (1)..(526): Xaa is any amino acid
MPIANFINQQLKAEVPDGTLLVCAARAAGVAIETPCNGAGTCGKCRVRLAENQQDVLACQTAVEGDIDILYCEKTAENRNVRILSSGHTFDYAIKPYITKKFNKRKTKIFGGNTLLGTEDGDTTDLIYGIALDIGTTTMVAELYNLTDGKLLAAESMLNPQSAFGQDVLSRIHFAGEKTGLNTLYESFLTAFGTLRDSLTNTAKVDPKRIYEVVFSGNTAMLHLATNTDPSPLGKYPYLSNIKGGESIPATGLGISNFGLVYLPPIISAFVGADITSGIFISKLKEKKGKTLFIDIGTNGEIVMANNGRLAATSTAAGPAFEGMNIACGMRAAPGAVEQFTIDENGGFSFKTIGGNKATGICGSGLLDITGELVRTKVIEKTGRFAKTNPLLKEHNGKPAFFITDDVFLTLQDVRQVQLAKGAIRSGITALLNSLGIGADDIDEALIAGSFGYHLSESSLLNIGLLPPELKGKIKFLGNTSQSGAAAFLLNADFRETIPQIIDGVEKIELANTPRFDDLFVQSLGF

SEQ ID NO: 56265 - DNA, 498 bp, Unknown
  Obtained from environmental sample
  misc_feature (1)..(498): n is a, c, g, or t
ttgttgcttgtatatctcctcggcaattttgtacgatgcttgtttcaaggcctcggtcttttcctttatcgcctggaggtcgccgccttccagggccttgcggagatcggctatggcttcttcggtcttggccttgtccgcggcactgaccttgtcacccaggtctttgatgttcttatcagtgccgtagatcatagaatccgcctcgttgcggacttccgccttttcccgttctttctggtcttcctcggcgagcagttccgcttcttttaccatgcgctcaatgtcctgatcattaaggccgctggaactttcgatgcggatgttctgctctttgcccgtacccaggtcttttgcgctgacgtggacaatgccgtgagcgtcaatgtcaaagccgacctcgatttgggggacgccgcgcggcgcggggggaatgccaaccagatcaaaccggcccaacacgcggttctggcttgccatttcacgttcgccctgtaa

SEQ ID NO: 56266 - protein, 165 aa, Unknown
  Obtained from environmental sample
  misc_feature (1)..(165): Xaa is any amino acid
MLLVYLLGNFVRCLFQGLGLFLYRLEVAAFQGLAEIGYGFFGLGLVRGTDLVTQVFDVLISAVDHRIRLVADFRLFPFFLVFLGEQFRFFYHALNVLIIKAAGTFDADVLLFARTQVFCADVDNAVSVNVKADLDLGDAARRGGNANQIKPAQHAVLACHFTFAL

SEQ ID NO: 56267 - DNA, 624 bp, Unknown
  Obtained from environmental sample
  misc_feature (1)..(624): n is a, c, g, or t
atggcaagccagaaccgcgtgttgggccggtttgatctggttggcattccccccgcgccgcgcggcgtcccccaaatcgaggtcggctttgacattgacgctcacggcattgtccacgtcagcgcaaaagacctgggtacgggcaaagagcagaacatccgcatcgaaagttccagcggccttaatgatcaggacattgagcgcatggtaaaagaagcggaactgctcgccgaggaagaccagaaagaacgggaaaaggcggaagtccgcaacgaggcggattctatgatctacggcactgataagaacatcaaagacctgggtgacaaggtcagtgccgcggacaaggccaagaccgaagaagccatagccgatctccgcaaggccctggaaggcggcgacctccaggcgataaaggaaaagaccgaggccttgaaacaagcatcgtacaaaattgccgaggagatatacaagcaacaagcggcgcagcagggaggaacaggcaagcagcccggcggcgatcccaatatgggcggcatgggaggctcaggccaaaccgattccggcggcggcaacaacaaaggcgccgaagacgccgattacgaagtggtagatgacaagtag

SEQ ID NO: 56268 - protein, 207 aa, Unknown
  Obtained from environmental sample
  DOMAIN (1)...(158): Hsp70 protein
  misc_feature (1)..(207): Xaa is any amino acid
MASQNRVLGRFDLVGIPPAPRGVPQIEVGFDIDAHGIVHVSAKDLGTGKEQNIRIESSSGLNDQDIERMVKEAELLAEEDQKEREKAEVRNEADSMIYGTDKNIKDLGDKVSAADKAKTEEAIADLRKALEGGDLQAIKEKTEALKQASYKIAEEIYKQQAAQQGGTGKQPGGDPNMGGMGGSGQTDSGGGNNKGAEDADYEVVDDK

SEQ ID NO: 56269 - DNA, 1146 bp, Unknown
  Obtained from environmental sample
  misc_feature (1)..(1146): n is a, c, g, or t
atggcaaaacgcgattattatgaagttctcggagtacagaaaaacgcttcaaatgaagaaattaaaaaggcatatcgtaaacttgcccttcagtatcatccggacaggaatccgggcaacaaggaagccgaagagaaattcaaggaagccaccgaagcatacgatgtgcttgccgatcaaaagaaaaaagccgcctatgatcagttcggctttgccggcgttgacaacatgggcggccaaacccatgactggagcaatttccggggtatggaagatatttttggcagcaatgatttaggcagcttttttgaaagcatccttggcggattaggcggctttggcagttttggtggcggcttccgcaggagcggcggtcataacggggtaaggcagggctcagacctccggttcgaccttgatattcaattcaaagacgcggtttttggaactaaagaagaaatccagtttttacacaacgaatcttgtcaggcctgcaaaggttccggggccgccaaaggcgcggaaaggaaaacatgccctacctgccaaggttccggccaggtacggcacacccaaagttttttctcggtagcgtccacctgtcccaactgcagagggcaaggctttatcatcgaaaggccctgcccagaatgcggcggctccggcacccagaagaaacggataaaaatcgcagtgacaattcccgcgggggttgaaaacggaagacggctggttattccccggcagggcgacgcgggccaaaacggcgccccggcaggtgatttgtatgtgataatccggataaaaccccatgaatattttgaacgacatgattttgacctttactgcgcggttccaatctcggtaacccaggcggccctgggcgcggaaatccgcgtcagcacccttgacggcaaaacaataaaggtgaaagtgccccccggaacccaaaacggcaaaatgctccgcatccgcgacgagggcgtaccgtcaggggctcaccgggggaatctctacatcaaactgattgtccgcataccggataaactttcccgccgcggcaaagaactgctggaggaactatcccgcaccgaaggcgaaaacgacagccccggacctgtccccctttcgcagttaagcgagtaa

SEQ ID NO: 56270 - protein, 381 aa, Unknown
  Obtained from environmental sample
  DOMAIN (149)...(229): DnaJ central domain (4 repeats)
  misc_feature (1)..(381): Xaa is any amino acid
MAKRDYYEVLGVQKNASNEEIKKAYRKLALQYHPDRNPGNKEAEEKFKEATEAYDVLADQKKKAAYDQFGFAGVDNMGGQTHDWSNFRGMEDIFGSNDLGSFFESILGGLGGFGSFGGGFRRSGGHNGVRQGSDLRFDLDIQFKDAVFGTKEEIQFLHNESCQACKGSGAAKGAERKTCPTCQGSGQVRHTQSFFSVASTCPNCRGQGFIIERPCPECGGSGTQKKRIKIAVTIPAGVENGRRLVIPRQGDAGQNGAPAGDLYVIIRIKPHEYFERHDFDLYCAVPISVTQAALGAEIRVSTLDGKTIKVKVPPGTQNGKMLRIRDEGVPSGAHRGNLYIKLIVRIPDKLSRRGKELLEELSRTEGENDSPGPVPLSQLSE

SEQ ID NO: 56271 - DNA, 1272 bp, Unknown
  Obtained from environmental sample
  misc_feature (1)..(1272): n is a, c, g, or t
atgcaggttgaaacacttgatgccacagtccgtgattacatcaatgagttagagaacagaaatctggaattacaaaataaagtcattgagattgaaacaaaccataaacaagattaccaacaattatataatgaatatttaattttaaaagaacagtacgacctattggtctacaaacggtttgtgcggagcgccgagcaattgcttgccgacgaaaagcagcagcctttatttaccgaggaagccgaacagcctgaaacaaacgaagaaaagcctttagagcttcaaacggttaaatcgtttacacgcaagaagaacggcgggcgcaagccgattagcgcaaaccttgagcgaaggccaagggtcatagacataccggaaagtgaaaaaacctgcgcttgcggggcgaatttgacccgaattggcgaagaaaccagcgaaaagctggttataatacccatgcagatttatgtagaccaaatagtcaggccgaaatatgcctgcaggcaatgcgaagggacggaagaggaagacaagcctgcggtgcgcatcgcgcctgtggagcctgcaattattccaaagagcatagcgagccccagcttgctggcaaccgtcttcacgcaaaagtttgaaatgcaccttccctattacaggcaggaaaaacagtttgagcagataggggtggcaataagccgccaggatatgagcaactggcagcagcaggcgtatggaaaacttaagccgttattcgccatactcaaagaaacggtaaaaagcggccctgtgctgcagatggacgagaccgaggtacaggtaataggggaagaaaaccgaaacgatcttcagaaaagctatatgtggcttgcccgcggcggccctgtcggcaaaaaagtaatttggtatgagtaccatccgactcacgccgcatataacgccattgaattccttcaagggtattgtgggtatctgcagacggatgggtacgatgcgtatgacagcgcggccaaaggccttcccggaataatacaggtgggctgcttcgcacacgcaaggcggaggttttttgaggctgccaagataaacaagaaaccacagtccgccgaggaagggatgaaatatatacgcaggctctaccagcttgaggacgcgctaaggagcaaatggaaagacgaccttgaaaaattccatgaagaccggaaaaaagaggcggctcccatatttactgaatttaagcagtggctttcaaaacgggtggatgaagtgccgccctaa

SEQ ID NO: 56272 - protein, 423 aa, Unknown
  Obtained from environmental sample
  DOMAIN (138)...(340): Transposase IS66 family
  misc_feature (1)..(423): Xaa is any amino acid
MQVETLDATVRDYINELENRNLELQNKVIEIETNHKQDYQQLYNEYLILKEQYDLLVYKRFVRSAEQLLADEKQQPLFTEEAEQPETNEEKPLELQTVKSFTRKKNGGRKPISANLERRPRVIDIPESEKTCACGANLTRIGEETSEKLVIIPMQIYVDQIVRPKYACRQCEGTEEEDKPAVRIAPVEPAIIPKSIASPSLLATVFTQKFEMHLPYYRQEKQFEQIGVAISRQDMSNWQQQAYGKLKPLFAILKETVKSGPVLQMDETEVQVIGEENRNDLQKSYMWLARGGPVGKKVIWYEYHPTHAAYNAIEFLQGYCGYLQTDGYDAYDSAAKGLPGIIQVGCFAHARRRFFEAAKINKKPQSAEEGMKYIRRLYQLEDALRSKWKDDLEKFHEDRKKEAAPIFTEFKQWLSKRVDEVPP

SEQ ID NO: 56273 - DNA, 366 bp, Unknown
  Obtained from environmental sample
  misc_feature (1)..(366): n is a, c, g, or t
atggctggggcgtgcggtatgacgttcgatatcagcaaagcaaggatttttatacgccctggttacacggatttacggaaagcggtaaacgggctttcagtaatggtagaacaacaaatggcaggggagccttttagcgggaacatttatctattttgcaaccgtgggcggaagctgctgaaagcgctgtggtgggacaggaacggattttggcttagccagaagcggcttgagaaagacaagttcccctggcctgaaacggacgaggaagcgagggaactaagcgcgggagaattgtcaatgcttttaaaggggatagattttttcaaagcgcacaaaacacttaattacaaatatgtttcataa

SEQ ID NO: 56274 - protein, 121 aa, Unknown
  Obtained from environmental sample
  DOMAIN (12)...(120): IS66 Orf2 like protein
  misc_feature (1)..(121): Xaa is any amino acid
MAGACGMTFDISKARIFIRPGYTDLRKAVNGLSVMVEQQMAGEPFSGNIYLFCNRGRKLLKALWWDRNGFWLSQKRLEKDKFPWPETDEEARELSAGELSMLLKGIDFFKAHKTLNYKYVS

SEQ ID NO: 56275 - DNA, 528 bp, Unknown
  Obtained from environmental sample
  misc_feature (1)..(528): n is a, c, g, or t
atggcattgtccgccgaatggtcgtctgcaaagttagcgcaagggcaggcaaaaatttgccttggcgttgacccgggctctctcgcctgcgggtgggcagttgtgtcccgcaacggctctaggcttgagctattggaggctggcgtgatacgcaacccaaagggccaggagttttttcagcgtatattgctcatacatcagaagctcggcgaggccatagaaaagcatcagccgcagttcgttgcggtggaaagcccctttgtggaaaaaaacgcagccaccgcgctaaagctgggccagatacgcggcggggttcttctcaccgccgcgttgcacggtctgccagtgggcgactacaaccccatgcaggtaaaaaaggccgtcagcggctacggctgggctggcaaagaccaagtgggcaagatggtgatgacgctactgaacttgacagaaccgctccccgccgacgccgccgatgccgccgccgttgccatcggccatctgctggcgactaggcgggtcttgtag

SEQ ID NO: 56276 - protein, 175 aa, Unknown
  Obtained from environmental sample
  DOMAIN (20)...(167): Crossover junction endodeoxyribonuclease RuvC
  misc_feature (1)..(175): Xaa is any amino acid
MALSAEWSSAKLAQGQAKICLGVDPGSLACGWAVVSRNGSRLELLEAGVIRNPKGQEFFQRILLIHQKLGEAIEKHQPQFVAVESPFVEKNAATALKLGQIRGGVLLTAALHGLPVGDYNPMQVKKAVSGYGWAGKDQVGKMVMTLLNLTEPLPADAADAAAVAIGHLLATRRVL

SEQ ID NO: 56277 - DNA, 369 bp, Unknown
  Obtained from environmental sample
  misc_feature (1)..(369): n is a, c, g, or t
gtgcctgccggaagaatggcgtttatcgcgtccggaccggtttttccgccgttgatttccccgcttaccgttgagccgatgtgcataacatgggagaagcgcaggatagacatatacttttccactttgactgttccgaatttactgatctttcccaaatcattgcggccaaggtctaccagcatattgtgttcggcaagctctttctcgtccgcaagcagttccttttccagcgtcagatcttcgctgtcgtcggcgccgcgcggacgggtacccgcaagcggatatgtgaacaattttccgtcgtgcagttttaccagagtttcgggggaagcgcccgctatttcaagatcgcttccgctgaaataa

SEQ ID NO: 56278 - protein, 122 aa, Unknown
  Obtained from environmental sample
  misc_feature (1)..(122): Xaa is any amino acid
MPAGRMAFIASGPVFPPLISPLTVEPMCITWEKRRIDIYFSTLTVPNLLIFPKSLRPRSTSILCSASSFSSASSSFSSVRSSLSSAPRGRVPASGYVNNFPSCSFTRVSGEAPAISRSLPLK

SEQ ID NO: 56279 - DNA, 1014 bp, Unknown
  Obtained from environmental sample
  misc_feature (1)..(1014): n is a, c, g, or t
atggttttcattctaaattctaacgcgccaaaagaaaaagtcgataaatttatctcggactgggaacaaaaaggtttttctaccatatatagcgtcggtacggagcatatagccgtctgccttatcggaaataccgccgaaatcgacatggatcatattgttcaaacgaacgatatcgttgactacggtaagcgcattacggagcagtacaaggcggtcaacaggcatgtacacgaggacaataccgttatctctgtgggcggcgctgttataggcgaagggcattttaccgtcatttcggggccttgctcggtggaaagcaaagagcagattttagaaatagcccgaagcgtgaaagaaagcggcgcaaagctccttcgcggcggggcgtttaaacccagaacgtcgccttacgctttccaggggatgcaggcggaaggactggaaatgctgcgcgccgcgagaaaggaaacagggcttcccgttgtctctgaaattatgaaccagacgcagattgacctgttcgaggatatagacattgtgcaggtgggggcgaggaacatgcagaactttgatctgcttaaggccgtcggcgctcttaaaaaaccggttctcttaaaacgagggcttgccaacacaatagaagaacttttgatgagcgccgaatatattgtcgccgcggggaacaatcaggtaattctgtgcgagcgcggcatccgcacgtttgagaccatgacgcgcaatactctggatctgtccgccgtcgtaattctgaaacaaaagtcgcacctgcccgttatcgccgacccgagccacgcttcgggaatcagaagccttgttgctccgctttcaaaagccgcgcttgccgtcggagcggacgggcttatgatagagacgcacaatgatcccgccaaggctctttgcgacggcgctcagtcgcttgacctgaaacagtttcatactttaatggaagaacttaaagtacgcgcggctgtcgagaaaaaggaaatataa

SEQ ID NO: 56280 - protein, 337 aa, Unknown
  Obtained from environmental sample
  DOMAIN (114)...(334): NeuB family
  misc_feature (1)..(337): Xaa is any amino acid
MVFILNSNAPKEKVDKFISDWEQKGFSTIYSVGTEHIAVCLIGNTAEIDMDHIVQTNDIVDYGKRITEQYKAVNRHVHEDNTVISVGGAVIGEGHFTVISGPCSVESKEQILEIARSVKESGAKLLRGGAFKPRTSPYAFQGMQAEGLEMLRAARKETGLPVVSEIMNQTQIDLFEDIDIVQVGARNMQNFDLLKAVGALKKPVLLKRGLANTIEELLMSAEYIVAAGNNQVILCERGIRTFETMTRNTLDLSAVVILKQKSHLPVIADPSHASGIRSLVAPLSKAALAVGADGLMIETHNDPAKALCDGAQSLDLKQFHTLMEELKVRAAVEKKEI

SEQ ID NO: 56281 - DNA, 945 bp, Unknown
  Obtained from environmental sample
  misc_feature (1)..(945): n is a, c, g, or t
ttggcacgcagaacttacgcgcttaataaagcgcaagcgtaccaactggcggacattaccaaaaccccgccgcaattcggcgcgattaccccgcgctggttaattcgttttctggaattcaaagggcttgaagccggtatttaccgcgtaaacaaagttgttgaaggagaaactccgcttgacattctctgctcttcagaaaaaaagagcgctgagattcccgaagggtacatacagtaccagcaaaagcccagggaatataccttaagctcaatttctaccattataaacgtagatacagcagtacaggacgtgtattcctcgccttttgatcagacaaaagaacaactgcatcttgcgattgaaagtctgcgcgaaaggcaggagagccagctaatcaataacgatgattacggccttttaaaaaatgttcccgacagccagcgcattaaaccgggaaacaaagcgggctcccccatgcccgacgactttgacgagcttatctcaaaggtgtggaaagagccggcgttctttttggctcacccgcgcgccgtcgccgctttccagcgtgaatgtacgcgcaggggcgttccaccggctaccacgtcggttttcggcggcaattttattctttggcgcggcattccggttattcctacggacaaactgtttgtggacggattaaaaaacccaaagagcaaaggcggaaaaaccaatattcttttaattcgcacaggggaagcaaaacgcggagttgtcggcttgtaccagagcggtttgcagaacgaacaaggaagagggctttccgtgcgtttcaggggagtggacaacaaaggactggcgtcttaccttctgtcgctgtactgctcagccgcaattctcgcggacgacgccatagctgttcttgaagatgtggaagtgggtaactactatgattacacctaa

SEQ ID NO: 56282 - protein, 314 aa, Unknown
  Obtained from environmental sample
  misc_feature (1)..(314): Xaa is any amino acid
MARRTYALNKAQAYQLADITKTPPQFGAITPRWLIRFLEFKGLEAGIYRVNKVVEGETPLDILCSSEKKSAEIPEGYIQYQQKPREYTLSSISTIINVDTAVQDVYSSPFDQTKEQLHLAIESLRERQESQLINNDDYGLLKNVPDSQRIKPGNKAGSPMPDDFDELISKVWKEPAFFLAHPRAVAAFQRECTRRGVPPATTSVFGGNFILWRGIPVIPTDKLFVDGLKNPKSKGGKTNILLIRTGEAKRGVVGLYQSGLQNEQGRGLSVRFRGVDNKGLASYLLSLYCSAAILADDAIAVLEDVEVGNYYDYT

SEQ ID NO: 56283 - DNA, 1443 bp, Unknown
  Obtained from environmental sample
  misc_feature (1)..(1443): n is a, c, g, or t
ttgaagatgtggaagtgggtaactactatgattacacctaacggttacggcttgccggacccggaagaacttgaaaggtgggcgttaacttatttcccggaacttcaggaaaaagagatcaataaggtcgaagacgccaaaactgaatattccccagtcgtcgtgccgtatacaagcgcggctgccggaacgccttccgaagagacgctttttaaaacttcttctttgggcacaggttttgacgtaaaccgtattcgcggcgatttccctattctgaatgagagagtcgcgggcggcaaacagcttatctggcttgacaacggcgcgacaacgcaaaaaccaaacgccgtaatagaccgtatctcatatttttacagacacgaaaattcaaacgtccaccgcggcgcgcacgagcttgccgcccgttccacagacgcttacgaagcggcgcgggaaaccatcgccaaatttataggcgctccctcaaaagacaatattgtctttgtgcgcggaacaacagaaggcatcaaccttgtagctcaaagttacgttaaacccctgctgagtcccggcgatgaaataatactcactatccttgaacaccacgccaacattgtcccctggcagatgatagcgcaggaaacaggagcggtaataaaagtcgctcccgttgacgatacgggacagatcattttgtccgaatacgcgcgcttgttttgcccgcgcacaaagtttgcctctgtaacgcacgtttcaaacgcattgggaacaattaccccggttcacgagatgattcagatagcgcacggtaacggagtacgaatccttatcgacggagcgcagtctgtagcgcatacgccgcttaatgtcagcgagttggacgcggacttttttgtgttctcaggacacaagatattcggtcctacgggcataggcgcggtgtacggaaaagcggacgctcttgaagaagccaaaccgtatcagggcggcggcaatatgataagggacgtaacttttgaacgcacggtatacaatcccgcgccgtccaagtttgaagcgggaaccggcaatattgccgacgcggtagggcttggcgcggcacttgattatgtttccggtattgggatagcgaacataagcgcgtatgaacacgagttgcttgattacgcgacccgcgagcttaaacgcataaacggtctgcgccttatcggcactgccgctgagaaagcgagcgttctgtcctttgtgcttgataacgtaagcgttgaacaagtcggcaaacatcttgcaagccacgggatagcggttcgcgccggacaccactgcgcacagccgattctgcgccgcttcggattggaagcgacagtgcgcccgacgattgcgttttacaatactcccgaggaaattgataaattggttatcgcggttagagaactggtataa

SEQ ID NO: 56284 - protein, 480 aa, Unknown
  Obtained from environmental sample
  DOMAIN (138)...(423): Beta-eliminating lyase
  misc_feature (1)..(480): Xaa is any amino acid
MKMWKWVTTMITPNGYGLPDPEELERWALTYFPELQEKEINKVEDAKTEYSPVVVPYTSAAAGTPSEETLFKTSSLGTGFDVNRIRGDFPILNERVAGGKQLIWLDNGATTQKPNAVIDRISYFYRHENSNVHRGAHELAARSTDAYEAARETIAKFIGAPSKDNIVFVRGTTEGINLVAQSYVKPLLSPGDEIILTILEHHANIVPWQMIAQETGAVIKVAPVDDTGQIILSEYARLFCPRTKFASVTHVSNALGTITPVHEMIQIAHGNGVRILIDGAQSVAHTPLNVSELDADFFVFSGHKIFGPTGIGAVYGKADALEEAKPYQGGGNMIRDVTFERTVYNPAPSKFEAGTGNIADAVGLGAALDYVSGIGIANISAYEHELLDYATRELKRINGLRLIGTAAEKASVLSFVLDNVSVEQVGKHLASHGIAVRAGHHCAQPILRRFGLEATVRPTIAFYNTPEEIDKLVIAVRELV

SEQ ID NO: 56285 - DNA, 402 bp, Unknown
  Obtained from environmental sample
  misc_feature (1)..(402): n is a, c, g, or t
gtgccaacaattcaacagctagtgcgtcttggtcgcgaaaaggtcaaaaaccgcacaacagcccctgcgcttaaagcatgcccccagaaacgcggcgtttgcagccgtgtttacaccacaacacccaaaaagccaaattccgctttgcgcaaaattgcccgtgtgcgactcagcaacaaaatggaagttacggcttatatcccaggcgaaggccacaacttgcaagaacattcaattgtgctaattcgcggaggccgtgttaaagacgtgcccggtgttcgctatcacataattcgcggtgctctagatacccaagccgttaacggtcgcaagcaggctcgttcacgctatggcgttaaaaagaaagcagccgcagcacccgcaaagggcggcaaaaagtaa

SEQ ID NO: 56286 - protein, 133 aa, Unknown
  Obtained from environmental sample
  DOMAIN (2)...(123): Ribosomal protein S12
  misc_feature (1)..(133): Xaa is any amino acid
MPTIQQLVRLGREKVKNRTTAPALKACPQKRGVCSRVYTTTPKKPNSALRKIARVRLSNKMEVTAYIPGEGHNLQEHSIVLIRGGRVKDVPGVRYHIIRGALDTQAVNGRKQARSRYGVKKKAAAAPAKGGKK

SEQ ID NO: 56287 - DNA, 2133 bp, Unknown
  Obtained from environmental sample
  misc_feature (1)..(2133): n is a, c, g, or t
gtggttgatgcaaagccaaccagaaaaataggcgaacacgaagttatagaaaacccaattaccagctgttttcgcgatggcttgaactccttggaatactttatttccactcacggcgcacgtaaaggtctttccgatacagctttaaaaactgcagatgctggttatttaactcgccgcttggttgatgttgcgcaaaacttggttatcaccgaagaggactgctgcgaaataaaaatcaccgcagagcgaatatccgttgagcattacgaaaacataaaagacacctccgaggctcttagcttgttcactaaaaggttgagcggatatgtggcagcaaacgatatttcgcaccccgaaaccaaagaggttttggcaaaaagaggcgacttcttggaaaaagaaattttgcgcaaattgatgttcatagaattgaagctcatacacgcaataaactacgaacacctccgcaaaaaaatgctcggaaccactttggaaaaagccgttcacggtgaagacggaaaaacagtggtttctgcaaattccattataaacgattcaaaactgatggaaatgataaaagcgggtgttaaagctcctatacatttggctgtaaaaggcattgtccgttctgcatccaaagacggcgataacattgttcaagctcttggtgaacgtattttagggcgtttctcccttaaagacatcaagcaccctgtgtctgatgccttgatagtttccaaaggcgagatgatagaagaaaaacacattccaaaaattttggatgctggcatagaagaagtttgcgttcgttctgttttaacttgcaattcgccaattggtgtttgcgcaaagtgctacggcagaatgcttgcctccggccgcttggttgatttgggcgaggccgttggcgttttggctgcccagtccataggcgaacctggtacgcagctcacgcttagaaccttccacatnggaggtgcttctagccgcataactgtggaaaacagcaaaaaagccacagtggatggcaaggttcttcttgaaagcagcgatgagatagattataaaggctcaaaaatagaaattggccgtatggcagagcttgtgttgctagataccaatggcataaacaaaggccgctggcaaattccttatggcgcaacgctcaaagtagaaaacggcaaagatgttaaaaaaggcgaaatgctctatgaatgggatccatacaacaacccaataataagcacagttgccggcaaaatacagcttttggattttgcagaaaaaacaacttacgtgtcggaacttgacgaaacaacgggcatagaaacttggactataatagccgataggcgtggcaaaaaacgtgcttccataaatgttatggaaaacggcgagcgcgttggtcatttctttttgccaaatggcgctattttaaccgttcgcgatggcgacacaataatcagcggccaaacaatagcaaaattgccacgctccgttggaaaaacaaaagacatcacaggcggtttgccacgagttgcagaattgtttgaggcccgcgaaccaaagaattcagcaatacttgcacctaccaatggcgtggttgcttttggcgcagaaaagaattctggacaaatagtgctaattaaaaactcagacacagaagaagaaattgttgttccgcacggaaagcatctttccgttcacgatggcgatagagttcgcaaaggacaggcaatagccgagggttctgtgaatttgatggatattctccgcattttgggcgaagaagaactgcaaaggcatttggttgacgaaatccaagctgtttaccgcttgcaggctgttaccatttccgataagcacatagagtgcattgttcgccagatgatgagaaaagtagtgataacagagccaggcgattcaaaattcctaacaggcgaagatgtttctagaatagagcttcgcttggaaaacgtgcgtttgcaagaagaaggcaagcaaattgcccaatttgccccgctgctccttggaataacaaaagccgctcttgcaatggatagctttatagccgcagcttctttccaagaaaccacaaaggtgctcaccagagccactattcaggtctaa

SEQ ID NO: 56288 - protein, 710 aa, Unknown
  Obtained from environmental sample
  DOMAIN (525)...(600): Apocytochrome F, C-terminal
  misc_feature (1)..(710): Xaa is any amino acid
MVDAKPTRKIGEHEVIENPITSCFRDGLNSLEYFISTHGARKGLSDTALKTADAGYLTRRLVDVAQNLVITEEDCCEIKITAERISVEHYENIKDTSEALSLFTKRLSGYVAANDISHPETKEVLAKRGDFLEKEILRKLMFIELKLIHAINYEHLRKKMLGTTLEKAVHGEDGKTVVSANSIINDSKLMEMIKAGVKAPIHLAVKGIVRSASKDGDNIVQALGERILGRFSLKDIKHPVSDALIVSKGEMIEEKHIPKILDAGIEEVCVRSVLTCNSPIGVCAKCYGRMLASGRLVDLGEAVGVLAAQSIGEPGTQLTLRTFHXGGASSRITVENSKKATVDGKVLLESSDEIDYKGSKIEIGRMAELVLLDTNGINKGRWQIPYGATLKVENGKDVKKGEMLYEWDPYNNPIISTVAGKIQLLDFAEKTTYVSELDETTGIETWTIIADRRGKKRASINVMENGERVGHFFLPNGAILTVRDGDTIISGQTIAKLPRSVGKTKDITGGLPRVAELFEAREPKNSAILAPTNGVVAFGAEKNSGQIVLIKNSDTEEEIVVPHGKHLSVHDGDRVRKGQAIAEGSVNLMDILRILGEEELQRHLVDEIQAVYRLQAVTISDKHIECIVRQMMRKVVITEPGDSKFLTGEDVSRIELRLENVRLQEEGKQIAQFAPLLLGITKAALAMDSFIAAASFQETTKVLTRATIQV

SEQ ID NO: 56289 - DNA, 2025 bp, Unknown
  Obtained from environmental sample
  misc_feature (1)..(2025): n is a, c, g, or t
gtggccttgcaggggctggaagaagttttccagtctacctttcccatcgacagccccaatggcgacatgaagcttacctatgaatactacacgcttgacgaggacgccataaaattctccgaacaggactgtaagcagaagggcattacctacgcgattccccttaaagcaagggttaacctgatattccagaatacgggtgaaatcaggcagaaagacatctacatgggcgacatcccgatcatgagcgagagggggactttcatcatcaacggcgccgagcgggtggttgtttcgcagttgcaccgttcccccggcgttatcttcagccatgaaaaagggatttattcatccaggattataccctaccgcgggagctggctggaatttgaaattgaccagaaacgcgagcttatctacgcgaaagttgacaggaaaaagcgcatacttggaacgatcttcctgcgcgcccttggctttgacagccgcgaggagatcatcaaagctttctatgtcaccgagactatcaaagtcaaagacgaccgcgagaccagggacattatctccgggcgcgttctcgccgccgctgtccggataaaggataccgccgccggccggaaaaacgcgaaacaggccgataccggcgatgggatgaaaaaactgttcagggcgggcgaaaaactccatccccacaacgttgacgagcttctatcaaacaacgtcaaatcaatcgaagtcataaaatttattgaccttgaagattcttccgatgaaaaatcttataattattcactggactcggatattcttctcaactgttttgagcgggaagagataaaatataccaaggaaggcaatgaggagcccacaaaagaagaagccctcatggcggtatttgcggtgctgatgcagggggaaacaatatccctggatgccgcggagaaagagcttaccggaatgttctttaccaaccgccgctatgacctgggcagggtagggcgctacaagctcaacaagaagttcgcctttgatcctccccttaccgattttaccctgaccaaagatgacattatcgccacgatgaaattccttataaaagtgtacataggcgatgaaaattttgacgatattgaccacctgggcaacaggcgggtgcgctccgtcggcgagcttatgtccgttgccatgaagacggcgttcagccgaatggaacgcatcgccaaggaaaggatgagccttaaagaaaccgacaccataaagccgcaggatcttgtttccattaaacccatcgtcgcggccatcaaggaatttttcggctcaagccagctttcgcagttcatggatcaggttaacccccttgccgagctgacccataagcggcggcttaacgccctgggccccggagggctttcccgtgagagggccgggtttgaagtccgcgacgtgcattatacccactatggaaggatgtgccccatagagacgcctgaaggcccgaatatcggcctgattgtgtcgctggccaattataccagggtgaacgaatacggttttcttgaaacgccgtaccgcaagatcagcaaaggcgtcgctaccagggatattgagtatctttccgcgatggatgaggacaggtacttcatcgcccaggcttcggccaaactcagggagaacggttcttttgccgaagggcagatttcctgccgcaggcagggcgattataccaaccgcgcgcctgaagacatacaatacatggatgtttcgcccaagcagatcatatcggtgtccgcctcgctgataccttttctggagcatgatgacgccaaccgcgcccttatgggttcgaacatgcagcgccaggcggtgccgctggtgttccccgaagcgcccagggtcggcacggggatggaggcgaaatgcgcctacgattccggcgtgcttgtaaaggcctgcagaagcgggactgtattgcgcgtaacgtcccacgagatcgttataaagccggataagggcgggcagccttaa

SEQ ID NO: 56290 - protein, 674 aa, Unknown
  Obtained from environmental sample
  DOMAIN (103)...(386): RNA polymerase Rpb2, domain 2
  misc_feature (1)..(674): Xaa is any amino acid
MALQGLEEVFQSTFPIDSPNGDMKLTYEYYTLDEDAIKFSEQDCKQKGITYAIPLKARVNLIFQNTGEIRQKDIYMGDIPIMSERGTFIINGAERVVVSQLHRSPGVIFSHEKGIYSSRIIPYRGSWLEFEIDQKRELIYAKVDRKKRILGTIFLRALGFDSREEIIKAFYVTETIKVKDDRETRDIISGRVLAAAVRIKDTAAGRKNAKQADTGDGMKKLFRAGEKLHPHNVDELLSNNVKSIEVIKFIDLEDSSDEKSYNYSLDSDILLNCFEREEIKYTKEGNEEPTKEEALMAVFAVLMQGETISLDAAEKELTGMFFTNRRYDLGRVGRYKLNKKFAFDPPLTDFTLTKDDIIATMKFLIKVYIGDENFDDIDHLGNRRVRSVGELMSVAMKTAFSRMERIAKERMSLKETDTIKPQDLVSIKPIVAAIKEFFGSSQLSQFMDQVNPLAELTHKRRLNALGPGGLSRERAGFEVRDVHYTHYGRMCPIETPEGPNIGLIVSLANYTRVNEYGFLETPYRKISKGVATRDIEYLSAMDEDRYFIAQASAKLRENGSFAEGQISCRRQGDYTNRAPEDIQYMDVSPKQIISVSASLIPFLEHDDANRALMGSNMQRQAVPLVFPEAPRVGTGMEAKCAYDSGVLVKACRSGTVLRVTSHEIVIKPDKGGQP

SEQ ID NO: 56291 - DNA, 669 bp, Unknown
  Obtained from environmental sample
  misc_feature (1)..(669): n is a, c, g, or t
gtgggacgttacgcgcaatacagtcccgcttctgcaggcctttacaagcacgccggaatcgtaggcgcatttcgcctccatccccgtgccgaccctgggcgcttcggggaacaccagcggcaccgcctggcgctgcatgttcgaacccataagggcgcggttggcgtcatcatgctccagaaaaggtatcagcgaggcggacaccgatatgatctgcttgggcgaaacatccatgtattgtatgtcttcaggcgcgcggttggtataatcgccctgcctgcggcaggaaatctgcccttcggcaaaagaaccgttctccctgagtttggccgaagcctgggcgatgaagtacctgtcctcatccatcgcggaaagatactcaatatccctggtagcgacgcctttgctgatcttgcggtacggcgtttcaagaaaaccgtattcgttcaccctggtataattggccagcgacacaatcaggccgatattcgggccttcaggcgtctctatggggcacatccttccatagtgggtataatgcacgtcgcggacttcaaacccggccctctcacgggaaagccctccggggcccagggcgttaagccgccgcttatgggtcagctcggcaagggggttaacctgatccatgaactgcgaaagctggcttga

SEQ ID NO: 56292 - protein, 222 aa, Unknown
  Obtained from environmental sample
  misc_feature (1)..(222): Xaa is any amino acid
MGRYAQYSPASAGLYKHAGIVGAFRLHPRADPGRFGEHQRHRLALHVRTHKGAVGVIMLQKRYQRGGHRYDLLGRNIHVLYVFRRAVGIIALPAAGNLPFGKRTVLPEFGRSLGDEVPVLIHRGKILNIPGSDAFADLAVRRFKKTVFVHPGIIGQRHNQADIRAFRRLYGAHPSIVGIMHVADFKPGPLTGKPSGAQGVKPPLMGQLGKGVNLIHELRKLA

SEQ ID NO: 56293 - DNA, 360 bp, Unknown
  Obtained from environmental sample
  misc_feature (1)..(360): n is a, c, g, or t
atgtctattattgttccctctatgccgtgcggcactttaagggacgtatcgcgcacttccttggccttttcgccgaagattgaattaagcagtttaaattcaggcgtcgtctccgtctcgctcttgggtgttaccttgccgacaagaatatcgccggaacgcactttcgcgccgacgcggataataccttcgctgtccaggttatcaaggcttttttccgacgtgttgggaatgtcgcgggtgattttctcgggaccgagtttagtttctcttatttctacaataaattcctttatgtgtatcgaggtaaacatatcgtcttttactactttttcggaaataagaattgagtcttcgtag

SEQ ID NO: 56294 - protein, 119 aa, Unknown
  Obtained from environmental sample
  misc_feature (1)..(119): Xaa is any amino acid
MSIIVPSMPCGTLRDVSRTSLAFSPKIELSSLNSGVVSVSLLGVTLPTRISPERTFAPTRIIPSLSRLSRLFSDVLGMSRVIFSGPSLVSLISTINSFMCIEVNISSFTTFSEIRIESS

SEQ ID NO: 56295 - DNA, 534 bp, Unknown
  Obtained from environmental sample
  misc_feature (1)..(534): n is a, c, g, or t
atgcagatacacgtgtcggcgattcgcagcgccaacagcgccatgcttgccgcgcttggcccggacacgggtttcgacggcgtggcggattaccctgtagccgaaaagctcgcccgttttctggacatgcttgcttcacgcggcaagctgcccaaaacgatcctctacagccttaacttcaaggacctgtacccaatggcgacgatcatgggcagttttcagggtcatccgtctgaagaagccatacccggcaggatacagcttggctcaggctggtggttcctcgatcatatagacggcatggaagcgcagatgaagctgctggggaacacgggtttgctgtcccgtttcgtgggcatgctcacggattcgcgcagtttcctttcctatccgcggcatgaatatttccgccgcatactctgcaatattctgggaacctgggccgaaaacggcgaaatccccaatgactttgaactgcttggaaacatggtaaaggacatttcgttcaggaacgcgcggaattattttaaataa

SEQ ID NO: 56296 - protein, 177 aa, Unknown
  Obtained from environmental sample
  DOMAIN (1)...(177): Glucuronate isomerase
  misc_feature (1)..(177): Xaa is any amino acid
MQIHVSAIRSANSAMLAALGPDTGFDGVADYPVAEKLARFLDMLASRGKLPKTILYSLNFKDLYPMATIMGSFQGHPSEEAIPGRIQLGSGWWFLDHIDGMEAQMKLLGNTGLLSRFVGMLTDSRSFLSYPRHEYFRRILCNILGTWAENGEIPNDFELLGNMVKDISFRNARNYFK

SEQ ID NO: 56297 - DNA, 912 bp, Unknown
  Obtained from environmental sample
  misc_feature (1)..(912): n is a, c, g, or t
atgatgacgaacatcatcgacataacaggcataaaagcccaggagaaacacatacagattgtaactgatgtcggcaaggatattccgtctatggtaatctgcgacgaactgcggctggagcaggttattacaaaccttatgaccaacgcgattaaattcacgccggaaaacggcatagttacgttgaacgcgcagaagctggaagaaaaagacgatgaggttacggtaagagttgaggttaaggactcgggcatcgggatttcgccggagcagcagacaaagcttttctcgccttacaaccaggccgaccgcaccatcgcaaaacaattcggcggaacggggctggggcttgccatttccaaacggattatagagctcatgcagggaaagatatggattgagtcggagcttggcaagggcgcgaagtttatatttaccttaaaaatgaaaaagggaaagcatgtcgcggtttcggcggcggacgggagcgcggccgcgcccgcccccggaataaaggcggcggatttacatttgcaggggtataccatactggcggcggaagacatggactttaacagggaagtcctgagcaagtaccttgaaaaaaccggcgtcgccattgattacgccgaaaacggcaaagaggctgttgaaaagttcaaggcaaaccacgaaaaatactgcctggttcttatggacattaacatgcccgaaatgaacggggacgaggcgacacagataatacgggcgcttgattatcctaaggcaaaggagattcccattgtcgccatgaccgccaacgtctttaaggaagatatagagaaatgccttgcggttggcatgaacgatcatatcggaaagccgcttgatttcaatgaagtaatggcaaagatgcaattttatttaaaataa

SEQ ID NO: 56298 - protein, 303 aa, Unknown
  Obtained from environmental sample
  DOMAIN (181)...(299): Response regulator receiver domain
  misc_feature (1)..(303): Xaa is any amino acid
MMTNIIDITGIKAQEKHIQIVTDVGKDIPSMVICDELRLEQVITNLMTNAIKFTPENGIVTLNAQKLEEKDDEVTVRVEVKDSGIGISPEQQTKLFSPYNQADRTIAKQFGGTGLGLAISKRIIELMQGKIWIESELGKGAKFIFTLKMKKGKHVAVSAADGSAAAPAPGIKAADLHLQGYTILAAEDMDFNREVLSKYLEKTGVAIDYAENGKEAVEKFKANHEKYCLVLMDINMPEMNGDEATQIIRALDYPKAKEIPIVAMTANVFKEDIEKCLAVGMNDHIGKPLDFNEVMAKMQFYLK

SEQ ID NO: 56299 - DNA, 927 bp, Unknown
  Obtained from environmental sample
  misc_feature (1)..(927): n is a, c, g, or t
gtggacaggcgggtactgcgtttttgtacagaaatgggctgccggggggaaagagcgagtggatccgcgtggaaaacgacaagaaagcacccgtcttttgacgaatcaaagtttattccggcgatgggcaaagcctttggcgcggaaattgacctagtaaaaactcccatcgaaaacctaaacttcggcgaaggctccgaacttacgttcaggctggatggcagaaattggaaattggccgatccaagcacaaaggaatattctatttccgccgtccaagccggacaggaaaggccgggggggccgggcaggggagggtggtacgcgggaacgggcgcacaagacgaaagaaggccagtcacaagccccaacggcaaactagaagccattgtgcaggacaacaatgttttgataagggaagtgaggggcggcgcaaaagtgctagcaagcaaggacgggaatatgggcgaccgctattttggccaatttttttggagcccagacagcaagcacttggtggcattgaggtcaaccgtggtgccgcaacgcaaagttacttttgtagaggccgcaccaagagaccagctgcagccaaaggtacactccaacgactacacaaagcccggagacccgctgccaatacagcgcccgcagctattcaacatcgccgaaaagaggcaggtgccagtttcagatgaactatgcccaaacccatacgccatcacaagaatacaatgggcaagcgacagcagcaggttcacatacattttcaatcagcgcggccaccagcttctgcgcctgatctcagttgacgctttcactggagcgtcaaggttttggtcgaggaaacgtctaaaacttttatccactactcggcaaaaacttgggtggaatttttggatgagcaaaatgaattggtttggatga

SEQ ID NO: 56300 - protein, 308 aa, Unknown
  Obtained from environmental sample
  misc_feature (1)..(308): Xaa is any amino acid
MDRRVLRFCTEMGCRGERASGSAWKTTRKHPSFDESKFIPAMGKAFGAEIDLVKTPIENLNFGEGSELTFRLDGRNWKLADPSTKEYSISAVQAGQERPGGPGRGGWYAGTGAQDERRPVTSPNGKLEAIVQDNNVLIREVRGGAKVLASKDGNMGDRYFGQFFWSPDSKHLVALRSTVVPQRKVTFVEAAPRDQLQPKVHSNDYTKPGDPLPIQRPQLFNIAEKRQVPVSDELCPNPYAITRIQWASDSSRFTYIFNQRGHQLLRLISVDAFTGASRFWSRKRLKLLSTTRQKLGWNFWMSKMNWFG

SEQ ID NO: 56301 - DNA, 678 bp, Unknown
  Obtained from environmental sample
  misc_feature (1)..(678): n is a, c, g, or t
atgctctatcgtatgtaccttcgctgggcggagcagaaaggttttaccgtggaagaagttgatcagcaggaagccgagggcgggcttaaatccgccacttgccgtattgaaggcgactatgcctacggattccttaaaggcgaatcggggattcacagacttgtaagaatcagtccgtttgacgcaaacgcgcggcggcacacttccttcgcctccgtttacctttttcccgttattgatgatacaatcgaagtagacataaaacccgaagatttacgtgtagacacataccgctcgggaggcgcgggaggacagcatgtaaataagacggacagcgcggttcgttttactcacctgcctacgggaatagttgtcgcctgccagaacgagcgcagtcagataaaaaaccgcgcgaccgccatgagtatgcttaaagcgcggctttacgagtactacagagaggagaaggaaaaagaaaacgaaaaatattcgcaggagaaaaaagatatttcatgggggcatcagataagatcgtatgtgtttcagccgtatacaatggtaaaagattaccgtacaaaagtagaaaagggaaatattcaggctgtaatggacggcgatatcgatccttttattgaagagtatttaagattttcatggcgtaacggagagatgaattga

SEQ ID NO: 56302 - protein, 225 aa, Unknown
  Obtained from environmental sample
  DOMAIN (1)...(48): PCRF domain
  misc_feature (1)..(225): Xaa is any amino acid
MLYRMYLRWAEQKGFTVEEVDQQEAEGGLKSATCRIEGDYAYGFLKGESGIHRLVRISPFDANARRHTSFASVYLFPVIDDTIEVDIKPEDLRVDTYRSGGAGGQHVNKTDSAVRFTHLPTGIVVACQNERSQIKNRATAMSMLKARLYEYYREEKEKENEKYSQEKKDISWGHQIRSYVFQPYTMVKDYRTKVEKGNIQAVMDGDIDPFIEEYLRFSWRNGEMN

SEQ ID NO: 56303 - DNA, 375 bp, Unknown
  Obtained from environmental sample
  misc_feature (1)..(375): n is a, c, g, or t
atgagcaaagccgcttttgtcgcgataataggccggccctcagccgggaaatcgacgctggtaaataaaatctgcggagaaaaagtatccatcgtgagcgctgttccgcagacgacgcgcgacgccattcgcggcatctgtaccagggagcaggggcagcttgtgtttgtcgacacgcctggccgtcataaatccgaaaaaaaatttaatattaaactttcagaaatatcggcaaaggccgttgaggattccgaccttgtcctttatgtgctggatgccacaagagctcccggtcctgaagaaatcgaaatcgcctcccttttggccccatattcgggaaggacagccgccgccataacaactcggccgatctga

SEQ ID NO: 56304 - protein, 124 aa, Unknown
  Obtained from environmental sample
  DOMAIN (7)...(123): Dynamin family
  misc_feature (1)..(124): Xaa is any amino acid
MSKAAFVAIIGRPSAGKSTLVNKICGEKVSIVSAVPQTTRDAIRGICTREQGQLVFVDTPGRHKSEKKFNIKLSEISAKAVEDSDLVLYVLDATRAPGPEEIEIASLLAPYSGRTAAAITTRPI

SEQ ID NO: 56305 - DNA, 864 bp, Unknown
  Obtained from environmental sample
  misc_feature (1)..(864): n is a, c, g, or t
atgaacaggctggaaaaatcaaaagaattactgttaaaaaattatgaagtatacggcatggtaaaccgatccgatacggaaaatcttcccgtcagggaaagcatagaagacattgtgctagggcttgaagaactgctcttccccggttatctggaaaatgcccatgccgacaacggaaatctgcttagaaccacaaacgacaaggtaaatcaagtgtcggccatgttaatccacgaggtggagaaaagccttgttttttccgcgcgtctgggggtcttaaactgcgggcacggcggatgcagggcggctgccgcccttgtgacggatgacttttttgaagaactgcccagaatcagggctcttctggcaaaagacctggaagccgccgtccgcggcgatcctgccgcgatgagcgcggatgaggttattctttcctatcccgggtttcaggcaattacgatccacaggctggcgcattatttctggaacgcgcaggttcccctcatcccgcgcatgatgagcgaactggtacacgggagcaccggcattgacattcatccgggcgcggcaataggcgaatcattttttattgaccacggtaccggcgttgtaatcggcgagacgaccgttattggcaataacgtcaagctctaccagggcgttacccttggggctctttcggtgaagaaagaggaaggaaagcgcaaacggcatcccaccattgaagatgatgtcaccatttattccaacgcgaccattctggggggcgaaacggtgataggccggggcagcgtcatagggggcaacgtgtggatcaccgaatccgtccccccgaataccaaggtttataaccagcataaatga

SEQ ID NO: 56306 - protein, 287 aa, Unknown
  Obtained from environmental sample
  misc_feature (1)..(287): Xaa is any amino acid
MNRLEKSKELLLKNYEVYGMVNRSDTENLPVRESIEDIVLGLEELLFPGYLENAHADNGNLLRTTNDKVNQVSAMLIHEVEKSLVFSARLGVLNCGHGGCRAAAALVTDDFFEELPRIRALLAKDLEAAVRGDPAAMSADEVILSYPGFQAITIHRLAHYFWNAQVPLIPRMMSELVHGSTGIDIHPGAAIGESFFIDHGTGVVIGETTVIGNNVKLYQGVTLGALSVKKEEGKRKRHPTIEDDVTIYSNATILGGETVIGRGSVIGGNVWITESVPPNTKVYNQHK

SEQ ID NO: 56307 - DNA, 1863 bp, Unknown
  Obtained from environmental sample
  misc_feature (1)..(1863): n is a, c, g, or t
atgtcaaaacagcaagcgtactttgacgcggtgcacgcgatgggaaaagaggcgctggaagaggcgcggaagtcagacaggcctgtcattgccacgctgggacggccctacaacgcatttaccccggaggcgaacatgggcataccccgcaagttcaccacgcggggttattcgattatccccttcgatatcctgccattccacgacgaggtaatattcccaaatatgtactggtattacggccagcaggatttgaaggcggcgaacctcctcaaaaaagaggataatatttatctttcttttattaccaatttttcctgcgcgcccgattccttcatcctgcattacatcaaatggacgatgggccagaagcccttccttgtgctggaactggattcacattcagcggacgcgggcgttgacacgagggtggaggcgttcctcgacattattgacggctaccgcgccaagaaagacgaacttgaggcggagcgttttgacaacggctggcgatttatttccgagaaaaaggccgacgggaaattcgacctgcgtatagacaataaacaaacaggtgagaaggttccgattattgggaacaagcgggtaaagctgcttctttccaacatgggagccatatccaccgaatacgtgggcgcggctctccgcagccagggcgtcaatgccgaggccctgcctgtggctaccgcaaaaacaatacagattgcccgcgcccacgcgtcgggtaaggagtgcgtccccagccatctggttttgggcagcgccctggaattcttcttcagcgaaaaataccgcaaagacgaactgtacctgctctttgtccccatcaccacgggcccatgccgcacgggccagtactacgtgttttacgaaaatttattccgcgatttaaggcttgagaacgtcgtcgttttcatcctttccgcggacaattcctacactgagcttggaggcggcttcgccaaggaaatgtggaggggacttgtgctttccgattacctcaaggacatacagtgcgccctcaaggcctgcgccattgatccgaaaaaagcgcagttggaatttgaacattcgtggcgcagggtaatgcacgcggttgagcataatcccaaatacctgtggaaggaactgaaaaatgtcgcaaatgacgttagaaagattcctctgaagcgaaaagtcgttgactgtccccgcgtgcttgtcgtgggcgaaatctacgtccgccgcgacgattttgccgtgggcgagctgaccgacctgatgagcgagaggggcatagtggtaaaggttgccggcatttccgaatggatacactatctggactttgtgcgggaatacgccctcaagaaattgatcaggctgagaaagccgggcagcaggcttttttccaaaccatggaaagatctaaaaaaacttgagatagaggaatggtggaagcactctgttgaaaaaaaggtactttccattctaaagcccacgggccttatccctganacgccccatgacatgcgtgaaatcatgaagtacactcangagcactttgtaaaccttgagcttaattcagagattgctgtttcctccggttcggcggcggcggcgatggacgcgggatattcgggcattgtaaatataagtccgtttgcctgccttatcgggcgcgtaattgagggcctattcactccgtgggcgcgcgaacgcaattacccgattttatctgtggaagtagacggcaaccttctgccgccgaacattgtaaataaactcaacatttttatggttaatgttctgcgctttaagggaggaaacgatctttcttccttggtagacggggcatcttcatga

SEQ ID NO: 56308 - protein, 620 aa, Unknown
  Obtained from environmental sample
  misc_feature (1)..(620): Xaa is any amino acid
MSKQQAYFDAVHAMGKEALEEARKSDRPVIATLGRPYNAFTPEANMGIPRKFTTRGYSIIPFDILPFHDEVIFPNMYWYYGQQDLKAANLLKKEDNIYLSFITNFSCAPDSFILHYIKWTMGQKPFLVLELDSHSADAGVDTRVEAFLDIIDGYRAKKDELEAERFDNGWRFISEKKADGKFDLRIDNKQTGEKVPIIGNKRVKLLLSNMGAISTEYVGAALRSQGVNAEALPVATAKTIQIARAHASGKECVPSHLVLGSALEFFFSEKYRKDELYLLFVPITTGPCRTGQYYVFYENLFRDLRLENVVVFILSADNSYTELGGGFAKEMWRGLVLSDYLKDIQCALKACAIDPKKAQLEFEHSWRRVMHAVEHNPKYLWKELKNVANDVRKIPLKRKVVDCPRVLVVGEIYVRRDDFAVGELTDLMSERGIVVKVAGISEWIHYLDFVREYALKKLIRLRKPGSRLFSKPWKDLKKLEIEEWWKHSVEKKVLSILKPTGLIPXTPHDMREIMKYTXEHFVNLELNSEIAVSSGSAAAAMDAGYSGIVNISPFACLIGRVIEGLFTPWARERNYPILSVEVDGNLLPPNIVNKLNIFMVNVLRFKGGNDLSSLVDGASS

SEQ ID NO: 56309 - DNA, 1248 bp, Unknown
  Obtained from environmental sample
  misc_feature (1)..(1248): n is a, c, g, or t
atggtcatggcacgaaagaaggagaagaaggaaaaggatattatcgaccagatgctcgataatattgacttccgggggctaacccaggacgaggttgtagggcaagacggccttataaagcaactaacggggaagatactccaacgggcgcttgaagccgaaatgacggagcatctggggtatgtaaaaaattcaaacgctggggacaacagcgggaacagccggaacgggcacacggaaaaaaccgtattgcttgaaaaccaaagcgcgacaattgacgtgccgcgggatcggaacgggacattcgaaccgatcatagttcccaagcatgaaaagcgcgtgccactttttaacgatcaaatcatttcgatgtattcgtttggaatgaccgaccgcgacatcaaggcgcatctggaacaaatctataacgtggaagtgtcgccggatcttataagccgcgtaacgaacgcggtcattgacgaagtgcgcgaatggcaggcccgcccgcttgaaaagtcatacgcgatagtgtatttggacgccctgcgggtcaaagcccgcgcggacgggaaaagctgcataaagagcgtttatgtggctcttggggtcaattttgaagggaaaaaggaggttttagggctttggatagcggagagcgaaggggcgaagttttggatgggcgtgttagccgaactgaaaaaccggggcgttcaggacatcctcatcgcctgcatggacgggcttaccggctttcccgaagcggtgcggtccgtgtatcctgacacccgtgtccagctgtgcattgtccacatggttcgcaattcgaccaggttcgtttcgtataaggacttgaaaaaagtgtgcgctgatctgaaagcggtctattcggcagccacggagtccgccgccagggaagcccttgaagagttcggcaaaatctgggataaaaaatatccgatgatttacaaatcctgggatcagcattgggatgacttgagcgagtttttcaaataccctcctgaaatccgccgtgctatttatacgactaacgctattgaatcgcttaactatcagttgcggaaagttacaaaaaatcgtttgctgtttccgtcagatgatgctatattcaagatactgtatttggcgatccgcaacgcttcagaaaaatggacaatgccggtaagggaatgggggcaggctttaaaccagtttgccattgagtttggaaaagaacgggttccgttctga

SEQ ID NO: 56310 - protein, 415 aa, Unknown
  Obtained from environmental sample
  DOMAIN (3)...(393): Transposase, Mutator family
  misc_feature (1)..(415): Xaa is any amino acid
MVMARKKEKKEKDIIDQMLDNIDFRGLTQDEVVGQDGLIKQLTGKILQRALEAEMTEHLGYVKNSNAGDNSGNSRNGHTEKTVLLENQSATIDVPRDRNGTFEPIIVPKHEKRVPLFNDQIISMYSFGMTDRDIKAHLEQIYNVEVSPDLISRVTNAVIDEVREWQARPLEKSYAIVYLDALRVKARADGKSCIKSVYVALGVNFEGKKEVLGLWIAESEGAKFWMGVLAELKNRGVQDILIACMDGLTGFPEAVRSVYPDTRVQLCIVHMVRNSTRFVSYKDLKKVCADLKAVYSAATESAAREALEEFGKIWDKKYPMIYKSWDQHWDDLSEFFKYPPEIRRAIYTTNAIESLNYQLRKVTKNRLLFPSDDAIFKILYLAIRNASEKWTMPVREWGQALNQFAIEFGKERVPF

SEQ ID NO: 56311 - DNA, 1026 bp, Unknown
  Obtained from environmental sample
  misc_feature (1)..(1026): n is a, c, g, or t
ttgcggcgtttattgaaggttcggggaacgctgctcagctctgaagtggtgataaagaaccagatacatggactattaacggcggaagggatggaggacgtgaaggggtcgctgcaaagcaaaaaagggcgtcagaaagtgctgaacgccctaaacgcgggtgaaaacgggctggtaatccaaccgctggtagaaacgatagaacagcttgaagggcacatcaagggaatagagaagcagcttcggacattgacagaaggggatcggatggtggaattgttgaagacaataccagggtgtggggagatctgcgcatggacaatccgcgcatacaccgatgacatcaagaggtttgcgaatccaaagaaatacgcgtcgtttgcgggattggcgccgtgggtacaaaactccaatgagagtatacaccatgggagcataacgaagcgggggccaaaggaactgcggacggcgctggtgcaggtggtgatggggctgaggcggatgaaggagaagacattttcgtggcgatttatgcagcggtatgaggggatgaagaaggggaagggaagcgggaaggcgataatagcgacggcaaggaagatagcggtagtgatatggaaaatactgagtgaggatgtagagtttgacatagggcagatggtggagggaaaacccgcgaagaaaactgaaagcaagaaggggacagaagggatagtgaaagaagccgtgaaagaagagggagaaaaagcggaagagaaaaaggttgagggtgtaaaaaaagtgtacaaaggactggcgttgccagaaaaaagagcctgtcatattttttgtgtaaatggaaaatatcatcagaacggaacccgttcttttccaaactcaatggcaaactggtttaaagcctgcccccattcccttaccggcattgtccatttttctgaagcgttgcggatcgccaaatacagtatcttgaatatagcatcatctgacggaaacagcaaacgattttttgtaactttccgcaactga

SEQ ID NO: 56312 - protein, 341 aa, Unknown
  Obtained from environmental sample
  DOMAIN (67)...(181): Transposase IS116/IS110/IS902 family
  misc_feature (1)..(341): Xaa is any amino acid
MRRLLKVRGTLLSSEVVIKNQIHGLLTAEGMEDVKGSLQSKKGRQKVLNALNAGENGLVIQPLVETIEQLEGHIKGIEKQLRTLTEGDRMVELLKTIPGCGEICAWTIRAYTDDIKRFANPKKYASFAGLAPWVQNSNESIHHGSITKRGPKELRTALVQVVMGLRRMKEKTFSWRFMQRYEGMKKGKGSGKAIIATARKIAVVIWKILSEDVEFDIGQMVEGKPAKKTESKKGTEGIVKEAVKEEGEKAEEKKVEGVKKVYKGLALPEKRACHIFCVNGKYHQNGTRSFPNSMANWFKACPHSLTGIVHFSEALRIAKYSILNIASSDGNSKRFFVTFRN

SEQ ID NO: 56313 - DNA, 780 bp, Unknown
  Obtained from environmental sample
  misc_feature (1)..(780): n is a, c, g, or t
atggaaaaacaggacggcgatgaaatgaggccgttttctttttgcacttgtatgggagcgcaagacattgttaaagacagaccttcattaccgtgctggattacttacactaactcaagaacgcacgagattataaaagcgaatattcaccgttcacctttatttggagggaagataatcggagtaggggcgcgttactgtccgtctatcgaggacaaggttgtgcggttcccacacagggagaggcatcatatttttattgagccagaaggactttcaactaatgagatgtacatgaacggtgcgtcaagttctctacctgaagacgttcagagcgattttattcacagcattgcgggacttgaagacgctaaaatagtccgaccagcttatgcggttgagtatgattacattgatcctcttgagctttatccgtctcttgagtcaaaaagattgtcaggtttttttacggcggggcagactaacggctcatcaggttatgaagaagccgcggcgcaagggttaatggccgggataaacgcggcaatgaaaatgttgggaagaccgccgcttgtgttaagccgcgctgaggcgtatatcggagttttagttgacgaccttacgacgcttggaacaaaagaaccttaccgtatgtttacaagcagggcggaacaccgccttatgctgcgccatgacacggcggatacaaggctcaccccaaggggcgcgatgtggggcttgtggatgacatacgctgggaacgctttcttgaaaagataa

SEQ ID NO: 56314 - protein, 259 aa, Unknown
  Obtained from environmental sample
  DOMAIN (1)...(189): Glucose inhibited division protein A
  misc_feature (1)..(259): Xaa is any amino acid
MEKQDGDEMRPFSFCTCMGAQDIVKDRPSLPCWITYTNSRTHEIIKANIHRSPLFGGKIIGVGARYCPSIEDKVVRFPHRERHHIFIEPEGLSTNEMYMNGASSSLPEDVQSDFIHSIAGLEDAKIVRPAYAVEYDYIDPLELYPSLESKRLSGFFTAGQTNGSSGYEEAAAQGLMAGINAAMKMLGRPPLVLSRAEAYIGVLVDDLTTLGTKEPYRMFTSRAEHRLMLRHDTADTRLTPRGAMWGLWMTYAGNAFLKR

SEQ ID NO: 56315 - DNA, 414 bp, Unknown
  Obtained from environmental sample
  misc_feature (1)..(414): n is a, c, g, or t
gtggggcttgtggatgacatacgctgggaacgctttcttgaaaagataaaaatgttggacgaagtaaatgaactgctcgcgaagcgaaggcagacaaattattcacttgacgaaaatgatacggagctgtcccgttatccagttgaattggtagaaagcgcgttgcttgataaaaagtacgcaggttatatagaaaaagaaattcgctttgccgcaaaagcggcaaaaatggacgctattaaacttaatccaaatttggattatacttccatcatggggctatcaaccgaggcaaaggaaaaactctcctctgtaaaaccgttgaatgtgggtcaggcggcgcggatacccggcgttaggcagggagatatcgcggtgttaattattttagcaaacaagagcagtcccaaatga

SEQ ID NO: 56316 - protein, 137 aa, Unknown
  Obtained from environmental sample
  misc_feature (1)..(137): Xaa is any amino acid
MGLVDDIRWERFLEKIKMLDEVNELLAKRRQTNYSLDENDTELSRYPVELVESALLDKKYAGYIEKEIRFAAKAAKMDAIKLNPNLDYTSIMGLSTEAKEKLSSVKPLNVGQAARIPGVRQGDIAVLIILANKSSPK

SEQ ID NO: 56317 - DNA, 528 bp, Unknown
  Obtained from environmental sample
  misc_feature (1)..(528): n is a, c, g, or t
atgataaaattagccgctttccttggcaatcccggcgcggaatattcgggtaacaggcacaacgcggggcgtatgcttgcgcggtcgcttccgttttatcagtctctttcatggcaaaaaaaatataaagggttgtacagttcgcatggggataaacacttcattatgccggaaacatatatgaacctgtcaggcgaatctgtgcaggccgttgcggcattttacaaaattgacgtgaaggaaattatcgtaatccatgatgaattggaactgccgttgggtgtcatttctttaaagttttcaggcggtcttggggggcacaacggacttcgctccatgaaaaaaagttttaacagcgcggatttttggcggatacggataggcattggccgccccgactcaaggcttcccggtgaaggcgacgggcgggaagtggggaaggtgtttacgattgggttttatcggattttacaaagaatgagcaagagacgcttatgcccgcccttgacgcgggagcgaatcttttaa

SEQ ID NO: 56318 - protein, 175 aa, Unknown
  Obtained from environmental sample
  DOMAIN (4)...(170): Peptidyl-tRNA hydrolase
  misc_feature (1)..(175): Xaa is any amino acid
MIKLAAFLGNPGAEYSGNRHNAGRMLARSLPFYQSLSWQKKYKGLYSSHGDKHFIMPETYMNLSGESVQAVAAFYKIDVKEIIVIHDELELPLGVISLKFSGGLGGHNGLRSMKKSFNSADFWRIRIGIGRPDSRLPGEGDGREVGKVFTIGFYRILQRMSKRRLCPPLTRERIF

SEQ ID NO: 56319 - DNA, 666 bp, Unknown
  Obtained from environmental sample
  misc_feature (1)..(666): n is a, c, g, or t
gtgggcaaaaaagaaaataataattcaagagcgggaaggcgaggaacaaaaatgacggcggattctgcttataaagagttgtatgacattgtagtaagactgcggggtcctggcgggtgtccgtgggatatagagcaaaatccttcttcacttaggggagcgttagtcgaagaaacctacgagtgtcttgaagccattgatgaaaaagagccttcccacattatggaagagcttggagatttatttttgcttgcgacaatgattagttatatgcatgaacaggaaggaaaatttaccgtagcggacgtgttatcaaatataggcaaaaaattaatccgcagacatccgcatgtatttggcgaagtaaaagtaaaggatagcgccgaagttttaaacaactgggcggcgattaaagtaaatcaggagggacgaaagcccaaagattcaatacttgatgaggtaagcggcgggcttccgccgatggatcgttcttttaagttgcaaaagaaagcagccaaagcaggttttgattggcctgatatggaaggagtaattggaaaaattaatgaggaacttaacgaggtacgctccgctgtcaatacgcccgaactggaagaagaattaggcgatctgcttttttccgtgatcaatctttgccgattttaa

SEQ ID NO: 56320 - protein, 221 aa, Unknown
  Obtained from environmental sample
  DOMAIN (46)...(119): MazG nucleotide pyrophosphohydrolase domain
  misc_feature (1)..(221): Xaa is any amino acid
MGKKENNNSRAGRRGTKMTADSAYKELYDIVVRLRGPGGCPWDIEQNPSSLRGALVEETYECLEAIDEKEPSHIMEELGDLFLLATMISYMHEQEGKFTVADVLSNIGKKLIRRHPHVFGEVKVKDSAEVLNNWAAIKVNQEGRKPKDSILDEVSGGLPPMDRSFKLQKKAAKAGFDWPDMEGVIGKINEELNEVRSAVNTPELEEELGDLLFSVINLCRF

SEQ ID NO: 56321 - DNA, 2535 bp, Unknown
  Obtained from environmental sample
  misc_feature (1)..(2535): n is a, c, g, or t
gtgcaatcgtatccctaccataggagcctcggtttctccgcgcggtgcgtcagcgacaaggaggggcacattccggcgcccgccgcgttaaagttaaagttaattgccgcaaccggcggaaccgtctccgcaaatccaaacaaggcgtcgtatgtcgccggggaacgggttacgatctccgccgtcccgaacagagggtacacgttcgccaaatggacaggcggaaaagtcgcggacaccggctacgcggttgctatcgttaccgtgaattcaaacacggcgatcaccgcgaatttcaataagagaaaagcgccgcccgtcgtttacggttctcttaacgatacgcgggacggcaaaaaatacgaaacggtatcgataggcggcagagtgtggatggcgcaaaaccttaactatgaggcgccggacagttcatggtgctacggcgacagcgccggaaattgcggcaggtacggcaggctgtacgcttggaacgcggcgcgaacggtttgcccgacggggtggcatttaccgaccgttcaggagtgggacgacttggttaacgcggccggcggcgccaaaacggcgggcaataaactgaaagcgacatccggttggacatttttcggcagcggctgggtacggaccggcaacggcacggacgattacggtttctcggccctgcccggcggcaaacgcgccggagacgctttccactatatcaaccaagacggctactggtggacggctacggaggatgagaaagatgttgagaaagcgtactaccggaaaattgacgagtacaaaggagaggtgaaatggggggaatggggcgacaaaatcaagagcagtgggatgtcggtgaggtgcgtcgttgacgaagccgcgccctattcgctgacgctgatcgccgcaaacggcggaaccgtctcagccaacccgaagaaagcttcctataaggccggagaacaggttgcgatctccgccgtcccgaacaacgggtacgcgttcgccggctggacgggcgggcgcaccgcanacgccgactacgcggttaccaccgttatcgtagactcgaacattactatcaccgccaatttcaagaagagcgacgcgccatccgtcgcttacggcactctttccgacacgcgggacggcaaaaagtacaaaacggcggtgatcggcggcaagacttggacggctgagaatctcagttatcaaacgcctgaaaattcatggtgctacgacgacaaaaccgacaattgcgcaaaatacggcaggctctacgtgttggagacggcgaaaaaggcttgtccggcaggctggcatctgcccacccgcgacgaatggaacgatttgatatcggcggctggcggcgagaacgcggcgcataagaggctgaaatcaatttcaggctggagccgaaccggcaacggcacggatgtctacggcttttcggcattgcccggcggctaccgcaaccaccttggccgtcgcgccaaactggagttcgaagaggccggcaacgagggctattggtggaccgcaacagaaggagaatttataagcagccaactcggcgccttcgtgggcatggcctcagacagcgtgaatgtatttttggacgcatactacaagagcggcgggctttcggcgcgttgcgttatgaatgaggacggggcgcttacgctcatagccacgaccggcggaaccgtgtcggccgatccaagcaaagcgtcatataaagccggtgaacaggttacgatctcagccgtcccgagcgacggatacgtattcacagattggacgggcgggtcggtcgcggacgtcaacgccgcaaccaccaccgtcgccgtgaacgcggatatgacaatcttcgccaatttccggcgtatcgtttccggcgcgctttccgatactcgcgacggcaagacgtacaagacggcaaagataggccgcaaaacatggatggccgagaacctgaattatcagacggacgacgggtcatggtgctatcaaaacgacgcggcgtactgcgataaatacggcagactgtacgattggaagacggccaagaaagcctgcccgacggggtggcatcttcccacccgtgcggagtgggacagtttggcagcgacggcgggaggctggtgtcataaccaaccctataataacgacattggcattacttggtatgaggcgggcaagaagctgaaatcaaagacagactggggccaaggcgttagcaagaggggcggtaacggaacggacaacttcggcttttcggccatgcccggtggcttccgcgacggcggctctagcggcaaatccgaacgcttcggccttgccggtagcgtcggcttctggtggtcgtccgcgcaaagaatcatccgcggcgacggcttctttaaacctgtcacgcaaaaagacagcggcagcgcgtacatgcgcgagatggacaatattctcgacgtttttggcgaacacgacagagacaagagccacgggtattcggtgaggtgcgtgatggacaaatga

SEQ ID NO: 56322 - protein, 844 aa, Unknown
  Obtained from environmental sample
  misc_feature (1)..(844): Xaa is any amino acid
MQSYPYHRSLGFSARCVSDKEGHIPAPAALKLKLIAATGGTVSANPNKASYVAGERVTISAVPNRGYTFAKWTGGKVADTGYAVAIVTVNSNTAITANFNKRKAPPVVYGSLNDTRDGKKYETVSIGGRVWMAQNLNYEAPDSSWCYGDSAGNCGRYGRLYAWNAARTVCPTGWHLPTVQEWDDLVNAAGGAKTAGNKLKATSGWTFFGSGWVRTGNGTDDYGFSALPGGKRAGDAFHYINQDGYWWTATEDEKDVEKAYYRKIDEYKGEVKWGEWGDKIKSSGMSVRCVVDEAAPYSLTLIAANGGTVSANPKKASYKAGEQVAISAVPNNGYAFAGWTGGRTAXADYAVTTVIVDSNITITANFKKSDAPSVAYGTLSDTRDGKKYKTAVIGGKTWTAENLSYQTPENSWCYDDKTDNCAKYGRLYVLETAKKACPAGWHLPTRDEWNDLISAAGGENAAHKRLKSISGWSRTGNGTDVYGFSALPGGYRNHLGRRAKLEFEEAGNEGYWWTATEGEFISSQLGAFVGMASDSVNVFLDAYYKSGGLSARCVMNEDGALTLIATTGGTVSADPSKASYKAGEQVTISAVPSDGYVFTDWTGGSVADVNAATTTVAVNADMTIFANFRRIVSGALSDTRDGKTYKTAKIGRKTWMAENLNYQTDDGSWCYQNDAAYCDKYGRLYDWKTAKKACPTGWHLPTRAEWDSLAATAGGWCHNQPYNNDIGITWYEAGKKLKSKTDWGQGVSKRGGNGTDNFGFSAMPGGFRDGGSSGKSERFGLAGSVGFWWSSAQRIIRGDGFFKPVTQKDSGSAYMREMDNILDVFGEHDRDKSHGYSVRCVMDK

SEQ ID NO: 56323 - DNA, 621 bp, Unknown
  Obtained from environmental sample
  misc_feature (1)..(621): n is a, c, g, or t
ttgcaaaataacatagtgtcggtgcttgctgatatggtagaaaaccgcgacaaggggacaggcggtcatattgaacgcacttcaatttatattaaaatactgatagaagagatgaaagagcgcggagtttatcttgatgaaatccgcgactgggatgtagaaaaaataatttcttccgcgcgcatgcatgaccttggaaaaatctcgattagcgatattattgttaacaagccggataaacttactgaggatgaatacgaattgattaaaacgcatactatcgaaggcgagctgataattgacgagataatttccaaaaccggagaagatgattttttgcacagcgcaaggctgtttgccggatgtcatcatgaacgctgggacggcaatggatatccgcgcggtttaaaaggacagaatattccgcttcaggggcgcattatggctattgtagatgtgtacgacgcccttgtttcagaacggccgtataaaaaagctttttcggacgaagaagctgtacaaataatcatggataatgcaggagttcattatgatccgaaaatagccgaagttttttttgcggtaaaggatcaatttaaatctgtaaaagcaggtttataa

SEQ ID NO: 56324 - protein, 206 aa, Unknown
  Obtained from environmental sample
  DOMAIN (20)...(157): HD domain
  misc_feature (1)..(206): Xaa is any amino acid
MQNNIVSVLADMVENRDKGTGGHIERTSIYIKILIEEMKERGVYLDEIRDWDVEKIISSARMHDLGKISISDIIVNKPDKLTEDEYELIKTHTIEGELIIDEIISKTGEDDFLHSARLFAGCHHERWDGNGYPRGLKGQNIPLQGRIMAIVDVYDALVSERPYKKAFSDEEAVQIIMDNAGVHYDPKIAEVFFAVKDQFKSVKAGL

SEQ ID NO: 56325 - DNA, 1083 bp, Unknown
  Obtained from environmental sample
  misc_feature (1)..(1083): n is a, c, g, or t
gtgatctttctgtttgcttataccatttacgcttcctcaagcatcaaggcctgcggtaccttgttcaacaccgtgcttggtattgataccaatctcgcaatgtacataggcgcgtttataattatcgggtatacgttcatgggcggttttcaggctgtatgctggacggattttttccaggggctgctcatgctggccgcgctccttatcgcacccattttcgcgctggcgctggtcgagaccgggcataccgccgcttccgttactttccccgtaaactactggaatttcatgagcagcggaaagatggactggaaaagctgggcggacattcttaccggattcgggtggggcctcggctatttcggaatgccgcatatcattatcagattcatggcgatccgttcacaaaaggaagttaagaaaagcgccattgtcggcataacatggaccgtattgattctgctcttctctgtcgcggttgccagtgtaggccgcttatttcttggcgatctcgaagacagttcattggtttttatcacgatggtgcgcaaaatattcccgggggttatctccggtatcctgttgtccgcaattctggccgccgccatgagtactgccgactcccagcttcttgcttccgcttcagccttcgcggctgatgtgtataaccctgtactgcgcggaggcaaaggcactgaagaagagatgttctggtcgggacgttttgttgttgcgattatcgcgcttttggcgattattatcgcctcaaatccgggtagcggcactattatgagccttgtcggaaacgcgtggggcgtattcggcgccgcctttggacctgccattttactgtcgctgttctggaaacgctttaccttttcaggcgctatagccggtattgtcgctggcgcggtggcggatataatttggcttgcgtttttttccggcacaggcctgtacgagattatccccggctttatcgtgggtttagtcgccgcggttattgttaccctgtgcggcaaaggccccggcgccgatgttgaagcgctgtttgataaatctgtatctttaaaggattaa

SEQ ID NO: 56326 - protein, 360 aa, Unknown
  Obtained from environmental sample
  DOMAIN (1)...(304): Sodium:solute symporter family
  misc_feature (1)..(360): Xaa is any amino acid
MIFLFAYTIYASSSIKACGTLFNTVLGIDTNLAMYIGAFIIIGYTFMGGFQAVCWTDFFQGLLMLAALLIAPIFALALVETGHTAASVTFPVNYWNFMSSGKMDWKSWADILTGFGWGLGYFGMPHIIIRFMAIRSQKEVKKSAIVGITWTVLILLFSVAVASVGRLFLGDLEDSSLVFITMVRKIFPGVISGILLSAILAAAMSTADSQLLASASAFAADVYNPVLRGGKGTEEEMFWSGRFVVAIIALLAIIIASNPGSGTIMSLVGNAWGVFGAAFGPAILLSLFWKRFTFSGAIAGIVAGAVADIIWLAFFSGTGLYEIIPGFIVGLVAAVIVTLCGKGPGADVEALFDKSVSLKD

SEQ ID NO: 56327 - DNA, 981 bp, Unknown
  Obtained from environmental sample
  misc_feature (1)..(981): n is a, c, g, or t
ttggttctggaaatgaaaaatgatctgcgttccggctttgcccccagcggcaacagttacgcatcatgccgggcaggccgcttttcatcagtttccgcgcagacaggggaaacatggaacggcataacccagcttgaatttgcccaccgtcttgccgaacttgacaccgccgaagccgccgccaaactacagtacctgcgggaagcgatagcgtcaggcggcctgatcgccaacctgagcggttccgccgcggcgcttaaatccggcggcgcgttgattgcacaacggtttagccgcatcggtccgccaaaaacaggaatcgggggccgggaatcggggattgggaatcagtccccggcttccataaaagaggtttttgcttcaccttcgctgcaaattggttttgccgccatgacgctgcgggcggcgccttatgacaccccggcacagactgccgaaacggtattggctcaccaactttccaccggcgcgttatgggaagatatacgcatgaaagggggcgcttacggggcatccgccgccagcgacagccttgagcgctgtttctccctttcaacttaccgtgatcccaaccccttgcgttcgctggattcgttttctgccatacttaanacacacgatattaccgcanaagatgacggctttcaagaaagctgttttcaagaaaacttggaaaaaatgatcatcggctgttatgcgagcgaaacccgtccccgcacgccttcggaaaaatccgccaatgattttctccgattcctttcgcgtattgacgatggctgccgcaggcgaaaactggaacggctcatcaacatttgcgaggatgacatttccgccgccctgggaggtatcgcgtcacagattgactcgcaaaagccaagccgtgttgttattgccggaacgaacagcgcggagcaggcggctaaagcgcttggtgtggaagtgcagttgctgccggtgtag

SEQ ID NO: 56328 - protein, 326 aa, Unknown
  Obtained from environmental sample
  misc_feature (1)..(326): Xaa is any amino acid
MVLEMKNDLRSGFAPSGNSYASCRAGRFSSVSAQTGETWNGITQLEFAHRLAELDTAEAAAKLQYLREAIASGGLIANLSGSAAALKSGGALIAQRFSRIGPPKTGIGGRESGIGNQSPASIKEVFASPSLQIGFAAMTLRAAPYDTPAQTAETVLAHQLSTGALWEDIRMKGGAYGASAASDSLERCFSLSTYRDPNPLRSLDSFSAILXTHDITAXDDGFQESCFQENLEKMIIGCYASETRPRTPSEKSANDFLRFLSRIDDGCRRRKLERLINICEDDISAALGGIASQIDSQKPSRVVIAGTNSAEQAAKALGVEVQLLPV

SEQ ID NO: 56329 - DNA, 1182 bp, Unknown
  Obtained from environmental sample
  misc_feature (1)..(1182): n is a, c, g, or t
ttgggaggttattatgggatttggtggtcgagtacagataagaaggatgcagaggaatcttatattttgcaaatgaccaacacaagtaacgaagcaaccgtgaatactcttaataaaggttggatgttctcggtgaggtgtgtggcctatttgaaagaaaatttcgccgttgtggtaaatggagaaggcatcggtgataccaaaataggcgaatttgaaccgaaagctgaagtcaccataagcgctgggacggctcccgaaggtaaggggttcgtaaagtggacaacacagagcgtcggcgtggtttttgatgacgcgggtagctctacgaccacgtttataatgccgggaggaagtgatgtaacggtaacggctatctttggcgaaaaaaaacacaaagttgaaatcgtggacgcgggagaaaacgctcttggtggcggcgtatatgcggccggcgagcgtgttaaaataaagcttgggacggcgcccacagataacaagaagttctatatgtggacgactcanagtaacgacgtggtttttgacttcgattacggcgctactaccacgtttaccatgcccgaacacgacgttacggtgaaggctgagttcggggtggcgtttatagacatgagagacggcaaaatatacaaaaccacaaaaatcggcgagcaggtttggatggcggagaatttgaattatgagacggagggttcaaggtgctataatgatagtacagcatattgcgataagtatgggaagttatataatttggaaacggctattaaggcttgtccaaatggttggcatttgccgagcagggatgagtgggaggtattgacaaaaacgattggcgagagaacagcatgcaagtatcttaaatctactagcggttgggacagttacctcagagattctagcaatggcgatgataagtacggtttttcagccctgcctggcggctatctcagttcgaatggctatttcggcgatgccggccgcttcggtggctggtggagtgccaccaagtccagaaatcgtgaatatccaggcaacgtggtcatcaggattgaggaatacatgaacggtgccaccagcgactacccatacgagaagaactacttgttcagtgtccgctgcttgcaagatacccccgtcccgcccaaaagagagaccaaatga

SEQ ID NO: 56330 - protein, 393 aa, Unknown
  Obtained from environmental sample
  misc_feature (1)..(393): Xaa is any amino acid
MGGYYGIWWSSTDKKDAEESYILQMTNTSNEATVNTLNKGWMFSVRCVAYLKENFAVVVNGEGIGDTKIGEFEPKAEVTISAGTAPEGKGFVKWTTQSVGVVFDDAGSSTTTFIMPGGSDVTVTAIFGEKKHKVEIVDAGENALGGGVYAAGERVKIKLGTAPTDNKKFYMWTTXSNDVVFDFDYGATTTFTMPEHDVTVKAEFGVAFIDMRDGKIYKTTKIGEQVWMAENLNYETEGSRCYNDSTAYCDKYGKLYNLETAIKACPNGWHLPSRDEWEVLTKTIGERTACKYLKSTSGWDSYLRDSSNGDDKYGFSALPGGYLSSNGYFGDAGRFGGWWSATKSRNREYPGNVVIRIEEYMNGATSDYPYEKNYLFSVRCLQDTPVPPKRETK

SEQ ID NO: 56331 - DNA, 1902 bp, Unknown
  Obtained from environmental sample
  misc_feature (1)..(1902): n is a, c, g, or t
gtggttttaggcgttattggcgttgatattagcgttgaggacattcagaaaatttcacaagctcgtaaaccattaggtgacgccgttaccgcagtattcagcaacaatggcactgtaactgggcattttgaccctagccgcatagggaaaaaaatacaggaaacagaaaaagatatgtttggaccataccttgaagattatttgaactatctcagagaaggaaagccatattcatttgtaagatatattccagcgataggctcagatatggcattatttttcaccccaattagaattggtgaatctacaaccccttggagctttgcggtggcagtttcaaccaagacagtaatggcaccggtgtataaaatgatacgaacagctatttacgtaagcattgctatgcttgtggcggtaattatagtggcggcgtttatgtccggatccatcagcaagcctattgtcaaagtaaccaaagccctcaaaaatatttccgaaggcgaaggcgatttaaccaaaagaatagatgtccgttccagagacgaaataggcattctggtgggctatttcaacaaactcatggatacgctccagcacccaatcagggaaaccaaaatgaccgtgaacgctttggccgcagaggcagaaaagctttcctccgtttccagccatctctccgagacatccaaagaaacggttaaccagatgaacaacgccacgaacatagccgagcaagtggcaacgaacataagggcaatggcaagcggagcagaacaagcgagcgtcaacgcaagcgaggtagccagcaccacggagcagatggcagtgaacatcaacgtcatggaaagcggagctcagcaagcgagccttcacgccaacgaggtggcaggtgcggcagagcagatgtctgcaaatatgaacacggtggcggcagcagtagatgagatgagcgcaagcataaacgagatatcccgcaatgccggtgatgccagcacagttgctggcgaagcgaccgtgaaatccaaagacgcaaccgaagtgatgaacaagctgggcatggcggctaaggaaatagggcaagttaccgatgttataaagaagatagccgacaaaaccaatcttctcgctttgaacgccacaatagaggcggctagtgctggcgaggcaggcaaaggctttgcggttgttgctggtgaaataaaagagcttgccaaccaaagcgcacaaagcgcagacgacatagcaatgcgcatagatggcatacagtctggtactagcaaggcggtgacggttataaaagatgtttcgcagataatagaaaaaataaacgaaggcgtagatgcaatatccaaaaacgttaagcagcagacaaaggcaagcgacgagattgcaaggaacgtttcgcaggcaaactcaggtgccaagcgcgttgccggtgcaataagcgaggttgccagtggtagcaaagacatagccnagaatgccggtcaagcgagcgtcaatgccaagcgcgtttcagattccataggcgagatagccaaaggcagcaaggacatagcgcgcaactcgggcgaggcagccaaaggcgtggatcgcgtttccaantccgtaaacgaggtagccaaaggcagcaaagatatagctcgcaacgcaggcgaggcagccaagggcgtagatcgcgtttccagatccgtaaacgaggtagccaaaggcagcaaggacatagcgcgcaacgcaggcgaagccgcaagaggagcgcaaaatgtaagctcaaatgttaccggcatgaatcgtgcggcaaaagaaagttcgcaggaagtttcgcgtgtgaaacaaagtgcagataacctatccaaaatggcggggcagttgcgtacggctatggataagtttaaggtgtaa

SEQ ID NO: 56332 - protein, 633 aa, Unknown
  Obtained from environmental sample
  DOMAIN (128)...(199): HAMP domain
  misc_feature (1)..(633): Xaa is any amino acid
MVLGVIGVDISVEDIQKISQARKPLGDAVTAVFSNNGTVTGHFDPSRIGKKIQETEKDMFGPYLEDYLNYLREGKPYSFVRYIPAIGSDMALFFTPIRIGESTTPWSFAVAVSTKTVMAPVYKMIRTAIYVSIAMLVAVIIVAAFMSGSISKPIVKVTKALKNISEGEGDLTKRIDVRSRDEIGILVGYFNKLMDTLQHPIRETKMTVNALAAEAEKLSSVSSHLSETSKETVNQMNNATNIAEQVATNIRAMASGAEQASVNASEVASTTEQMAVNINVMESGAQQASLHANEVAGAAEQMSANMNTVAAAVDEMSASINEISRNAGDASTVAGEATVKSKDATEVMNKLGMAAKEIGQVTDVIKKIADKTNLLALNATIEAASAGEAGKGFAVVAGEIKELANQSAQSADDIAMRIDGIQSGTSKAVTVIKDVSQIIEKINEGVDAISKNVKQQTKASDEIARNVSQANSGAKRVAGAISEVASGSKDIAXNAGQASVNAKRVSDSIGEIAKGSKDIARNSGEAAKGVDRVSXSVNEVAKGSKDIARNAGEAAKGVDRVSRSVNEVAKGSKDIARNAGEAARGAQNVSSNVTGMNRAAKESSQEVSRVKQSADNLSKMAGQLRTAMDKFKV

SEQ ID NO: 56333 - DNA, 603 bp, Unknown
  Obtained from environmental sample
  misc_feature (1)..(603): n is a, c, g, or t
atgtctttgctaccactggcaacctcgcttattgcaccggcaacgcgcttggcacctgagtttgcctgcgaaacgttccttgcaatctcgtcgcttgcctttgtctgctgcttaacgtttttggatattgcatctacgccttcgtttattttttctattatctgcgaaacatcttttataaccgtcaccgccttgctagtaccagactgtatgccatctatgcgcattgctatgtcgtctgcgctttgtgcgctttggttggcaagctcttttatttcaccagcaacaaccgcaaagcctttgcctgcctcgccagcactagccgcctctattgtggcgttcaaagcgagaagattggttttgtcggctatcttctttataacatcggtaacttgccctatttccttagccgccatgcccagcttgttcatcacttcggttgcgtctttggatttcacggtcgcttcgccagcaactgtgctggcatcaccggcattgcgggatatctcgtttatgcttgcgctcatctcatctactgctgccgccaccgtgttcatatttgcagacatctgctctgccgcacctgccacctcgttggcgtga

SEQ ID NO: 56334 - protein, 200 aa, Unknown
  Obtained from environmental sample
  SIGNAL (1)...(22)
  misc_feature (1)..(200): Xaa is any amino acid
MSLLPLATSLIAPATRLAPEFACETFLAISSLAFVCCLTFLDIASTPSFIFSIICETSFITVTALLVPDCMPSMRIAMSSALCALWLASSFISPATTAKPLPASPALAASIVAFKARRLVLSAIFFITSVTCPISLAAMPSLFITSVASLDFTVASPATVLASPALRDISFMLALISSTAAATVFIFADICSAAPATSLA

SEQ ID NO: 56335 - DNA, 393 bp, Unknown
  Obtained from environmental sample
  misc_feature (1)..(393): n is a, c, g, or t
ttggaggcatttcttcttgaacttggcaaaggctttgcttttgttaaacggcaatatcgtgttccagtaggcaatcgtaatttttcagtagatttggtattttacaacatcttgctaaaatgttatgtattgattgatntgaaacgtggtgaagtagaacatagtgatattggacaaatgaatttttaccttaactattttcgcaaagaagtaaatgttaaaaccgacaatgagccaatcggtatagtattgggtgcatataaagataaaattatggttgagtacgcaatagataatattactaacaagttgtttgtaagtaaatatcaactttatttacctaataaggaagaattagaaaaagaattaactcatttgataggaaatgtataa

SEQ ID NO: 56336 - protein, 130 aa, Unknown
  Obtained from environmental sample
  DOMAIN (1)...(126): Protein of unknown function (DUF1016)
  misc_feature (1)..(130): Xaa is any amino acid
MEAFLLELGKGFAFVKRQYRVPVGNRNFSVDLVFYNILLKCYVLIDXKRGEVEHSDIGQMNFYLNYFRKEVNVKTDNEPIGIVLGAYKDKIMVEYAIDNITNKLFVSKYQLYLPNKEELEKELTHLIGNV

SEQ ID NO: 56337 - DNA, 588 bp, Unknown
  Obtained from environmental sample
  misc_feature (1)..(588): n is a, c, g, or t
atggcttacgctaagtttgacgagactgtggatctgtccgttaaactcaaccttaaaaagagccagaccgtgcgtgatacggtggttcttccacatcagttccgtggcgagaaaaaagtgcttgttttctgcaagccggaaaaagaaaaggaagcccaggaagcgggagcgacttttgtcggcgcggatgatttaattcaaaaagtaaaggacggatggactgactttgacgtagcggtcgccactcccgatatgatgaaagatgtcggcaagcttggtatggtattaggccgcaaaggtcttatgccgaacccgaaaacagggacggtaaccttcgaccttaaaggaacgttagctgaacttagaaaaggccgcgtggaattcagggcggacaagacgggcgttcttcatcttgcggtgggcaagatttcaatggaaccgtcgcaggtcgccgaaaatgttacaacggtcatggcggaagttaaacgcaaacgccccattgacgttaagggtgagtttattcaatcggtttcggttgcgtctaccatgggacccggcgtatgggtcgctataaaggatcaggattag

SEQ ID NO: 56338 - protein, 195 aa, Unknown
  Obtained from environmental sample
  DOMAIN (1)...(186): Ribosomal protein L1p/L10e family
  misc_feature (1)..(195): Xaa is any amino acid
MAYAKFDETVDLSVKLNLKKSQTVRDTVVLPHQFRGEKKVLVFCKPEKEKEAQEAGATFVGADDLIQKVKDGWTDFDVAVATPDMMKDVGKLGMVLGRKGLMPNPKTGTVTFDLKGTLAELRKGRVEFRADKTGVLHLAVGKISMEPSQVAENVTTVMAEVKRKRPIDVKGEFIQSVSVASTMGPGVWVAIKDQD

SEQ ID NO: 56339 - DNA, 534 bp, Unknown
  Obtained from environmental sample
  misc_feature (1)..(534): n is a, c, g, or t
atggcaataatcgctaagaaaatacaggaaagtaaaactaaagctattggtgaactcaaagaatccttgagctccgctaaagattttatctttaccgagtaccgcggtcttacggtggagcaaatcactaatttaagaaaacaactgcgagcgaaggatgttaaatataaagttgttaaaaacaattttgcccagatcgcgtttaaacagttgtcggatcaggatgtatctaaataccttgtcggacctactgcggtagcaattactcccaaggattccaacgaagtagccaagatactttttgactttttaaaagaagttcccgccctgcgtgttaaaggcgcattgataagcaataccgtatacgacgccgcccaaaccgaggctttctctaaactgcccggcaggttggaacttatttctatgcttatgtcggtaatgaacggccccgcgcgcagtcttgcagccgcgctcaacgatgtgccgtccagactggtacgcacagtcaaagctatcgccgacaagaaacaataa

SEQ ID NO: 56340 - protein, 177 aa, Unknown
  Obtained from environmental sample
  DOMAIN (7)...(105): Ribosomal protein L10
  misc_feature (1)..(177): Xaa is any amino acid
MAIIAKKIQESKTKAIGELKESLSSAKDFIFTEYRGLTVEQITNLRKQLRAKDVKYKVVKNNFAQIAFKQLSDQDVSKYLVGPTAVAITPKDSNEVAKILFDFLKEVPALRVKGALISNTVYDAAQTEAFSKLPGRLELISMLMSVMNGPARSLAAALNDVPSRLVRTVKAIADKKQ

SEQ ID NO: 56341 - DNA, 579 bp, Unknown
  Obtained from environmental sample
  misc_feature (1)..(579): n is a, c, g, or t
atggacttaaaccgcgacccccttcgggaaccgcggttcgtgagaaaacaagctgtcaaatcacgtggcttaatcgccttcaatctccattattggatttctacagtgccgccggccgcggtaatcgcgtccttgatctttgcggcttcttccttggaaacattttccttgaggggcttgggcgcgccttcaacaaggtctttggcttctttaaggccaaggctggtgatcgtcctgacttccttgataaccgcgattttcttggattcctcgaaagccttaagaacgacggtaaactcggttttttcctcagccgccgccgcgggagccgccccgccgtcgccaaccgctaccgtcacaggggccgccgcggacacgccgaatttctcttccatcatttttaccaattctgaaacttccagaaccgtcatggacgcaatcgcttctaaaatttcttcttttgtggctgccatattatcttctcctaaatatgtgttatacgctccatacgaagcgcttacccacttgatcctaagaccaaacaggcatttatttaaaccgacaggaacggcagcttag

SEQ ID NO: 56342 - protein, 192 aa, Unknown
  Obtained from environmental sample
  misc_feature (1)..(192): Xaa is any amino acid
MDLNRDPLREPRFVRKQAVKSRGLIAFNLHYWISTVPPAAVIASLIFAASSLETFSLRGLGAPSTRSLASLRPRLVIVLTSLITAIFLDSSKALRTTVNSVFSSAAAAGAAPPSPTATVTGAAADTPNFSSIIFTNSETSRTVMDAIASKISSFVAAILSSPKYVLYAPYEALTHLILRPNRHLFKPTGTAA

SEQ ID NO: 56343 - DNA, 384 bp, Unknown
  Obtained from environmental sample
  misc_feature (1)..(384): n is a, c, g, or t
atggcagccacaaaagaagaaattttagaagcgattgcgtccatgacggttctggaagtttcagaattggtaaaaatgatggaagagaaattcggcgtgtccgcggcggcccctgtgacggtagcggttggcgacggcggggcggctcccgcggcggcggctgaggaaaaaaccgagtttaccgtcgttcttaaggctttcgaggaatccaagaaaatcgcggttatcaaggaagtcaggacgatcaccagccttggccttaaagaagccaaagaccttgttgaaggcgcgcccaagcccctcaaggaaaatgtttccaaggaagaagccgcaaagatcaaggacgcgattaccgcggccggcggcactgtagaaatccaataa

SEQ ID NO: 56344 - protein, 127 aa, Unknown
  Obtained from environmental sample
  DOMAIN (59)...(127): Ribosomal protein L7/L12 C-terminal domain
  misc_feature (1)..(127): Xaa is any amino acid
MAATKEEILEAIASMTVLEVSELVKMMEEKFGVSAAAPVTVAVGDGGAAPAAAAEEKTEFTVVLKAFEESKKIAVIKEVRTITSLGLKEAKDLVEGAPKPLKENVSKEEAAKIKDAITAAGGTVEIQ

SEQ ID NO: 56345 - DNA, 1290 bp, Unknown
  Obtained from environmental sample
  misc_feature (1)..(1290): n is a, c, g, or t
atgaacgcgtcaaggtacataaaaatagccctcttttttattgttctgggaagcgcgggcgccgggtacatcgttctttccgccagcggcataagtcctttcaatacaaatatttacgatgtcattcttgaagacgcttcgggcctttccacccgttcaaaaatttaccttgcaggcgtatcggtgggcaaggtacagggcatacagctaaacggaaccgaagccagggtgaaactggcgtttttaaaggatatagaagtccgcgaggacgcaattatcagcaggaaaccgtcatcccttttggggaccgctgtcctcagcctggatcccggatcgaccaaatcccgtgtaatcccgccggggagcttaatcaaaagcgtgcctcccgccggagatttaaattccgcaatgagcatggtaggggatattggcggccaggtttccacaatccttgacgagtttcgcacaaaccagttggccctcatagcggtttcccttgaagcgatcagctctatcgccggaaaaattgacgcttcctccgatacccagctcgacaggatttcccgcatactggaatcggcagcgttaataagcgaaagaaccgaaaggcttntgcggaacagcgaattgaacataacaggttcctttacggatatttatgaagcggtcgcaaatatcagggcaattacagccgaaattgcctcaggccgcggcaacataggcgaggcagtttacagcgacaatttgtacagcagcatccttgccaccgtgggaaaaaccgaagacgcggcgggaaagcttggtactgccctggataatatttcgaccctggtacgcaatacggacgggctgataagaaccgcggatggggtaataaccaacgccggagaaatcgtggacaaggctttaggccttgggattcaggtggacaccaacgcccgttatgacatcatcgctcaaaacatgagggcttccgcttcaatccgccttgatccgcgctcaaacgacaggtggtaccgtgttggcgtatcgtcggcgcccgatggcgtttcaagccgtaccgtaaaggaaaccactgatattacaggaagcattacccgggaagacactaccgaaacacagtattccattgcggtagacgcggaacttgccagaaaatttggccttttcacgctgcgcggcgggttgctggaaagtacggcaggaattggtttggatgttcaacctttaaaatggctcaacctttcaggagaagtttttcattttcaggcaggggaaatgccaaattaa

SEQ ID NO: 56346 - protein, 429 aa, Unknown
  Obtained from environmental sample
  SIGNAL (1)...(27)
  DOMAIN (35)...(111): mce related protein
  misc_feature (1)..(429): Xaa is any amino acid
MNASRYIKIALFFIVLGSAGAGYIVLSASGISPFNTNIYDVILEDASGLSTRSKIYLAGVSVGKVQGIQLNGTEARVKLAFLKDIEVREDAIISRKPSSLLGTAVLSLDPGSTKSRVIPPGSLIKSVPPAGDLNSAMSMVGDIGGQVSTILDEFRTNQLALIAVSLEAISSIAGKIDASSDTQLDRISRILESAALISERTERLXRNSELNITGSFTDIYEAVANIRAITAEIASGRGNIGEAVYSDNLYSSILATVGKTEDAAGKLGTALDNISTLVRNTDGLIRTADGVITNAGEIVDKALGLGIQVDTNARYDIIAQNMRASASIRLDPRSNDRWYRVGVSSAPDGVSSRTVKETTDITGSITREDTTETQYSIAVDAELARKFGLFTLRGGLLESTAGIGLDVQPLKWLNLSGEVFHFQAGEMPN

SEQ ID NO: 56347 - DNA, 795 bp, Unknown
  Obtained from environmental sample
  misc_feature (1)..(795): n is a, c, g, or t
atgagcgccgaaaaaccttcgataaacgataaaccttcgattgaacgacctataatcaggatagagcatctttccaaatcttttgggaaacagcgggtattggcggacgtgagctttaatgtgcctgaaaaatgtatttacgccattgtcggacaaagcggtaccggaaaaagcgttttgttcaaatccataatcgggatgataaaaccggacggcggaaaagtctggtttaaggacacggaacttaccgcgctggactatgattccctgattgcccaaaggaaatcattcggctacgcgtttcaaaacgccgccttatttgattccatgaacgttggggaaaatctggcattccccctccgtgaggttttgggattaaaaaacagggaagaaatacgaaaaaaagttagcagactccttgaatggatagagcttcccggtatagagtctaaaaacccggacgaattatccggcggaatgcgaaagctcgtaggcgttgcccgcgcgttaatcatggaacctgaggtgcttttttttgacgagcctaccaccggacttgacccggtgttgtcggaaaccatcaataacctggtagtccgcgtcaacagggagcttcgcataacctgcctgataatcacccacgacatccccgccgcttttcgcatcgccgggagaatcgcgtttttggatcaggggtttataatcgcggacggaaagccggaagaggtggcaagatcggatcatcccatggtaagggattttatccgtatctcattcagtgagatgaatttatga

SEQ ID NO: 56348 - protein, 264 aa, Unknown
  Obtained from environmental sample
  DOMAIN (44)...(232): ABC transporter
  misc_feature (1)..(264): Xaa is any amino acid
MSAEKPSINDKPSIERPIIRIEHLSKSFGKQRVLADVSFNVPEKCIYAIVGQSGTGKSVLFKSIIGMIKPDGGKVWFKDTELTALDYDSLIAQRKSFGYAFQNAALFDSMNVGENLAFPLREVLGLKNREEIRKKVSRLLEWIELPGIESKNPDELSGGMRKLVGVARALIMEPEVLFFDEPTTGLDPVLSETINNLVVRVNRELRITCLIITHDIPAAFRIAGRIAFLDQGFIIADGKPEEVARSDHPMVRDFIRISFSEMNL

SEQ ID NO: 56349 - DNA, 363 bp, Unknown
  Obtained from environmental sample
  misc_feature (1)..(363): n is a, c, g, or t
atgcgaaaagcggcggggatgtcgtgggtgattatcaggcaggttatgcgaagctccctgttgacgcggactaccaggttattgatggtttccgacaacaccgggtcaagtccggtggtaggctcgtcaaaaaaaagcacctcaggttccatgattaacgcgcgggcaacgcctacgagctttcgcattccgccggataattcgtccgggtttttagactctataccgggaagctctatccattcaaggagtctgctaactttttttcgtatttcttccctgttttttaatcccaaaacctcacggagggggaatgccagattttccccaacgttcatggaatcaaataaggcggcgttttga

SEQ ID NO: 56350 - protein, 120 aa, Unknown
  Obtained from environmental sample
  DOMAIN (41)...(79): Protein of unknown function (DUF1602)
  misc_feature (1)..(120): Xaa is any amino acid
MRKAAGMSWVIIRQVMRSSLLTRTTRLLMVSDNTGSSPVVGSSKKSTSGSMINARATPTSFRIPPDNSSGFLDSIPGSSIHSRSLLTFFRISSLFFNPKTSRRGNARFSPTFMESNKAAF

SEQ ID NO: 56351 - DNA, 396 bp, Unknown
  Obtained from environmental sample
  misc_feature (1)..(396): n is a, c, g, or t
atggaatccatgtccattaacgtcgttcattaccttgtaatgccgaaggttgtggcgtctttcctggtttttccggttcttacccttctggccgatgtagtcggggtaataggttcttttgttatcgcggttcctctatttaatatagattcggctggatatctggattatatgtttgattttacgaatccccgcgatatttttattggccttatcaaagcggcgataatggggattattatttcgaccatctgctgctttaacggccttaggacgacacagggcgccaggggggtgggcgacagcgccaccagggcggttgtgatctcgtcagtatcaattcttgtggcggactacctcatgaccaccattatgctgccgttcatttacatatga

SEQ ID NO: 56352 - protein, 131 aa, Unknown
  Obtained from environmental sample
  DOMAIN (1)...(126): Domain of unknown function DUF140
  misc_feature (1)..(131): Xaa is any amino acid
MESMSINVVHYLVMPKVVASFLVFPVLTLLADVVGVIGSFVIAVPLFNIDSAGYLDYMFDFTNPRDIFIGLIKAAIMGIIISTICCFNGLRTTQGARGVGDSATRAVVISSVSILVADYLMTTIMLPFIYI

SEQ ID NO: 56353 - DNA, 1149 bp, Unknown
  Obtained from environmental sample
  misc_feature (1)..(1149): n is a, c, g, or t
atgctgcataattttttaatattcataagcccgttttattttcctgccctgcttgccgcgacggtttatttttttattttatcgcttgccaaccattatgagatgtggcgttttacctcggcgtcgcagatattcgacgggcctatggtttccgtgcttgtcccggcgcgcaacgaggagcagaacatagaacgctgccttaactcgctgcgaaaccaggtatacaaaaaatatgagattctggcgttaaacgataactcaacggacaataccctggaaattctcaaccgaatcgccgcttcggacagcaaggtgaaggttattaacggcaaaccgcttcccaatgactggtacggcaagccttacgccatgcaccagcttacgcaggaagcaaagggcgaaatactgctctttaccgacgcggacacgatacacacgcccaccagcatcgcctgggcggtaaccaatatgcatgaccttaaagcggacctgttatctggttatgttggtcagatttttctcagcttcggggaaataatcacggttccgatgatgttttttcttaccgggtttgtaatcccgctatttatgaaccgttatacgaaattacactggttttcccacgcgatagggcagtttatcgccgtgcgaaagacggtttttgacgcgataggcggatgtgaatccttcagaaaaaaaacaagcgaagacgtttatatgtgccgttatataaaaaacaaaggctataataccaggttcctgaatataactgagcatgttaaatgccggatgtacaacggctaccatgccgcaattgagggtatcggaaaaaatatttttgattttctggggaaaagcactatcctgatttttttcataatgtttttaataatcatttttctggttctgcctttcccgttgctgtttatctgtattgccgcttcaagtccctggatctggcatattatttccgcggttgggttgcacacccttacatggctgtttatgttcctgggcctgaggctgaactggtggtatggtttcctttggcccttgatgtttataaaccttatctacatggggctgtggtcatggttcaggacggtttccggtaaaggctttctctggaaagacagaaaggtaagctga

SEQ ID NO: 56354 - protein, 382 aa, Unknown
  Obtained from environmental sample
  SIGNAL (1)...(19)
  DOMAIN (51)...(225): Glycosyl transferase family 2
  misc_feature (1)..(382): Xaa is any amino acid
MLHNFLIFISPFYFPALLAATVYFFILSLANHYEMWRFTSASQIFDGPMVSVLVPARNEEQNIERCLNSLRNQVYKKYEILALNDNSTDNTLEILNRIAASDSKVKVINGKPLPNDWYGKPYAMHQLTQEAKGEILLFTDADTIHTPTSIAWAVTNMHDLKADLLSGYVGQIFLSFGEIITVPMMFFLTGFVIPLFMNRYTKLHWFSHAIGQFIAVRKTVFDAIGGCESFRKKTSEDVYMCRYIKNKGYNTRFLNITEHVKCRMYNGYHAAIEGIGKNIFDFLGKSTILIFFIMFLIIIFLVLPFPLLFICIAASSPWIWHIISAVGLHTLTWLFMFLGLRLNWWYGFLWPLMFINLIYMGLWSWFRTVSGKGFLWKDRKVS

SEQ ID NO: 56355 - DNA, 1332 bp, Unknown
  Obtained from environmental sample
  misc_feature (1)..(1332): n is a, c, g, or t
gtggcgaaagaggaggctttggcgcgcgcgaaagaagtacaatcaatgattgataagggcgagacgctttcgccgcttgcgggcgtgtcaatcgctgtaaaagataacatttccacagagggaatcgaaaccacctgcgcttccaaaatgctcaaggggtacacgcccgtgttcaacgcgacggttatcgagaagctggaaaaagccggcatggttctcatcgggaaaaccaatatggacgaatacgcgatgggcggctccagcgaaaccggggcgtcaggcccggtgcataatccctgggacatagcgcgtgtcgccggcggttcatccggcggcagcgtcgctgctgtggctgccggagagatacccatcgcgcttggttccgatacaggcggcagtatacgccagccctgtgccttctgcggcgctaccggcattaagccaacctacggctccgtgtcacggtatgggctaatcgcctatgcgtcgtccctcgatcagatcggccctgtcggacaaaacattgacgactgcgccgctttgctgtcgatcatttccgggccggatacacgcgacagtacctgcgttatagaaaagccgtttgaattcggcgaagctttctctggaatgcaaggcgtaaagataggacttccccgaaattatttctcaggcggcattgacgatgaagtaaagtccgctgttttggctgtcgcgaaagaatttgaggcggcgggagcaatcatcgaagaatttgaaatgccgctgatggattatatgatccccgcctactacatcatcgcctgcgccgaagcatcatcaaacctctcgcgttatgatggtttgaaatacggttatcgcagcgtgaacgcccaatctctttcagaagtataccgcctttcccgcaacgagggtttcgggctggaagtaaaaagaaggataatgctcggctcgtttgtgctttcatcggggtactacgacgcttattacaaaaaagccctgcaagtacgcgcccttataaaagacgcttacacgaggctgttcacaaagtttgacatgatactctctcctgtcgctcccaccaccgcgtacaaaataggcgataacatcggcgatccaataaaaatgtacatgggagacatttacaccgtgtcgatcaatcttgccggactcccctctgcggcactgccctgcggctttgattcggcgggtctgcccatcggctttcaactgatcggtgacgctttctctgaaagcaagctcataggcgcggcgcgggtttatcaagcgcgtaccgactaccacacaaaaaaaccaatggaagcaaaagtatga

SEQ ID NO: 56356 - protein, 443 aa, Unknown
  Obtained from environmental sample
  DOMAIN (2)...(421): Amidase
  misc_feature (1)..(443): Xaa is any amino acid
MAKEEALARAKEVQSMIDKGETLSPLAGVSIAVKDNISTEGIETTCASKMLKGYTPVFNATVIEKLEKAGMVLIGKTNMDEYAMGGSSETGASGPVHNPWDIARVAGGSSGGSVAAVAAGEIPIALGSDTGGSIRQPCAFCGATGIKPTYGSVSRYGLIAYASSLDQIGPVGQNIDDCAALLSIISGPDTRDSTCVIEKPFEFGEAFSGMQGVKIGLPRNYFSGGIDDEVKSAVLAVAKEFEAAGAIIEEFEMPLMDYMIPAYYIIACAEASSNLSRYDGLKYGYRSVNAQSLSEVYRLSRNEGFGLEVKRRIMLGSFVLSSGYYDAYYKKALQVRALIKDAYTRLFTKFDMILSPVAPTTAYKIGDNIGDPIKMYMGDIYTVSINLAGLPSAALPCGFDSAGLPIGFQLIGDAFSESKLIGAARVYQARTDYHTKKPMEAKV

SEQ ID NO: 56357 - DNA, 471 bp, Unknown
  Obtained from environmental sample
  misc_feature (1)..(471): n is a, c, g, or t
gtgccgatagggaagtggatgaagacgaatctgaacgtggagacggcggattcatggtgttatgaagacaaccccgctaactgtgagaggtacgggagattgtatacgtgggaggcggcgaagagggcttgccagtcggtggggatgcggttgcctacccgcgctgagtgggatgctttggtaaatgcggctggcggttattctacggcgggtaagaaactgaaatcgacgagcggatggaattacaatggcaatgggacgaatgattacggcttttcggctctgcccggcggcggccgcggcaccgatggcagtttctacagtgccggcaaccgcggcatctggtgggcggccacggagggttccgacggttacgcctactaccggctcatgtacgacggctacgaccacgtggacgagagcaacgacgacaagggcaacggtaactctgcacgttgcttgcaggactga

SEQ ID NO: 56358 - protein, 156 aa, Unknown
  Obtained from environmental sample
  misc_feature (1)..(156): Xaa is any amino acid
MPIGKWMKTNLNVETADSWCYEDNPANCERYGRLYTWEAAKRACQSVGMRLPTRAEWDALVNAAGGYSTAGKKLKSTSGWNYNGNGTNDYGFSALPGGGRGTDGSFYSAGNRGIWWAATEGSDGYAYYRLMYDGYDHVDESNDDKGNGNSARCLQD

SEQ ID NO: 56359 - DNA, 1713 bp, Unknown
  Obtained from environmental sample
  misc_feature (1)..(1713): n is a, c, g, or t
atgcttcgtgaacttcgcataaaaaacttagcgctgattgaaaacctaacccttgacttccgtcaaggcttcaccgtcttcaccggcgagaccggcgccggcaagtccatcctcataggcgccatcgggcttttactgggcgaacgggcctcatccgagatgatacgcagcgggtgcgaggacgccgaggtaagcgggtcgctcgatatagagaacatccgccacaaactgcgcgagtttctgcgtgaagccggcatcgacgccgaggacggcagcctcataatccgccgcaacatttcaaaggccggcaagaataggatacacgtcaatcaagtgccgctgccgctctctaccctaaaagccttgggcgacctgctcatagacctgcacggacagcacgagcaccaatcactgctaaacgaagacacccacgccgacatcgtggacgcgctgccggaggcgtccgccgccaaggcaagctacataacctcgtacaacgcccacatcgccgcggcgcaagaactacgcgacgcgcaaagagcggcgcgggaactcgccgataaaaaagacgtgctggaatttcaatacaaagaactctccgccctcaacccgcaacgcggcgaggagacggcgctcgaacaagaactttcgcttctgtcaaccgcggcggagcgctccgaatgcgtaagcgatatactgtcgctcttaggctcggacgacaccggcgcgacaagcggcggcgagtcaatacaaaaaagactgtcgcaaatcaaccgcaaattagaagctctaagcaaacacgacccgtcagccgcaccgtatatagacgaaatagaatccgctctatcaatctgctccgacttggatatcttttgcagcagatacttagagacgacggacggcgctaccggtaccgagagcagaatcgaagagataaactcgcggttggccaagatacagcggctcaaaaagaagtattcatgcgcgatggacgaactgattgacaaacgcgaacagttggaaaaagatttatcattacttaataacaccgacgcggatatggaactgcttgagaaaaaagccgcgaaagcgcgcaaagagtgcgtagacgccgccgcagtgctgacatcgtcgcgcaaaaaggccatcgataccttcgacaaagaggtaacgcgccgaatggaactcttaggcttcgtcggcggatcgctcgccaccgaactaacgccgttagccgaacccgcccaaaacggcatggacgctatacgcttcttggtgaggacgaaccccggcgaaccgttcctgccgctcgcaaaaacagcctccggcggcgaggcttcgcggcttatgctggcagtcaaatccatactcgccgcgcacgacgaaatccccgtgctcatcttcgacgaaatcgacaccggcataggcggcgttctggcaggagaggtcgccaaagcgctatattccctctcgtcaacgcaccaagtgctatgcatatcgcacctgcaccaaatagcatcggtagcggataaccactaccgcgtcgccaagagggttgacggagggcggacggtgacggaagtcgaaatgctggacggcgaacaaaggacgctggagatcgctaggatgctgggcggggcggactcggaggcggcggtcaagcacgcggtggagttgctgaaaaagcggcagactttaaccaagaacatataa

SEQ ID NO: 56360 - protein, 570 aa, Unknown
  Obtained from environmental sample
  DOMAIN (1)...(524): RecF/RecN/SMC N terminal domain
  misc_feature (1)..(570): Xaa is any amino acid
MLRELRIKNLALIENLTLDFRQGFTVFTGETGAGKSILIGAIGLLLGERASSEMIRSGCEDAEVSGSLDIENIRHKLREFLREAGIDAEDGSLIIRRNISKAGKNRIHVNQVPLPLSTLKALGDLLIDLHGQHEHQSLLNEDTHADIVDALPEASAAKASYITSYNAHIAAAQELRDAQRAARELADKKDVLEFQYKELSALNPQRGEETALEQELSLLSTAAERSECVSDILSLLGSDDTGATSGGESIQKRLSQINRKLEALSKHDPSAAPYIDEIESALSICSDLDIFCSRYLETTDGATGTESRIEEINSRLAKIQRLKKKYSCAMDELIDKREQLEKDLSLLNNTDADMELLEKKAAKARKECVDAAAVLTSSRKKAIDTFDKEVTRRMELLGFVGGSLATELTPLAEPAQNGMDAIRFLVRTNPGEPFLPLAKTASGGEASRLMLAVKSILAAHDEIPVLIFDEIDTGIGGVLAGEVAKALYSLSSTHQVLCISHLHQIASVADNHYRVAKRVDGGRTVTEVEMLDGEQRTLEIARMLGGADSEAAVKHAVELLKKRQTLTKNI

SEQ ID NO: 56361 - DNA, 915 bp, Unknown
  Obtained from environmental sample
  misc_feature (1)..(915): n is a, c, g, or t
atgcatagcacttggtgcgttgacgagagggaatatagcgctttggcgacctctcctgccagaacgccgcctatgccggtgtcgatttcgtcgaagatgagcacggggatttcgtcgtgcgcggcgagtatggatttgactgccagcataagccgcgaagcctcgccgccggaggctgtttttgcgagcggcaggaacggttcgccggggttcgtcctcaccaagaagcgtatagcgtccatgccgttttgggcgggttcggctaacggcgttagttcggtggcgagcgatccgccgacgaagcctaagagttccattcggcgcgttacctctttgtcgaaggtatcgatggcctttttgcgcgacgatgtcagcactgcggcggcgtctacgcactctttgcgcgctttcgcggcttttttctcaagcagttccatatccgcgtcggtgttattaagtaatgataaatctttttccaactgttcgcgtttgtcaatcagttcgtccatcgcgcatgaatacttctttttgagccgctgtatcttggccaaccgcgagtttatctcttcgattctgctctcggtaccggtagcgccgtccgtcgtctctaagtatctgctgcaaaagatatccaagtcggagcagattgatagagcggattctatttcgtctatatacggtgcggctgacgggtcgtgtttgcttagagcttctaatttgcggttgatttgcgacagtcttttttgtattgactcgccgccgcttgtcgcgccggtgtcgtccgagcctaagagcgacagtatatcgcttacgcattcggagcgctccgccgcggttgacagaagcgaaagttcttgttcgagcgccgtctcctcgccgcgttgcgggttgagggcggagagttctttgtattga

SEQ ID NO: 56362 - protein, 304 aa, Unknown
  Obtained from environmental sample
  misc_feature (1)..(304): Xaa is any amino acid
MHSTWCVDEREYSALATSPARTPPMPVSISSKMSTGISSCAASMDLTASISREASPPEAVFASGRNGSPGFVLTKKRIASMPFWAGSANGVSSVASDPPTKPKSSIRRVTSLSKVSMAFLRDDVSTAAASTHSLRAFAAFFSSSSISASVLLSNDKSFSNCSRLSISSSIAHEYFFLSRCILANREFISSILLSVPVAPSVVSKYLLQKISKSEQIDRADSISSIYGAADGSCLLRASNLRLICDSLFCIDSPPLVAPVSSEPKSDSISLTHSERSAAVDRSESSCSSAVSSPRCGLRAESSLY

SEQ ID NO: 56363 - DNA, 801 bp, Unknown
  Obtained from environmental sample
  misc_feature (1)..(801): n is a, c, g, or t
gtgagtctggataaaaacatggaaaaactgtccagcggcatacgcattaaccgcgccggtgatgacgcttcgggactcgctgtttccgagaaaatgcgggctcaaatccgcggtctgaatatggcgtcattcaacgcaatgaatggcatctcattcattcaggtatcggaaggctatctgcaggaaacccaggatattatccagcgtctgcgtgaattggcagtacaggccgccaacggtatctataccgaggaggatcgcctttacatccagatcgaagtctctgctctggtcgccgaagtagacagaattgcgtcgcacgctcagtttaacggaatgaatctgttaactggccgcttcggcaggcctgtgggtgaaaatatagtcaccgcctccatgtggttccatatcggcgccaacatggatcacaggacacaggtgtatatcggcactatgaccgcgaaaggtctcggaatcagaaatgtctccgacgatacatttatttcactgtccgcgccggacaacgccaaccgcgccattggaacccttgatgtagcgcttaaaaaagtaaacaaacaacgggccgatctcggcgcctaccagaaccgccttgaacacgcaatccgcggtattaacgttggcgcggaaaacctgcaagccgctgagtcccgcatcagggacgccgacatggcttttgagacagtcaattacaccaagaatatgatactgacccagtccgggacagcaatgctggcccaggcaaaccagaaaggacagacggtgctgcagcttctgcagtaa

SEQ ID NO: 56364 - protein, 266 aa, Unknown
  Obtained from environmental sample
  DOMAIN (173)...(244): Bacterial flagellin C-terminus
  misc_feature (1)..(266): Xaa is any amino acid
MSLDKNMEKLSSGIRINRAGDDASGLAVSEKMRAQIRGLNMASFNAMNGISFIQVSEGYLQETQDIIQRLRELAVQAANGIYTEEDRLYIQIEVSALVAEVDRIASHAQFNGMNLLTGRFGRPVGENIVTASMWFHIGANMDHRTQVYIGTMTAKGLGIRNVSDDTFISLSAPDNANRAIGTLDVALKKVNKQRADLGAYQNRLEHAIRGINVGAENLQAAESRIRDADMAFETVNYTKNMILTQSGTAMLAQANQKGQTVLQLLQ

SEQ ID NO: 56365 - DNA, 681 bp, Unknown
  Obtained from environmental sample
  misc_feature (1)..(681): n is a, c, g, or t
gtgttgttcctcgacgaagcccctgaattcaggatcaatgtgcttcaggccctgcgagagccgctggaagaccgggtgataagcatttcccgcgccgaaggccccatgcgtcttccggcggaattccagttaatactggcgactaacgcctgcccctgcggaaggctggggatcaggcataatgataatggaacggaaagcgaaatgcagacctgtttatgttcgccggaagaaatttcccggtactggcgcaaattcggcggcgccctccttgaccgtattgagattcgcgccgctgttattcccccaagtgttaatgaaatcggcaaaccaaatggaggcgccaatggcggcgagcgcagcgcggacattgccaagcgggtaaaggccgccgttgaaattcaacagcggcgctataaaggcttggggatacgccgtaacgcgctgattcccgccggaaaaatcgaaaccttttgcggcatggatcaacaggcgcgggacgcgtttcacaaggctcttgcgcggctggggctttcaggccgcgcctatcacggcattttacgggtagcgcggacaatagccgacctggagggcaaggaaacaatcggcacggaacatattctggaagcggtacagcaccgccgttatggggaagacccctacgagattatcactatttag

SEQ ID NO: 56366 - protein, 226 aa, Unknown
  Obtained from environmental sample
  DOMAIN (1)...(108): Magnesium chelatase, subunit ChlI
  misc_feature (1)..(226): Xaa is any amino acid
MLFLDEAPEFRINVLQALREPLEDRVISISRAEGPMRLPAEFQLILATNACPCGRLGIRHNDNGTESEMQTCLCSPEEISRYWRKFGGALLDRIEIRAAVIPPSVNEIGKPNGGANGGERSADIAKRVKAAVEIQQRRYKGLGIRRNALIPAGKIETFCGMDQQARDAFHKALARLGLSGRAYHGILRVARTIADLEGKETIGTEHILEAVQHRRYGEDPYEIITI

SEQ ID NO: 56367 - DNA, 1872 bp, Unknown
  Obtained from environmental sample
  misc_feature (1)..(1872): n is a, c, g, or t
atgaagaaatcgcgcggcggcggaaaagttggcagcctttatccaagacgcatacgggttatcttgcccgctatgccgcgcaagtcggctccgccgcgcaaggcgcggtttttaattcgctgccggatagaggagattaagatgcagtacacaggcgcgcaaatattagtagagtctttaattgagcagggagtggatattgttttcggctatccgggcggcgcggtcttaaatatttacgacgaactctacaaacacagcgacaagatccgccacatccttgtcagccacgaacagcacgccgctcacgccgcagacgggtatgcgcgttcaacgggaaagacgggagtgtgcatcgcgacttccggaccgggcgcgacaaatcttatcacgggaattgccactgcgtacatggactcgattccgctggtagctattacaggcaatgttcccacggggattttaggcaaggacagttttcaggaagtggacattaggggtatctccatgcctatagttaaacacaactggattgtaaagcacgtcgaanacctaggagaagtgatccgcgaagcgtttgagcttgcgtctaccggccgtcaggggcctgtgctgattgacataccgaaagatatcaccatgcttacagccgaatggcatccttccaaaaagaaaggcgagataaaagacaaagctctttccgcacgagcgaagcggcttgacgagcgtacagcgagaatcagttttacggacgaagatattgaggaagccgcggaaatgatcagtgaagccaaacggcctttgctttatgcgggaggaggagtcatcagttcaggcgcggaggcggagcttgtcgctcttgccgaaagactgaacgctcccgtcgcgctcagcctgatgggaatcggcgcgataccgaaggatcaccgcctgtgtacgggtcttatcggaatgcacggaacagtggctagcaacaaggcgacgcagaaagcggacttgctccttgcgattggggcgcgtttctccgaccgcgttatcagcaaggcggatatgttcgcgaataccgcgcaggtgattcactttgacattgatcccgcggaagtgggaaaaaacattgaaacccacgcgtgggtgattggaaacttaaagaacactcttgccgctttgcttgcaaaacttcccgcgcgtcttgaaacagaatggcacggcgagattgacaaatggaaaacccatctgccgcaaacctacacccacgaggttacattcgcgaagaacgctctccacccccgctttattattgaggagaccgcgaaggcgctggggccggaaacaattgccgttaccgacgtaggccagcaccagatgtggacggcgcagttcttccctgccgagaagccaagatcatttatcagttcgggcggacttggaacaatgggtttcggtctcggagcggcttgcggcactaaaatagcgaacccaaaaaagcctgtcgtactttttacgggagacggcagtttcagaatgaactgcgccgaaatggcaaccctcaccaacaataatatcccgctcctgataattgtctttaacaacggagtcttgggcatggtaaggcagtggcagagtttcttctacgaaaaaagatactcgcaaacaaaccttggagcagctcccgattttataaaactctgcggcgcatacggcattaacggtttccgagccggcgacagggagtcctttaagaaagcgctccacagcgcctcggaagaactgtccgccggaagagcggcgctcattgaagcagacatagaccgtgatgagaacgtactgccgatggttccgtcgggcaaaccgattgacgagcagattttgtag

SEQ ID NO: 56368 - protein, 623 aa, Unknown
  Obtained from environmental sample
  DOMAIN (253)...(412): Thiamine pyrophosphate enzyme, central domain
  misc_feature (1)..(623): Xaa is any amino acid
MKKSRGGGKVGSLYPRRIRVILPAMPRKSAPPRKARFLIRCRIEEIKMQYTGAQILVESLIEQGVDIVFGYPGGAVLNIYDELYKHSDKIRHILVSHEQHAAHAADGYARSTGKTGVCIATSGPGATNLITGIATAYMDSIPLVAITGNVPTGILGKDSFQEVDIRGISMPIVKHNWIVKHVEXLGEVIREAFELASTGRQGPVLIDIPKDITMLTAEWHPSKKKGEIKDKALSARAKRLDERTARISFTDEDIEEAAEMISEAKRPLLYAGGGVISSGAEAELVALAERLNAPVALSLMGIGAIPKDHRLCTGLIGMHGTVASNKATQKADLLLAIGARFSDRVISKADMFANTAQVIHFDIDPAEVGKNIETHAWVIGNLKNTLAALLAKLPARLETEWHGEIDKWKTHLPQTYTHEVTFAKNALHPRFIIEETAKALGPETIAVTDVGQHQMWTAQFFPAEKPRSFISSGGLGTMGFGLGAACGTKIANPKKPVVLFTGDGSFRMNCAEMATLTNNNIPLLIIVFNNGVLGMVRQWQSFFYEKRYSQTNLGAAPDFIKLCGAYGINGFRAGDRESFKKALHSASEELSAGRAALIEADIDRDENVLPMVPSGKPIDEQIL

SEQ ID NO: 56369 - DNA, 684 bp, Unknown
  Obtained from environmental sample
  misc_feature (1)..(684): n is a, c, g, or t
atgatggggaaagacgtgtactggggcgcatggtttgaacattataccgcttttatgtgccattatgcggaattggccgaatatacgggctgcgaaatgctctgtatcggctgtgaaatggtcgccgcagaaaggaaagaaagccattggcgtaaattaatagatgaaacaaaaaaattttattcggggcctcttgtatataacgccaatcacggcagcgaagacaatgtgcattggtttgacgctgttgattatatcggaaccagcgcttactatccggtagcgaaaattcccggtgaaaccgaagaaaatatgtttgcggcctggcagcctataaaaaaaagagtaaaagccttaagcgcgaaatggaaaaagcaggtaatatttatcgaaatcggctgccgcagcgcgaaaggctgcgcgatgatgccctgggattttacccatgttgaatttccctacgatgaagacgaacaagccaacttctaccggtcatgcctgcggacattctttgacgagccgtggtttgcgggtttcttctggtgggactggagcacaaaaatatacgatacgaaaaaagccaaaggcaataccggttttaacattcacggtaaaaaagccgaanacgttttaaaggaatggtattcaaaaccgcgtgaggattctcaaaagaagttactatga

SEQ ID NO: 56370 - protein, 227 aa, Unknown
  Obtained from environmental sample
  misc_feature (1)..(227): Xaa is any amino acid
MMGKDVYWGAWFEHYTAFMCHYAELAEYTGCEMLCIGCEMVAAERKESHWRKLIDETKKFYSGPLVYNANHGSEDNVHWFDAVDYIGTSAYYPVAKIPGETEENMFAAWQPIKKRVKALSAKWKKQVIFIEIGCRSAKGCAMMPWDFTHVEFPYDEDEQANFYRSCLRTFFDEPWFAGFFWWDWSTKIYDTKKAKGNTGFNIHGKKAEXVLKEWYSKPREDSQKKLL

SEQ ID NO: 56371 - DNA, 2202 bp, Unknown
  Obtained from environmental sample
  misc_feature (1)..(2202): n is a, c, g, or t
atgcaccgcgagatggagagaagggtgcagcgcgggcataactactgtattgttgacgaaatcgattcgatccttatcgacgaggcccgcaccccgctgatcatctcgggcgccgccgaggatgacaccttcaaattcgccgaggttgacaggctcctgggcagcctgaaggaagtcgaaaaaaaggaaaacggcgaataccccgacgagacgcagggcgaagttgttgtcggcgattacaagatcaacgaaaaaaataaaaatgtttctttcagcaaccagggcctcgcagtcattgaggagattctgcagaaacgcgggcttatccagggggccattgtcgatgagggtaattttgaatacatacactattttacgcaggcgctgaaagcccacaaactttttcatctggacgttgactatgtggtgcaggacggccaggtgcagatcgtcgatgaatttaccgggcgcattctgcacggcaggcgttattcggacggcctgcatcaggcgatagaggcgaaagaacgtattaaaatcgcccagcgcaaccgcaccttggcgaccatcaccttccagaattatttcaggctctactcgaaaatatccggcatgaccggcaccgcggacaccgaggccgccgaattcagcaagatttacaagcttgaggtcgtggttattccgaccaacctgccggtcgcgcgtctggacgaggacgacgtggtgtacctgaacgaggccgacaagtacaaagctctttgcgatgaaatcgccgagtcgaacaaaaaaggccagcccatgctggtcggcacgggtctcatcgagaaatcggagaggatttccacgctgctgacaaggcgcggcgtgcagcacgaggtgctgaacgcgaagaaccacgcgcgcgaggcgctgataatcgcggaggcgggggcgaagggcgcggtgacaatcgccaccaatatggcgggcaggggcacggacatcaaactgggcggcagcccggaatcccgcgccagaagacgcgccggaacccaggcaagccccgagcaatacgcagttatttacaatgaagaatacgagaaatggaagaaggactatgaagaagtaaaatcccttggagggttatacgtcatcggcacggagcgtcatgaaagcaggcgtatcgacaaccagctgaggggccgttcaggcaggcagggggatcccggcaggagcaagttcttcatctccatggacgacgagctgatgaggctgttcggcggcgagaaaatgaagaacattatgtccaggataggcatggaggccggcgagccgatttaccatccctggctgaacaaaagcatagagaacgcccagaaaaaagtcgaggaacgcaacttcgagattcgcaagcatcttctggattacgacgacgtgctgaaccagcagcgtaaatttatctacgaacagcgcgacgcgatcctgcttgacaaggacctgaaaaacagggtgaacgacgccaccgccggccttgtgggggaattgattgacgaattcaacagggaacagcgccaggacgcggcaggggccttaaaaaacctgaacgagcagctccggaccaaattcggctatcagttaacgcttgatcaaagcgaagccaaaaattccgaatcgcttgaaaagaaaataatcgccgatcttgaaaaggacatgagcgacaaggaagcccttatcggcccggattaccttaacatgattatcagggacagctaccttcacgccattgacaacaaatggcttgatcatctggaaaacatggaggctctgcgcgaggccgtttatctgcgccattacgcccagaagaaccccctgacagaatacaaggtggaaggcttccagatttttgacagcatggtcgatgacatacgccaggaaatagcctcgcgcctgcacctcgtgaggattcaggtcgcgccctcagagggcgccggtgcccgcaggcccggacgcacaataacctcgcagtccgcgagccacagcagcatggcttccttcggcgccgcttcctccggggggccgggcggcggtcgttcaggttcacctatgggggcggcaagcagtcccgacggcgcgacggtggtgcgcagtcatcccaaggtaggcagaaacgatccatgtccctgcggcagcggccggaaatacaagcattgccacggcaagtaa

SEQ ID NO: 56372 - protein, 733 aa, Unknown
  Obtained from environmental sample
  DOMAIN (715)...(733): SEC-C motif
  misc_feature (1)..(733): Xaa is any amino acid
MHREMERRVQRGHNYCIVDEIDSILIDEARTPLIISGAAEDDTFKFAEVDRLLGSLKEVEKKENGEYPDETQGEVVVGDYKINEKNKNVSFSNQGLAVIEEILQKRGLIQGAIVDEGNFEYIHYFTQALKAHKLFHLDVDYVVQDGQVQIVDEFTGRILHGRRYSDGLHQAIEAKERIKIAQRNRTLATITFQNYFRLYSKISGMTGTADTEAAEFSKIYKLEVVVIPTNLPVARLDEDDVVYLNEADKYKALCDEIAESNKKGQPMLVGTGLIEKSERISTLLTRRGVQHEVLNAKNHAREALIIAEAGAKGAVTIATNMAGRGTDIKLGGSPESRARRRAGTQASPEQYAVIYNEEYEKWKKDYEEVKSLGGLYVIGTERHESRRIDNQLRGRSGRQGDPGRSKFFISMDDELMRLFGGEKMKNIMSRIGMEAGEPIYHPWLNKSIENAQKKVEERNFEIRKHLLDYDDVLNQQRKFIYEQRDAILLDKDLKNRVNDATAGLVGELIDEFNREQRQDAAGALKNLNEQLRTKFGYQLTLDQSEAKNSESLEKKIIADLEKDMSDKEALIGPDYLNMIIRDSYLHAIDNKWLDHLENMEALREAVYLRHYAQKNPLTEYKVEGFQIFDSMVDDIRQEIASRLHLVRIQVAPSEGAGARRPGRTITSQSASHSSMASFGAASSGGPGGGRSGSPMGAASSPDGATVVRSHPKVGRNDPCPCGSGRKYKHCHGK

SEQ ID NO: 56373 - DNA, 984 bp, Unknown
  Obtained from environmental sample
  misc_feature (1)..(984): n is a, c, g, or t
ttgcatgacggcaaagaaatccgctacgacaaattgcttgttgccacgggttcctctccctttgtgcctccctttgaggggcttgatacggtcacgcaaaaatgcacatttatgagccttgacgacgctgacaggctggaatttatgcttaaagagaataagcgtgtactgattatcggcgcgggccttatcggcctgaaatgcgccgagggcattcttagccgggtgcagcacataacggtgcttgaccttgccccgcgcattttgtcgagtattcttgacgatgaaggcgcgaagctggttcaaacccacatggaaagcaaaggcatagagttcaagcttgcggctaacgtaaagagttttcagattaacagggcttatttggagaacggcgaatcaatagattttgacatccttgtcctggccgtcggcgtgcgtcccaataccgcgcttttgaacggtattgcgaagatcgaccgcggcatagtcatcaatgaaaaatcagagacaacggcttctgatatttacgccgccggcgactgtacccaaacggttgacgtgtcaagcggtgaaaataaagttatggcacttttgcccaacgcgtatatacagggcgagtgcgccggaatcaatatgacaggcagcgccgccgggggcgcgagcttcgacaaggcgatacccatgaacgcgattagctttttgggcatgcacataattacggctggcagttacagcggcagcgtatatactgaagaaaaaatcaaacccgttgaaggcgtttataaacgcctgttttacagcgataacaaacttaacgggtatatccttatcggcaatgtggagaaagccggaatttataccagccttatccgcgagcgtactccgttagacgcaattgattttacgcttgtctgtgaaaggccggggcttatggcgtttacgaaagaggacagaatggtaaaattagggggaatggcatcatga

SEQ ID NO: 56374 - protein, 327 aa, Unknown
  Obtained from environmental sample
  DOMAIN (55)...(186): Pyridine nucleotide-disulphide oxidoreductase
  misc_feature (1)..(327): Xaa is any amino acid
MHDGKEIRYDKLLVATGSSPFVPPFEGLDTVTQKCTFMSLDDADRLEFMLKENKRVLIIGAGLIGLKCAEGILSRVQHITVLDLAPRILSSILDDEGAKLVQTHMESKGIEFKLAANVKSFQINRAYLENGESIDFDILVLAVGVRPNTALLNGIAKIDRGIVINEKSETTASDIYAAGDCTQTVDVSSGENKVMALLPNAYIQGECAGINMTGSAAGGASFDKAIPMNAISFLGMHIITAGSYSGSVYTEEKIKPVEGVYKRLFYSDNKLNGYILIGNVEKAGIYTSLIRERTPLDAIDFTLVCERPGLMAFTKEDRMVKLGGMAS

SEQ ID NO: 56375 - DNA, 717 bp, Unknown
  Obtained from environmental sample
  misc_feature (1)..(717): n is a, c, g, or t
atgaacatatcggcaaaacatcttcatttcaaagaattgaaccagcagataagaaacgccacggaagccgtctgtatagacgattgttttggacagcggtttatcggcagcggcatgggcggcaaaaccataaagataaacggaacgccgggcaacgcgctgggcgcttattttgacggagaagtcatcgaagtaaacggtaacgcgcaggacgcaaccggcgatacgatgaacgacggcaaaatcatcatccacggaaacgcgggagacgcgctgggctacgccatgcggggcggttgtatctttgtccggggtaatgccggatacagagccggtatccacatgaaagaatataaagaaaaaaaaccggtaattgtcattggcggcaaagcgggcagttttttgggcgaatatcttgccgggggattgatcgtggtgctgggtcttgattcggatgaatccccggtctggtattttacgggaaccggtatgcacggcggaaaaatctttgtaagaaccaacaaggaacttgtctcactgcccgcacaggttagcgcggaaatagccaacgccaaagatttgcaggagattacgccgtatattgaagaatttgccggatatttcggcatggacgcgcagaaactgctgaaagaccgctattatgtgttaaaaactaacgcgaaaaacccctataaacagctctatacggcaaactag

SEQ ID NO: 56376 - protein, 238 aa, Unknown
  Obtained from environmental sample
  DOMAIN (13)...(210): GXGXG motif
  misc_feature (1)..(238): Xaa is any amino acid
MNISAKHLHFKELNQQIRNATEAVCIDDCFGQRFIGSGMGGKTIKINGTPGNALGAYFDGEVIEVNGNAQDATGDTMNDGKIIIHGNAGDALGYAMRGGCIFVRGNAGYRAGIHMKEYKEKKPVIVIGGKAGSFLGEYLAGGLIVVLGLDSDESPVWYFTGTGMHGGKIFVRTNKELVSLPAQVSAEIANAKDLQEITPYIEEFAGYFGMDAQKLLKDRYYVLKTNAKNPYKQLYTAN

SEQ ID NO: 56377 - DNA, 351 bp, Unknown
  Obtained from environmental sample
  misc_feature (1)..(351): n is a, c, g, or t
atggaaagcgccttaataatttcaacttcagaaaaagaaaccgctcttgttacggtgatgttaaatgccgcttccattcatcaaattactacccttcagtccgccgacaacgcgcgcaatcttatcctcaaacaggattttgatctggtgattattgacgcgcctcttcccgatgaatccggagaaagtttttcccggcatatcgcttccaaaggcgtatcgcaggttattctcatggtaaaaaacgaactttttgattcggtatccgccgcctgtgaagaagacggggttcttaccatttcaaaaccnggtggacaaggctcttttatggtcggcattatcactggctaa

SEQ ID NO: 56378 - protein, 116 aa, Unknown
  Obtained from environmental sample
  DOMAIN (2)...(114): Response regulator receiver domain
  misc_feature (1)..(116): Xaa is any amino acid
MESALIISTSEKETALVTVMLNAASIHQITTLQSADNARNLILKQDFDLVIIDAPLPDESGESFSRHIASKGVSQVILMVKNELFDSVSAACEEDGVLTISKPGGQGSFMVGIITG

SEQ ID NO: 56379 - DNA, 1182 bp, Unknown
  Obtained from environmental sample
  misc_feature (1)..(1182): n is a, c, g, or t
gtgcttcggacttgcggcgtgcaatttttcaatatcgacaaagaaccgcttcaaaagccggtggaaacaataacctggaatcttgacagcgcggaaaaaggcggctacccgcatttcatgctcaaggaaatcatggagcagcctaaaatcctgcgcgaaaccattagttcggcggtgaatacctataaaagcgttattggcgctcttgatgtcgcgggctttaccaagatcgtgataaccgcctgcggttcggcgtacaacgcgggagttgtcgccaaatacgtgtttgagaagttgtgcaggtttccgtcggtagagacagagcttgccagcgagttccggtatcgggacgccgttattgacgaaaaaacacttgtcattttgataagccagtccggcgaaaccgcggataccatcgcagccatgcgggaggcaaaagccaaaggcgctattacgctgtcaatcgttaatgttgtcggcagcaccattgccaaggaaactgacttctgcctgcttacggcggcaggccccgaaattgccgtggcgacaacaaaagccttttccgcccagcttgtgttattgtatatccttgccgtatggtttgccgttaagctgggaaaaatatcgcgggaagcggagcgtgaactgttgtcagaaatcgctgccctgcccgaaaaggcggcaggcttactcaagcaggttgattcaatccaaaaatgcgcttcaaattgcatcggctataaaagcatcttctttatcggcaggaacattgattacgccatctcgctggaaggttccctcaagctcaaggaaatatcctacattcattcagaagcctacgcgggcggcgaattaaaacacggcacgatttctctggtagagaaagatacgctggtggtcgctatctcaaactgcgcccagctctacggtaagattatgagcaatgtggagcaggttaagagccgcggcgcgaaggttttgcttatcggtaactgtccgtctgatcatttaccggcggacgatgacaatttttccgtcatcgccctgccggaaacttcggaattgttttcctcatccctgtcggttattgttttacagcttttcagttattatgtagccgccaacaagggcctggatattgacaaaccgcgcaatctcgccaaaagcgttaccgttgaataa

SEQ ID NO: 56380 - protein, 393 aa, Unknown
  Obtained from environmental sample
  DOMAIN (241)...(379): SIS domain
  misc_feature (1)..(393): Xaa is any amino acid
MLRTCGVQFFNIDKEPLQKPVETITWNLDSAEKGGYPHFMLKEIMEQPKILRETISSAVNTYKSVIGALDVAGFTKIVITACGSAYNAGVVAKYVFEKLCRFPSVETELASEFRYRDAVIDEKTLVILISQSGETADTIAAMREAKAKGAITLSIVNVVGSTIAKETDFCLLTAAGPEIAVATTKAFSAQLVLLYILAVWFAVKLGKISREAERELLSEIAALPEKAAGLLKQVDSIQKCASNCIGYKSIFFIGRNIDYAISLEGSLKLKEISYIHSEAYAGGELKHGTISLVEKDTLVVAISNCAQLYGKIMSNVEQVKSRGAKVLLIGNCPSDHLPADDDNFSVIALPETSELFSSSLSVIVLQLFSYYVAANKGLDIDKPRNLAKSVTVE

SEQ ID NO: 56381 - DNA, 1107 bp, Unknown
  Obtained from environmental sample
  misc_feature (1)..(1107): n is a, c, g, or t
atggcaaagaaatcaaaaaagggtaaagaggccgggagcgacgccgctattacctccgctcagctggccgcgctgcagaagcccagcaagaagaccgttaatatcagcggcatcccggggcccgtaaaggcggctatcgttatggtggcgctcggcacggacgcatccagcaaggtattcaagctgcttgacgatgtggacatagagcggctctccacggaaatcgcgcggttggagaacatctcgcaggatgtccgcgaggcggtgcttgaggagttccacaccctggcgctggcgcaccaatacatatcgcagggcggcttagactacgcgcggcaggtcttgatagcggcgctcggaccggagaaagccaacgagattcttgaaaaagtgcaagccaagatcaggacgaccggtttcaacctactggaaaatatagatcccaagcagctcgtcaactacatacagaaggagcacccgcagacgatagcgatcctgctcgcccacatggacgcggcgcacgcggccggcatagtctcggcgctgccgcagatggtgcagatcgacgtggctacgcgtatagccacaatggagagcatatcgccggacacgctgtcgcagatcgaggaggttctggtaacgcagataaagtccctcttcggcggcgacgtctcggagatcggcggcgtaaaagccgtggcggagatactgaacaacgtagaccgcggcacggagaagaacatcatcggcaacttggagagggagaacccggaacttgccacggaaatcaagaaactcatgttcgtcttcgaggacgccatgctgctcgacgaccgctctatgcagcgcctgctcaaggaggtcgacacgaaggagctcggtatggccctcaagagcgccacggaagagctgcaggagaagttcttccgcaatatgtcgtcacgcgcgtcggagatgatcaaggaagatatgcagttcatgggcccgatacgtctaaaggacgtggaagaagttcagcagagggtcgtggacgttatacgcaggctggaagaggacggagagataataataagcggacgtggcggcgacgacaatgtcgtggtataa

SEQ ID NO: 56382 - protein, 368 aa, Unknown
  Obtained from environmental sample
  DOMAIN (249)...(358): FliG C-terminal domain
  misc_feature (1)..(368): Xaa is any amino acid
MAKKSKKGKEAGSDAAITSAQLAALQKPSKKTVNISGIPGPVKAAIVMVALGTDASSKVFKLLDDVDIERLSTEIARLENISQDVREAVLEEFHTLALAHQYISQGGLDYARQVLIAALGPEKANEILEKVQAKIRTTGFNLLENIDPKQLVNYIQKEHPQTIAILLAHMDAAHAAGIVSALPQMVQIDVATRIATMESISPDTLSQIEEVLVTQIKSLFGGDVSEIGGVKAVAEILNNVDRGTEKNIIGNLERENPELATEIKKLMFVFEDAMLLDDRSMQRLLKEVDTKELGMALKSATEELQEKFFRNMSSRASEMIKEDMQFMGPIRLKDVEEVQQRVVDVIRRLEEDGEIIISGRGGDDNVVV

SEQ ID NO: 56383 - DNA, 873 bp, Unknown
  Obtained from environmental sample
  misc_feature (1)..(873): n is a, c, g, or t
atgccccaaccacccacaaaaaaccaagaaaccgtcgtaaacgagaacgtctccgtcttactcgaccaactcttaaaggccgaggatcccgctaccgtcggcatccggcggatactgcgccacaagattgatgaggcaaacaattacccgtttaagtctgttgagttggaagcctttgactccgctaccgcaactgtgccgggcaaatcgggtggcaagcgggggcgggaatcgcacatcttcaccgaacaggagcgctcatacttagagttagagaagcgggtgcgcgatgtggagcgtacgctcactcaggagagggtggcaaacaagcgggcgttgcaggataactttgaaaaaggcaaggcggaggggttcgccgccggcgagaaggccgggtacgacaaggccaaagcgacgttcgacgcggaggtcgcgaaactcaaggcgcagatggcggcgtatttcaagcagttggaagactccaagaagataatgatcaacggcttggaacacgttttgctgcgcttctgcgtggaactaacaaaaaaaatcgtctcgtgcgaattagaaacaaacaaggagataatcaccgctacgataaaacgggcgctggcaatgatagcggaaagggagaacatcctgatccgagtgtcgcctggagattttgacgtagccagcgggaataaagagtttttagactcggtaacggaacgcttagaaaacgtacgtatagaggaagacgcgagaataaacaaaggcggttgcataatagaatcaaactccggcttggtcgacgcgaggctgggggtacagttggaagaggtggaggaactggtagagaaagcgtgggaatcttcggacatggcgggataa

SEQ ID NO: 56384 - protein, 290 aa, Unknown
  Obtained from environmental sample
  DOMAIN (46)...(276): Flagellar assembly protein FliH
  misc_feature (1)..(290): Xaa is any amino acid
MPQPPTKNQETVVNENVSVLLDQLLKAEDPATVGIRRILRHKIDEANNYPFKSVELEAFDSATATVPGKSGGKRGRESHIFTEQERSYLELEKRVRDVERTLTQERVANKRALQDNFEKGKAEGFAAGEKAGYDKAKATFDAEVAKLKAQMAAYFKQLEDSKKIMINGLEHVLLRFCVELTKKIVSCELETNKEIITATIKRALAMIAERENILIRVSPGDFDVASGNKEFLDSVTERLENVRIEEDARINKGGCIIESNSGLVDARLGVQLEEVEELVEKAWESSDMAG

SEQ ID NO: 56385 - DNA, 819 bp, Unknown
  Obtained from environmental sample
  misc_feature (1)..(819): n is a, c, g, or t
atgaagattattcagagtgaagaatttgattcgtattggaaaagccctgagtatcaggaagataatgaagctgttgaaactgccgtaaaagaaattatcgccgctgtcagccgggacggggacgcggcggtgcgcgatttcgcgtcaaggtttgacaaaagctctccgacgcagcttgaagttcccccttcgcttgttcagcagtccgccgctgaattaaggcgcagcgatcccgaattgatcgccgccatggagcttgcagcggaccacataaagcggttttccctgcagcagcgagcgcagttttctgattttgagtatgaaatggaaaaagggtttgttaccgggcagagggtaatacctgtggacagggcggcggcttatgttccggcgggccgcttcccgcttttttcatccgtgcttatgggcctgattcccgccttctgcgcgggcgtggaagagattatacttgcttctccgcctttggaagacggccttcccgacaggaagatccttgccgccgccgcaatagcggctgacagtttcgccggggattcatcgttccagactaagctcagggtttttaccgtcgggggagcgcaggcaatagcggcgcttgccctggggacgcaaaccattcctcgcgttgaccttattgtcggcccggggaaccaagtatgtgaccgccgcgaaacgcatcctctttggcagggtggggatcgatttcatcgccggccccaccgatgtgctgatcatagccgacggttccgccagcgccgatcttgtcgcggcggacatgctcgcccaggcggagcatga

SEQ ID NO: 56386 - protein, 272 aa, Unknown
  Obtained from environmental sample
  DOMAIN (10)...(257): Histidinol dehydrogenase
  misc_feature (1)..(272): Xaa is any amino acid
MKIIQSEEFDSYWKSPEYQEDNEAVETAVKEIIAAVSRDGDAAVRDFASRFDKSSPTQLEVPPSLVQQSAAELRRSDPELIAAMELAADHIKRFSLQQRAQFSDFEYEMEKGFVTGQRVIPVDRAAAYVPAGRFPLFSSVLMGLIPAFCAGVEEIILASPPLEDGLPDRKILAAAAIAADSFAGDSSFQTKLRVFTVGGAQAIAALALGTQTIPRVDLIVGPGNQVCDRRETHPLWQGGDRFHRRPHRCADHSRRFRQRRSCRGGHARPGGA

SEQ ID NO: 56387 - DNA, 720 bp, Unknown
  Obtained from environmental sample
  misc_feature (1)..(720): n is a, c, g, or t
ttgccctggggacgcaaaccattcctcgcgttgaccttattgtcggcccggggaaccaagtatgtgaccgccgcgaaacgcatcctctttggcagggtggggatcgatttcatcgccggccccaccgatgtgctgatcatagccgacggttccgccagcgccgatcttgtcgcggcggacatgctcgcccaggcggagcatgatcctgacgcccgcgcccgcgcccttgtccccagcggggagcttgccggtcaaatcgccgcggcgctggaaaagcagcttgcctctctgtccaccgcagtttctgcccgcgcttctctggacgcgggcgggcttgttatcatttataagacgcgggaagaggcgatacgaatcgccaacacaatcgcgcctgaacatcttgagcttcaggttgccgacgtggataattggattcccctcctgaaaaattacggttcgctttttataggaaacctttccgcggaggccctgggcgactattccgcggggattaacaacaccctgcccacgtcgacaagcgcccgtttttcaggcggcctgtcggtcaggcattttctcaagaccgtcaccacattgcgctgcgcctcaggcgaaggttatgaaaaagcgcgtaacgctgcggaaactctggcccgcgccgaggggcttgaaggtcacgcgctgagcgcggcggcgcgtagtgtaacaaaggacgtgtaa

SEQ ID NO: 56388 - protein, 239 aa, Unknown
  Obtained from environmental sample
  SIGNAL (1)...(24)
  DOMAIN (5)...(235): Histidinol dehydrogenase
  misc_feature (1)..(239): Xaa is any amino acid
MPWGRKPFLALTLLSARGTKYVTAAKRILFGRVGIDFIAGPTDVLIIADGSASADLVAADMLAQAEHDPDARARALVPSGELAGQIAAALEKQLASLSTAVSARASLDAGGLVIIYKTREEAIRIANTIAPEHLELQVADVDNWIPLLKNYGSLFIGNLSAEALGDYSAGINNTLPTSTSARFSGGLSVRHFLKTVTTLRCASGEGYEKARNAAETLARAEGLEGHALSAAARSVTKDV

SEQ ID NO: 56389 - DNA, 921 bp, Unknown
  Obtained from environmental sample
  misc_feature (1)..(921): n is a, c, g, or t
atgtatttatcccttgttgtcccctgttttaatgaagaagcggctattccgttattttataataaagctgttaaaattaccgcatcgatcaataaaaagtttgaaataatttttgtagatgatggttcaagggataatactctaagcattttgcgtcgccttgcaaatcagaacaaacgcgtacactacatttctttttcgcgtaactttggcaaagaagcggccatgcttgcggggttacaagcggcgcgcggtgaatacattgcaactcttgacgcggacggacaggaccctccgtctctagttcccgaaatgttgaaagctgttgcttccggggaatacgattgcgccgcgtccagacgggtagaccgcgccggagagccgcctgtacgttcattttttgcgcgctgtttttatgcgcttatgaaaaaaataaccgacatagaaattatttcaggcgctcgggattttcgcctgatgaacagaaaatatttggaagcgcttttaacgttgccggaacggaacagattttcaaaaggcattttcccatggattggctttaaaacaaagtggtttgagtatgaaaacatcaaacggacagccggaaaaacaaaatggtctttctggacactgttcctgtattctcttgacggaataatcgcgttttcatctaaaccgcttgctatagcttccatatttgggattctgttttttatcatcgcacttatgttagtcatttttttagtaatccgaaaaatcgtatggggcgatcctgtagatggatgggcgtcgacaatctgcatcatccttttttgttctgggattcagctttttaccacaggagtattggggcagtacatggcaaaaacatataccgaagttaaacagcgtcctcagtatattatccgtgaggcgcaatga

SEQ ID NO: 56390 - protein, 306 aa, Unknown
  Obtained from environmental sample
  DOMAIN (4)...(169): Glycosyl transferase family 2
  misc_feature (1)..(306): Xaa is any amino acid
MYLSLVVPCFNEEAAIPLFYNKAVKITASINKKFEIIFVDDGSRDNTLSILRRLANQNKRVHYISFSRNFGKEAAMLAGLQAARGEYIATLDADGQDPPSLVPEMLKAVASGEYDCAASRRVDRAGEPPVRSFFARCFYALMKKITDIEIISGARDFRLMNRKYLEALLTLPERNRFSKGIFPWIGFKTKWFEYENIKRTAGKTKWSFWTLFLYSLDGIIAFSSKPLAIASIFGILFFIIALMLVIFLVIRKIVWGDPVDGWASTICIILFCSGIQLFTTGVLGQYMAKTYTEVKQRPQYIIREAQ

SEQ ID NO: 56391 - DNA, 1260 bp, Unknown
  Obtained from environmental sample
  misc_feature (1)..(1260): n is a, c, g, or t
gtgaaaaacgataccgcgttcgataatatcgcaaaagtacccacgctgattataacagttgtatacgccgtggtgaaggtattgttttatgtggtaatgcgccccgaccaaatattttcccgcgtgtgtttaggcttggtgatgattgccgtcatggctcttttgaccggcgacaagctgaaattgacgagaccgcaaatgtccgtgcttgtgccgttttcccttgccgcgcttgagcttacctacgtcgggttattaggcggcgaccgtacaacctatattttcctgataggttgctcgttggtttgcctaatgtacgccgatgtttgggggctgtttatatttacatccttaaccggcgtgactatgacttttcttatattgggattgggcgtccatatccttcctcagcccagcgattttcgtgacgagatatccaactttgtcgccatgattgtaatatacgcgttggtttttctgctcggtcggtatacgatcagcgcgatgaaccgttttcgcttagccgggcagacctttgatacggccttaaaaacatcgccgaacctgatcgttatcgtggacgacaaggcgcgggtcgagtatataagcaaaacgttcgtggaggtgcttggtattgaaaagcaggagtacgcgataaaactgccgtttatagatttatttcccaccaacgagttaaagttgtttttcggcgagctgttgcaccataagggacggataacggaaatctttgaaatggagataggcggcagccggcaccattttatgcttcattccgaagcgctgagggccgacggaatcgcgcgtacatttgattgtttggagataacccccatccttgaggcgcaacgcgccgccgaggtcgccagcaagagcaaatcaaacttcttagccacaatgtcccacgaaatccgcacaccgatgaacgcgattatcggtatagcgcagatacaactgcaacgcgatgatttgccggacgaatacgcgaccgcgttgcggaagatatacggctccgccaataaccaactcggtataatcaacgatattttggatatgtccaaaatagaaaccggcaaaatggaactgaacccggtggaatacgatgtgccggacctgattaacgacgccatgcaactcaacgccgttagaataggcgagaaacagattgagttcatagtagacattgacgagaatttgccgtcaaggtgttacggcgacgagttgcgaatcaagcaatactaa

SEQ ID NO: 56392 - protein, 419 aa, Unknown
  Obtained from environmental sample
  DOMAIN (298)...(364): His Kinase A (phosphoacceptor) domain
  misc_feature (1)..(419): Xaa is any amino acid
MKNDTAFDNIAKVPTLIITVVYAVVKVLFYVVMRPDQIFSRVCLGLVMIAVMALLTGDKLKLTRPQMSVLVPFSLAALELTYVGLLGGDRTTYIFLIGCSLVCLMYADVWGLFIFTSLTGVTMTFLILGLGVHILPQPSDFRDEISNFVAMIVIYALVFLLGRYTISAMNRFRLAGQTFDTALKTSPNLIVIVDDKARVEYISKTFVEVLGIEKQEYAIKLPFIDLFPTNELKLFFGELLHHKGRITEIFEMEIGGSRHHFMLHSEALRADGIARTFDCLEITPILEAQRAAEVASKSKSNFLATMSHEIRTPMNAIIGIAQIQLQRDDLPDEYATALRKIYGSANNQLGIINDILDMSKIETGKMELNPVEYDVPDLINDAMQLNAVRIGEKQIEFIVDIDENLPSRCYGDELRIKQY

SEQ ID NO: 56393 - DNA, 1275 bp, Unknown
  Obtained from environmental sample
  misc_feature (1)..(1275): n is a, c, g, or t
atgaaatttaaactccttgttgttgatgatgaaaaaaacatccgggaggggcttgccgcttctcttgaaatggacggctacagcgccgtttgcgccgcaagcggcgatgaagcgtgggatctctattgcaagggcgacatagacctggttattaccgacctgcgcatgcccggcatggacggcgaggaacttatgcgccgcatactggcggaaacccccggcctgccggttatcatactcaccgggcacggaaccatagaaaacgccgtcagcgcaatgcacgacggggcatgggatttccttaccaagcctgtcaatctggatcaccttgcaatgctggtaaagcgggcgctggaaaacagggaacttgtgctgcgccaccgggaactggaagcggatctggaacggggcaggctcttgtccggcatgatcggcaagtcggccgttatgcgaaaagtttttgacacgataagccgcgtcgcgcctaccaaagcctcagtcctgattaccggggaatccggcgttggcaaagagctggtagccgacgccatccacgagctttcaccccgcaagggcaagcctctggttaaagtgcactgcgccgcgcttgcggcaaacctccttgaaagcgaattgttcggccatgagaaaggggcgttcacgggcgcggtctcaaggcggcgggggcgttttgagcttgcaaacggcgggacgctttttcttgacgagataggcgagatagaccagaacatacagataaaacttctgcgtgttttgcaggaacgccagtttgagcgcgtcggcggggaagaaacccttgaaaccgacgtccgccttgtcgccgcgaccaacaaagacctcaaagccgagatagaaaaaggcaatttccgcgaagacctgtacttccgccttaacgtggtgagcatcaacgttcctccgttacgcgaaaggaaggatgacattcccctgatgacggcaagtttcctgaaggagatcgccgctgaaaacaacaaaaccatcgaaggcatccacgaaaaagcctatgcccgtctctacgcctatgactggcccggcaatatccgcgagcttcgcaactgcattgaaagcgccgtggtcatgtgccgcaaaccggtcatcgccgttgacgatctgccccccgctctgcaatcttactctgacgatgaaagctgggtaaaggttcctctggattgcagtcttgaggaagatgaaaaaatattatcaggcggcgattggctatcacaagaacaaaactaa

SEQ ID NO: 56394 - protein, 424 aa, Unknown
  Obtained from environmental sample
  DOMAIN (166)...(314): ATPase family associated with various cellular activities (AAA)
  misc_feature (1)..(424): Xaa is any amino acid
MKFKLLVVDDEKNIREGLAASLEMDGYSAVCAASGDEAWDLYCKGDIDLVITDLRMPGMDGEELMRRILAETPGLPVIILTGHGTIENAVSAMHDGAWDFLTKPVNLDHLAMLVKRALENRELVLRHRELEADLERGRLLSGMIGKSAVMRKVFDTISRVAPTKASVLITGESGVGKELVADAIHELSPRKGKPLVKVHCAALAANLLESELFGHEKGAFTGAVSRRRGRFELANGGTLFLDEIGEIDQNIQIKLLRVLQERQFERVGGEETLETDVRLVAATNKDLKAEIEKGNFREDLYFRLNVVSINVPPLRERKDDIPLMTASFLKEIAAENNKTIEGIHEKAYARLYAYDWPGNIRELRNCIESAVVMCRKPVIAVDDLPPALQSYSDDESWVKVPLDCSLEEDEKILSGGDWLSQEQN

SEQ ID NO: 56395 - DNA, 540 bp, Unknown
  Obtained from environmental sample
  misc_feature (1)..(540): n is a, c, g, or t
atgctggtcggcgacagggccatcatggacatcatgggactggaacgcagcgccattgaggcggagggtatcgccctcatgaacgaaactttccggggttacaacctcggcatcgacgtgatcgccgtaaagctccagaacgtaaccccgccggccggtgtgcagcaggcttttgaggatgtgaacaaggcgatgcaggacagggagaggctgatcaacgagggacagcaggtatacaacgaggaaattcccaaaaccaggggcgaagccgagcgtctgatacaggtggcgcaggggtacgcgacagagagggtgaatagggcgaacggagatgtggcgcgttttaacgcggtgtacaacgagtaccgccggtccccggacgttacgcgtcagcggctgtattatgaaatgattgaggaagtattcaagggcgaggaaggcacggtgattatagaccgcagcctgaggaatttcctgcccatgatgaaccttggcggcggcacgccaagcgcggcgcaaggcgcgcagggaggcagataa

SEQ ID NO: 56396 - protein, 179 aa, Unknown
  Obtained from environmental sample
  misc_feature (1)..(179): Xaa is any amino acid
MLVGDRAIMDIMGLERSAIEAEGIALMNETFRGYNLGIDVIAVKLQNVTPPAGVQQAFEDVNKAMQDRERLINEGQQVYNEEIPKTRGEAERLIQVAQGYATERVNRANGDVARFNAVYNEYRRSPDVTRQRLYYEMIEEVFKGEEGTVIIDRSLRNFLPMMNLGGGTPSAAQGAQGGR

SEQ ID NO: 56397 - DNA, 975 bp, Unknown
  Obtained from environmental sample
  misc_feature (1)..(975): n is a, c, g, or t
atgaaaaaattcgtaaccaccattgttgtaatttttgttatctttattggccttatgatagccagccccttttacattattaatgaaggcgaacaggcggcggttgtgcagttgggacagttaagagacgttaccaccaatgccggcctgtattttaaagttccttttatcgatgaaatctaccgttacccaaagaagatcatggcctgggacggcgaagcgaggatagttcccacggcggaaaggcagtttatctttgtcgatgttatcgcccgctggcgcatttccgatcccaaaaaattctacgaggccattaacaccgtggacgcggcgtattccaaacttgccgagattatcgactccgaggtgcgtaccgtggtggcagaaaacttcttgcgggagtctgtgcggaattcaaacatcattatggaacgcaccctgagcaccgatgaccccggcctgggggaagatataagggccgagatactgagcacggtacagcccggttcggggtatgaacctattacaaagggccgccgccgccttgccgaggaagtgctcagccgttcgcggcgcatggttcccgaatacggcatagagcttatcgacgtggtaacgcggcagatacgctactccgacgagcttaccccgagcgtctttgcccgcatgatacgggaacgtaaccagatagcccaggcttaccgttctgccggcgaaggcagcaaggcggaatggctgggcaagatggacaacgaaaaacgctccattctctccgccgcttacgagcaggcggagacgatccgcggaaaggccgacgccacagcgacgcggatttacgctgaggcttacagccaggacagggacttttttaatttctggcggggcgtggaatcctaccgcggcactctgccgaagtttaagaaaactttaactacggatatggaatatttccgttatctgtataccccgcgataa

SEQ ID NO: 56398 - protein, 324 aa, Unknown
  Obtained from environmental sample
  SIGNAL (1)...(28)
  DOMAIN (23)...(240): SPFH domain / Band 7 family
  misc_feature (1)..(324): Xaa is any amino acid
MKKFVTTIVVIFVIFIGLMIASPFYIINEGEQAAVVQLGQLRDVTTNAGLYFKVPFIDEIYRYPKKIMAWDGEARIVPTAERQFIFVDVIARWRISDPKKFYEAINTVDAAYSKLAEIIDSEVRTVVAENFLRESVRNSNIIMERTLSTDDPGLGEDIRAEILSTVQPGSGYEPITKGRRRLAEEVLSRSRRMVPEYGIELIDVVTRQIRYSDELTPSVFARMIRERNQIAQAYRSAGEGSKAEWLGKMDNEKRSILSAAYEQAETIRGKADATATRIYAEAYSQDRDFFNFWRGVESYRGTLPKFKKTLTTDMEYFRYLYTPR

SEQ ID NO: 56399 - DNA, 1206 bp, Unknown
  Obtained from environmental sample
  misc_feature (1)..(1206): n is a, c, g, or t
atgaattttacgcaagacaatgttgtcgcttacttccagcctattctttccgccgagacaaccgacgtatacgcctatgaagttttaggccgctacttggacgatgacgggaatgcgcaatctttaggccctttttttaccaaccctgatacttcgcatgaagaagctctgagggtagacagaatagtaagaagatatgccatgagaaaatatgcggaagaaaagcgaaacgaatatctgtttatcaatatcagattggcatggcttttaccgtttattcaaaacccgaaagaaatggtaactttgcagttggcaaacgaatttggcatccctcccgaaaaactggttatagaaattacagaagaagattttaattcaaacgaggaatatctccgcgccatagtccactataaaagagcgggatgccgtatcgcgcttgatgattacggaaaggaagccagcaatattgacaggctggcaaaacttcagcccgatattataaaaatcaatattgattatatccataacagtgaaaattcttatcattatcgcgagtatttacgggctattgccgttttcgccgattccgtaggtatcgagattttgtgtgaagggatagagacggagcgtcagcttgatatttgcatttcctcaaagggaagattttttcagggatttcttctttctgtccctcaggcgtctttgtccggcatggttattaattcctgtgttttttcctcgttaatcgcggccgcttatacggcaatccaaaccagggcaaccgatatggaattctttaaaaattccatggatgttcaggttgagcgtttccttctcgaaaacccgtttgattttgaaaaaacaaacaacgacgattgccttgtaaaacttttccgtgaattgccggaagtaatacgaatttatctgtgcgaccggaaaggcgtccagatttccaataatattgagcggcaatcaggcggtattttatacaaagattataaaaacaagaactgggcatggcgcggatattttcatgaaataataaaggcttttatcaggggcagaaaaagctgcctgacaaacccgtaccgcgattttacaacaaaggaaaagatatggacatattgttacgcgattaaagatgatgtgtttttattggcggatattataaaggaaccggagagggtagacaatgtcgctggatag

SEQ ID NO: 56400 - protein, 401 aa, Unknown
  Obtained from environmental sample
  DOMAIN (1)...(231): EAL domain
  misc_feature (1)..(401): Xaa is any amino acid
MNFTQDNVVAYFQPILSAETTDVYAYEVLGRYLDDDGNAQSLGPFFTNPDTSHEEALRVDRIVRRYAMRKYAEEKRNEYLFINIRLAWLLPFIQNPKEMVTLQLANEFGIPPEKLVIEITEEDFNSNEEYLRAIVHYKRAGCRIALDDYGKEASNIDRLAKLQPDIIKINIDYIHNSENSYHYREYLRAIAVFADSVGIEILCEGIETERQLDICISSKGRFFQGFLLSVPQASLSGMVINSCVFSSLIAAAYTAIQTRATDMEFFKNSMDVQVERFLLENPFDFEKTNNDDCLVKLFRELPEVIRIYLCDRKGVQISNNIERQSGGILYKDYKNKNWAWRGYFHEIIKAFIRGRKSCLTNPYRDFTTKEKIWTYCYAIKDDVFLLADIIKEPERVDNVAG

SEQ ID NO: 56401 - DNA, 975 bp, Unknown
  Obtained from environmental sample
  misc_feature (1)..(975): n is a, c, g, or t
atgtcgctggataggagagtaagcaccgggatgcccggtctggatcaggcgatcgatatgcttcgcctgggtgataacgttgtctggcaggtaaattccatcgaggattacctccaggtggtgcgtccgtatatcaatcaggcaaaaaaggacaagcgcaggcttgtttatttccggttcgggaatcacgatcctataatggaagatgacgagccgtccgttgtgtataaactggatacctccgaggggtttgagctttttgccgcgaaaatacataatattattgacaaggaaggacttgaggctttctatgtattcgactgcctgagcgacttattgaagagctggcgttcggacatgatggtgggcaatttttttcgtgtaacctgccctttcctgtttgtgcttgatactctcgcgtattttgcccttatccggggcacccatacccacgacacaatcgcccgaatacgcgagaccacgcagcttttaatggacgtgtacattgttgacaataagatttacattcatccgcttaaggtgtgggaacgctattctcccaccatgttctttcctcatctgatagaagaagacggggcgatctcaattacctccagcgccgacacggcgaccctgttctcgcaggtcagcggcagcggacagcccagcgattactggaatataaccctggatcacgcgcgcacgctgcttagcggggataaagagtcgcaggaggagatgaaaaagctccttatcagccttgtaataggcaaggagttgcgcataacggaactcgcagttaagtatttcacgctcagggatgttctggacatcgcgcgacgggagatagggacgggttttatcggcggaaaaagcngtggggatgcttctcgcgagaaaggtgctggagaccgacgcacaggacgcgatgcggggccatgggaaccgcatgatcctactctcggccgaatctga

SEQ ID NO: 56402 - protein, 324 aa, Unknown
  Obtained from environmental sample
  misc_feature (1)..(324): Xaa is any amino acid
MSLDRRVSTGMPGLDQAIDMLRLGDNVVWQVNSIEDYLQVVRPYINQAKKDKRRLVYFRFGNHDPIMEDDEPSVVYKLDTSEGFELFAAKIHNIIDKEGLEAFYVFDCLSDLLKSWRSDMMVGNFFRVTCPFLFVLDTLAYFALIRGTHTHDTIARIRETTQLLMDVYIVDNKIYIHPLKVWERYSPTMFFPHLIEEDGAISITSSADTATLFSQVSGSGQPSDYWNITLDHARTLLSGDKESQEEMKKLLISLVIGKELRITELAVKYFTLRDVLDIARREIGTGFIGGKSXGDASREKGAGDRRTGRDAGPWEPHDPTLGRI

SEQ ID NO: 56403 - DNA, 972 bp, Unknown
  Obtained from environmental sample
  misc_feature (1)..(972): n is a, c, g, or t
ttgttcacgctaaacggatttgggagggccttacctatggagtttgacaatattaaggagttcgcggcgtacttgggagttcaacgcggtctctctgcggcgacggtgcgggagtatagatacgatctgcggcgttacgcggcttggctctcggacaccggaaagcggctgtcggaggttacgcccaacgacatggacgcttacgtactgtatctacggggagagttaaacttgcaaccaagaacttgcaaaaggaggatcgccgccgtatcgacttaccataagtggctcgtgcgggtgggcgtgttgcaaaatgatccggtctattttatagttctgccgaaagccggtactaacttacccatatacttaaccaaagacgagatcgggcagttcatgctgctcatcgaagaggaggccgtcaagcggcctattgtgggaacgcggaacagggcaatgttctatctgatgatgttcgccggtctgcggatttcagaaacgctggccataagggagtctaccatcgccatgcaagacggattgccggacacggtaaccgtcgtgggcaaaggtaacaaggagcggcaagtaccgctgtcggaaaaggcggcaatggcggtgcggtcgtggatggacaccaaaaaggctctgcgggaggatgacgatttggcccgaaagttaactcggaagaatctaaaagaaattatgagtgatctcctctttccggggcgggatggtcggcagatggacaagagagccgtccaaagaaagatcgcgtctttgcggggggagttcggaaacaaaaaactgacaccgcataaactacgtcatacgtttggtacgtcgctcaacagggcgggggtcgatataaagacgatccaagagttgctcggccataaggacatcgggacaacgcagatttatacgcacgtggaagcctcgcaaaaaaaggcggcggtcaaactgctgtga

SEQ ID NO: 56404 - protein, 323 aa, Unknown
  Obtained from environmental sample
  DOMAIN (18)...(101): Phage integrase, N-terminal SAM-like domain
  misc_feature (1)..(323): Xaa is any amino acid
MFTLNGFGRALPMEFDNIKEFAAYLGVQRGLSAATVREYRYDLRRYAAWLSDTGKRLSEVTPNDMDAYVLYLRGELNLQPRTCKRRIAAVSTYHKWLVRVGVLQNDPVYFIVLPKAGTNLPIYLTKDEIGQFMLLIEEEAVKRPIVGTRNRAMFYLMMFAGLRISETLAIRESTIAMQDGLPDTVTVVGKGNKERQVPLSEKAAMAVRSWMDTKKALREDDDLARKLTRKNLKEIMSDLLFPGRDGRQMDKRAVQRKIASLRGEFGNKKLTPHKLRHTFGTSLNRAGVDIKTIQELLGHKDIGTTQIYTHVEASQKKAAVKLL

SEQ ID NO: 56405 - DNA, 2292 bp, Unknown
  Obtained from environmental sample
  misc_feature (1)..(2292): n is a, c, g, or t
ttgaacgaatgggtcaggaggaaattcctttccttcagaggcaaatttaacaaacagggaaccgacgatgaatacagggaactgttgaacctgttttttcaaggctttcgcattgatgtttccgctcccatgtatcgctcccttcccgctgcaattgaccgctggctgtccgtactgcacattgatttttccgcttatcaatacgctcttaacataaaagaatacggcgtaaacaacgacgttatacagtatgccctttccatgaatgtgattttcgaagaagaagacggcgtaataaaaacccctattgggcaatgtaaagatttgggagttctgcgcgcgcctgtcgccctgtcaaattatctgccggaaattaaagacttaatggcggcaaaaaaatccggcggctcccatgtgcttctttccgaagaacggcttgtttcgtttttggattcagccgccgcccttcttgcccgtttggggataaaagttaaccttcccaaatcccttgcgaaggagttaaaaccgcgcctggtgataagggggaattccacaggaaaatcgctaaaaacttatcttgatctatccactttgcaggaatttgaatggcagatagccataggcgagaaggtactgtcttcaaaggaatttgaaaaactggtcaatcaaaaaagcgccattatccgtttcaaggacggttttgtaaaaatggatccgcaggaattttcacgcctgcttaaaaaatcaaaagaagccaagccggattttaatgatttcttaaaagcgcacttttcaggcgattccgttcttgccttcgacgcccgcgaaactatcaacaatattttccgcgaacagaatttttctattccggccgcgcttaccgccaagctcaggccctaccaaaaacgcggttataactggatatgttcgcttttatattcaggtttcggctgtatactcgcggacgacatggggcttggaaaaaccgttcagtcaatagcgtctatattgcggctgaaagaggaaaggctgttaaaaaacggctgtcttgtcgtagcgcccgcggccctcctttccaactgggaaaacgaacttgggcgttttgccccatcgctgaaaatttcccgctatcacggaagccgccgcgtccttgacagaaaacgcgacgtgtttctcacaacctaccaaaccgctgtgcgcgacgcggaaaagctcaaggcagaagccttttccctgcttgtcatagacgaagcccacttaatgaaaaacgccgatacccgcatatcacgcacggtaaaacagcttcgttcccaataccgccttgccctttccggcactcccgtggaaaaccgccttgaagacctgcgttccctttttgactttatcctgcccggttatcttggaaacgccacggagttcagggttatgtacgtgtcccccatcgaagttatgcgaaaccgcgctcaggccgaagccttgcggaaaataaccgcccccttccttttgaggcggctgaaaacggacaaggccatcatcaaggatctgcctgaaaaaatcgtagtcaatgaatacgccgcgctggaaaaaagccaggccgcgttatacgaaagcgtggtcgccgaatccatacaaaaatccgagaaggcagatcctgcggaacgatccgctttgattctcaatcttttgacttccctgaaacagatatgcgaccatccccgcgtgtttgacaaggaaagccccgcgatctccggcctttccggcaaggcccaactgctccttgccctgcttgaggagattctagccaaccgcgaaaaaacgcttgtgttcagccagtatgtggaaaccctggactgcctggagaagatcatcaaaagcgaactagcggaacagccgctgatttaccacggcggcctcagccagagcgcgcgttccgaaattatcaaccgctttcagaacgaaaacgcggcaaggatactgctgataagcctgaaagccgggggcttagggctgaaccttacagcggcgagccgggtgatccattacgatctgtggtacaatccggctgtagaaaaccaggccactgacagggccttccgcattggccagaagcgcaatgtctttgtccaccgcttcatcaccaaaaacagtttcgaggaaaagatcgacgccatgatcaccagcaaacgagagttagccgacatgacagtcgcctcgggcgagtcatggattgccaggatgagccatgaggagttgaaggcgctgttgacaggaacaaaatctcggccaatctga

SEQ ID NO: 56406 - protein, 763 aa, Unknown
  Obtained from environmental sample
  DOMAIN (298)...(455): DEAD/DEAH box helicase
  misc_feature (1)..(763): Xaa is any amino acid
MNEWVRRKFLSFRGKFNKQGTDDEYRELLNLFFQGFRIDVSAPMYRSLPAAIDRWLSVLHIDFSAYQYALNIKEYGVNNDVIQYALSMNVIFEEEDGVIKTPIGQCKDLGVLRAPVALSNYLPEIKDLMAAKKSGGSHVLLSEERLVSFLDSAAALLARLGIKVNLPKSLAKELKPRLVIRGNSTGKSLKTYLDLSTLQEFEWQIAIGEKVLSSKEFEKLVNQKSAIIRFKDGFVKMDPQEFSRLLKKSKEAKPDFNDFLKAHFSGDSVLAFDARETINNIFREQNFSIPAALTAKLRPYQKRGYNWICSLLYSGFGCILADDMGLGKTVQSIASILRLKEERLLKNGCLVVAPAALLSNWENELGRFAPSLKISRYHGSRRVLDRKRDVFLTTYQTAVRDAEKLKAEAFSLLVIDEAHLMKNADTRISRTVKQLRSQYRLALSGTPVENRLEDLRSLFDFILPGYLGNATEFRVMYVSPIEVMRNRAQAEALRKITAPFLLRRLKTDKAIIKDLPEKIVVNEYAALEKSQAALYESVVAESIQKSEKADPAERSALILNLLTSLKQICDHPRVFDKESPAISGLSGKAQLLLALLEEILANREKTLVFSQYVETLDCLEKIIKSELAEQPLIYHGGLSQSARSEIINRFQNENAARILLISLKAGGLGLNLTAASRVIHYDLWYNPAVENQATDRAFRIGQKRNVFVHRFITKNSFEEKIDAMITSKRELADMTVASGESWIARMSHEELKALLTGTKSRPI

SEQ ID NO: 56407 - DNA, 447 bp, Unknown
  Obtained from environmental sample
  misc_feature (1)..(447): n is a, c, g, or t
atgtcatataaaaacgcttcattatcatataaagaaactaaagtaaaaaccgccggtcaggggcatcttatagtcatgctctacgacgaggcggtaaagcaactgaccaacgcggcggaaattttgcaaaagaatataggcgaaaaaagagacccgggcagaattgagcaaatatccaaagccataatgaaaactcaggaaatcattaccgaattgactgtttcactggattttgatcaaggcggcgaaatttctaaaaacctgttttctatttatacatggtttaacagggaacttgttgaagcgaatattaatcaggatttaaacagaatgttgactgtaaaagatatgctttcagaccttagaaacgcatggagtacggttgcaaaccagaaaacagccgaaaatccgaaccgcgaggcagtaggacttaacattgccggttaa

SEQ ID NO: 56408 - protein, 148 aa, Unknown
  Obtained from environmental sample
  DOMAIN (3)...(132): Flagellar protein FliS
  misc_feature (1)..(148): Xaa is any amino acid
MSYKNASLSYKETKVKTAGQGHLIVMLYDEAVKQLTNAAEILQKNIGEKRDPGRIEQISKAIMKTQEIITELTVSLDFDQGGEISKNLFSIYTWFNRELVEANINQDLNRMLTVKDMLSDLRNAWSTVANQKTAENPNREAVGLNIAG

SEQ ID NO: 56409 - DNA, 693 bp, Unknown
  Obtained from environmental sample
  misc_feature (1)..(693): n is a, c, g, or t
atggatgaaaaaaatttattatccgacggtatcgatataatttgcgaaagcgatgaggaaataaaaagcctcatcgctcccaaccgcgaaaaaattatcgccctccttaataattacataaaagaaattgaactttttaactccgcgtacggacttgtcggagtaagcaatacaaatgagctgattataaaacacatactcgattcacttgcgccgcttggcgtaattttaaaactgctcaaaagcgtccgagcggaaaatactccgcaaatagcggacgcaggatcaggcgcaggactgccgggcattccgctggcgattactctgccgcattgtgattttaccctcattgaacgcatggggcgcagggcgggatttttactcaacacaaaggcggttctgtctctttccaatgttaatatagaagaaagcgaattggaaaaaacggagaaagagcgttttaaccttgtcacttttcgcgccttcaaanccgctggaaccgaattgcttaaaaccctttttaacgtttgcgcttcgggaggcgtaatagccgtttacaggggcaggcgcgaaaaaatcgaagcggaaatgtcgccttacaaaaaaaactgcgaaaattgggaaataactccatatacaacgccgtttcttgacgaagaacggcatcttttggtcattagaccgccggcttaa

SEQ ID NO: 56410 - protein, 230 aa, Unknown
  Obtained from environmental sample
  DOMAIN (32)...(224): Glucose inhibited division protein
  misc_feature (1)..(230): Xaa is any amino acid
MDEKNLLSDGIDIICESDEEIKSLIAPNREKIIALLNNYIKEIELFNSAYGLVGVSNTNELIIKHILDSLAPLGVILKLLKSVRAENTPQIADAGSGAGLPGIPLAITLPHCDFTLIERMGRRAGFLLNTKAVLSLSNVNIEESELEKTEKERFNLVTFRAFKXAGTELLKTLFNVCASGGVIAVYRGRREKIEAEMSPYKKNCENWEITPYTTPFLDEERHLLVIRPPA

SEQ ID NO: 56411 - DNA, 1113 bp, Unknown
  Obtained from environmental sample
  misc_feature (1)..(1113): n is a, c, g, or t
gtgggacgttacaccgttatacccgttttggtgttttctttgacagttgcagtctatgaactccgcatggacgatcaattttggcctattatttttaaaaatatctcatttatcctgttaacatccgctattgtgatttttatcggcattacggtaactatgattttcaccccgggaagaatcccgataggcactatcgaacaagttgaagtgttaagcctgaatgtcggggacaatttactggatatattcccgtccaatatgctcagtgtaatctcgacgggcggaatttacttgtttccggcgtgtatttttgcgttttttctgggtttgggtcttgattacgaccgtaactattcaaaacccgtcatttctatcgtggactcgctttcgcggattttctaccatatcgcttcctttttctccgagattttagggttcgttttaatcgtgctttccgcggtttgggcggtgcgttttcacggtttgttagaggcaaaagtctacaaggatataatcgcccttttggggattttcagcgttgttttgtgctttggcattatgccgttcttcctgtacctgttaaaacccaaaacaaacccatggcatatcctatacggctttttgggaccggcaattgcggcattcttctccggcgacgttaattttgcgattcccgtgcttgtacgtcattcaaaggaaaatttcggcataagaagacggtcaagttccatatcgatatcattattcgctactttctgcagatgcggaagcgccatggtggcggcagcggcttttatcgtcattattaagtcttattcgtatttaagaataggtatgctcgatttattaacaatcggcatatactccttctttatttctttcatccttgcgcgtcatcccggcgacggagctttcatagcgttggccgccctctgccttacctacggcggcggagcgtacagcgccggttacctcattctaaaacctatggctttctacttggcggctgtaggtgcttttatcgacgtaatgcttaactctttctgcacctatgtattggcgagaacaaacggctttatagaagaaaaaaatctggtgcattttatataa

SEQ ID NO: 56412 - protein, 370 aa, Unknown
  Obtained from environmental sample
  DOMAIN (3)...(357): Sodium:dicarboxylate symporter family
  misc_feature (1)..(370): Xaa is any amino acid
MGRYTVIPVLVFSLTVAVYELRMDDQFWPIIFKNISFILLTSAIVIFIGITVTMIFTPGRIPIGTIEQVEVLSLNVGDNLLDIFPSNMLSVISTGGIYLFPACIFAFFLGLGLDYDRNYSKPVISIVDSLSRIFYHIASFFSEILGFVLIVLSAVWAVRFHGLLEAKVYKDIIALLGIFSVVLCFGIMPFFLYLLKPKTNPWHILYGFLGPAIAAFFSGDVNFAIPVLVRHSKENFGIRRRSSSISISLFATFCRCGSAMVAAAAFIVIIKSYSYLRIGMLDLLTIGIYSFFISFILARHPGDGAFIALAALCLTYGGGAYSAGYLILKPMAFYLAAVGAFIDVMLNSFCTYVLARTNGFIEEKNLVHFI

SEQ ID NO: 56413 - DNA, 1371 bp, Unknown
  Obtained from environmental sample
  misc_feature (1)..(1371): n is a, c, g, or t
atggtaaactttactattaataaagcttatccatcagttacatggccgacagcggcggaaataacctacggtgcggcattgtctgcatcggcgcttagcggcggtacaaatacgcctgccgggactttcgcatggactacaccctcgaccattcccacagttgccaacagcggatatggcgtaacatttacgccgacagatacgaataattataataccgttagcggcactgtaaacataacagtaacacctgccaatctgtcaggagatattaatatcagcccaagcggaacagttgcagtcaacacgcaacttaccgctacatataacggatcagaaacagtaagttaccaatggaaaaaagatgggaataatgttggaacaaactccaacaaatttacgccgacaacaaaagggaattacaccgtaaccgtaagtgcaacaaactacaatagtaagaccagcgcaactgttaccgttataaacacatggatagccgtaacggacagcaaattcggcacaaccaccatcacctcaatcgtctatggtaacggcaagtttgtcgcaggaggatctggtggtaatatcgtaggagatattggaaaaatggcgatttcaacagacggaatatcatggacagcaattacgcaaagtatcttatgtaccgaggttacatcaatcgcatacggtaataacaaatttgtagctgttagctgggatgaaatggcgtattcagcggacggcgtaacatggacagaagtaaggcataacctcttcgattcatcagagactttcaaagcaatcgcctatggcaacggcaagtttgtcgtcggaacctataacggtaaaatggcaacttcaccggacggtttaacatggacagccgtaaatagcaaattcggaaactatggtatctattcgatcgcctatggcaacgggttgtttgtagcaggaggcgtgtggggcaaaatgtcgacttcaccggacggcataacttggacagccgtaacggataccaccttcgccagtagcagtagtggcaccatcgaatcaatcgtatatggcaataacatgtttgtcgcagtaggtagagcaaaaatagcgacttcaacggacggcgtaacatggacagccgccgtaatggacaacattataatcggctttaaagcaatcgcctatggcaacggcaagtttgtcgcaggtggcggtaacggatcggttacttcaacggacggcgtaacatggacacccttattggacttcggaacaaactggatctacgcaatcgcctatggaaacggtaagtttgtcgccgtgggatacgacaattttcccgagcctaccggcaaaatggtgtgtttcccatactaa

SEQ ID NO: 56414 - protein, 456 aa, Unknown
  Obtained from environmental sample
  misc_feature (1)..(456): Xaa is any amino acid
MVNFTINKAYPSVTWPTAAEITYGAALSASALSGGTNTPAGTFAWTTPSTIPTVANSGYGVTFTPTDTNNYNTVSGTVNITVTPANLSGDINISPSGTVAVNTQLTATYNGSETVSYQWKKDGNNVGTNSNKFTPTTKGNYTVTVSATNYNSKTSATVTVINTWIAVTDSKFGTTTITSIVYGNGKFVAGGSGGNIVGDIGKMAISTDGISWTAITQSILCTEVTSIAYGNNKFVAVSWDEMAYSADGVTWTEVRHNLFDSSETFKAIAYGNGKFVVGTYNGKMATSPDGLTWTAVNSKFGNYGIYSIAYGNGLFVAGGVWGKMSTSPDGITWTAVTDTTFASSSSGTIESIVYGNNMFVAVGRAKIATSTDGVTWTAAVMDNIIIGFKAIAYGNGKFVAGGGNGSVTSTDGVTWTPLLDFGTNWIYAIAYGNGKFVAVGYDNFPEPTGKMVCFPY

SEQ ID NO: 56415 - DNA, 924 bp, Unknown
  Obtained from environmental sample
  misc_feature (1)..(924): n is a, c, g, or t
atggaactggtcagagcgttcagcgtttttccccgcgacggcgtttatatgccgctgacatgggaattgggtgacgcgcagcggcaggagcgcgtaacggcgcatcacgaagcggcgcatcacgatgcgatgctaaagcgaatcttttccgccgataccgcccggcttatctgttcgtttttatcggattcaagcgcgagggtaatggcctttggccgggccaggaattttcaaacccagtttccttccatgttcaagacaggaaccgccaatcagtatcagagcattgtcgccctgggggctacgccaaaatacaccgccggagtgtggatgggaaattttaccggtgaaacagttatcggcagaacgggaagctccattcccgccgccattgcgcgtgacgcgctggttttcttgcagtctcgccagcgcggcgcggcgcccgatttttccgcgcctgaaaactggcggatgcggcgcgtctgcgccctttccggcatgactcccggtgatgcgtgcctttcggttatcaacgaataccagtatcacggcgaagaaggggaaccctgcacctggcaccggatggtaaacggccgcagcgaggtagtataccccgccgaatatcaggcgtggtttaccgcttctgtgcgggaaggttcacttgactacaggtcgcgcccccttgaaattgtcagtccccgcgaaggctttgtataccttagcagccccggcattggccgggatgaaattccggtagaagttatcggcggcaacagcgatgaattgcgcgtgacgttcaacggccaaatattcagcgtcgggcggccctttgttttttcccttccccgcataccaggttcctacactttgctggttcaaaacggcggcgaggaagaggaagtgaattttacggtggagccttga

SEQ ID NO: 56416 - protein, 307 aa, Unknown
  Obtained from environmental sample
  misc_feature (1)..(307): Xaa is any amino acid
MELVRAFSVFPRDGVYMPLTWELGDAQRQERVTAHHEAAHHDAMLKRIFSADTARLICSFLSDSSARVMAFGRARNFQTQFPSMFKTGTANQYQSIVALGATPKYTAGVWMGNFTGETVIGRTGSSIPAAIARDALVFLQSRQRGAAPDFSAPENWRMRRVCALSGMTPGDACLSVINEYQYHGEEGEPCTWHRMVNGRSEVVYPAEYQAWFTASVREGSLDYRSRPLEIVSPREGFVYLSSPGIGRDEIPVEVIGGNSDELRVTFNGQIFSVGRPFVFSLPRIPGSYTLLVQNGGEEEEVNFTVEP

SEQ ID NO: 56417 - DNA, 951 bp, Unknown
  Obtained from environmental sample
  misc_feature (1)..(951): n is a, c, g, or t
atggcagatttagcggcccccgcttatgaagtaaccgccacaaaacggcgccccaaaacttttgacgaactggcggggcaggaatttgtggtttccaccctgaagaactccctgaaaagcgggagcattgcccacgcttatttgttttctggaccgcgtggttgcggcaaaaccagcgcggcgcgtattttagcccgttctttgaactgcgattcgcccgtgggcggaaacctgggggaaccctgcggacattgcgataattgcaggtcaatcgccgccggctcaaacatggacgttatcgaaattgacggcgcatccaataccggcgtcaacgatgtcaggcagattaaggacgaagtgcttttccctccccagtccgggcgctacaaggtttacatcattgacgaagtccacatgcttaccactaatgcgtttaatgccctccttaaaacgatagaggagccgccgccttatgttatatttatttttgcgacaaccgagatacacaaggttcccgcaaccattaaaagccgctgccagcaattcagtttcaggcttatccccattgagaccattcagggcttgctaaaaaaaatatgcgatgaaatgaacataaaagcggatgataacgcgctgttctggatcgcgagggaatccacgggcagcctgagggacgcgttcactctttttgatcaggttgtttctttttccggcgggcatataaacgaaaacctgatccgtgaaaaactcggcctcgccggtctggaaaaaattaactccctcgccgaggcctgcgccgccaatgacatagccggggctctttcccaggtcgattcaattcttggctcaggcgttgctattgaacagcttgtcatcgatcttgcaggatattaccgcagtcttatgctgttgaaaaacgngcattacccgcgaatcccttttgggcaataa

SEQ ID NO: 56418 - protein, 316 aa, Unknown
  Obtained from environmental sample
  DOMAIN (46)...(255): ATPase family associated with various cellular activities (AAA)
  misc_feature (1)..(316): Xaa is any amino acid
MADLAAPAYEVTATKRRPKTFDELAGQEFVVSTLKNSLKSGSIAHAYLFSGPRGCGKTSAARILARSLNCDSPVGGNLGEPCGHCDNCRSIAAGSNMDVIEIDGASNTGVNDVRQIKDEVLFPPQSGRYKVYIIDEVHMLTTNAFNALLKTIEEPPPYVIFIFATTEIHKVPATIKSRCQQFSFRLIPIETIQGLLKKICDEMNIKADDNALFWIARESTGSLRDAFTLFDQVVSFSGGHINENLIREKLGLAGLEKINSLAEACAANDIAGALSQVDSILGSGVAIEQLVIDLAGYYRSLMLLKNXHYPRIPFGQ

SEQ ID NO: 56419 - DNA, 1485 bp, Unknown
  Obtained from environmental sample
  misc_feature (1)..(1485): n is a, c, g, or t
atgctcaaatatgtactggcactggatcaggggacaaccagttcgcgcgcgattttgtttgatcaggaacaaaatatcgttgctcaggaacagaaagagtacacgcagatttatccccgcgagggctgggtcgagcatgatcccatggagatatattcatctcagtatggggtgatggcggagttaatggcgcggcaaaacattgcgccggcggatatagccgcgattggcattgccaaccagcgggaaacaacgattttgtgggaaaaggcgagcggcaggcccatttataacgctatagtctggcagtgccgccgcacggccgccattgtggattcgctggttgaagccgaccttgccgaccatatcaaaaaaaccacgggtctggtgccggacgcttatttttccgggacaaaaattaaatggattcttgaccatgttgaaggggcgcggaataaagcccgtaacggggaaatcctttttggcacggtggactcctggcttatctggaaattgtgcggacttcatctgaccgattacaccaatgccagccgcaccatgttattcgacattcacaaactggattgggatgacactttgcttgcttccctggacataccccgctccatgctgcccgaagtgcggccttcaagcgcgatatacggggaggctactattcagggtacaaagatacccattgccggcgttgccggggatcaacaggcggcgctgttcgggcagggctgctttgaaaagggccaggcgaagaatacctacggaaccggctgttttttgctgatgaataccggcgaaaagcccgttgaaagccgcaacggcctggttagcaccattgcggcaagcctacccggcaagctccgttatgcgctggaaggttcggtctttataggcggcgcggtagttcattggctgcgggatgagatgcgcctgattaccgaaagcgccgaaattgaatcttacgcggcgcagacagccgatacgggcggggtgtacattgttcccgcctttgccggactgggcgcgccgtactgggatatgcacgcccgcggctgcatcgtgggtattacccgcggaaccaatcgctgtcacatcatcagggcggcggaggaatccatcgcctaccaggtgacggatcttgtgcgggcaatggaaaaagattcaggttttgtcataccggaattgaaagcggacggcggcgcaagccgcgacaatttcctgatgcagtttcaggctgatatttccggctgcgcgataatccgccccgtgatccgcgaaaccaccgccctgggcgcagcctgtcttgccggtatagcggtgggtttttggaaaggcactgatgaactggaaagccgctggaaaagcgacgccgttttcaacccttccatggatattcaaaaacgggcgtccctgctttccggctggcacaaagctgtaagccgcagccacggttgggcggaaaacagttag

SEQ ID NO: 56420 - protein, 494 aa, Unknown
  Obtained from environmental sample
  DOMAIN (249)...(474): FGGY family of carbohydrate kinases, C-terminal domain
  misc_feature (1)..(494): Xaa is any amino acid
MLKYVLALDQGTTSSRAILFDQEQNIVAQEQKEYTQIYPREGWVEHDPMEIYSSQYGVMAELMARQNIAPADIAAIGIANQRETTILWEKASGRPIYNAIVWQCRRTAAIVDSLVEADLADHIKKTTGLVPDAYFSGTKIKWILDHVEGARNKARNGEILFGTVDSWLIWKLCGLHLTDYTNASRTMLFDIHKLDWDDTLLASLDIPRSMLPEVRPSSAIYGEATIQGTKIPIAGVAGDQQAALFGQGCFEKGQAKNTYGTGCFLLMNTGEKPVESRNGLVSTIAASLPGKLRYALEGSVFIGGAVVHWLRDEMRLITESAEIESYAAQTADTGGVYIVPAFAGLGAPYWDMHARGCIVGITRGTNRCHIIRAAEESIAYQVTDLVRAMEKDSGFVIPELKADGGASRDNFLMQFQADISGCAIIRPVIRETTALGAACLAGIAVGFWKGTDELESRWKSDAVFNPSMDIQKRASLLSGWHKAVSRSHGWAENS

SEQ ID NO: 56421 - DNA, 471 bp, Unknown
  Obtained from environmental sample
  misc_feature (1)..(471): n is a, c, g, or t
gtggaaaaatcctcggatggagtttcttcgggcggaaagtccgaaggagccgactcaatttcttcgcctagtcccgataaaaggtccgggggtacggaaaaatcatcgtccggagttgaagatgtttcctcttcggccggagtttccgttccgagagaatctaaaaaatcatccgcagggaaagaatcgtcaggcaatgtccctgtatccggagagcttaaaaagtcatcggcaggaaaagattcgtctgccggaaaatccggcaggtctgcggctgcgggcgttctttcctcggactttatgtccgcagattctatatccgtaggcgattcatccgttggagtatcgcctcccaaagagcttaaaaaatcatcatcggcgaatgtctcttcccctgacgttccgtccggaggcgtttcatctgccggagtatcaattccaagagacgataagaaatcgtcggtagactga

SEQ ID NO: 56422 - protein, 156 aa, Unknown
  Obtained from environmental sample
  misc_feature (1)..(156): Xaa is any amino acid
MEKSSDGVSSGGKSEGADSISSPSPDKRSGGTEKSSSGVEDVSSSAGVSVPRESKKSSAGKESSGNVPVSGELKKSSAGKDSSAGKSGRSAAAGVLSSDFMSADSISVGDSSVGVSPPKELKKSSSANVSSPDVPSGGVSSAGVSIPRDDKKSSVD

SEQ ID NO: 56423 - DNA, 759 bp, Unknown
  Obtained from environmental sample
  misc_feature (1)..(759): n is a, c, g, or t
atgagaacgattaggttttttcttcttttaacgctgattttctcttttatgccggtaaccgcaggggctgaaaactgggaatcttacgagcttattgaacgcttattggccatacctagccccggaaaaccgctaatttttaaagattttataatttttaccgccgatacaaacctgcgaaaggtaggaattgcctttgcccatgagaattttgcctatacatactggttcaaacaacttcttgtccctcaagacctcctaaatgcgccaattccgcccggtaaaaaagtccccgatccttacatagattcgggtattcaattctatgtatttgaggtccctgaaggtttaaatgaagttggatacaggcttgtaattaacggcctgtggacaacagacccgaataatcccctaacccgcagagaccttgtttccggcttgattttatcggtggtaagtatgccgttcagacccataaaacttgaccctctaaaaggactgcccgaaggactaacctttacctttaacggccccccaggagagaccgtcaccgtagccggcagttttaacagttgggacccatttatgtacgaacttaaagaaaacccagcaggtgtttataccctcacgctcccactgccgccaggcacataccaatacgtttttttctgtcagggcaagcgttttgtagatttgaataatccacgcagaagttactcacgggaaggaaaagccgcgtcggagattacggttccgtaa

SEQ ID NO: 56424 - protein, 252 aa, Unknown
  Obtained from environmental sample
  SIGNAL (1)...(23)
  misc_feature (1)..(252): Xaa is any amino acid
MRTIRFFLLLTLIFSFMPVTAGAENWESYELIERLLAIPSPGKPLIFKDFIIFTADTNLRKVGIAFAHENFAYTYWFKQLLVPQDLLNAPIPPGKKVPDPYIDSGIQFYVFEVPEGLNEVGYRLVINGLWTTDPNNPLTRRDLVSGLILSVVSMPFRPIKLDPLKGLPEGLTFTFNGPPGETVTVAGSFNSWDPFMYELKENPAGVYTLTLPLPPGTYQYVFFCQGKRFVDLNNPRRSYSREGKAASEITVP

SEQ ID NO: 56425 - DNA, 693 bp, Unknown
  Obtained from environmental sample
  misc_feature (1)..(693): n is a, c, g, or t
ttgaaaatgaagggaagagcaattctactggttaaccctcaaaagggccatgcacgaaaacttggcaatgatatatcagaagaattgctctccatgaatatagaagcggatatttactcaattaaggaaaaatcttttgtttctccggataaaaaatacatcgtcgcgatagtccttggcggagacgggactgttctctcagcggccagggcggtatccccactgggtatcccgatttttcccgttaatctggggacatttggctttatcgcggaagtacaaccccttaaatggcggatggttttcgacaggtggatggcagggaaggaagccgtttcccgccgccttatgcttgatgtttcggtagaaagggacggctgcaaaatctttcgggaatgttgccttaacgatgtcattatttcgtcttccggcattgccaagataataaaccttcgcctttttttcaaagaagaaggaatgaagacaaatttaaagctgggctcgtaccgttcggatggccttattatcgccaccccgaccggttcaaccgcatattcaaccgccgttggaggccccgttgtcgatccggagcttgaggcgcttatattaagccccgtttgcccttttatgcttacaaaaccgtcctttggtattacctggcacaggaactgtgattgtagaggtggcggatga

SEQ ID NO: 56426 - protein, 230 aa, Unknown
  Obtained from environmental sample
  DOMAIN (6)...(223): ATP-NAD kinase
  misc_feature (1)..(230): Xaa is any amino acid
MKMKGRAILLVNPQKGHARKLGNDISEELLSMNIEADIYSIKEKSFVSPDKKYIVAIVLGGDGTVLSAARAVSPLGIPIFPVNLGTFGFIAEVQPLKWRMVFDRWMAGKEAVSRRLMLDVSVERDGCKIFRECCLNDVIISSSGIAKIINLRLFFKEEGMKTNLKLGSYRSDGLIIATPTGSTAYSTAVGGPVVDPELEALILSPVCPFMLTKPSFGITWHRNCDCRGGG

SEQ ID NO: 56427 - DNA, 1425 bp, Unknown
  Obtained from environmental sample
  misc_feature (1)..(1425): n is a, c, g, or t
atgatagaagagcttagcgtaaggaattttgcgctgattgacagccttaacctctcatttgaaaaaggctttactgttttatcgggggaaacgggagccggaaaatccataatcgtaggctcccttagttttctttttggcgccaaaacagacagcgaaattatccgttcaggttccgaagaagcaaatgtctcggcggtggttactgttgacaataaaaaccgggatgccctgcaatggcttagccagcgtgaaattgagcctgaagattccaggcttgtaatccggcgcagcgttaaagcttccggccgcaattcaatctacatacaaaacgtaccagtaaccaggaacgatcttgccgaatttatgggttttctttttgatctccacgggcagcacacccacgaatcccttttaagaaaagaaacccaccgtgtttaccttgaccggttttcaggcctggaaaacgaagccgcggcattctgccaggtatttacggagctggcggaaaagcgcaagacccttgaatcgctgaaccgttccgaaaaagaaagggagcagaggcttgagctgttgaattatgctattgaggaaattaccaaggccgctcccaaaagcggggagataaaagagctggaagccgaaacccagcgcctttcggattttgaaaagctaagccttcatgtgaatgctgtttcttcatcgctttatgaggactcggaatccacagattccgcaatttctcttctaagccttgggcgtcgccttagggcttcgcttgagaacgccgcctccatagacaactcgctttctcctttgctaaagcggctggaagatatttactatgaagccgaggacttggccgccgaattcaggaattaccgcggccgattaacctacgatccggcgaagcttgaagaaacggaagaaaggctcgccctgctttacaaattgaaaaaaaaataccgtcctgccgggcagccggaagcgggtggttccgtcggcgtaagttcggatgagggaggcatacttgcctataaagccgaagccgaggcggaaatagaggcgatttcgggagcgggggaaaaccaggacaagttaaaagccgaaatcggccgccttgaaaaggacattgccgcaagggctggcgttcttagcgcaaagcgaagcgaaggggcgaagcgtttgagtgaaggaataacgggcatcctttccaggctgggcatgcccaaggcgattttttcggtaagcgtaaagccaaaaaccagggaaggaggctccggccttgtctgcggctcctacggcgcggatgatgtggaatttttgatttccgccaattcaggagagccgttaaaggagcttgcccggatcgcctcagggggggaattatcccgagtgatgctggctatcaagacaatattgtga

SEQ ID NO: 56428 - protein, 474 aa, Unknown
  Obtained from environmental sample
  DOMAIN (1)...(299): RecF/RecN/SMC N terminal domain
  misc_feature (1)..(474): Xaa is any amino acid
MIEELSVRNFALIDSLNLSFEKGFTVLSGETGAGKSIIVGSLSFLFGAKTDSEIIRSGSEEANVSAVVTVDNKNRDALQWLSQREIEPEDSRLVIRRSVKASGRNSIYIQNVPVTRNDLAEFMGFLFDLHGQHTHESLLRKETHRVYLDRFSGLENEAAAFCQVFTELAEKRKTLESLNRSEKEREQRLELLNYAIEEITKAAPKSGEIKELEAETQRLSDFEKLSLHVNAVSSSLYEDSESTDSAISLLSLGRRLRASLENAASIDNSLSPLLKRLEDIYYEAEDLAAEFRNYRGRLTYDPAKLEETEERLALLYKLKKKYRPAGQPEAGGSVGVSSDEGGILAYKAEAEAEIEAISGAGENQDKLKAEIGRLEKDIAARAGVLSAKRSEGAKRLSEGITGILSRLGMPKAIFSVSVKPKTREGGSGLVCGSYGADDVEFLISANSGEPLKELARIASGGELSRVMLAIKTIL

SEQ ID NO: 56429 - DNA, 468 bp, Unknown
  Obtained from environmental sample
  misc_feature (1)..(468): n is a, c, g, or t
atggcagaaaatttgaactacgagactgagggcagcaaatgtcaagacaaaaaaactactggctgcgagaagtacgggaggttgtataattgggacgaggctaaaacagcttgtcccactggttggcatttgccaagcgatgaggaatggaatgttttgctgaaattcgcaaatcctaattgttctgacagcagcgattatgctggtgcgggaaccaagttaaaggctaaaagtgcttggagatatggcacggatgcctactgtttttcggctcttccgggcggttatggcgaaggtggtaatttcttctatgtcggctactacggttattggtggagtagtactggtgagcaaagcgctaactacgcctacagccgaaacataggttacgacggcggcgaggggggtgtagtcaggatcaaaaacaataagaacaacttgttaagcgtccgttgtttgaaagattaa

SEQ ID NO: 56430 - protein, 155 aa, Unknown
  Obtained from environmental sample
  misc_feature (1)..(155): Xaa is any amino acid
MAENLNYETEGSKCQDKKTTGCEKYGRLYNWDEAKTACPTGWHLPSDEEWNVLLKFANPNCSDSSDYAGAGTKLKAKSAWRYGTDAYCFSALPGGYGEGGNFFYVGYYGYWWSSTGEQSANYAYSRNIGYDGGEGGVVRIKNNKNNLLSVRCLKD

SEQ ID NO: 56431 - DNA, 1023 bp, Unknown
  Obtained from environmental sample
  misc_feature (1)..(1023): n is a, c, g, or t
atgccattattatgcttattggtatttttcttaatcagctgctccaaatccgatgcccctaaggggggggcaggacgggggggtgcacaaacggttagcgtagaggctattatcgcgcagccggagcagttgaaaaattccgtgcgcggggttgggattttagtgccatcaaatgaagtggaaattcaggcggaaatagccggcaaggttgaaagggtttattttagggatgggcaaaacgttaggtcaggtgcatccttggtgaaaattgaagatgataatctaagagcggtgatgtacagagccgatgcaaaactagtgcttgccagaagcagtgctgaacggaaaaaaaaacaatataacgcaggtgctatatccgctcaggaatgggaaaatactcaagcggatttgcaaatagcggaagccgattccatagatgctgctgccaacttgcgaaagactttgatttccgccccatttgaggggagactcggcataagcaaaataaatcgcggaaaaaggctctccgtaggagaccaaatagtgaaaatagttcaaaaatttccgctgaaagttgatttttccgttgcggacaaatatgcatccactatgaaagtgggtatggaagtggagtttatccgcaataccgaaaattacaaagcggtgattgacgctctggagagttctttggacggctcaaccagaacattgctagcgagggcgataataaacgggcaaccggaagaacttgttccgggtgcgcctcttgaatttatgttgaatttaccgcctagaatgtctatcaccgttccaccggaagcaattggaagcgatgcctttggcagcaatttatatctgtacaaaggtggaaaggctcagttagctcgcatagaaattggaacccgttttattgacaaagtagaagttttggatggcgtgtttatcggtgataccgttttatgcgtaggagcatcccctgtgagaaacggcggcaatgtggaaattagcagaattagacggtaa

SEQ ID NO: 56432 - protein, 340 aa, Unknown
  Obtained from environmental sample
  SIGNAL (1)...(19)
  misc_feature (1)..(340): Xaa is any amino acid
MPLLCLLVFFLISCSKSDAPKGGAGRGGAQTVSVEAIIAQPEQLKNSVRGVGILVPSNEVEIQAEIAGKVERVYFRDGQNVRSGASLVKIEDDNLRAVMYRADAKLVLARSSAERKKKQYNAGAISAQEWENTQADLQIAEADSIDAAANLRKTLISAPFEGRLGISKINRGKRLSVGDQIVKIVQKFPLKVDFSVADKYASTMKVGMEVEFIRNTENYKAVIDALESSLDGSTRTLLARAIINGQPEELVPGAPLEFMLNLPPRMSITVPPEAIGSDAFGSNLYLYKGGKAQLARIEIGTRFIDKVEVLDGVFIGDTVLCVGASPVRNGGNVEISRIRR

SEQ ID NO: 56433 - DNA, 378 bp, Unknown
  Obtained from environmental sample
  misc_feature (1)..(378): n is a, c, g, or t
ttgcgtgacaaaaatggcaaagttctgactatggcagctctgcgttcccaggctcaaagcgaagaaccccttggcccaaacaccgaggtaaatcaatggctccgcaaatacttagaggctttaaccgatgaatccagagagcttggggaagaactgctttggaaatggtggagcaaagacaaattggatatgcagaacataaggatagaaatagttgaccaactgcacttttggttatcccttgcgattaccgctggcatggatgcagagaaggtatttgatatctatatgcaaaagaataaagtgaatatagaacgccaaaattcaagctacagcaaagagaataaaaatgaagcggacaatagaggaattaattaa

SEQ ID NO: 56434 - protein, 125 aa, Unknown
  Obtained from environmental sample
  SIGNAL (1)...(20)
  misc_feature (1)..(125): Xaa is any amino acid
MRDKNGKVLTMAALRSQAQSEEPLGPNTEVNQWLRKYLEALTDESRELGEELLWKWWSKDKLDMQNIRIEIVDQLHFWLSLAITAGMDAEKVFDIYMQKNKVNIERQNSSYSKENKNEADNRGIN

SEQ ID NO: 56435 - DNA, 2739 bp, Unknown
  Obtained from environmental sample
  misc_feature (1)..(2739): n is a, c, g, or t
atgaataagaaacttggcgatcccagcgatccgcttttggtttcggttcgttccggagcggcaatatccatgccgggtatgatggatacgattcttaaccttggaataagcgataaatcggtaaaaggtcttgcgacaaagacgggtaatccgcgttttgcgtgggatgcctaccgccgttttattcaaatgtacggcgatgtagtaatgggcgtggagcatagcaagtttgaagaagctatacacgcgcttaaaaaatcaaaaaatatagagttggataccgatcttacagcgggcgatcttgaaaaacttgtcgaagaatacaaacaaatcgttaaaaagaatacaggtaaagacttcccgcaagccccgcttgatcaactttggggagcgataaacgcggttttcggctcatggatgagcgaccgcgccgttagataccgtaaattagaagatatccgcaaccttaaaggcactgcggtaaacgttcaatcaatggttttcggcaatttcggcgatgattcgggtacgggagtatgtttcagcagagacccaagtaacggcgttaatgaattttacggcgaatatttaatgaatgcgcagggagaggacgtagtagcgggtatcagaacccccgaaagaatctctactctggcaaagaagaatcctactatatataaacagcttgtcgccattaaaaacagactggaaaaacactttaaagatatgcaggatatggaatttacagtacaacagggcgagcttttccttctgcaaacgcgtaacggtaaacgcgcaggaaccgcggcggtaaaatgcgcggttgacatggtagcggaaggtttaatcgataaaacaaccgccattatgcgcgtttcacccaaccaccttgaccagcttttgcacccgatgatcgattttaaggcgcagaaagatgtaaaagcccttacaaaagggttaaacgcctctccgggcgcgggtacgggcaggattgtttttaacgcaaaagaagcggagctttggcacgcaagaggcgaaaaagtaattttggttcgtaaagatacaagtcccgaagacatcggcggtatggttgtttcgcagggtattcttacctcgacaggcggcatgacaagccacgcggcggttgtcgcgcgcggtatgggaactccttgtgtcgccggcgccaaaggcgttttattagacggcaataccgtagaaatcggcgggaaaaaatttaatgaaggcgattggataacaatcgacggaacttccggcgaagtatacgatggaaaattgccgctggtagctccttcaatttccaaagatgtaaatactttccttaaatggtgcgatgatgtccgcgcaagctcggttcgcggcagaataaaaggttttgcagtaagaaccaacgccgatcagcctgacgacgcgaaaagagcgtttgctttcggcgctcagggtatcggtctttgccgcacagagcacatgttctttgataaagaaaaacttatccacttccgcgccatgattgtcgcggaaacggaagcggagagaaaagagcagttaaagaagattcttccccttcaacagaaagatttctacggtattttcaaggcaatggaaggccgccctgtaacaatcaggcttttagacccgcctttgcatgaatttgtaccccatacaaaggaagaagttgaagaattagccggacatttaaacatcggcgtcgataaattaaacgctaaaatcggcactcttatagaaagcaacccgatgttagggcatcgcggctgcagattggcggtaacataccctgaaatctacgatatgcaggtagaagctatcgctcttgccgctgttgaatgcgtaaaagaaaaaattccggtacatcccgaaattatgatacctatcgtagtaaccgcaagagaactcaggcttttacgccccaacgtggagaaaatatttgaaaaagtgctttccgcggcgggagtaaaggttcctgtaaccattggtacgatgattgaagtgccgcgcgccgcgattcgctcggagcatatcgcgcattacgcggactttttcagttttggaacaaacgatcttacacagatgacattcgcctttagccgcgatgacgttgcgtcgttcctgcctttctatcttgaaaaaaatgttcttgatgttgatccgttcaagaccattgaccaggacggagtaggcggtttgatggagatggcgattaaaggcggtcgatctgtaaaaccggatctcaaacttgggatctgcggagaacacggcggagatcctgctactatagatttttgctatagagtgggattgagctacgtatcatgttcaccattccgggttccgttagctaggcttgcaggtgcgcaagctgtaattaacaactcaggaaagaatataacggggggggagtcagaaaagactaaaccaaccactgccaaggtgaaaggcagtaaaaaacctgcaaaagcaagggggaaaaagaaaatggcagtaacatctgcgaagaagaaacttgcggcgaagaagaaaaccgccgccaagaagaccggcgcaaagaaagccggtgcgaagaaggttgcgaaaaagaaacccgcagccaaaaaaaccggcgccaagaaaaccggcgccaaaaagactgcgaagaaaaaacccgcagccaaaaagaaaactgcggctaaaaaacccgcagccaaaaaatcagtagttctttaa

SEQ ID NO: 56436 - protein, 912 aa, Unknown
  Obtained from environmental sample
  DOMAIN (326)...(425): PEP-utilising enzyme, mobile domain
  misc_feature (1)..(912): Xaa is any amino acid
MNKKLGDPSDPLLVSVRSGAAISMPGMMDTILNLGISDKSVKGLATKTGNPRFAWDAYRRFIQMYGDVVMGVEHSKFEEAIHALKKSKNIELDTDLTAGDLEKLVEEYKQIVKKNTGKDFPQAPLDQLWGAINAVFGSWMSDRAVRYRKLEDIRNLKGTAVNVQSMVFGNFGDDSGTGVCFSRDPSNGVNEFYGEYLMNAQGEDVVAGIRTPERISTLAKKNPTIYKQLVAIKNRLEKHFKDMQDMEFTVQQGELFLLQTRNGKRAGTAAVKCAVDMVAEGLIDKTTAIMRVSPNHLDQLLHPMIDFKAQKDVKALTKGLNASPGAGTGRIVFNAKEAELWHARGEKVILVRKDTSPEDIGGMVVSQGILTSTGGMTSHAAVVARGMGTPCVAGAKGVLLDGNTVEIGGKKFNEGDWITIDGTSGEVYDGKLPLVAPSISKDVNTFLKWCDDVRASSVRGRIKGFAVRTNADQPDDAKRAFAFGAQGIGLCRTEHMFFDKEKLIHFRAMIVAETEAERKEQLKKILPLQQKDFYGIFKAMEGRPVTIRLLDPPLHEFVPHTKEEVEELAGHLNIGVDKLNAKIGTLIESNPMLGHRGCRLAVTYPEIYDMQVEAIALAAVECVKEKIPVHPEIMIPIVVTARELRLLRPNVEKIFEKVLSAAGVKVPVTIGTMIEVPRAAIRSEHIAHYADFFSFGTNDLTQMTFAFSRDDVASFLPFYLEKNVLDVDPFKTIDQDGVGGLMEMAIKGGRSVKPDLKLGICGEHGGDPATIDFCYRVGLSYVSCSPFRVPLARLAGAQAVINNSGKNITGGESEKTKPTTAKVKGSKKPAKARGKKKMAVTSAKKKLAAKKKTAAKKTGAKKAGAKKVAKKKPAAKKTGAKKTGAKKTAKKKPAAKKKTAAKKPAAKKSVVL

SEQ ID NO: 56437 - DNA, 381 bp, Unknown
  Obtained from environmental sample
  misc_feature (1)..(381): n is a, c, g, or t
ttggctgcgggttttttagccgcagttttctttttggctgcgggttttttcttcgcagtctttttggcgccggttttcttggcgccggtttttttggctgcgggtttctttttcgcaaccttcttcgcaccggctttctttgcgccggtcttcttggcggcggttttcttcttcgccgcaagtttcttcttcgcagatgttactgccattttctttttcccccttgcttttgcaggttttttactgcctttcaccttggcagtggttggtttagtcttttctgactccccccccgttatattctttcctgagttgttaattacagcttgcgcacctgcaagcctagctaacggaacccggaatggtgaacatgatacgtag

SEQ ID NO: 56438 - protein, 126 aa, Unknown
  Obtained from environmental sample
  SIGNAL (1)...(22)
  misc_feature (1)..(126): Xaa is any amino acid
MAAGFLAAVFFLAAGFFFAVFLAPVFLAPVFLAAGFFFATFFAPAFFAPVFLAAVFFFAASFFFADVTAIFFFPLAFAGFLLPFTLAVVGLVFSDSPPVIFFPELLITACAPASLANGTRNGEHDT

SEQ ID NO: 56439 - DNA, 477 bp, Unknown
  Obtained from environmental sample
  misc_feature (1)..(477): n is a, c, g, or t
atggccgagatttcaacgtcagacagttcttggtgctatgaaaacagcgccgatagttgcaacaagtacggccggttgtacacttggcgcgtagcgattaaggcttgccccaacggatggaagttaccggatactgcggattggagaaagttggtgacgttggcgggtaaacaaaaaacgtcgggtaaaaagttgaaatcaaagaacggatggagtggggatgaactcaataatgtaaacggtaacggtactaatgattacggattttcggccctgcccggcggcctccggactgcccaagacagtagcgatttctacaatgatgccggcaactccggctattggtggacggccacggaggactatagtcgcgacgttcacttccggaacatatggtacaacaacgacaacgtgcttgaaggctacgcctataagagcaacggcttctctgttcgttgcgtccaaaatagaaattga

SEQ ID NO: 56440 - protein, 158 aa, Unknown
  Obtained from environmental sample
  misc_feature (1)..(158): Xaa is any amino acid
MAEISTSDSSWCYENSADSCNKYGRLYTWRVAIKACPNGWKLPDTADWRKLVTLAGKQKTSGKKLKSKNGWSGDELNNVNGNGTNDYGFSALPGGLRTAQDSSDFYNDAGNSGYWWTATEDYSRDVHFRNIWYNNDNVLEGYAYKSNGFSVRCVQNRN

SEQ ID NO: 56441 - DNA, 828 bp, Unknown
  Obtained from environmental sample
  misc_feature (1)..(828): n is a, c, g, or t
atgcgcaaactcatactgactacggcggtggtcgcggcggcgattggattggcggcggtggtcgggacgctttggttgtcgaagcgcgcgaaggaattgatgccggagcggacgatatccgtaacatacgggcaaagttttgaaatggcgttcgtggcgtttgaaatggcgttcgtggcgggcgggacgtttacgatggggtgcgccgccgaacaggacagcgattgcgacgacgacgaacgtccggcgcattccgtgacgttgagcgattactacatagggaagcgcgaggtgacgcaggggctgtggaaagcggtgacgggcggtaatccgtcatactttacagggagcgataatttgcccgtgaatcgcgtccgttggaatgaggtcaacgcgtttatagacagtttgaatagaaagaccggcaggacgtatagattgccgacggaggcggagtgggagtatgcggcgcgcggggggaataaaagcggagggtacaaatattctggtagtaatacgttgggaagcgttgcttggtatggtgataatagcggtcgtaaaactcatgaggcaggtacgaaagcgcctaatgaacttggtatctatgacatgagcggcaacgtgtgggagtggacgggcgataggtatggatattacggttctgatgcgcagactaatcctatagggccgtcaacgggttctttccgcgtgtttcggggcggtagttgggactcctacgcgagtagttgccgtgtctctaatcgcagctactaccccgactacagcgacggcaacataggcttccgccttgtgttgttgtccccctag

SEQ ID NO: 56442 - protein, 275 aa, Unknown
  Obtained from environmental sample
  SIGNAL (1)...(21)
  DOMAIN (52)...(272): Domain of unknown function (DUF323)
  misc_feature (1)..(275): Xaa is any amino acid
MRKLILTTAVVAAAIGLAAVVGTLWLSKRAKELMPERTISVTYGQSFEMAFVAFEMAFVAGGTFTMGCAAEQDSDCDDDERPAHSVTLSDYYIGKREVTQGLWKAVTGGNPSYFTGSDNLPVNRVRWNEVNAFIDSLNRKTGRTYRLPTEAEWEYAARGGNKSGGYKYSGSNTLGSVAWYGDNSGRKTHEAGTKAPNELGIYDMSGNVWEWTGDRYGYYGSDAQTNPIGPSTGSFRVFRGGSWDSYASSCRVSNRSYYPDYSDGNIGFRLVLLSP

SEQ ID NO: 56443 - DNA, 849 bp, Unknown
  Obtained from environmental sample
  misc_feature (1)..(849): n is a, c, g, or t
atgcgcaaactcatactgactacggcggcggtcgcggcggcgattggattggcgggatgctctaagacaccgacaccgaaatccgtctccgcgacgcctgatacggcggccctatcggtcgatacgccgcccgccgacgcttccgctttttccgaaacggcggtcggcgggcaaagttttgaaatggcgttcgtggcgggcgggacgtttacgatggggtgcgccgccgaacaggacagcaattgcgacgaagacgaacgtccggcgcattccgtgacgctgaacgattactacatcgggaagcgcgaggtgacgcaggggctgtggaaagcggtgatgggcgccgataataatccgtcattttttacagggagcgataatttgcccgttgaaaacgtcagttggaatgaggtcaacgcgtttatagacagtttgaatagaaagaccggcaggacgtacagattgccgacggaggcggagtgggagtatgcggcgcgcggggggaataagagcggaggatacaaatattcaggtagtaatacgttggatagcgttgcttggtatgatgataatagcgacagtaaaacacaagaggcaggtacgaaagcgccgaatgaacttggtatctatgacatgagcggcaatgtgtgggagtggacgggtgattggtatggcgattacggttcggatgcgcagactaatcctatagggccgtcaacgggctctaaccgcgtgtttcggggcggtagttggttctacgttgcgaggaactgccgtgtctctaatcgcggcgacatcatccctgactaccgctacgacgacataggtttcgcctgcttcccgccataa

SEQ ID NO: 56444 - protein, 282 aa, Unknown
  Obtained from environmental sample
  SIGNAL (1)...(21)
  DOMAIN (58)...(281): Domain of unknown function (DUF323)
  misc_feature (1)..(282): Xaa is any amino acid
MRKLILTTAAVAAAIGLAGCSKTPTPKSVSATPDTAALSVDTPPADASAFSETAVGGQSFEMAFVAGGTFTMGCAAEQDSNCDEDERPAHSVTLNDYYIGKREVTQGLWKAVMGADNNPSFFTGSDNLPVENVSWNEVNAFIDSLNRKTGRTYRLPTEAEWEYAARGGNKSGGYKYSGSNTLDSVAWYDDNSDSKTQEAGTKAPNELGIYDMSGNVWEWTGDWYGDYGSDAQTNPIGPSTGSNRVFRGGSWFYVARNCRVSNRGDIIPDYRYDDIGFACFPP

SEQ ID NO: 56445 - DNA, 618 bp, Unknown
  Obtained from environmental sample
  misc_feature (1)..(618): n is a, c, g, or t
atgaataagcgtatttctttagcgcttgtattgttttttttagtcgtaaccctttgttttggtcaggccggcgctcttagggattatgttgggcttataagtatccattatcattctgatgttgtcgcttacatgagcaaatacaaggaaagatttgagaagaaaggatataccaacgccgccaaagctattgacaactaccttaaaggcttaagcggaaccggttttatctatgtagccggagacggaacctgttatgttcttacaaacgagcatgttgtcgcgcagtcagaaagcctttccattacctttgaaaaacaggacggaagtaaaactatttatgacagactcaaagtgttgtttgtggacgaagaaaaagatttggctattcttgtttttgacgcgggagtaaagccttttacccgagggttaagctttgccgccaaggctgttgacgaaggcgctgatgtttttgccgtcggcttccccggttttggtaataccgcaatttggcaattcagccgaggtaatgtctctaacgcgtcagtcatgttccctaaaagcagcgacagcgatgagattatcggtccctattttcagcataccctctcaaattga

SEQ ID NO: 56446 - protein, 205 aa, Unknown
  Obtained from environmental sample
  SIGNAL (1)...(25)
  misc_feature (1)..(205): Xaa is any amino acid
MNKRISLALVLFFLVVTLCFGQAGALRDYVGLISIHYHSDVVAYMSKYKERFEKKGYTNAAKAIDNYLKGLSGTGFIYVAGDGTCYVLTNEHVVAQSESLSITFEKQDGSKTIYDRLKVLFVDEEKDLAILVFDAGVKPFTRGLSFAAKAVDEGADVFAVGFPGFGNTAIWQFSRGNVSNASVMFPKSSDSDEIIGPYFQHTLSN

SEQ ID NO: 56447 - DNA, 822 bp, Unknown
  Obtained from environmental sample
  misc_feature (1)..(822): n is a, c, g, or t
ttgaccggcgaaggcactccgtctattgaagaagctaacgcaagtattaagctgtctatttacgacaagtattccactattggctcgaaagacaccgtcacgggcagtccgactcaaaaccagtactacttcacgtaccgtatctatccgagtgccgcgagaaacggctttgatgtcaatgtggcctctgcaaaatacctgcttggaactaacgagccgggtcagtcgataacgccgaacattaacctgaccggctccagcaccttctggccatccggtctgaccgcgcttcccgacggcttgtggaaagtggacattgaagtttacgaccgggccggcaatacctctggtgtagttacccaggaattccgggtgaaccgggcagcgccgaagctgaatgtaacgacaacggccttgaccgactacaacggccagacccccctgaacaacacggcggtatttggcgtgactataaccgttgaggatggagacctcaacacggtggatattcaggtaggtaaactgaacactccgactcttaccagcattaccaaaggtacctataccggctctactaaccagtggacggtaacaccgactccgtggactatcagcgaagcgctctttagacagcttgacgatggtcccaatacgataaccgttaccgccaccgatgacggccccaggtcggcgacaccctggacgtttaactttaacaaagacctcaatccgccttctatcagcatcaacaactggacgagcccaaagcagatatccaaatcggattgggatgccgcgggtagtaacacatcatcatgctga

SEQ ID NO: 56448 - protein, 273 aa, Unknown
  Obtained from environmental sample
  misc_feature (1)..(273): Xaa is any amino acid
MTGEGTPSIEEANASIKLSIYDKYSTIGSKDTVTGSPTQNQYYFTYRIYPSAARNGFDVNVASAKYLLGTNEPGQSITPNINLTGSSTFWPSGLTALPDGLWKVDIEVYDRAGNTSGVVTQEFRVNRAAPKLNVTTTALTDYNGQTPLNNTAVFGVTITVEDGDLNTVDIQVGKLNTPTLTSITKGTYTGSTNQWTVTPTPWTISEALFRQLDDGPNTITVTATDDGPRSATPWTFNFNKDLNPPSISINNWTSPKQISKSDWDAAGSNTSSC

SEQ ID NO: 56449 - DNA, 594 bp, Unknown
  Obtained from environmental sample
  misc_feature (1)..(594): n is a, c, g, or t
atggcaggcgagcgaaaaaaaattattgtagtggacgacaatccggaaaatctgaacgttcttaaaaacaccatgaaagaactttacatggtatacccatgcccttcagcggcgcagatgtttgaactgctggcgcatgtcatgccggatttaattctcctggacgtggaaatgccggagatgaacgggtatgaagccataaaaaaacttaaaaacagcagtattaccaaggaaatacccgttatattccttacgtcaatgacggacgcgcagagcgagttggaaggattaagctacggcgccgttgattatatccgaaaacccttcgtcactcccctattgctccagcgcataaaaacccaactttcaattctggaacagcagaatgaaatcaggcatcttcttgacttaaaaacggaagaagttaaaatgcgcgaagcggccgagcatgaggcggaaagcgcttctcaggcaaagggcgacttcctttcccacatgagccatgaaataagatccccgttaaacgccgtaataggaatgataaacatcggccacgaggaaaaaacccctggaggcgtaaaggtttatctttga

SEQ ID NO: 56450 - protein, 197 aa, Unknown
  Obtained from environmental sample
  DOMAIN (6)...(119): Response regulator receiver domain
  misc_feature (1)..(197): Xaa is any amino acid
MAGERKKIIVVDDNPENLNVLKNTMKELYMVYPCPSAAQMFELLAHVMPDLILLDVEMPEMNGYEAIKKLKNSSITKEIPVIFLTSMTDAQSELEGLSYGAVDYIRKPFVTPLLLQRIKTQLSILEQQNEIRHLLDLKTEEVKMREAAEHEAESASQAKGDFLSHMSHEIRSPLNAVIGMINIGHEEKTPGGVKVYL

SEQ ID NO: 56451 - DNA, 711 bp, Unknown
  Obtained from environmental sample
  misc_feature (1)..(711): n is a, c, g, or t
gtgatgaaaataataaaagggatcatgcagtatgcgcctgtcggcgtgtgtgcccttgttttcggagttgtagcccagaatgggccgaaagtaatgggcgctctggggattgttaccgccgcctgtttcatcggctacgtttttcatattgtcatcgtttattttgggcttctcaaattctacggaggcatgagtgttaaacgctttttcagggatggaaaggacccgtttatcaccgcttttgtaaccagaagttccaacggtaccctgcctgtatccatggaagccgcagagagtatgggcatagagaaggacgtgtattctttctcgcttccgcttggggcaaccatcaatatggatggaaccgcgatttaccagggcgtatgcgccaccttcatcgctcttaccgtttggggtcatggttttactgtcagtcaaatgggattgatcgtggtaacagctaccctggcttcaatcggaaccgctggggttccgggcgccggcacaattatgctgcttatggtacttgagagtctcggactgccagtcacagcgggaaccgcagtggcgggtgcctacacgatgatcctcggtattgacgcgcttcttgacatgggccggtccgccctcaacgttaccggagaccttgtctgtactgcggttgtttccaaaaaaatgggcatgcttgacaataacaaatggaattcctga

SEQ ID NO: 56452 - protein, 236 aa, Unknown
  Obtained from environmental sample
  SIGNAL (1)...(25)
  DOMAIN (1)...(225): Sodium:dicarboxylate symporter family
  misc_feature (1)..(236): Xaa is any amino acid
MMKIIKGIMQYAPVGVCALVFGVVAQNGPKVMGALGIVTAACFIGYVFHIVIVYFGLLKFYGGMSVKRFFRDGKDPFITAFVTRSSNGTLPVSMEAAESMGIEKDVYSFSLPLGATINMDGTAIYQGVCATFIALTVWGHGFTVSQMGLIVVTATLASIGTAGVPGAGTIMLLMVLESLGLPVTAGTAVAGAYTMILGIDALLDMGRSALNVTGDLVCTAVVSKKMGMLDNNKWNS

SEQ ID NO: 56453 - DNA, 648 bp, Unknown
  Obtained from environmental sample
  misc_feature (1)..(648): n is a, c, g, or t
ttgaaattgaaagttaagatttgcggtctcttccgcgaggaagatattgagtatgtcaacgaagctcgccctgattttattggttttgtgtttgccgaaagcagacggaaagttacgcccgcccaagcggctaaactgcaccgttgccttgccgaaggaataatggcggttggcgtttttgtggacttttccatcgatgggatcgccggcttttaccgagacggtatcatttcgctagtccagcttcatggggcggaagacgacgcgtacatagcgcggcttaaagaaaccgctcgcggcgttccagtgataaaggttatcaaaagcgcggaactgctgtcgctggcggaagctggcaaaactgtagcggcgaacgctgactattaccttatcgactcangcgcgggcagcggaaaaacctttgactgggatcttttgcgctctggtaagccttgcgcttcatggctgcattcgtccggaaagcagtggtttctggcgggcggtataactcctgaaaatatcgggcaggcaatggagcttaaccctttcgccatcgacgtttcaggcggggccgaaacagacggtataaaagacaggagcaaaatagtacaattaacggcaattgtcaggaaaggaataacagtatga

SEQ ID NO: 56454 - protein, 215 aa, Unknown
  Obtained from environmental sample
  DOMAIN (5)...(211): N-(5'phosphoribosyl)anthranilate (PRA) isomerase
  misc_feature (1)..(215): Xaa is any amino acid
MKLKVKICGLFREEDIEYVNEARPDFIGFVFAESRRKVTPAQAAKLHRCLAEGIMAVGVFVDFSIDGIAGFYRDGIISLVQLHGAEDDAYIARLKETARGVPVIKVIKSAELLSLAEAGKTVAANADYYLIDSXAGSGKTFDWDLLRSGKPCASWLHSSGKQWFLAGGITPENIGQAMELNPFAIDVSGGAETDGIKDRSKIVQLTAIVRKGITV

SEQ ID NO: 56455 - DNA, 1302 bp, Unknown
  Obtained from environmental sample
  misc_feature (1)..(1302): n is a, c, g, or t
atgacatctctacctaaaaaatatgtatctgctgaagaatatataaagcttttagagtatgcagaaaaaagatataaagaagtaaatcttgtttgtcctgcgaatgaaatagacgtttttcttatgtcaaaaaaaatcacagatttaaattctcttagttttataaaatattttcacgagaaaagtgaattaaaaggttacaaaaaacaactaaatgatttttatacacaatattcaactgattatttaaatttgccaataattatcgaaagattgaaagatattgatgagttaataaatacatctaaattacatccatctgtcatacaaaatatgtataataatccaattaatcaaaaatctgattttatttatgacttaatagcaatgagactttctaatccacaatttcaagatgttaattttaataatattttcatcgaatatttaaataataatgaacaacaaaaagaattagtaataaaaacagcagatgttatacaaaattatatagattttgatgatttgttgataaatataaaatcaatgtatatataccctctttatgtaaacattattcatcatatcttaaaaaataataatggtaaaaaagcttatattgtatcgattttacagaattttgacatgatatgctcaaaagcaaatgtagaccctcagttattaattatcaatttatctgaatggcttccatggcttaaaaaaaaggatgggacatataaatttaacgaaactttttcgatattttttataaaagaaattttaaaatctaatacagagttagcaatatattgcattgaacaattaaaaaagtatttagatgattatactaaagatgaatggaaacaaagtataacacaaaatgatagttatgaagttcttgttactaaaacattagattataaatataatacttttgcagttgaagcaatgcatgaaatattattagaatttgcaaaaattgatgtaagctctgtggaacgtatacattatgaaaaaataataagtcatatggcaagtaaagaagtcagttttaccaaaacgtttaatagtgtaagagatttattatgtcaaaaaggggaattaaattgcaaggaatttcttttctggagtgaatggctttttatatattccaaacttgaaacaaaacaagaagtattaagaacaatttttcctgtttcattattagatgataatgattgtttaaatgtacttgttaagtataaaaatatattaccaaaaataatttcatcagcaggagatgaaagtgcaggatttatttga

SEQ ID NO: 56456 - protein, 433 aa, Unknown
  Obtained from environmental sample
  misc_feature (1)..(433): Xaa is any amino acid
MTSLPKKYVSAEEYIKLLEYAEKRYKEVNLVCPANEIDVFLMSKKITDLNSLSFIKYFHEKSELKGYKKQLNDFYTQYSTDYLNLPIIIERLKDIDELINTSKLHPSVIQNMYNNPINQKSDFIYDLIAMRLSNPQFQDVNFNNIFIEYLNNNEQQKELVIKTADVIQNYIDFDDLLINIKSMYIYPLYVNIIHHILKNNNGKKAYIVSILQNFDMICSKANVDPQLLIINLSEWLPWLKKKDGTYKFNETFSIFFIKEILKSNTELAIYCIEQLKKYLDDYTKDEWKQSITQNDSYEVLVTKTLDYKYNTFAVEAMHEILLEFAKIDVSSVERIHYEKIISHMASKEVSFTKTFNSVRDLLCQKGELNCKEFLFWSEWLFIYSKLETKQEVLRTIFPVSLLDDNDCLNVLVKYKNILPKIISSAGDESAGFI

SEQ ID NO: 56457 - DNA, 825 bp, Unknown
  Obtained from environmental sample
  misc_feature (1)..(825): n is a, c, g, or t
ttggcggaaaaattattgagaggcaagagaatgaggatagttatccataaaagccacgaagaggcaagccgctgggcggcgtattacatagccggcagaatcaacggttacaacaaaaccgaggacaagccctttgtactggggcttcccacgggctcaagccccctttttatataccgcgagtttgtaaaattgaacagcgccgggaaactctcttttgccaatgtccatactttcaatatggacgaatacgcggggctcccgcccgaacatccctacagctaccattactacatgatggagaatctttttaagcatattgatataaaacccgccaacacgcatattttagacggaatggcgaaagaccctgtggaggaatgccgcctttacgaggaggcaatcgcgaaaatgggcggcatagaactgttcctgggggggatgggcggcgacgggcatatcgctttcaacgaaccgggctcttccctgaggtcaaggacaagggttaaaaccctcaccaatgaaacaaaaaacgccaacgcccgtttctttggcggcgacccggaaaaagtcccgtcaatcgcgctgactgtgggcgtaggaaccgtgatggacgcgcgcgaagtgctgatcatagcaaacggcaaaaacaaagcccgcgctttacgcgcggttgttgaagacggcatcagccatatgtggacgctttcctgcctgcaaatgcaccccaaggcaatcatcgtctgcgacgaagacgcgaccgatgaactgaaaatgagaacggtacgttacttcatggatattgaaaggcttaacgagttctag

SEQ ID NO: 56458 - protein, 274 aa, Unknown
  Obtained from environmental sample
  DOMAIN (25)...(260): Glucosamine-6-phosphate isomerases/6-phosphogluconolactonase
  misc_feature (1)..(274): Xaa is any amino acid
MAEKLLRGKRMRIVIHKSHEEASRWAAYYIAGRINGYNKTEDKPFVLGLPTGSSPLFIYREFVKLNSAGKLSFANVHTFNMDEYAGLPPEHPYSYHYYMMENLFKHIDIKPANTHILDGMAKDPVEECRLYEEAIAKMGGIELFLGGMGGDGHIAFNEPGSSLRSRTRVKTLTNETKNANARFFGGDPEKVPSIALTVGVGTVMDAREVLIIANGKNKARALRAVVEDGISHMWTLSCLQMHPKAIIVCDEDATDELKMRTVRYFMDIERLNEF

SEQ ID NO: 56459 - DNA, 522 bp, Unknown
  Obtained from environmental sample
  misc_feature (1)..(522): n is a, c, g, or t
atggacagcaagtgtgcagtggtcagcgtagtgaaaagccctgccctgtggctttcgctagcagtgggggcctttgcgggcggaatcgccgcctgggttagcgtctcggtcgccgaaaaagaaagatggcacaccacggttcaaatagtccaaacgcccgccgctccggatgccataggcccgtacagccaaggcatggttgttgcccgcatgctctacaccgccggccagatacctctggatccacagacgatggaaatcgtccaaggcggaattgaagcgcagaccagccaagtgctgaaaaatttggacgcggtgctggccgaggccggggcctcctgggaaagcgtagtcaagtcaacagtctttttgaccgacatgaacgattttgccgcattcaattctgtttatgaacagcacattaaccccgccaagccagcccgcagcacagtccaagtggccgcattgccaaagggcgctgcggtagaaattgagctcatcgctaggatcacttctaaataa

SEQ ID NO: 56460 - protein, 173 aa, Unknown
  Obtained from environmental sample
  SIGNAL (1)...(26)
  DOMAIN (52)...(170): Endoribonuclease L-PSP
  misc_feature (1)..(173): Xaa is any amino acid
MDSKCAVVSVVKSPALWLSLAVGAFAGGIAAWVSVSVAEKERWHTTVQIVQTPAAPDAIGPYSQGMVVARMLYTAGQIPLDPQTMEIVQGGIEAQTSQVLKNLDAVLAEAGASWESVVKSTVFLTDMNDFAAFNSVYEQHINPAKPARSTVQVAALPKGAAVEIELIARITSK

SEQ ID NO: 56461 - DNA, 1320 bp, Unknown
  Obtained from environmental sample
  misc_feature (1)..(1320): n is a, c, g, or t
ttggggggacgacgggtggacggtcaggacggaggacgggtcgctctccgcccagttcgagcataccgtcttggtgaccgacagcggctccgaggtgctgacactcaccccgtcgcagagagcggccggggtcaggctaatcgtcgacggggaggcgtaccggtgaccgggcagacgctattccgcaaagagctcaaagacgtccgtacgatcgcggtcaaaaccggcagccgcatcctcaccgccgccggacacgagaggcgcgtcgagcggcttgccgccgatctgtccgcgctgcgcaaatccggcgcgcgggtcgtgctcgtctcttccggcgccatcgcccacggcatgaaggcgctcgggctcgacaaacggccctccgagatccccatgcagcaggcctgcgccgccatagggcagaataggctcatggccatctaccaagaacacttcgcgaaacacgatacgctgatagggcaagtcctgctgacgtgggacgacctgcgcagcaaaaaacgctatctcaatctgcgcaacacgctgttcaaattgttcgactgcggggcgatacccatagtcaacgagaacgactccgtgagcgtggaggagatatgtttcggcaataacgacacgctgggcgcgcaaatagcgatgctggtcaacgccgacgtgttggtcaacctgactgacgtgggcgggctttacgacaaaaatccccacacggataaagacgcgaagcacatccccgtcgtgagcgccgtctccgtcggaatacagaagatggccggcgataaaaagagcgagatcagcgtgggcggcatgtccacaaagctgaaggccgccgagatggtcacgcgggccggcattccggcgctgataggcgacggtttcaaccaaagcttgctgacggtgctgaaagacgagtcgcgggcgacgctcttcctgccgtccgacaaaaagataccctcaaggcagcgctggatagccttcaccgggcagtcggctggaagcgtcgccgtggacgccggggcgtccaaagcgataacggaaaaaggcaaaagcctgctggccgccgggatcacgaaggttaacggacggttcaacgccggggatatggtggacatagtcgatccgcgcggagacgttatagccaaggggttggtaaacttctccgcggacgaggtcgaggcgatacgcgggtgcaagacggcggaggtggagagaaagctcggcgccataaggttcaacgaggtgattttgcgggataatatggttgtggggcagggcggtcagaaatcgtgtccggcggagaaataa

SEQ ID NO: 56462 - protein, 439 aa, Unknown
  Obtained from environmental sample
  DOMAIN (337)...(411): PUA domain
  misc_feature (1)..(439): Xaa is any amino acid
MGGRRVDGQDGGRVALRPVRAYRLGDRQRLRGADTHPVAESGRGQANRRRGGVPVTGQTLFRKELKDVRTIAVKTGSRILTAAGHERRVERLAADLSALRKSGARVVLVSSGAIAHGMKALGLDKRPSEIPMQQACAAIGQNRLMAIYQEHFAKHDTLIGQVLLTWDDLRSKKRYLNLRNTLFKLFDCGAIPIVNENDSVSVEEICFGNNDTLGAQIAMLVNADVLVNLTDVGGLYDKNPHTDKDAKHIPVVSAVSVGIQKMAGDKKSEISVGGMSTKLKAAEMVTRAGIPALIGDGFNQSLLTVLKDESRATLFLPSDKKIPSRQRWIAFTGQSAGSVAVDAGASKAITEKGKSLLAAGITKVNGRFNAGDMVDIVDPRGDVIAKGLVNFSADEVEAIRGCKTAEVERKLGAIRFNEVILRDNMVVGQGGQKSCPAEK

SEQ ID NO: 56463 - DNA, 555 bp, Unknown
  Obtained from environmental sample
  misc_feature (1)..(555): n is a, c, g, or t
ttggagggggatatcgtcaatattgatctgaccacgattgtcgacggctttcacggcgactcctccgagactttcatgataggcgcggtcagcaaagaggcgcggcatcttgtgggcgtggcggccaaggccctcattatcggcatagacgcggtgaagccgggggcgcacctgcgcgccatcggcgacgccatcgaacccttcgtcaacgcccaaggctgttcggtggtccagcagtacaccggccacgggatcggcttgaagttccacgagtccttctccgtctaccatcacatagaaccccgcggcgaagatataatcatgctgcccggaatgaccttcaccatagagccgatgataaacctcggcggttatgcggtgacgacggattggggggacgacgggtggacggtcaggacggaggacgggtcgctctccgcccagttcgagcataccgtcttggtgaccgacagcggctccgaggtgctgacactcaccccgtcgcagagagcggccggggtcaggctaatcgtcgacggggaggcgtaccggtga

SEQ ID NO: 56464 - protein, 184 aa, Unknown
  Obtained from environmental sample
  DOMAIN (1)...(165): metallopeptidase family M24
  misc_feature (1)..(184): Xaa is any amino acid
MEGDIVNIDLTTIVDGFHGDSSETFMIGAVSKEARHLVGVAAKALIIGIDAVKPGAHLRAIGDAIEPFVNAQGCSVVQQYTGHGIGLKFHESFSVYHHIEPRGEDIIMLPGMTFTIEPMINLGGYAVTTDWGDDGWTVRTEDGSLSAQFEHTVLVTDSGSEVLTLTPSQRAAGVRLIVDGEAYR

SEQ ID NO: 56465 - DNA, 564 bp, Unknown
  Obtained from environmental sample
  misc_feature (1)..(564): n is a, c, g, or t
atgctcgaactgggcggagagcgacccgtcctccgtcctgaccgtccacccgtcgtccccccaatccgtcgtcaccgcataaccgccgaggtttatcatcggctctatggtgaaggtcattccgggcagcatgattatatcttcgccgcggggttctatgtgatggtagacggagaaggactcgtggaacttcaagccgatcccgtggccggtgtactgctggaccaccgaacagccttgggcgttgacgaagggttcgatggcgtcgccgatggcgcgcaggtgcgcccccggcttcaccgcgtctatgccgataatgagggccttggccgccacgcccacaagatgccgcgcctctttgctgaccgcgcctatcatgaaagtctcggaggagtcgccgtgaaagccgtcgacaatcgtggtcagatcaatattgacgatatccccctccaatacgcggtcatccttggacgggatgccgtgacatacaacgtcgttccgcgagatgcagcaggatttaggggaagcgcgcttatgccccttgtagccgaggcaggccggtaa

SEQ ID NO: 56466 - protein, 187 aa, Unknown
  Obtained from environmental sample
  misc_feature (1)..(187): Xaa is any amino acid
MLELGGERPVLRPDRPPVVPPIRRHRITAEVYHRLYGEGHSGQHDYIFAAGFYVMVDGEGLVELQADPVAGVLLDHRTALGVDEGFDGVADGAQVRPRLHRVYADNEGLGRHAHKMPRLFADRAYHESLGGVAVKAVDNRGQINIDDIPLQYAVILGRDAVTYNVVPRDAAGFRGSALMPLVAEAGR

SEQ ID NO: 56467 - DNA, 1230 bp, Unknown
  Obtained from environmental sample
  misc_feature (1)..(1230): n is a, c, g, or t
gtgcctgtggagaaggctaaggcgaccgaggtctttgaggagatagagcaacggcgggtggacccgggattgcttgaacgggtggagggcaacaacttccgcacgcgcatctacccaatcccttccggcggagtgcgcacagtcgcgataggttacgaggaggagttggcgcttgaaaaggagttgctgcaataccggttgccaatggactatcccgacccgctcgaaaacttcaaagtaaaggcgaccgtttggaagagcagccttaagcccatcgttcccaaatccgttgaggaacttctttttgacaaagcggacgaaaactatgtagccgcgtttgcccgcaacaattatcgtcccacacgcgcgttgaatttcgcgctgccggcgccggttgacattccgcaaattatgatgcagccggcgcagggaagttactatttcttcgcctctgtcgcgcctaaattggaaacgcgtaaaaagcaatggaacaacgatttggcaatcatttgggacgtatcgctaagcggctcgcaacgcaatatagagcgtgaactggaaatgcttgacatcatcttctccgaaaagaaaaacgcaaacgtatatctttattttttgaacaatacattaaccaaaatgatcaacaaaaacaccgccaacggcgagcacaaggtcagtaacggtaattgggacgcgttgaaaaacatcttgaggcacgcgaccttcgacggcggcaccgatttttcaaaaatcaacttaaatcttctcgccggaaacgagattatattcttttcggacggactttcaacgctgagcgacgccgacttcataaagaacacccgtattaccgtaaaatgtcctatgcactgcgtcgtctcttcggcaaaagccgattacagcgcgatgagattgattgctggcaaaacaaaaggtaaatttgttaatctcaacgctctctcttccgatgagttaaagaaagaattattgagcgaaacgttgcaattcttgggggcggagcatggggaagcggtgcgcgagacgtatccgagcatcgcgacggcggttcagggcaatttttcgcttgccggtatttccggcacgaatgacgcggaagtggtcttgcttttcggtttcggcaacaacgttgaaaagcgtataaaggtgaagctggacgcgaagaaagccgataatagggctaatgttcataagctttgggcgcaaaagagataa

SEQ ID NO: 56468 - protein, 409 aa, Unknown
  Obtained from environmental sample
  misc_feature (1)..(409): Xaa is any amino acid
MPVEKAKATEVFEEIEQRRVDPGLLERVEGNNFRTRIYPIPSGGVRTVAIGYEEELALEKELLQYRLPMDYPDPLENFKVKATVWKSSLKPIVPKSVEELLFDKADENYVAAFARNNYRPTRALNFALPAPVDIPQIMMQPAQGSYYFFASVAPKLETRKKQWNNDLAIIWDVSLSGSQRNIERELEMLDIIFSEKKNANVYLYFLNNTLTKMINKNTANGEHKVSNGNWDALKNILRHATFDGGTDFSKINLNLLAGNEIIFFSDGLSTLSDADFIKNTRITVKCPMHCVVSSAKADYSAMRLIAGKTKGKFVNLNALSSDELKKELLSETLQFLGAEHGEAVRETYPSIATAVQGNFSLAGISGTNDAEVVLLFGFGNNVEKRIKVKLDAKKADNRANVHKLWAQKR

SEQ ID NO: 56469 - DNA, 855 bp, Unknown
  Obtained from environmental sample
  misc_feature (1)..(855): n is a, c, g, or t
atgattgcggaaaagtacgagaattctacaaccaacggctatttcggcactttgcagacgatgctgaaatgggcggcaaagaaaaggattatcggcagagaccctttcctcgatgttaaaagactgcttaacgaaaagacggacaagaaaataattacccctgacgaattcaaggcattgtttgtcgatgactggaaaacggtatggggcaatgatttgcttaggtgtacggcgaataagttggcggctttgactggcatgaggtgttgcgaggtgctggggctgaggggcgaatttgtctatgacgaccatatctttttatgcgggcaatatgacgaatacggctaccgcgaaacaaaaaccaagataaaacaccatattccccttaccgccgaattggtaaaggatttgagaaagctgatgaagtttaatgggcagggttatatcttctcgcttgacggcggggctacgcctgttacccgtatgcacatattcaaaggcttaaaaaaagcgtttaacaatatcgggataaccaacgaggagataggggagcgtgggcttaacatacatgcgtggcggcatttttgtaacacggaactgcaaaaggcgggattgacgatccagaaagtacaggcggttacagggcataagtcagagaaaatgactgaacgctacacgcattttgacccgcttgatttcggagaagtgcccaaaatacaggcggctctgctgaaaaagaagcataagaagccggaagccagcattggcgaagcggcggggaatgaactcccagcctttacccttgtaaagccacaggaagatgacaagaccggacggaaaagaaaagcatcctag

SEQ ID NO: 56470 - protein, 284 aa, Unknown
  Obtained from environmental sample
  DOMAIN (68)...(235): Phage integrase family
  misc_feature (1)..(284): Xaa is any amino acid
MIAEKYENSTTNGYFGTLQTMLKWAAKKRIIGRDPFLDVKRLLNEKTDKKIITPDEFKALFVDDWKTVWGNDLLRCTANKLAALTGMRCCEVLGLRGEFVYDDHIFLCGQYDEYGYRETKTKIKHHIPLTAELVKDLRKLMKFNGQGYIFSLDGGATPVTRMHIFKGLKKAFNNIGITNEEIGERGLNIHAWRHFCNTELQKAGLTIQKVQAVTGHKSEKMTERYTHFDPLDFGEVPKIQAALLKKKHKKPEASIGEAAGNELPAFTLVKPQEDDKTGRKRKAS

SEQ ID NO: 56471 - DNA, 594 bp, Unknown
  Obtained from environmental sample
  misc_feature (1)..(594): n is a, c, g, or t
ttgtcatacgcttttgattttgtggtgatgccgcaagacagtattatcgacgcgctgaaatcaggacgttatgattatagggttaatgttgcgttgactgaggagccggaattaccgtttacacgacgcggtgtgcttgaaacagtccgcaggataatggatgaattgcctaaagagggcggaaacgctggtgatacggcccttggtagtgataatgggaataatggtcaggcgctctataccgaagccgttgataatatcgccaagcggtttaaagtagagtggaagaagtatacgcccaaccggagaatcgcggcggttaccatgccggacgacgggtttttgagaatatcggaagtctattaccccggatggcgcataaaggccaacggaatcccggtcaagtactaccgctcggacatggcctggatggccgttccgttaaaagccggcgattacgaaatagtcatggaacccaagtcgctatacatgggcgtcgcgtctaaggtatcggcggcgttcacgctggttattgcgggcatcttggcgtatgcgtttgtacgcaaacggcagggtagggcggcgaagagttaa

SEQ ID NO: 56472 - protein, 197 aa, Unknown
  Obtained from environmental sample
  misc_feature (1)..(197): Xaa is any amino acid
MSYAFDFVVMPQDSIIDALKSGRYDYRVNVALTEEPELPFTRRGVLETVRRIMDELPKEGGNAGDTALGSDNGNNGQALYTEAVDNIAKRFKVEWKKYTPNRRIAAVTMPDDGFLRISEVYYPGWRIKANGIPVKYYRSDMAWMAVPLKAGDYEIVMEPKSLYMGVASKVSAAFTLVIAGILAYAFVRKRQGRAAKS

SEQ ID NO: 56473 - DNA, 930 bp, Unknown
  Obtained from environmental sample
  misc_feature (1)..(930): n is a, c, g, or t
ttgtttcaaggtgttcgagggtacggtggaaatttaaggcgggaggaagagatgcgcaggttatttattaacgtattaatgcgggtactctataaaataagatccaaacggccgatgttattggaaattttgttggatgattctatcttgcgcggtattcggctttatttcatgtattatatcaggcgcgacaaaaatcgaaattggggcgcggacactgtcggttttttcgatcaaaatgccgaaagagtgaatgccgtggtaaaaactcttgcggatgaaagaagtaaaaaaatatatttgggcataataaaataccgacaaacacgcaataagaaagactttccgtttcacgccgttgaagaaagacagtattttatcaaaaaattggcgcttggtaaagacgaaacatatatagactgcggcgccagcggaacatccatagattggttcttgagaaaatgcccgaaatacaaacaaatcgtcgcttttgagccggattccaaactgtttgagatacttaaaaaacgattcggaaataatccgcggataacgataataaacgccggcgtttttaatactaacgggaaaatagcgttttcaacacgcgggaacagcacgtctcacgtagttaccgacgacaatcaggataatctaagttacatacaaaccaaaaccatagacagtttaggattggaaagagtttcttttataaaaatggatatagaaggcgcggaattagacgcgctgaaaggcgctgagaaaaccattttaaaagacaagcccaaattggcgatctgcatttaccatagtctcgaagatatgatcagcatacccgagtacattcacaaattagtccctgaatataaactttatgtcagacaatatgactttttggccgagaccgtgttgtacgcaatcatgccatga

SEQ ID NO: 56474 - protein, 309 aa, Unknown
  Obtained from environmental sample
  misc_feature (1)..(309): Xaa is any amino acid
MFQGVRGYGGNLRREEEMRRLFINVLMRVLYKIRSKRPMLLEILLDDSILRGIRLYFMYYIRRDKNRNWGADTVGFFDQNAERVNAVVKTLADERSKKIYLGIIKYRQTRNKKDFPFHAVEERQYFIKKLALGKDETYIDCGASGTSIDWFLRKCPKYKQIVAFEPDSKLFEILKKRFGNNPRITIINAGVFNTNGKIAFSTRGNSTSHVVTDDNQDNLSYIQTKTIDSLGLERVSFIKMDIEGAELDALKGAEKTILKDKPKLAICIYHSLEDMISIPEYIHKLVPEYKLYVRQYDFLAETVLYAIMP

SEQ ID NO: 56475 - DNA, 1122 bp, Unknown
  Obtained from environmental sample
  misc_feature (1)..(1122): n is a, c, g, or t
atgcccgtcaaaacgaccgtaaaaaaaaccgttaaaaagaagcgtaccgcaaccgccgccaaagccgccgcgaaaaccaccgccaagaagcccgccgagcgcgagttggtctcgtttgacttcgccgtcaaatacctattgcgcggcaagcgcgactacgtcgttctcaacggctttctgtccgaacttctcggtaaaaaagtagaggttaagtctatcgacgaccccgaaaacattaagacctacaaaaacgacaaggtgaaccgcgtagacattaaggcgcggattaacggcggcgaactcgccattttcgagatacagtttcttcaagagtttgactttttcgcgagggtgcttttcggcgtttgtagcgcggtggttgaccaagttgaggcgggtgatttctacaacataaagaaagtttactcgataaacatagcctattttaacctaaacgccaagcgcgaatacttattttccggcgatataaacacgtttaaaggcgtccactacaaagacgaacaaatcccgtttgagcgggctgtctctcctaagtcaaagaaaatggttgacattcatcctgaatattaccttatcttgccgagaatgttcgatgaaaagatgcgtagcaggttcgacgagtgggtatacgtcctgaagaaatccgccgtccgcgacgacttcaaggctgccggaataaaggaggccaaagcgaagttagactatatccgaatgacgccggagcaaagaaaggtatactttaagtacatggacaaccgcagaggtgccgacagcgcgatccaaacggcggagggcaaaggcgaacttagaggcatacggaaaggcagacaggaaggtctacagaaaggcctacagaaaggcagacaggaaggcctacagaaaggcctacagaaaggcctacagaaaggcagacaagaaggcctacagaaaggcagacaagaaggcttacagaaaggcatacaaaaaggcctacagaaaggtcaggaattggaacgcgccaaactcataaaaagcctgtacgaaaacggcgtaaccgttgcaaaaatcgtaaaaagcacaaaactttccgaaaccgacgtcaaacggattttagggttgtag

SEQ ID NO: 56476 - protein, 373 aa, Unknown
  Obtained from environmental sample
  misc_feature (1)..(373): Xaa is any amino acid
MPVKTTVKKTVKKKRTATAAKAAAKTTAKKPAERELVSFDFAVKYLLRGKRDYVVLNGFLSELLGKKVEVKSIDDPENIKTYKNDKVNRVDIKARINGGELAIFEIQFLQEFDFFARVLFGVCSAVVDQVEAGDFYNIKKVYSINIAYFNLNAKREYLFSGDINTFKGVHYKDEQIPFERAVSPKSKKMVDIHPEYYLILPRMFDEKMRSRFDEWVYVLKKSAVRDDFKAAGIKEAKAKLDYIRMTPEQRKVYFKYMDNRRGADSAIQTAEGKGELRGIRKGRQEGLQKGLQKGRQEGLQKGLQKGLQKGRQEGLQKGRQEGLQKGIQKGLQKGQELERAKLIKSLYENGVTVAKIVKSTKLSETDVKRILGL

SEQ ID NO: 56477 - DNA, 1194 bp, Unknown
  Obtained from environmental sample
  misc_feature (1)..(1194): n is a, c, g, or t
gtgaaaaatttcaggcgcgttctgttgtttgtactactgttcggaaccatgctgatattcggaataatagaaaacatcaaaggcgtttcctatcctttaaatcaagaacagttcaacgcttcctgggaacaacagggcctgatggtatcaatgttatcaatagcctatgtcggtttcagcgtcatcgccggtatttttctggggcgctttgggataaagccgtctttcctctttgggttttccgccctctgcaccggcctattttcgatgtttttcatgccgggtttttttcttaccgccgccgccctgttcgtggtatttgccggcttcggtttttttgaggtggggctcaacgctcttgcgacaaggctttttataacaaaggcggctttgttgatgaacctgctccattcattttacggaataggagcgatgattgggccaaaggccgccggcctgattgcaggtaacgcccgcttcgggtggcgttatgtatatttattttcactaccgctggcccttgtgttttttatcctggcgatcattatccgcttccccgaagaaagccgcggaccggcttcaaccgccgaagccggtcagttacacgccccgcgtaaaagtttttttgacgcgcttaaatcccctatggtatggctcatgtccattacgcttggcctgtgcgtcgccgttgagatgagcagttccaactggggtgtcatgtattttaacgatgtttataaaatcaacccgagcacggacggcgcgacgtttctttcggctttttttctgttgtttactgtttcacggctggtctgcggcctgtttgtggaaaaaatcggctatatgcgagcccttttgttatcagccttcatagtcctgactgtctttatatctggttttcttcttggggaaaagggtatctacctgctgccctcgctgggtttttttgtcgcccaattctggcctacgctgatggcagtggctattgtcagctttggcgcagacgcccctgttttttccagcgcgatgattgccgtcagcggtcttctcaacgccggcatacagttcatcatcggcctgaccaacagaatcttcggccctgcctggggttaccgcagcacagttgtatacacgctgcttttgattatagctttgggggtgttatatcggaaactcagaaaaattaggaagtag

SEQ ID NO: 56478 - protein, 397 aa, Unknown
  Obtained from environmental sample
  SIGNAL (1)...(21)
  DOMAIN (13)...(378): Major Facilitator Superfamily
  misc_feature (1)..(397): Xaa is any amino acid
MKNFRRVLLFVLLFGTMLIFGIIENIKGVSYPLNQEQFNASWEQQGLMVSMLSIAYVGFSVIAGIFLGRFGIKPSFLFGFSALCTGLFSMFFMPGFFLTAAALFVVFAGFGFFEVGLNALATRLFITKAALLMNLLHSFYGIGAMIGPKAAGLIAGNARFGWRYVYLFSLPLALVFFILAIIIRFPEESRGPASTAEAGQLHAPRKSFFDALKSPMVWLMSITLGLCVAVEMSSSNWGVMYFNDVYKINPSTDGATFLSAFFLLFTVSRLVCGLFVEKIGYMRALLLSAFIVLTVFISGFLLGEKGIYLLPSLGFFVAQFWPTLMAVAIVSFGADAPVFSSAMIAVSGLLNAGIQFIIGLTNRIFGPAWGYRSTVVYTLLLIIALGVLYRKLRKIRK

SEQ ID NO: 56479 - DNA, 609 bp, Unknown
  Obtained from environmental sample
  misc_feature (1)..(609): n is a, c, g, or t
ttgaaaaagaaatttgaaatgtcgccaaacagcggcaggtgcagaggcggcaaagggaacgccagggagcgccggtctgcgccattgtcggctataccaacgcgggcaagtccagcncttttcaacgccctcagtggttccgccgtccttgtggaagacaaactctttgcgaccctggacgcgacaacccgccgctttgaacctgcgcccggcatggaagcgctgttaactgacacggtaggctttatcagacgactgccgcataacctgattaaggcgtttagatcgacccttgaagaaaccgcacacgccagcctgctgatccatgtccttgacgcggcggatcccaatatcgaaagttatttcgggacaacggtttccgtcctgcaggaactgggcgccggggaaatacctgttattaccgtattgaacaaaatcgaccttttggcggacacggcgcatcaagatgcggcgcatatagatgcggtgcatcaagatgcagtgctttcccgttttccccaaagccttgggctttcggcaaaaaccggcgagggtctggacgaattaaaattacggatagctgaaaaactaagcgggagcgttatgtga

SEQ ID NO: 56480 - protein, 202 aa, Unknown
  Obtained from environmental sample
  DOMAIN (39)...(147): GTPase of unknown function
  misc_feature (1)..(202): Xaa is any amino acid
MKKKFEMSPNSGRCRGGKGNARERRSAPLSAIPTRASPALFNALSGSAVLVEDKLFATLDATTRRFEPAPGMEALLTDTVGFIRRLPHNLIKAFRSTLEETAHASLLIHVLDAADPNIESYFGTTVSVLQELGAGEIPVITVLNKIDLLADTAHQDAAHIDAVHQDAVLSRFPQSLGLSAKTGEGLDELKLRIAEKLSGSVM

SEQ ID NO: 56481 - DNA, 534 bp, Unknown
  Obtained from environmental sample
  misc_feature (1)..(534): n is a, c, g, or t
atggcgcagcaattacatgaaacaagagaacgtcaaaaacgggcattactcgtaatcttaagcgatgataacacaggcgagttacaggggcttgtaaaaacactggaactggaaatcgcaggccaggaaattgtaaagatacgggaaagacagccaaaattcggcatgggaagcggaaaagccgaggaaatcgcaggaaaagccaaagagctggaagcggactgccttgtgttcgattgggacataagcccgtcacagcagcaaaactgggaagacctttccggaattcccgtcatcgacagacaggaactaattatccatatttttgccatgcgcgccgtcacaagggaagctgacttgcaggtgcagcttgcggaactgcactaccggctgccccgcctgactcacaaatatatagacctttcccggcagcggggcggacgttacggcactaagggcgcaggcgaaacaaaactggaaactgaccgccgcgagatacaaaaacgcatacacaagcttgaaaaagaaatttga

SEQ ID NO: 56482 - protein, 177 aa, Unknown
  Obtained from environmental sample
  misc_feature (1)..(177): Xaa is any amino acid
MAQQLHETRERQKRALLVILSDDNTGELQGLVKTLELEIAGQEIVKIRERQPKFGMGSGKAEEIAGKAKELEADCLVFDWDISPSQQQNWEDLSGIPVIDRQELIIHIFAMRAVTREADLQVQLAELHYRLPRLTHKYIDLSRQRGGRYGTKGAGETKLETDRREIQKRIHKLEKEI

SEQ ID NO: 56483 - DNA, 309 bp, Unknown
  Obtained from environmental sample
  misc_feature (1)..(309): n is a, c, g, or t
gtggtaaatcaggtttcgccgtattgcgactgccacgcggaaagcgatgccgcggtgatacccgacatcgggatttttgccggctttgacccggtcgcgctggacaaggcgtgtattgacgcggtgaacgccgcccctgccattcaatccagtattctcagcgagcgcgagcgcagccaccgtgatgccgccggcaatgaagattattttaccaacattcaccccaccaccgattggcgcaagcagatttcgtatgcggaagaaattggcttgggcagcgggaaatatgagctgattacggttaagtag

SEQ ID NO: 56484 - protein, 102 aa, Unknown
  Obtained from environmental sample
  misc_feature (1)..(102): Xaa is any amino acid
MVNQVSPYCDCHAESDAAVIPDIGIFAGFDPVALDKACIDAVNAAPAIQSSILSERERSHRDAAGNEDYFTNIHPTTDWRKQISYAEEIGLGSGKYELITVK

SEQ ID NO: 56485 - DNA, 837 bp, Unknown
  Obtained from environmental sample
  misc_feature (1)..(837): n is a, c, g, or t
atgacaagctgcggttgttttgaagctatctgcgcctatgtgcccgagtgcaatggcgtaatggtcgttaaccgcgagtttttgggcgacactcccattggaatgacattttccacattggcaggttctgtcggcggaggccaacagactccgggctttttcggttgcggaaaagtatttcttacaagcagaaagttcctctatgcggaaggcggttatgccagaatcgtgtggatgacaaaagagttaaaggatcttttgcgtaacgatttattaagacgttttgatgaacaaaaactacccggttttatcgatcaaattgccgatgaaactgtcgcggtgaccgccgaagaagtgcggaagttcatggaaaaagtaaaacaccccgcgttgaaaatggaagatatgacgcattttgctcagagcgaacaggtaggggaggccgaagcgaagagtgacgctgttaaaaaagacgcgccatcaggcgaatccgcgtctgcgaaaactgaagaagcggggagtattccggcgaacatagacattaccgccatcacagaaaagataaaagccgatgtaactaaggaagttataaccggtataatcgacattttaagcgagcgctttttaggcaaagctccgtcctcggcaagttcggaagttaaaacagaatcagctaatgttataaaaacatctagaatatcaacctctgatcgtatttccaaaattaaaagttttgatcttcccgttgataacgcaagttgttctatatactccgtaaaacttggtaatttaaaatctgaaggcggtactcgcggaagaacgtctcggccgatctga

SEQ ID NO: 56486 - protein, 278 aa, Unknown
  Obtained from environmental sample
  DOMAIN (1)...(137): CO dehydrogenase/acetyl-CoA synthase complex beta subunit
  misc_feature (1)..(278): Xaa is any amino acid
MTSCGCFEAICAYVPECNGVMVVNREFLGDTPIGMTFSTLAGSVGGGQQTPGFFGCGKVFLTSRKFLYAEGGYARIVWMTKELKDLLRNDLLRRFDEQKLPGFIDQIADETVAVTAEEVRKFMEKVKHPALKMEDMTHFAQSEQVGEAEAKSDAVKKDAPSGESASAKTEEAGSIPANIDITAITEKIKADVTKEVITGIIDILSERFLGKAPSSASSEVKTESANVIKTSRISTSDRISKIKSFDLPVDNASCSIYSVKLGNLKSEGGTRGRTSRPI

SEQ ID NO: 56487 - DNA, 1401 bp, Unknown
  Obtained from environmental sample
  misc_feature (1)..(1401): n is a, c, g, or t
gtggaaaagcaggaagtggaagaaactttatctcaaataattacggttatgattttgataggctttatctgctttgtgatcgcaattatcattgccgtcatcgttgggaaatccattgcgaaacccttggtttatatggttgaagctcttaaaggcataacgcaaggggaaggggatttaactcagaccattacggtacagtccaaagatgagactggcgatttagctgcctatttcaacaagctgatgagtgtgctcagaaagcccataggcgaggcaaagtcaataactaaacttttggtttccgtttccgaagaactgtcttctgtgagcggcttgcttgcaaagggcagcgaacagactcttcaacagagcaatattgcaactagaacaacggagcaaatgtcagtgaatatcaacgcgatggcgagcggcgcggaagaatcctcagtgagcgcagacgaagtagcgggtgcagttgtgaaagtggcaacaaacatcaacgcgatggcgagcggtgctaaagaagcctccgctaatgcaaacgaagtagcgggtgcagtcgtagaggttgggtcaaacatcaacgcgatggcgagcggcgcggaagaagcctccgctaatgccaacgatgtagccagtgctgcagagcaaatgtccacaaatatgaacacagtcacagccgccatagaagcgatgagtgcgagcatcagccaaatatccagcaacgccagtgatgcccgcaaagtttccatagcagccacagaaaaatcccaaaatgcaacagatgttatgaccaagttgggtgctgcggcaaaggaaattgggcatgtgacaaatgtcatcaaaaagatagcagacaaaaccaaccttctcgctctcaatgctaccattgaggctgccagcgcaggcgaagcaggcaaaggttttgctgttgtggcaaacgaaatcaaagagcttgcgaaccaaagtgcagaaagcgcagacgacatagcgaaacgcatagaaagcattcagaatggcacaagcaatgctgttcatgtgattaacgatgtgagtgacattattgtaaaaataaacaaaagcgttgaggcaatagcgggccatgcccagcagcaaacaaaaaccagcaacgaaatagtgaacaatatttctcaggccaatatcggctccaaaagagttgccagtgctattggcgaagtggcaaaaggtgcaattgatgtttcaaaaaatgctggcgaagcggccaaaggtgcaacctatgtgagccagaatattgctaacgtgagtagcgttgcaaagcaatctgcacagggagccacacaagtcaatctatctgctacggatttgagcaaaattgcgggtgagttgaaagatacggttagcaaatttaaggtgtga

SEQ ID NO: 56488 - protein, 466 aa, Unknown
  Obtained from environmental sample
  DOMAIN (17)...(88): HAMP domain
  misc_feature (1)..(466): Xaa is any amino acid
MEKQEVEETLSQIITVMILIGFICFVIAIIIAVIVGKSIAKPLVYMVEALKGITQGEGDLTQTITVQSKDETGDLAAYFNKLMSVLRKPIGEAKSITKLLVSVSEELSSVSGLLAKGSEQTLQQSNIATRTTEQMSVNINAMASGAEESSVSADEVAGAVVKVATNINAMASGAKEASANANEVAGAVVEVGSNINAMASGAEEASANANDVASAAEQMSTNMNTVTAAIEAMSASISQISSNASDARKVSIAATEKSQNATDVMTKLGAAAKEIGHVTNVIKKIADKTNLLALNATIEAASAGEAGKGFAVVANEIKELANQSAESADDIAKRIESIQNGTSNAVHVINDVSDIIVKINKSVEAIAGHAQQQTKTSNEIVNNISQANIGSKRVASAIGEVAKGAIDVSKNAGEAAKGATYVSQNIANVSSVAKQSAQGATQVNLSATDLSKIAGELKDTVSKFKV

SEQ ID NO: 56489 - DNA, 648 bp, Unknown
  Obtained from environmental sample
  misc_feature (1)..(648): n is a, c, g, or t
atgctttctatgcgtttcgctatgtcgtctgcgctttctgcactttggttcgcaagctctttgatttcgtttgccacaacagcaaaacctttgcctgcttcgcctgcgctggcagcctcaatggtagcattgagagcgagaaggttggttttgtctgctatctttttgatgacatttgtcacatgcccaatttcctttgccgcagcacccaacttggtcataacatctgttgcattttgggatttttctgtggctgctatggaaactttgcgggcatcactggcgttgctggatatttggctgatgctcgcactcatcgcttctatggcggctgtgactgtgttcatatttgtggacatttgctctgcagcactggctacatcgttggcattagcggaggcttcttccgcgccgctcgccatcgcgttgatgtttgacccaacctctacgactgcacccgctacttcgtttgcattagcggaggcttctttagcaccgctcgccatcgcgttgatgtttgttgccactttcacaactgcacccgctacttcgtctgcgctcactgaggattcttccgcgccgctcgccatcgcgttgatattcactgacatttgctccgttgttctagttgcaatattgctctgttga

SEQ ID NO: 56490 - protein, 215 aa, Unknown
  Obtained from environmental sample
  SIGNAL (1)...(25)
  misc_feature (1)..(215): Xaa is any amino acid
MLSMRFAMSSALSALWFASSLISFATTAKPLPASPALAASMVALRARRLVLSAIFLMTFVTCPISFAAAPNLVITSVAFWDFSVAAMETLRASLALLDIWLMLALIASMAAVTVFIFVDICSAALATSLALAEASSAPLAIALMFDPTSTTAPATSFALAEASLAPLAIALMFVATFTTAPATSSALTEDSSAPLAIALIFTDICSVVLVAILLC

SEQ ID NO: 56491 - DNA, 786 bp, Unknown
  Obtained from environmental sample
  misc_feature (1)..(786): n is a, c, g, or t
atgctgatgctgttagtgggctttttggtaggcggcgccgccgcgtccatagtgtgggcgattatcgtctccggcaagcggcgtgccatcgatgctgagaaggccgagatggagcagatcatggcctcggtgggggagacgctggcggaagccgacgccatagagacgaatttcaggagcggcgcccttaccccggaagccttccgccgccatttgggcgatcgggtcaacgtggttatgcgcctgctaagaaccaacatgcattccctcgacgcctactttgttaagtacgccgagcaggaggcgcgcgagtacctccgcatcatagacaacccggaacgccgcaaacaagagggaccggatctctccgcgccgatcatagacaccggcgccggtatggaactgcccgaaccgccggagaccaacctattggccataacccacaccgcccctccgcctccgccgcctccgccggctccgccccctgtaatgacggagccggtagccgactctttcccgataatgccgccgccgccgctgcccgccgcacccgagcggacgccgatagcgagcgcctttgatggcgccgatgattttgaaccgccgccggccgcccccgcgccgagggttacggatacgcccgagcggtatgaacaaccgttcgccccgccgctccgagccccgtcgatacctccgacgacttcaaaccgtgcttccgcgcgcccgcttcgagggctggaaatacggtcagccaatacgaacaaccgcccgccccgccgcgcctag

SEQ ID NO: 56492 - protein, 261 aa, Unknown
  Obtained from environmental sample
  SIGNAL (1)...(20)
  misc_feature (1)..(261): Xaa is any amino acid
MLMLLVGFLVGGAAASIVWAIIVSGKRRAIDAEKAEMEQIMASVGETLAEADAIETNFRSGALTPEAFRRHLGDRVNVVMRLLRTNMHSLDAYFVKYAEQEAREYLRIIDNPERRKQEGPDLSAPIIDTGAGMELPEPPETNLLAITHTAPPPPPPPPAPPPVMTEPVADSFPIMPPPPLPAAPERTPIASAFDGADDFEPPPAAPAPRVTDTPERYEQPFAPPLRAPSIPPTTSNRASARPLRGLEIRSANTNNRPPRRA

SEQ ID NO: 56493 - DNA, 489 bp, Unknown
  Obtained from environmental sample
  misc_feature (1)..(489): n is a, c, g, or t
ttgttcgtattggctgaccgtatttccagccctcgaagcgggcgcgcggaagcacggtttgaagtcgtcggaggtatcgacggggctcggagcggcggggcgaacggttgttcataccgctcgggcgtatccgtaaccctcggcgcgggggcggccggcggcggttcaaaatcatcggcgccatcaaaggcgctcgctatcggcgtccgctcgggtgcggcgggcagcggcggcggcggcattatcgggaaagagtcggctaccggctccgtcattacagggggcggagccggcggaggcggcggaggcggaggggcggtgtgggttatggccaataggttggtctccggcggttcgggcagttccataccggcgccggtgtctatgatcggcgcggagagatccggtccctcttgtttgcggcgttccgggttgtctatgatgcggaggtactcgcgcgcctcctgctcggcgtacttaacaaagtag

SEQ ID NO: 56494 - protein, 162 aa, Unknown
  Obtained from environmental sample
  misc_feature (1)..(162): Xaa is any amino acid
MFVLADRISSPRSGRAEARFEVVGGIDGARSGGANGCSYRSGVSVTLGAGAAGGGSKSSAPSKALAIGVRSGAAGSGGGGIIGKESATGSVITGGGAGGGGGGGGAVWVMANRLVSGGSGSSIPAPVSMIGAERSGPSCLRRSGLSMMRRYSRASCSAYLTK

SEQ ID NO: 56495 - DNA, 1740 bp, Unknown
  Obtained from environmental sample
  misc_feature (1)..(1740): n is a, c, g, or t
ttgggcgggctgcccgcgtgggtgcggatactgcccgtttgcctcataaaggccggagaagacgttatcgtcctaacgccgctctacgccaatatcccgaaggtcaaggaggcgctcgaaaacgggacgctcgaacccgccctcccaaaacaagcgttccaatccgtatcgtaccgcggcgaagtcagctgttaccgccacggcggcgccccggtgccgacctacttcattgccgtggaggggcgcttcaccgcgtcgctcaacccctactcctactccgacagcaacgagatactcgacgactcgctcgccttctgcgccgccgccccgttcgtactcaataaactcggcgtcagccgcaacgtgctcttccacgcccacgactgggagaccgcgcccgtcgcgcttacctcgaaaatcgcggtgcttgaggggttgttcgaaaacgcgcggaccgtcctgaccctgcacaactccttcgacagcggcatagacgcggacagaaaacgaaaattcttcggcggcaaaatacaaggagatacgatactgaagtgcgtgataccgctcttaaacggcccgctgacgacggtgagcgcgccgttcgcgaccgaactgcgcgtagacccgctgcaacgcaccgtcttcacaaaccacctccaaggggaattctccgccaacccgcccataggcgtggaaaacgggatgttcggcaaaccgcacctgtgctacacctacaccgcgctctcccacgcccggcagggcgtatacgacaaactgctcgccgaaaaaaggcggttcagacaggccatgctgcggacggtggggaggatggccggcagagacggggtgataggcgggcttgctgaaatgattgttgacaagcctgcggatagatgtattaacaccggtatcaataaggatgtcaatacaagcgttaatagcggtatcgataagaatatcagcacagatgttaatgccggtatcatcaatacggatgttagtacggataccgatgtcgataccgataaaaatatcaacgcccgacccatattcttcatgtcaggccgccttgaccttatgcaaaaaggctttgacgtgatctttcacgccatccagtgttttcccgccggtaaagccgccctgatattctgccccagcagcgccgacggcgcgcgccactcaaaggagctcgctttttttcgggagatagctcaggagcggcccggcgatatagtgatatggccgtttaggataaccgagggggattacgtctcctccgttttgggtagctcgtttttgctcatgccctcgttctacgagccgttcggggcggcgaccgagggttttatctacggcaccccggttgttgcgcgggctacgggcgggctcacggttcaggtgaggccgctatcgggcggcggcgccggggcggtaggctccgcgaccgggctcttgtaccgcgaggcggccgagggcgaagcgcaggcgtgcgacgggtggcgcgacatcctcagcgtccccgtggatcagcggataagggtgccgctctaccagtccatggtcaaggaggccttcggggcgctctccttggcggctaatatcttcgccgacaatgttcgctacgggcgaatgatggtgaactgcatggacagcctgcgggatttttcatggaacgcggccgtttcaaagtaccgcagagtgtacgaagcggcgtcgcgccgcgggttctttgacgaataa

SEQ ID NO: 56496 - protein, 579 aa, Unknown
  Obtained from environmental sample
  DOMAIN (335)...(514): Glycosyl transferases group 1
  misc_feature (1)..(579): Xaa is any amino acid
MGGLPAWVRILPVCLIKAGEDVIVLTPLYANIPKVKEALENGTLEPALPKQAFQSVSYRGEVSCYRHGGAPVPTYFIAVEGRFTASLNPYSYSDSNEILDDSLAFCAAAPFVLNKLGVSRNVLFHAHDWETAPVALTSKIAVLEGLFENARTVLTLHNSFDSGIDADRKRKFFGGKIQGDTILKCVIPLLNGPLTTVSAPFATELRVDPLQRTVFTNHLQGEFSANPPIGVENGMFGKPHLCYTYTALSHARQGVYDKLLAEKRRFRQAMLRTVGRMAGRDGVIGGLAEMIVDKPADRCINTGINKDVNTSVNSGIDKNISTDVNAGIINTDVSTDTDVDTDKNINARPIFFMSGRLDLMQKGFDVIFHAIQCFPAGKAALIFCPSSADGARHSKELAFFREIAQERPGDIVIWPFRITEGDYVSSVLGSSFLLMPSFYEPFGAATEGFIYGTPVVARATGGLTVQVRPLSGGGAGAVGSATGLLYREAAEGEAQACDGWRDILSVPVDQRIRVPLYQSMVKEAFGALSLAANIFADNVRYGRMMVNCMDSLRDFSWNAAVSKYRRVYEAASRRGFFDE

SEQ ID NO: 56497 - DNA, 1140 bp, Unknown
  Obtained from environmental sample
  misc_feature (1)..(1140): n is a, c, g, or t
atggcccgaatcatcaaaacagcagccatcgctttcttatccctcctcatcctgcaccttgttcttcgttttaccccttacccggagcttgaaagctacctggaccggtcttatgggtttgcggttcttgaccggaagggcaacactttaagggtttttccttcagccgagggcgtaaagcgggaatggctggcgcttgatgaaatccccgccggagtgctgaggatatttgtccgggccgaggacgctcgtttttatctgcatccgggtattgatcccaccgcaatcgccgcttccggcttgaggaacctgcgctccgggcgtgtcgtatccggcgcttccacgattaccatgcagcttgcccgcctgctgaagccgcacgatcatagcctgcgggggaaaatactggaagcccttgacgcgctgcggcttgaagcgaggctctcaaaaaaacagattttggaactttggattaacggcattccttttggctctaatatcgaaggcctggccgctgtcagccgcgcgcgttttggcagagaagcgaaggggcttgacgacgcgcgggcggtcctgctcgcggtgatccctcgaagtcccagccattatgatccggctcattctgaaagcgaggcgataaacgcggccctggccctcgccaaacgctgccgccttgatctggacgaggttgccttgacggaggccgccgccgaagccgagcccggaaaactggctgatgaaaaagcccctttccatgccccgcattttaccgaccgcattgctccgggcctaagacagcctgtacatacaacccttgactttgatttgcagttgtacgccgaaaaacgcctcgcctccgagcttgggccgctcgcgcataaccgggtgggcaacggggccgtgctggccattgacaacgccaatggggaggtgcttgtctatattggctcggcctcatggtttgataacgcgaagggcggcaagatagacggcgtgagggtgcgaaaccagcccggctcctgcctncagccttacctttacgcgctggcgctggaaaaaggatatgcccccaatgacattctccctgacatcccgactgttttcggcggcagcgaggcttacagcccggggaaattttaa

SEQ ID NO: 56498 - protein, 379 aa, Unknown
  Obtained from environmental sample
  SIGNAL (1)...(23)
  DOMAIN (40)...(208): Transglycosylase
  misc_feature (1)..(379): Xaa is any amino acid
MARIIKTAAIAFLSLLILHLVLRFTPYPELESYLDRSYGFAVLDRKGNTLRVFPSAEGVKREWLALDEIPAGVLRIFVRAEDARFYLHPGIDPTAIAASGLRNLRSGRVVSGASTITMQLARLLKPHDHSLRGKILEALDALRLEARLSKKQILELWINGIPFGSNIEGLAAVSRARFGREAKGLDDARAVLLAVIPRSPSHYDPAHSESEAINAALALAKRCRLDLDEVALTEAAAEAEPGKLADEKAPFHAPHFTDRIAPGLRQPVHTTLDFDLQLYAEKRLASELGPLAHNRVGNGAVLAIDNANGEVLVYIGSASWFDNAKGGKIDGVRVRNQPGSCLQPYLYALALEKGYAPNDILPDIPTVFGGSEAYSPGKF

SEQ ID NO: 56499 - DNA, 1488 bp, Unknown
  Obtained from environmental sample
  misc_feature (1)..(1488): n is a, c, g, or t
atgttgtatactgaaaattcaataaatccgctaaaggagcgccttatgacaagaattcgggtaaaattgactgctttggagaataaaaccacacggagggacgggtcaagaaaggcgcaagtgtcacacaaaactccgataatggaattccacatcgacagggaagtccggcgcgagtatgggcttaaagacagcctgtttgcgattacggggaatgtaatcctggcggatatgcggcagacgcgggaattggcggcaaaattcaacgcgaaacaggaccctaaaaccgggcgttttatccgggccgggcagttatacgccatggggcttatagatgaaattctgcactatgtgatttccctgtaccgcaaacaggtacagccggacgcttttgatctttgcctgccaaaggctggaaacaaagctgggagaggacaggactggaggcttgttcgtcgctttttcggaacagtttccgcccaaccggtttataccggcgataaggtagttcccgaatatctgcaaagttccgaggaaggcgaaagttgccgctgtctttctctggaagaaaccatgatgctctcccttgccaatctcaaccctgcttttaagccgtttcaattcctgtttgatgataaagatctggtgcagcataccgtttatccggcggcaattgaggaactcaaggctctttttaaggatttgccccccttcggtccatttgggcaaaacctctgggatatgctccgctcaccggcgcttgcctctgacaccctaagcggccagcttgaatatatgcgtcagcattggggcatgattctggggaagtttgcggcgcggatgctcattggtttggacgttatcaaagaagaagaaaaaccatccttctttggtcccggcccgagcgaagtaatgagtttttccgggcttgatgagtatgagcgttttagccccgatcaggactggatgcccaaaacagtactgatggcaaaatgtaccctggtctggctgttccagctttcgcaaaaatacggcagggaaattaaccgtctggatcaaattcccgatgaagaactggacgagcttgcccgccggggctttaccggactgtggcttatcgggctgtgggaacggagcaatgccagtagaacaatcaaacagtggaccggcaatcccgaagcggcggcttccgcttacagcctgtacgattatgacatcgcgggtgaattgggtggctggggcgctttatgcagcctgcgggaccgctgtataatacggggcatacggcttggctccgacatggttcccaaccacaccggcatagacagccgctggatggcagaacatcccgaccgctttttacagcttccctatccgccctttcccacctacagctacaactgcggcaatttatcaggcagggatgatataacccgtcaaatcgaggaacattatttttcccgcagtgacgcggcggttgtcttttag

SEQ ID NO: 56500 - protein, 495 aa, Unknown
  Obtained from environmental sample
  misc_feature (1)..(495): Xaa is any amino acid
MLYTENSINPLKERLMTRIRVKLTALENKTTRRDGSRKAQVSHKTPIMEFHIDREVRREYGLKDSLFAITGNVILADMRQTRELAAKFNAKQDPKTGRFIRAGQLYAMGLIDEILHYVISLYRKQVQPDAFDLCLPKAGNKAGRGQDWRLVRRFFGTVSAQPVYTGDKVVPEYLQSSEEGESCRCLSLEETMMLSLANLNPAFKPFQFLFDDKDLVQHTVYPAAIEELKALFKDLPPFGPFGQNLWDMLRSPALASDTLSGQLEYMRQHWGMILGKFAARMLIGLDVIKEEEKPSFFGPGPSEVMSFSGLDEYERFSPDQDWMPKTVLMAKCTLVWLFQLSQKYGREINRLDQIPDEELDELARRGFTGLWLIGLWERSNASRTIKQWTGNPEAAASAYSLYDYDIAGELGGWGALCSLRDRCIIRGIRLGSDMVPNHTGIDSRWMAEHPDRFLQLPYPPFPTYSYNCGNLSGRDDITRQIEEHYFSRSDAAVVF

SEQ ID NO: 56501 - DNA, 1359 bp, Unknown
  Obtained from environmental sample
  misc_feature (1)..(1359): n is a, c, g, or t
atggccggatatgctgttgatatagcaggtattgttggcactgatgacgctgtcgacacaaccggtattgttgaagtcgaaactgacgacgctgcaatcaacgttaatgcgaatgatgttcttgatacggaaaccgttattgacggtaatgatattatcggtactgaagagccgccgatgattgacatcgtcgataccattgatttgattaatgtgaacgaaatgttaggcaccggcgacgtagtcaccatgatggacatggacgatgagatccgcgccgcgatgcgcgccgcggccgaagcgaccgccgccgcgtcggccgcccataaattcatggacatggacgacgagatccgcgccgcgatgcgcgccgacgtttcggttcagcccgtttcggatccgatcgtttcggctccgctcaacgaccggtttgcttcggcggacgaggttgtcgagcaaacggacgaagcggcggtcggtcagatggacatggacgacgagatccgcgccgcgatgcgcgccgccgccggcaacgtttcgcttccggtcgattcggatgcggtcgtttcagatgcaatcgcttcagacacagtcatttcagatatggtcgattcggatccggtcgattcggatacagtcgtttcggatccggtcatttcggacacagtcgtttcggatccggtcattaacaacttagttgatattgataccccctcccccgccgccgctcccgtcgccgcggacgacgacgcgatagtagaggagaggttgcgtcaactcctgatcgacgagggtcccgacccggatctgcctctcggttcgcttgatgttgacgacgacgtcattgatccggcattggttccggctgcggcatcggctgcggcatcggctgcggcgtcggctacgccgccgcctccgccgccgcctatgccggtcggcgccggctccgccgccgccgagggcaccaccgtcatcgccccccccgacgaccgcgacacgcctttcgatctccccgatcacgtgcttccttcgacgctcgcggacatatactatcagcaggggcagccgcagctcgcgctgcacatatacgagcggctgtcgctgcgcgacccgggcgacgccaggctttcggcaaagatagaggagatcaggggggtgcttcaacatctcggggagggtggcacagtcgcgcccgtcgcggcggtcagaccggaaaaggccccttcggcctcttccgggcgaaaaaaaaaggcggacgaaggcggaaccccacgcgccgacgtcagaccgctggccggagtcaggattaaaaagagcgcgcccgccaaaaaaggcaagcgcgccaagccgaagccttga

SEQ ID NO: 56502 - protein, 452 aa, Unknown
  Obtained from environmental sample
  misc_feature (1)..(452): Xaa is any amino acid
MAGYAVDIAGIVGTDDAVDTTGIVEVETDDAAINVNANDVLDTETVIDGNDIIGTEEPPMIDIVDTIDLINVNEMLGTGDVVTMMDMDDEIRAAMRAAAEATAAASAAHKFMDMDDEIRAAMRADVSVQPVSDPIVSAPLNDRFASADEVVEQTDEAAVGQMDMDDEIRAAMRAAAGNVSLPVDSDAVVSDAIASDTVISDMVDSDPVDSDTVVSDPVISDTVVSDPVINNLVDIDTPSPAAAPVAADDDAIVEERLRQLLIDEGPDPDLPLGSLDVDDDVIDPALVPAAASAAASAAASATPPPPPPPMPVGAGSAAAEGTTVIAPPDDRDTPFDLPDHVLPSTLADIYYQQGQPQLALHIYERLSLRDPGDARLSAKIEEIRGVLQHLGEGGTVAPVAAVRPEKAPSASSGRKKKADEGGTPRADVRPLAGVRIKKSAPAKKGKRAKPKP

SEQ ID NO: 56503 - DNA, 1104 bp, Unknown
  Obtained from environmental sample
  misc_feature (1)..(1104): n is a, c, g, or t
atgcttttagacgtctcacgggcgctgcgcgatgtcttctcctccgttgacgagttgcgggagattgtttcgcagttgtcaagcggtcaaaacgcgctgccggaagcggaggcggcgttgcttcgcgccgtgcgggcgcttgagcatcaggcgcgtcagagcggcgcggaggtcatggagcggcttaaggacctgctcagggagttaaaccgcctgcaggccgacgcggcgcgggcgcaggagcagggctccgccgccgcgacgcggtcttctccagccgaggccatacgctccgcggcgctgaccgccgcccgcagcttggaaaacttgcagctgctctcggcgcaaacgcgcgccgcggagacagagcagcacctattggctcttccggccaagatcggcggggagtggacggaggtgcagatcaagttcgttaaggagcgcaagggggagaagggggaaaacaaagacgggcacgtgtcgatatacttaaacgtggccccatcggcgttgggtcaaatcacggcgcatttggattatcacccgcccaacctgaagctggcgtttcagtttgagaagccggaggtgacgcggtggttcaggcggcagtcgggcgaattgagagaggcgctgtcgcaagtcggcctgccggggaccgtatggaatttcacaataggcggncgatcagcggcgaaccggctacttcggctcgtcaacctatcgcagttgagaccgacggggttgatcagacggacgtgtttgaggttaagaatgggcgggtggattttaagatatgaggatcggctaattatgacaacaacagaaaagaatatgcgcgatgtcgcggtcgctctgaaatacgacgattccgagaatcgcgcccctatcgtatccgccaaaggcttcggcctaatggctgagcggattctggagcttgcgaagttaagcggcgttcctatccggcaggacagcgacttggtggagctgttggctgaaatcgacgtggacagagaaattccggcgcatctgtacgcggcggtggccgaggtgctggcgatggtgtataaggcgaacaacgcaatgggcggcgagccgcaaccttaa

SEQ ID NO: 56504 - protein, 367 aa, Unknown
  Obtained from environmental sample
  DOMAIN (75)...(355): FlhB HrpN YscU SpaS Family
  misc_feature (1)..(367): Xaa is any amino acid
MLLDVSRALRDVFSSVDELREIVSQLSSGQNALPEAEAALLRAVRALEHQARQSGAEVMERLKDLLRELNRLQADAARAQEQGSAAATRSSPAEAIRSAALTAARSLENLQLLSAQTRAAETEQHLLALPAKIGGEWTEVQIKFVKERKGEKGENKDGHVSIYLNVAPSALGQITAHLDYHPPNLKLAFQFEKPEVTRWFRRQSGELREALSQVGLPGTVWNFTIGGRSAANRLLRLVNLSQLRPTGLIRRTCLRLRMGGWILRYEDRLIMTTTEKNMRDVAVALKYDDSENRAPIVSAKGFGLMAERILELAKLSGVPIRQDSDLVELLAEIDVDREIPAHLYAAVAEVLAMVYKANNAMGGEPQP

SEQ ID NO: 56505 - DNA, 1413 bp, Unknown
  Obtained from environmental sample
  misc_feature (1)..(1413): n is a, c, g, or t
atggttatcaatacaaacagtgttaacgcaaagagtatcaatacaagcggtataaatacgaacggtgtcaatcctcccgataatcaaaatatacgcggtgatctcggcgttggtattaataataggcagggagcggttgataacactcgcgcggtcaacaattcaggcggaggcggcattaatactaatagtagcaccagacccgttgataattctgtcggtgtgggaatcaacgcaagagggattaatacgagcggtatcaattttacggataacccgaatatacgcggagatatcggtatgggtgtcaacgctcgtaatattaatacacaaagtataaatacgagcgctatcaatcctacggataatcaaaatatacgcggcgatctcggtgtcggcattaataataggcaaggaacagttgataatactcgcagcgtcaacattaacactgctggcgcgacatcatctgttgacgttccggcaatcaaagagaattgcctatctgtagtagacgccttanaatcttccgccgctcccattctgcgtgagattgctcaacgcggcgagaccagcgccggcagcgccgcctcgcttatcgaacttgtaagggacaccgtgtcgtcgcttgacgaggcgctacgcccgctggtacgctccgagcggccgctcccgccggagttttacgaacgcgtggtttccggggcggggcaccggatcagcgctgaggcgaagaacgcgctcttctcgcagatcggggcggcgcaggcgctgatacggacggcgatggaagcggcggaaggcgtcaatatccgtaccaacgcaaacgccgatatcggcggcaggtccaatctgcatataggcgcaaacgccgattttaatttcagcgtcggtccaagagttaataataacgcgaattttactccaaacatcgctccaagcgttattaataacgccaacgtcgctcccggcgtcaataccaacgttaacccggccgtcaacgccgctcctaacgttaataccaatattaatccaaccgcaaacgtcggtatcaataccgtcgttcatacaaattccgcctccggtagtaatcccaacattaataccgttcccaacacgaatgtcaatactaatgctaacgctaacgccaatattactccggtcgtcaattccggtatcggaaataatgtcaatgcaaatgatacaaatgataatataaatcccaacgccgccgcgaaagccgacagccgccgtcccgatgattttttgcagatagcccgccgtatatgggcgaacaccgagaaacttcgcgccggattccgcgaggcgttctcaacgctcgatttgcagaaccagcgcctcgccgctcgacaagcccgccgacggctcaaccgccggtacgtaagggcgtag

SEQ ID NO: 56506 - protein, 470 aa, Unknown
  Obtained from environmental sample
  misc_feature (1)..(470): Xaa is any amino acid
MVINTNSVNAKSINTSGINTNGVNPPDNQNIRGDLGVGINNRQGAVDNTRAVNNSGGGGINTNSSTRPVDNSVGVGINARGINTSGINFTDNPNIRGDIGMGVNARNINTQSINTSAINPTDNQNIRGDLGVGINNRQGTVDNTRSVNINTAGATSSVDVPAIKENCLSVVDALXSSAAPILREIAQRGETSAGSAASLIELVRDTVSSLDEALRPLVRSERPLPPEFYERVVSGAGHRISAEAKNALFSQIGAAQALIRTAMEAAEGVNIRTNANADIGGRSNLHIGANADFNFSVGPRVNNNANFTPNIAPSVINNANVAPGVNTNVNPAVNAAPNVNTNINPTANVGINTVVHTNSASGSNPNINTVPNTNVNTNANANANITPVVNSGIGNNVNANDTNDNINPNAAAKADSRRPDDFLQIARRIWANTEKLRAGFREAFSTLDLQNQRLAARQARRRLNRRYVRA

SEQ ID NO: 56507 - DNA, 1767 bp, Unknown
  Obtained from environmental sample
  misc_feature (1)..(1767): n is a, c, g, or t
ttggcgatagtaaggcgcataaaattattgttacaatgggaaataataacgcatagtaaaacggaaaaaggagaatttatgcattacaaaaattttttaacagttacttatgcgcccgccggttacctgaatgataactcgcttgagcagataagagcggacattgataaagtaggcaagtatatcaaactggataaaatctatcttgaaacttaccgttctgaaatacttgtcgagcgaaaaaagatggaagaaattaaatcgcttttcattgaaaaaggctactctgtatccggcgggataacaacaaccgtaaaaagcacattgatgggaagcatgtgttttacagacccggaaaaccgcaaaaggcttggagaaatcgccgcctacaccgctcagctttttgatgaaataatccttgacgatttttattttacaaattgccgctgtgaatcctgcatcaaggcaaagggagcctcacgcgactgggcttctttccgtcttgcgctgatgaacgacatttccgaaaacgtgattatcaaaaacgcgaaagcggcaaatccaaaagtaaattgcataatcaaatatcccaactggtacgacagttttcaagccaacggctataaccttgaagacgagtcaaaaatgtttgacatgatctacacaggaaccgaaacgcgcgatccaaattatactcatcaaaacctgccgcgctatttaagctttttccttccccgtctttttgaacacatcaagcctgggaaaaacggcggcggctggtacgacctttttgattgttcgttggaagattatgtacagcaggcgtatttaacgcttttttcaaaatgccgcgaacagatgttgttctgtttccccttactcgcatacgcgcctctttacaccgccgccgtcggagcgttcttcgatgaagcggatcagttcattggacagataggggagcccgtgggcgtcgcctgttacaagccgtataactcgcacggagagcggcttcttcatgaatttgtcggaatgtgcggcgtcccgcttgatccctatccttattacccggaaaacgcgaagacggtgtttcttaccgcggacgccgcgtgggacgcggacattgtcggcaagataaaacaaagtcttttgaaagggagcaaggtttttatcacaagcgggctgtatgaaaaactggcgggcaagggaatagaggacatacttccgcttgaaataactaacagaaaaataactacggacgtatttaccaacagcgctttcggcaggggcaactgcggctatgtaaaagcagcctctccgataacattgtcccatgtcgcctacaacgagaacgatatatggccgctttcagccgctcttactccgcattcaagccacgcgttgttgttatgcggcgcttacggcaaaggaagtctctacatacttacaattcccgataatttcgccgatttgtacaatcttcccgccgagactctcgccctcctgcgtggacagtttgatttgcccgtaacgcttgaaagcgtaggccgcgtgtctctgttcccgtatgacaacaacacctttattttgcagtcattccttgacaggccggaaagagtgcgcgtccgcattaacaagccggatgttaagcttgaactgttggcaaagacgaaaattcggtcgtttgagatagtacgttccggtgaaaacgaaagcatttttgatattttcatgatgccggggcattacatggcgtttaggattgcatga

SEQ ID NO: 56508 - protein, 588 aa, Unknown
  Obtained from environmental sample
  misc_feature (1)..(588): Xaa is any amino acid
MAIVRRIKLLLQWEIITHSKTEKGEFMHYKNFLTVTYAPAGYLNDNSLEQIRADIDKVGKYIKLDKIYLETYRSEILVERKKMEEIKSLFIEKGYSVSGGITTTVKSTLMGSMCFTDPENRKRLGEIAAYTAQLFDEIILDDFYFTNCRCESCIKAKGASRDWASFRLALMNDISENVIIKNAKAANPKVNCIIKYPNWYDSFQANGYNLEDESKMFDMIYTGTETRDPNYTHQNLPRYLSFFLPRLFEHIKPGKNGGGWYDLFDCSLEDYVQQAYLTLFSKCREQMLFCFPLLAYAPLYTAAVGAFFDEADQFIGQIGEPVGVACYKPYNSHGERLLHEFVGMCGVPLDPYPYYPENAKTVFLTADAAWDADIVGKIKQSLLKGSKVFITSGLYEKLAGKGIEDILPLEITNRKITTDVFTNSAFGRGNCGYVKAASPITLSHVAYNENDIWPLSAALTPHSSHALLLCGAYGKGSLYILTIPDNFADLYNLPAETLALLRGQFDLPVTLESVGRVSLFPYDNNTFILQSFLDRPERVRVRINKPDVKLELLAKTKIRSFEIVRSGENESIFDIFMMPGHYMAFRIA

SEQ ID NO: 56509 - DNA, 597 bp, Unknown
  Obtained from environmental sample
  misc_feature (1)..(597): n is a, c, g, or t
ttggccgagcagcttcaagactaccatcttgagttaggtgaagtttcttcctacccgcccggctacaaggaaaacgccggtattttctgccacaataatccgtgggttacgatagcggaaaccaggcttgggagagggaatcgcgcgtttgaaacttacgcgaaaatttgtcccgcttaccgggaagacgacagcgatttgcgccgattggagccgtatgtgtacgcgcaaatggtggcaggtaaggacgcgattcgtcacggagaggctaaaaattcctggcttaccggaaccgcggcgtggacgtttgtcagtatttcgcagtacattcttggagtgcgccccgtttttgacggccttatgatagacccgtgcattccttcaagcatgaaagaatttaccgttacccgtcatttccggggcgcggattatcacatcacggtggacaacagcgcgggcgtggaaaagggaataaagtccataatggttgacggtgatctgctggatggagaagcattgaagaaagcggtattacctgtatttggcgatagtaaggcgcataaaattattgttacaatgggaaataataacgcatag

SEQ ID NO: 56510 - protein, 198 aa, Unknown
  Obtained from environmental sample
  misc_feature (1)..(198): Xaa is any amino acid
MAEQLQDYHLELGEVSSYPPGYKENAGIFCHNNPWVTIAETRLGRGNRAFETYAKICPAYREDDSDLRRLEPYVYAQMVAGKDAIRHGEAKNSWLTGTAAWTFVSISQYILGVRPVFDGLMIDPCIPSSMKEFTVTRHFRGADYHITVDNSAGVEKGIKSIMVDGDLLDGEALKKAVLPVFGDSKAHKIIVTMGNNNA

SEQ ID NO: 56511 - DNA, 1584 bp, Unknown
  Obtained from environmental sample
  misc_feature (1)..(1584): n is a, c, g, or t
atgttttctttcattgaattctgtttatggaacgccaacgatgacatgaccaacttccagcgcaactacagcataggtgaagttgagattgacggttcgcgcatctatcacaaaactgaataccgcgaaaggcgcaatcattacgcggtgtgggcggtcaatgttccaatcgagggctttgacacggacaggcagtcgtttatcggcctttacaacagcttcgctcatccgcaggctgttcttgacggagaggcaaaaaattccgtcgcttcggggtgggcgccaatcgggtctcaccacatcaaggcgcaccttgcgccgggcgaggctaaatcttttgtttttgtccttggttactgcgaaaatcccgaagatcaaaagtgggaaaggcagggggtgatcaacaaaaaccccgcgaatgtacttttatctaaatacggaacgtcagaggcggcggacagggctcttgccgagcttaacgagtactggaagaatcttcttagccgctttaccgtggacgccgaagacaaaaaaatggcgcgcatggcgggtgtctggaatcagtatcagtgcatggttacatttaacatgtcgcgcagcgcgtcttattttgaatcgggaatagggcgcggcatgggcttccgcgactccaatcaggacttgcttggttttgttcatcttgttcccgaacgcgcccgcgcccgcattttagacattgccgcgactcagctccccgacggcagcgcgtatcatcagtaccagccgcttactaagcgcggcaataacgaaataggctccggctttaacgatgatcccctgtggctaatatgcggagttgcggcgtacatcaaggaaacgggcgattacggcatactcgatgaaaaagtgccttttgacaacaacgatgcgttagccgacaccctctttattcacttaaagcgctcatttgattacacagtaacgcacaccgggccgcacgggcttccgctgattggccgcgccgactggaacgactgtttaaaccttaactgcttttccaaaacgcccggcgaatctttccagacaaccgctaattttgaaagcggcgtcgcggaatccgttttaatcgccgcaatattcgcctttaccggccccgattatgccgaaatctgccgccgcaccgggcgcaatgaagaggcgcagtatgccgaaaaagccatagcgacaatgatagaagcggttaataaccacggctgggacggcgactggttcctccgcgcctacgacgcgcacggcaaaaaaatcggcagccgcgagtgtgaagacggaaaaatatttattgaatccaacggttttgccgtgatggcgggaatcggtcttaacgacggacgcgcgcagaaagcgcttgattccgtaaaagatcaacttgatacaaagtacggcattgtacttttacagccggcgtacaaggattaccatattgagttaggtgaagtttcctcatatccgccggggtacaaggaaaacgccgggattttctgccataacaacccctgggttacgatagcggaaaccaggctgggcaggggaaaaccgggcgtttga

SEQ ID NO: 56512 - protein, 527 aa, Unknown
  Obtained from environmental sample
  DOMAIN (37)...(125): Glycosyltransferase 36 associated family
  misc_feature (1)..(527): Xaa is any amino acid
MFSFIEFCLWNANDDMTNFQRNYSIGEVEIDGSRIYHKTEYRERRNHYAVWAVNVPIEGFDTDRQSFIGLYNSFAHPQAVLDGEAKNSVASGWAPIGSHHIKAHLAPGEAKSFVFVLGYCENPEDQKWERQGVINKNPANVLLSKYGTSEAADRALAELNEYWKNLLSRFTVDAEDKKMARMAGVWNQYQCMVTFNMSRSASYFESGIGRGMGFRDSNQDLLGFVHLVPERARARILDIAATQLPDGSAYHQYQPLTKRGNNEIGSGFNDDPLWLICGVAAYIKETGDYGILDEKVPFDNNDALADTLFIHLKRSFDYTVTHTGPHGLPLIGRADWNDCLNLNCFSKTPGESFQTTANFESGVAESVLIAAIFAFTGPDYAEICRRTGRNEEAQYAEKAIATMIEAVNNHGWDGDWFLRAYDAHGKKIGSRECEDGKIFIESNGFAVMAGIGLNDGRAQKALDSVKDQLDTKYGIVLLQPAYKDYHIELGEVSSYPPGYKENAGIFCHNNPWVTIAETRLGRGKPGV

SEQ ID NO: 56513 - DNA, 375 bp, Unknown
  Obtained from environmental sample
  misc_feature (1)..(375): n is a, c, g, or t
ttgcgccgccttgagccgtatgtgtacgcgcaaatggtggcgggaaaagacgcggttaaccacggcgaggcgaaaaactcatggcttacggggacggcggcctggacctttgtcagcatctcccagtacattctcggggtgcgcccctgttttgacggccttgttattgacccctgtattccctcaaccatgaaaggctttaccgttacgcgtcatttccgcggcgctgattatcacataacggtggacaacggcgcgggagcggaaaagggagtaaagtcaataaccgttgacggcaagccgctggaggggacagtaatacctgcctttggcgacaataaggtacataaagtcgttgtgactatggggaaataa

SEQ ID NO: 56514 - protein, 124 aa, Unknown
  Obtained from environmental sample
  misc_feature (1)..(124): Xaa is any amino acid
MRRLEPYVYAQMVAGKDAVNHGEAKNSWLTGTAAWTFVSISQYILGVRPCFDGLVIDPCIPSTMKGFTVTRHFRGADYHITVDNGAGAEKGVKSITVDGKPLEGTVIPAFGDNKVHKVVVTMGK

SEQ ID NO: 56515 - DNA, 711 bp, Unknown
  Obtained from environmental sample
  misc_feature (1)..(711): n is a, c, g, or t
ttgtttgaaaaccttattggacagagcgcggcaagccagcttatagcggatattgagggagcgtcccttgcgcccgcaatgcttttttccggccctcccgcctcgggcaagggaaccgccgccctggaactggccagggttatatcctgtgaggtggcggataaagcagacagggctaaatggaactgcccctgcccttcctgtaaccgccaccggcttttggttcacccggatctcctctgccttggcaataagcctttctccgcagaaatttccgcgtccgcttcttcatttttaaaggaagccggaagcccttcatcgcgcatgcttttcatccgctcggtacgaaagctccttgcccgcttcaatcccgtgctttgggaagacgagccaaaggccggtaaaatttcttccctggtaaattcgctggaagaggatcttgacgatctggcttttttgacggggcaaagcccggttgacagcgattccgtaacgaagctggcggaggaaattataaaaggctcttttaagctccagtccgaaggtatgagcgagacaattcccatcggccagataaggcgcgccgctttctggagccgcctcgccccggcctcaggggggaaatgccttgttatcgagaacgcccaccgaatgcaggaagaggcgaggaactcgcttttaaagcttctggaggaccccccgcccgcctga

SEQ ID NO: 56516 - protein, 236 aa, Unknown
  Obtained from environmental sample
  misc_feature (1)..(236): Xaa is any amino acid
MFENLIGQSAASQLIADIEGASLAPAMLFSGPPASGKGTAALELARVISCEVADKADRAKWNCPCPSCNRHRLLVHPDLLCLGNKPFSAEISASASSFLKEAGSPSSRMLFIRSVRKLLARFNPVLWEDEPKAGKISSLVNSLEEDLDDLAFLTGQSPVDSDSVTKLAEEIIKGSFKLQSEGMSETIPIGQIRRAAFWSRLAPASGGKCLVIENAHRMQEEARNSLLKLLEDPPPA

SEQ ID NO: 56517 - DNA, 702 bp, Unknown
  Obtained from environmental sample
  misc_feature (1)..(702): n is a, c, g, or t
atgccttgttatcgagaacgcccaccgaatgcaggaagaggcgaggaactcgcttttaaagcttctggaggaccccccgcccgcctgactgtggtacttaccgccccaaggccgctcagcctgatcaggactatcctctcaaggctcaggccctatgccttcaactcccgcgatgctgaagccgagcaggaagtaatcagaagggtctttaaggttgaaggctataaaagcggaataggcccttatcttgattcatttctccctattactttagacacgcttgaagcccttgcagctttttttactgcctctgtcgcgtacagagccgcgctgctttcaaaaaggcggagccgccccttgagcgaggaagttgtgctgcttggtaaattcagcgctcccaaagcggaggcagcgggccttggcaggcccaaagaagatacggctgctgtagtaaacctgatcattgagaaagcggtgaaattcgaagtacgctcccttttctcccgttttctttcctgtcttctggcacaggtttccatgagcgcaaggtcatccggttcactgccgtcagtttcgtttagccagacatggaagcagtgtaccgattgggcagaaacggcggctggcacttataacctcaggccgcctcaggttttggaaaagctgttaatcgatctgagcctcaggatggcggaattatga

SEQ ID NO: 56518 - protein, 233 aa, Unknown
  Obtained from environmental sample
  misc_feature (1)..(233): Xaa is any amino acid
MPCYRERPPNAGRGEELAFKASGGPPARLTVVLTAPRPLSLIRTILSRLRPYAFNSRDAEAEQEVIRRVFKVEGYKSGIGPYLDSFLPITLDTLEALAAFFTASVAYRAALLSKRRSRPLSEEVVLLGKFSAPKAEAAGLGRPKEDTAAVVNLIIEKAVKFEVRSLFSRFLSCLLAQVSMSARSSGSLPSVSFSQTWKQCTDWAETAAGTYNLRPPQVLEKLLIDLSLRMAEL

SEQ ID NO: 56519 - DNA, 918 bp, Unknown
  Obtained from environmental sample
  misc_feature (1)..(918): n is a, c, g, or t
atgaaagaaaagtacgagccattgaacaatatccctattcctcattcctcattcctcattcctcattttccctactccctttttctttgttctttgttacttattatttgttcctgttcctcgcggccaaaagataccggcgatatttatgatatgcgaaaagacgcggaagtgcagcttgaacagggcaacagggaggcggaaggnggggattttccaaccgcccaggggtttatcgaacaggcaaaccggtttgccgttctaacagataattcaagcttgttgatccgctcangcatttcccctcgcaatgtgttgttcgcgcagggcaatgcggacgaggcctttgaaagctggaacaaggccctggaagaggcaaacagggccggaaacaaggaacttgccgccgtttgccgcatccatatcgcgcggggaaagctgttttccccggacggcaaaaacgccgcgcaatcccttcgtgatgaggtaaaccgggagatggcttcgataaaatccgacgaactctatatcgcctttgcgtggacggtcattggccttgcggaaaaggaattgggtcgttatgccgccgcggaagaggcggtcaaacgcgcctttgcgatccatgaaaaggccctcaaccttaaacttgccgcctacgactggtttattatagcctctttccgttccctttccggcaattcagccggcgccctgaaagccctggatagcgctatagaatatgaccgccgtaccgagaattcctgggggcttgccaatgactggcaggcggttggcgacgtgcaaaaaaaggcagggaacatcgacgccgcccgcgccgcgtatttccgcgccgcagccattttccgcgctatggggaatttcgaagccgccgacaatgcccttgcaagaggggagtag

SEQ ID NO: 56520 - protein, 305 aa, Unknown
  Obtained from environmental sample
  misc_feature (1)..(305): Xaa is any amino acid
MKEKYEPLNNIPIPHSSFLIPHFPYSLFLCSLLLIICSCSSRPKDTGDIYDMRKDAEVQLEQGNREAEGGDFPTAQGFIEQANRFAVLTDNSSLLIRSXISPRNVLFAQGNADEAFESWNKALEEANRAGNKELAAVCRIHIARGKLFSPDGKNAAQSLRDEVNREMASIKSDELYIAFAWTVIGLAEKELGRYAAAEEAVKRAFAIHEKALNLKLAAYDWFIIASFRSLSGNSAGALKALDSAIEYDRRTENSWGLANDWQAVGDVQKKAGNIDAARAAYFRAAAIFRAMGNFEAADNALARGE

SEQ ID NO: 56521 - DNA, 684 bp, Unknown
  Obtained from environmental sample
  misc_feature (1)..(684): n is a, c, g, or t
gtgcttattaactctcccaacaacccgacaggcagggtatatcccgcgcagaccataacagagctagcccgcctcttgacggaacacggtaaaaaaaccggaaggccgccttaccttgtttccgacgagccttaccgtgaaattgcgtataacgtaagcgtggctcccgtactgtgcgcctataacgaatcgattgtcgtcagctcatattcaaagagcctttccctgcctggcgaaaggataggctatatcgcagtaagccccaaagcaacggacaaagacgaccttatgaacggccttatctacgctacgcgaattttgggttatgtgaacgcgccggccctcatgcagcgcattgtggcggagcttaccgatgcggcggttgacgtaagcatctacgcccgcaggcgggacgcgttcacggcaatccttgatgaggcgaaaatagagtatgccgtgccggaaggggcgttctacctgttctgcaaggcgcctccgagaaaaatttcatccggatcaggcgacgattcggcttttgtgaaccacttaaaacaacatctgattctgggcgtacccggttcaggtttcggcaagcccggctggctgcgtttcgcctactgcgtggacgaaaagaacatacgggcaagcgctggtgcttttaagaaggccatggaagaatggtag

SEQ ID NO: 56522 - protein, 227 aa, Unknown
  Obtained from environmental sample
  misc_feature (1)..(227): Xaa is any amino acid
MLINSPNNPTGRVYPAQTITELARLLTEHGKKTGRPPYLVSDEPYREIAYNVSVAPVLCAYNESIVVSSYSKSLSLPGERIGYIAVSPKATDKDDLMNGLIYATRILGYVNAPALMQRIVAELTDAAVDVSIYARRRDAFTAILDEAKIEYAVPEGAFYLFCKAPPRKISSGSGDDSAFVNHLKQHLILGVPGSGFGKPGWLRFAYCVDEKNIRASAGAFKKAMEEW

SEQ ID NO: 56523 - DNA, 444 bp, Unknown
  Obtained from environmental sample
  misc_feature (1)..(444): n is a, c, g, or t
ttggtttctcgcttgtcccggtggcaatcgaaatccgggcctcggccaagccgccggacgaagcaaagaaaaaatccggctctcgaaagaggcggtgatgctatggcttcatacagcatcggcgaactggaaaaactgctcagggtgaagggctacgttatacgctattgggaaaaggaaatacccttaattcagagcggaaaaagcaacttcggaaggcgggtgtacagcgtgcgggatctacagattttctcccgccttaagtatctattgtacgaacgccgttttaccatcgaaggcgcaagagaccagctctacaaggaacttgccggggaacaccaggacttaaggggttgcatttccgcccttcgttcagagcttatgtcgctgttttttcttgtgcatgatcctgatcgggataaacgggcggagaaaaattcttga

SEQ ID NO: 56524 - protein, 147 aa, Unknown
  Obtained from environmental sample
  misc_feature (1)..(147): Xaa is any amino acid
MVSRLSRWQSKSGPRPSRRTKQRKNPALERGGDAMASYSIGELEKLLRVKGYVIRYWEKEIPLIQSGKSNFGRRVYSVRDLQIFSRLKYLLYERRFTIEGARDQLYKELAGEHQDLRGCISALRSELMSLFFLVHDPDRDKRAEKNS

SEQ ID NO: 56525 - DNA, 1248 bp, Unknown
  Obtained from environmental sample
  misc_feature (1)..(1248): n is a, c, g, or t
ttgagttccctttttcctcctctttcggaagaagcccgcaaaaccctcgcttccgttccggctcttgtcgaaaaagcctttcccatatcggcgcgttttcgcgccaccctgccgtccgatgtggcggatcttttccgcttcctcacttatgagaggactgagcgcggcgcttcttacctgggcaggcccgcccttctttcggcttatctccgttattacctgccctggaacatctaccgcctctgccgtctttttgctgccctgcccgtcgagttaaagagccacgacgctattaacgatttgggggcagggccccttaccctggcaatttctttgtggataagccgccccgatctaagggacatccccctggaattccgctgtctggataaaaccgccgcagttcttgacgccgggaaaaagcttttcgccgcccttaccgcanacattgcctgtccctggactgtaagaaccattcgcggagagatccacggctttggcaggcagcgcggcagggcgctgtccgtggaaatcaggggaaagcctgcggccctgagcgcggcggtaaacctctacaacgagctattctgggacttttctccaatggataaagaaggcctggaacgctttgcttccggccaggccaggctgctttcgtctttaacggaaagctccggttccgttttgattgtagagccgggcattccacgctcaggggagtttatctccatgcttcgttcttcacttataaaagaaaaacgtctcccgctttcgccctgtccgcactccggggcttgttcacttcccggcggcaggcctgcttccggtcgcttgcagcccaaggccaagtggtgtcatttcgcgctaaacaccgaagacgcgccggaagaactgcacaggctttcggcggctttaaagctcccaaaggaaagggcagcgctgagttttatcctggcgggagctgccgcgcagagaccggctaagcgcgtaacgcacgcagaacgcagagagcgggtgaaagtccgcgtcatctcggatagctttcccatctcagcggattcgcctggcgcaagaggtcatgaaaacaaaacctgggggcgctacggctgcagcgagcgcggtctggtgcttgtaaccggaagcaggagaagactggagtcatccctaccgggagcgcttgaggagcttgttttggatgacaagaggattgatgagaaaagtggagctttaatagggaatattttgtag

SEQ ID NO: 56526 - protein, 415 aa, Unknown
  Obtained from environmental sample
  misc_feature (1)..(415): Xaa is any amino acid
MSSLFPPLSEEARKTLASVPALVEKAFPISARFRATLPSDVADLFRFLTYERTERGASYLGRPALLSAYLRYYLPWNIYRLCRLFAALPVELKSHDAINDLGAGPLTLAISLWISRPDLRDIPLEFRCLDKTAAVLDAGKKLFAALTAXIACPWTVRTIRGEIHGFGRQRGRALSVEIRGKPAALSAAVNLYNELFWDFSPMDKEGLERFASGQARLLSSLTESSGSVLIVEPGIPRSGEFISMLRSSLIKEKRLPLSPCPHSGACSLPGGRPASGRLQPKAKWCHFALNTEDAPEELHRLSAALKLPKERAALSFILAGAAAQRPAKRVTHAERRERVKVRVISDSFPISADSPGARGHENKTWGRYGCSERGLVLVTGSRRRLESSLPGALEELVLDDKRIDEKSGALIGNIL

SEQ ID NO: 56527 - DNA, 684 bp, Unknown
  Obtained from environmental sample
  misc_feature (1)..(684): n is a, c, g, or t
atggaaatcgggtatcccccaatggagtattttgacgctgacggcaaaacccccatcggctttgatgtggagatgggcaaggcggttgcggcaaaaatgggccttgagccgaagttcattgacacagcctgggacggcattttcgccggggtgaacacaaacaaatacgactgcatcatgtcttcggtgaccatcaacgaggcaagaaagaaagcgcacaatttcagcaagccgtatatccgcaatacattggctatagtactgcccaaggattccacccttaatgtaagctcgccgcaggatcttgccggccttcgcgtatcctatcaggaagaaacaacgtcagatttctttatggaagatcttgcgaaagagggcctgcagtttaccccttatgagtatgataaggtgatgtactgttttgacgagctcaagctgggcagggtggatgtaattgttaccgatctgcttgtcgcctatgaatatgtcagcaggccggacaaccccttcaaaattgtctgggagggcggagatgaagagttcggcatctgcatgaagaagggaaatgacgccctgaccgcggccataaacaaggcgcttgatgaactctttgcagacggaagtatgctgaagatatcgcagaacatttttggtatggatcttgtttcggcagtgcgaaaataa

SEQ ID NO: 56528 - protein, 227 aa, Unknown
  Obtained from environmental sample
  DOMAIN (1)...(219): Bacterial extracellular solute-binding proteins, family 3
  misc_feature (1)..(227): Xaa is any amino acid
MEIGYPPMEYFDADGKTPIGFDVEMGKAVAAKMGLEPKFIDTAWDGIFAGVNTNKYDCIMSSVTINEARKKAHNFSKPYIRNTLAIVLPKDSTLNVSSPQDLAGLRVSYQEETTSDFFMEDLAKEGLQFTPYEYDKVMYCFDELKLGRVDVIVTDLLVAYEYVSRPDNPFKIVWEGGDEEFGICMKKGNDALTAAINKALDELFADGSMLKISQNIFGMDLVSAVRK

SEQ ID NO: 56529 - DNA, 1650 bp, Unknown
  Obtained from environmental sample
  misc_feature (1)..(1650): n is a, c, g, or t
atgataactgttacggatttaagccttacattcggcgagcgcaccctttttaaagacgttaacctgaaatttacacccggcaactgttacgggataatcggcgcgaacggagcgggaaaatccacttttcttaaaatcctgtcaggagaaattgaacacgacaagggagaaatttctaccggtaaaaaccagcgcattgccgttttaaggcaggatcacttcgcgtttgaaaagtatccggcgcttgaaaccgtaatcatgggttacccgaaactttacgccgttcaaaaagagcgcgaggcggtttacgcgaaggaaaatttcaacgaagaagacggaatgagagcaagcgaacttgaggcggatttttcagaacttggcggatgggaagccgaagcgcangtcggccagcttctttccggcctagggcttgacgaggaagatcacggcaaattaatggcggaacttgacgaatcaaaaaaagtgcgcgtactactggcgcaggccctgttcggcagcccggacattctgctccttgacgagcctacaaacggtttagacttggaatccatctcatggttggaggactttcttattgacttccccaacacggtaattgtcgtctcccacgaccgccatttcttaaacgcggtatgcacaaacgtatgcgacatagacttcggcaaaatcacaccgtattcgggcaattacgatttctggtatcagatgagccagatactgcaaaggcaggcgcgggatcagttaaaaaagcgggaagaaaaagcgaaagaattaaaagagtttatccagaggttttcgtctaacgcaagcaaagcgcgtcaggcgacaagccgcaagaaggtgctggaaaaactcgaccttgacaatgtgcccgtaacaagcagaaaatttccgtacgcgggattcaaaagcgaccgtgatatagggaacaatgtgctgagagcggaaaaattaaactattcttttgaggggaaatccctattaaaagattttacgcttacggtaaacaagggcgataaaatcgcctttgtggggctggagcactcttccaagtcggcgttttttgacattatcacaggggaaaaaaaagccgaatccggagactgttattgggggcagacaacttctttttcctattttccgaaagagaattcagcctactttaattcggatctttcaataacagactggctaaggcaatattcgccggatcaggacgaaacttatgtgcgcagtttcctgggccgcatgcttttttccggtgacgaagcgttaaaacctgtaaacgtgctttcaggcggcgaaaaagtccgttgcttgctctccaagatgatgctctcaggcgcaaacgtcctgattcttgacgaaccgaccaaccaccttgacctggaagcgatcaccgcccttaacgacgggcttgccgctttttccggtgtaatactctttaactctcacgatcatgaattcattaattcaatagcgaaccgtattatcgagattctccctcaggaagaaaatccaggcggccttatagacagaatgatgcccttcgacgattacctcgccgacagttccgtaaaacaactaaggtctgcggcatataaacacacgcaaaaattgttgatttaa

SEQ ID NO: 56530 - protein, 549 aa, Unknown
  Obtained from environmental sample
  DOMAIN (345)...(510): ABC transporter
  misc_feature (1)..(549): Xaa is any amino acid
MITVTDLSLTFGERTLFKDVNLKFTPGNCYGIIGANGAGKSTFLKILSGEIEHDKGEISTGKNQRIAVLRQDHFAFEKYPALETVIMGYPKLYAVQKEREAVYAKENFNEEDGMRASELEADFSELGGWEAEAXVGQLLSGLGLDEEDHGKLMAELDESKKVRVLLAQALFGSPDILLLDEPTNGLDLESISWLEDFLIDFPNTVIVVSHDRHFLNAVCTNVCDIDFGKITPYSGNYDFWYQMSQILQRQARDQLKKREEKAKELKEFIQRFSSNASKARQATSRKKVLEKLDLDNVPVTSRKFPYAGFKSDRDIGNNVLRAEKLNYSFEGKSLLKDFTLTVNKGDKIAFVGLEHSSKSAFFDIITGEKKAESGDCYWGQTTSFSYFPKENSAYFNSDLSITDWLRQYSPDQDETYVRSFLGRMLFSGDEALKPVNVLSGGEKVRCLLSKMMLSGANVLILDEPTNHLDLEAITALNDGLAAFSGVILFNSHDHEFINSIANRIIEILPQEENPGGLIDRMMPFDDYLADSSVKQLRSAAYKHTQKLLI

SEQ ID NO: 56531 - DNA, 1044 bp, Unknown
  Obtained from environmental sample
  misc_feature (1)..(1044): n is a, c, g, or t
gtgggtaaaaatcttgcatgggaatacacaaagaagccttttgagatcgagataaagcctgaaattattacggtagaagaagtaacgcaaattctataccatgtcccctcagaagaaaaaatacccctcctcttagggataatacagcgcgaacaacccgaaagtattattattttttgcaacacaaagaagagtaccgagattgtcgcaaagcggctgaaaatcaacggatacgactgcgagtttatcataggggaccttccgcagagcaagcggctgaaaataatcgacgatgtaaaagccggtaaaataaaaactcttgtcgccaccgatgtcgctgcgcgcggccttgatatagaaagcctcgctatggtgattaactacgatctgcccgtggaagcggaaaattatgtccaccgcataggcagaaccgcgcgcgccggaaagacgggcaaagcgattaccctttccagcgaacaggacgtgtacgagttacccgccatagagcgttacataggcaaaaaaattccgtcccaaatcgccggacaggaactttacgcccgggacaaaagcgcgggacagagaattcaaaccgatttttatgaagagcgccaccacacaggagttaaagcgcccggcggaaggcgcgaacaccgaggcagggaaagcggcaagaaacgccgcgaaactccggctcacagcggagcttttcgcaagaatatgccgcataaaagcggcgtanaaccggcagagcatgatttgccgcggcaggaagcgccgcagcaggatatgtcgaacctttccatggaagaacgaatggctttatacaaaaaaaagtatacttccccggaagcgaaacacggcggaaaaaaggagcatgtcagacaaaacaccgtaaaacaccgtcatagcgatacggcgaatgttccccgctccccgcctcagaaagccgaacaacatgaaacacggaaaccgcaggagcatactgcgcccgttaaaaagggaatattgtccaaacttataggattattcgggaaaaaatga

SEQ ID NO: 56532 - protein, 347 aa, Unknown
  Obtained from environmental sample
  DOMAIN (72)...(148): Helicase conserved C-terminal domain
  misc_feature (1)..(347): Xaa is any amino acid
MGKNLAWEYTKKPFEIEIKPEIITVEEVTQILYHVPSEEKIPLLLGIIQREQPESIIIFCNTKKSTEIVAKRLKINGYDCEFIIGDLPQSKRLKIIDDVKAGKIKTLVATDVAARGLDIESLAMVINYDLPVEAENYVHRIGRTARAGKTGKAITLSSEQDVYELPAIERYIGKKIPSQIAGQELYARDKSAGQRIQTDFYEERHHTGVKAPGGRREHRGRESGKKRRETPAHSGAFRKNMPHKSGVXPAEHDLPRQEAPQQDMSNLSMEERMALYKKKYTSPEAKHGGKKEHVRQNTVKHRHSDTANVPRSPPQKAEQHETRKPQEHTAPVKKGILSKLIGLFGKK

SEQ ID NO: 56533 - DNA, 939 bp, Unknown
  Obtained from environmental sample
  misc_feature (1)..(939): n is a, c, g, or t
ttgtttttttggagaaacagaatgaagatttttttgacgggcggaactggttttattgggcattttgttgcaaaggaatttttggagcaagggcatagccttagaattttggcgagaaatccgagtaaaattccgagtttggcaaaacagaaaaatgttgagatgatagcagcaggtttgctggattcagaagctataaaaaaagggttggaaggctgcgaggcttgcgttcatattgcgcttggctggggggatacccctctctccatgctcgcaaacgacaccgccgctaccgttcagctcttggaatttgccgcgcagagcggttgcaaaaaattcatatacacatccagcacggcggcttttggaaaaattcgcaacaacgcaagcgaaaatatggtttgcatgccgcaagatttatatggctcaacaaaactcgctggcgaggcttatgttctgggcttttcaaaaggctatggagaaaattttccgagcgttgagatgaagaggaatgtaattcgcccgggctatacttttgggcacttggctttcccggatggcataacccaacccgaccgcaggttttttaacatagctaaagcggtgaaggaaaaccaggccgtacgtttaacaaagcacgatggcactcagtttatacacgcctcccagctggcaaagctctacgccgccgttttgaaaagcgaccttaacgaggaagtgttctttgggcttggcacggaatggataagctggaagagcatagcacagcgtgctattgcgatgtgtccgggaacaaaagccgttattgaagaagaagacaaaggctggggcaaggaaccctgcctattctctttggaaaaaatggaaaaacattttgggttaaaattcaacggcaacgattttatagatgagcatataaaatggaatttacagcaataa

SEQ ID NO: 56534 - protein, 312 aa, Unknown
  Obtained from environmental sample
  SIGNAL (1)...(24)
  DOMAIN (12)...(228): Male sterility protein
  misc_feature (1)..(312): Xaa is any amino acid
MFFWRNRMKIFLTGGTGFIGHFVAKEFLEQGHSLRILARNPSKIPSLAKQKNVEMIAAGLLDSEAIKKGLEGCEACVHIALGWGDTPLSMLANDTAATVQLLEFAAQSGCKKFIYTSSTAAFGKIRNNASENMVCMPQDLYGSTKLAGEAYVLGFSKGYGENFPSVEMKRNVIRPGYTFGHLAFPDGITQPDRRFFNIAKAVKENQAVRLTKHDGTQFIHASQLAKLYAAVLKSDLNEEVFFGLGTEWISWKSIAQRAIAMCPGTKAVIEEEDKGWGKEPCLFSLEKMEKHFGLKFNGNDFIDEHIKWNLQQ

SEQ ID NO: 56535 - DNA, 753 bp, Unknown
  Obtained from environmental sample
  misc_feature (1)..(753): n is a, c, g, or t
atgcaaatacgccccaaattttctatattatccaaatgtttagggaatattcttttcattaaatcccgtagccctaaaccaacccgaaccgaacaaaaaggtatttatatggagaaaaaagacctaacagcagcagatgtctgggcaatgttcgccgagacccgactcataatgcaggaaaacgaccgcaaaattgcggaaggacatcgtattttagacgagaagttcgccgagactgatcgtaaaattgcggagggacaccgccttttagacgagaaattcgaagcacttggtattaaagtcaatgacctaaaatcaaatgtaaatggtattagcgatagcaatggcgaatttgcggaagagtattttttcagttccttgaaaaagaaaatggaattcgcaggagtgcattttgacgacataagcaaagatttcaagctattgaaaaaactgccaaatggcgaaaggctcgaagaccagtttgacatcgttatgattaacgataacgcagtagccttagtagaaatcaaatacacagctagaaagggttacccaacaacaatggtaaaccaaaaagtccccaattttagaactttattcccagactacgcaggttacaaaatatatctagggctaggtgctttgtctatcagcaaagaagttgagcaggaagctgaaaaactcggcataggcttgcttaggcaagtaggcgaaaccattgagtatgaaaccaaatgggtgaaagcgtattag

SEQ ID NO: 56536 - protein, 250 aa, Unknown
  Obtained from environmental sample
  misc_feature (1)..(250): Xaa is any amino acid
MQIRPKFSILSKCLGNILFIKSRSPKPTRTEQKGIYMEKKDLTAADVWAMFAETRLIMQENDRKIAEGHRILDEKFAETDRKIAEGHRLLDEKFEALGIKVNDLKSNVNGISDSNGEFAEEYFFSSLKKKMEFAGVHFDDISKDFKLLKKLPNGERLEDQFDIVMINDNAVALVEIKYTARKGYPTTMVNQKVPNFRTLFPDYAGYKIYLGLGALSISKEVEQEAEKLGIGLLRQVGETIEYETKWVKAY

SEQ ID NO: 56537 - DNA, 411 bp, Unknown
  Obtained from environmental sample
  misc_feature (1)..(411): n is a, c, g, or t
atgaaaacggtattggatgcgaacgttatcgtatcgacagccgtttggggcgggaatccgcgtaaaatcatacagcgggtcgccgatgggttggatacgttgttcattaccgaagatattgttgatgaacttgatgatgtgctgagaagaccgatgttcggtctcaacgacgacgaagcggaattgcggatagcggaaattgaagaactcggtaagaaagttgcggtctctcccgaacgccgaataacggatgcttgccgtgactccgacgacaatacatacctcgaatgcgccatcgccgccggaaccgactacatcatcaccggcgacaaagatctgttagtcctcaaggagtacggcggagtgaaaatcgtgaacgcgcggagttacttggatatcgtaggcggatga

SEQ ID NO: 56538 - protein, 136 aa, Unknown
  Obtained from environmental sample
  DOMAIN (3)...(124): PIN domain
  misc_feature (1)..(136): Xaa is any amino acid
MKTVLDANVIVSTAVWGGNPRKIIQRVADGLDTLFITEDIVDELDDVLRRPMFGLNDDEAELRIAEIEELGKKVAVSPERRITDACRDSDDNTYLECAIAAGTDYIITGDKDLLVLKEYGGVKIVNARSYLDIVGG

SEQ ID NO: 56539 - DNA, 1884 bp, Unknown
  Obtained from environmental sample
  misc_feature (1)..(1884): n is a, c, g, or t
ttgcgttttctgcctctcaccgccgaagtaattcttacggaaaagaaaaccggcgtacaatggcgttcaaatcccgcagggtttaatgatgatcctatggcggatgttgttacaaagtacctcatgggctctcagctttcacttgaatacgcggacaattccggcgtcggaatgtcattgttttcaagttactacagcgtaaacaggtcagcttacgagtatgaggtggtagacggcgctttggaagtgcgttatacgataggcgacatttcgcgttcttacaggataccgccggctatgtccgaagaaagaatgctggaatatctggataaaatggatgaggatgccttttttgaaattgaagccagttaccgtctttacgatattgaaaatctgcgttccaacgatgacaaagcgaaacttcttgccgattttcctgagctggccaaaataagaatgtatatattaaggggcaatactcaggattacatgaaagagcagatggaagtttactttaaggacgcaggctatacttatgatgagtactttgaggattttacaaaatattccaccggcggcggttttgaaaaacccgctttcagtattacgcttcgttattatcttgacggaaaatcccttatagttaatataccctttgatacggttgcataccggccagcttatccgattctgcaattaaccgtactgccgtttatgggcgcgggcggaataaacgatcaggggtatatgcttgtacccgactccagcggagcgcttatttactttaataacaagaagcatagccagattccttacagtataaaggtttacggatgggacgaagccatgccccgcgacgccataattgtcgacaataaagcgctgtttccggctttcggcattcataaaaacggaaacgctatgttatgtgtcattgaggaaggttctgcttacgcgagtgtacgcgccgacgtgtccgggcggaacgcctcctggaacagggtatatccgttattcgatatgattcacggcgcgaaaatggatattacaggccgcaacgagcgtgatgtttatctttatgaatcaaccttgccggccggggaaaatattactctgcgttatacactgtgcgaaaagcccggttatatgggcatggcggaagaataccgctcatggttaatgaataaatatccctttttcgcgcaaaggtcttccgctcaaagcggggttcccgttgcggtagaacttatcggcgcggtaaacaaaacgcagcaccgtcttgggcttccgtttgatctgccgttaaaacttacttcttacaaagaaatagaatccatgattaacgatttcggcaattatggatggaagaacttaaaaattaaacttaacggctggtttaacaggagcgtcgatcattccgttcccacaaagtttaaattaatcagccagcttggcggcaaaagtgattttcacggcatagtatcaacggcgggaaaaaataattttaagctttttccggaagtggatttcttttacatgaaagatgtaaaacttttcagcggttttaatatttaccgcgacgcggcgcgttatgtgaaccgtgaaagaatacagaaatacccgtttagttttgtctggttcggagaacgcaaacaatggggtaaattaagttatgtttcacgtcccgtagttatgatgaagatgatagacaaattcttcaaaaaaacagaatctctcggaataaaaaatatcgcgttcagaaacataggttcaaaacttgccggagattataatgaaagacggcatataagccgcgaggcttccatggttatgcgccaggaaaaacttgaacaaataaaacaatccggaaaagaggtgtcataa

SEQ ID NO: 56540 - protein, 627 aa, Unknown
  Obtained from environmental sample
  misc_feature (1)..(627): Xaa is any amino acid
MRFLPLTAEVILTEKKTGVQWRSNPAGFNDDPMADVVTKYLMGSQLSLEYADNSGVGMSLFSSYYSVNRSAYEYEVVDGALEVRYTIGDISRSYRIPPAMSEERMLEYLDKMDEDAFFEIEASYRLYDIENLRSNDDKAKLLADFPELAKIRMYILRGNTQDYMKEQMEVYFKDAGYTYDEYFEDFTKYSTGGGFEKPAFSITLRYYLDGKSLIVNIPFDTVAYRPAYPILQLTVLPFMGAGGINDQGYMLVPDSSGALIYFNNKKHSQIPYSIKVYGWDEAMPRDAIIVDNKALFPAFGIHKNGNAMLCVIEEGSAYASVRADVSGRNASWNRVYPLFDMIHGAKMDITGRNERDVYLYESTLPAGENITLRYTLCEKPGYMGMAEEYRSWLMNKYPFFAQRSSAQSGVPVAVELIGAVNKTQHRLGLPFDLPLKLTSYKEIESMINDFGNYGWKNLKIKLNGWFNRSVDHSVPTKFKLISQLGGKSDFHGIVSTAGKNNFKLFPEVDFFYMKDVKLFSGFNIYRDAARYVNRERIQKYPFSFVWFGERKQWGKLSYVSRPVVMMKMIDKFFKKTESLGIKNIAFRNIGSKLAGDYNERRHISREASMVMRQEKLEQIKQSGKEVS

SEQ ID NO: 56541 - DNA, 1026 bp, Unknown
  Obtained from environmental sample
  misc_feature (1)..(1026): n is a, c, g, or t
atgaaaaaagtaatggtggaaatgagcggcggcgttgactcctccactacggccgccattctccttgacaaaggcttcgacgtctgcggcgtcaccttcggcggcgggaaatccgcccgtgacgcaaaactcgtcgccgaccacctgcgcataaagcacctgacgattgacctatccgccctcttcgagcgcgtggtaataggcaacttcataagcgaatacaagtccggccgcacccctaacccatgcgtcgcctgcaaccgatacctcaagttcggagaacttttcaatacagccgacgaattaggctgcggctacatcgccaccggtcactacgcggtggcggaaaacggagaactgcggcgcggggcggacgccaaaaaggatcagtcgtacttcctctacccaatattggcgtcgccgatagagagaattctcttccccttgggcgctatgaccaaaagcgaaacccgcgccatggccaaaaggtacaacctcccgacggcagacaagggagagagccaagacatctgcttcgtccccggaacggactacgcgaaattcctgagatcgcgcggcgtcgacgcggtcgctgcggcgggaaacatagttgacaccgaaggcaacatagtaggaacgcacaccggcatccacaactacacggtaggccaacgcaaaggccttggggcgcttggaaaaccgatgtacgtaaaacaaatcatcccggcggataatacggtagtcgttgcggaagacagccaaatcgttagtgatgaggcggtgatagaaaacgccgtaatctccaaaacaagacccctaaacgcaggcggtggctacgccgcgcaaattagatacaaaagcgccccggtaggagccacggtaacggaagtaataggtacggaaaacagtaacggtgaacgaacaatacggataaagttcaacgcccccgtaagagccgtttccccgggccagtccgcggttctttacgacggagacacagtagtagcaggcgggtttatacgttga

SEQ ID NO: 56542 - protein, 341 aa, Unknown
  Obtained from environmental sample
  DOMAIN (3)...(165): ExsB
  misc_feature (1)..(341): Xaa is any amino acid
MKKVMVEMSGGVDSSTTAAILLDKGFDVCGVTFGGGKSARDAKLVADHLRIKHLTIDLSALFERVVIGNFISEYKSGRTPNPCVACNRYLKFGELFNTADELGCGYIATGHYAVAENGELRRGADAKKDQSYFLYPILASPIERILFPLGAMTKSETRAMAKRYNLPTADKGESQDICFVPGTDYAKFLRSRGVDAVAAAGNIVDTEGNIVGTHTGIHNYTVGQRKGLGALGKPMYVKQIIPADNTVVVAEDSQIVSDEAVIENAVISKTRPLNAGGGYAAQIRYKSAPVGATVTEVIGTENSNGERTIRIKFNAPVRAVSPGQSAVLYDGDTVVAGGFIR

SEQ ID NO: 56543 - DNA, 480 bp, Unknown
  Obtained from environmental sample
  misc_feature (1)..(480): n is a, c, g, or t
gtgcgggaagcggctggaaggcttaaaatagtgtttgacagttacggtgatgtagcccacaagtcgttgaacgaggaaacctcggcggtttacaacattttgcaggatttgcagggcaaatatgccgatgacacgggaaccgtgggcattgcgtattgggtagcggagcttaagaaccgtaacgaggcacttgaaaagttggttaaggagcgttttgacgagattgctggcaggacggatattgtgctgaaagaagcgagggcgcagcttgacaaggcgtatcaaataatcgtggagcgtataaatgcccttgcgatagttgatggcgtagcggcttacgagacgtttatcagaacgataaatgcagtgatagcgaagtatatggcgattttacaccaccataggcatcatcacgccgagcatgcgcaaccggaggtgacgcaagtaacaaatgccccaaccgtatggacagggttatga

SEQ ID NO: 56544 - protein, 159 aa, Unknown
  Obtained from environmental sample
  misc_feature (1)..(159): Xaa is any amino acid
MREAAGRLKIVFDSYGDVAHKSLNEETSAVYNILQDLQGKYADDTGTVGIAYWVAELKNRNEALEKLVKERFDEIAGRTDIVLKEARAQLDKAYQIIVERINALAIVDGVAAYETFIRTINAVIAKYMAILHHHRHHHAEHAQPEVTQVTNAPTVWTGL

SEQ ID NO: 56545 - DNA, 1233 bp, Unknown
  Obtained from environmental sample
  misc_feature (1)..(1233): n is a, c, g, or t
atgcaccagttcaatcccatgagcatggaggcgaccaacggcgacgcccacgagatgcccgaccgcccgcaatactacggcgacgaccatctgtggatagcgctggccgtgggcacatacgtaaaggagaccggcgacagcgccttcctgaacgaatcggtctcgtactacgagaaagacgcttggggggccccggtggagtcgggcagcgtgtacgaccacctcgcgagggcgttgcaattcaccaaggagaacatgggcaaccacggtctgccgctcctaggcttcgcggactggaacgactgcgtgaacctgcccaccggcgcggaatccatcttcaacacgtgcctctacagccgcgccctgctcgaaatgatcgacttggagacgttcctcggccacaaggacaaggtcgaggcctacaaagccgaccacgccgtcatgaagaagcacctgaacgaacgggcgtgggacggcgattggtacgtgagctactacaacgccgacggcacgccgctggggtcaaacagcaacagcgacggcaagatatacctgtacacgcaggcgtggccggtgctcgcggatattgccgcggacgggcacgggcgcacggcgctcgactccgcccgcaagatgctcaacacgaagaaagggctcaaactctccacgcccggcttcaacggctacgaccagaccaagggcggcataaccacctacccgccgggagcgaaggagaacggcggcatattcctccacaccaacccgtggatgatgatcgccgaggcgctcatgggcgacggcaaccgcgcctacgagtactataaccagatcaatccggccacaaagaacgatattatcgacgagtacgagtgcgaaccgtacgtctacccgcagaacatcttgggcgacgagcacccgctattcggcctggcccgcaacagctggctctccggaacgtcttcgtggacgtatcaggcggcgagccgttacataatgggaatccgcccgcagatggacggactcttggtagacccgtgcgtgccgtccgattggaagcgcttctccgtggagcgtaacttccgcgggtgccgctacgtgataaacgtggagaatcccgggcgcgtctgcaagggcgtaaaatcaatctctgtcgacggaaaggcgctcgacaagcccgtagttcccgtctttaccgacgggaaaacgcacgaagtcaacgtggcgatgggctaa

SEQ ID NO: 56546 - protein, 410 aa, Unknown
  Obtained from environmental sample
  misc_feature (1)..(410): Xaa is any amino acid
MHQFNPMSMEATNGDAHEMPDRPQYYGDDHLWIALAVGTYVKETGDSAFLNESVSYYEKDAWGAPVESGSVYDHLARALQFTKENMGNHGLPLLGFADWNDCVNLPTGAESIFNTCLYSRALLEMIDLETFLGHKDKVEAYKADHAVMKKHLNERAWDGDWYVSYYNADGTPLGSNSNSDGKIYLYTQAWPVLADIAADGHGRTALDSARKMLNTKKGLKLSTPGFNGYDQTKGGITTYPPGAKENGGIFLHTNPWMMIAEALMGDGNRAYEYYNQINPATKNDIIDEYECEPYVYPQNILGDEHPLFGLARNSWLSGTSSWTYQAASRYIMGIRPQMDGLLVDPCVPSDWKRFSVERNFRGCRYVINVENPGRVCKGVKSISVDGKALDKPVVPVFTDGKTHEVNVAMG

SEQ ID NO: 56547 - DNA, 732 bp, Unknown
  Obtained from environmental sample
  misc_feature (1)..(732): n is a, c, g, or t
gtggatagcgctggccgtgggcacatacgtaaaggagaccggcgacagcgccttcctgaacgaatcggtctcgtactacgagaaagacgcttggggggccccggtggagtcgggcagcgtgtacgaccacctcgcgagggcgttgcaattcaccaaggagaacatgggcaaccacggtctgccgctcctaggcttcgcggactggaacgactgcgtgaacctgcccaccggcgcggaatccatcttcaacacgtgcctctacagccgcgccctgctcgaaatgatcgacttggagacgttcctcggccacaaggacaaggtcgaggcctacaaagccgaccacgccgtcatgaagaagcacctgaacgaacgggcgtgggacggcgattggtacgtgagctactacaacgccgacggcacgccgctggggtcaaacagcaacagcgacggcaagatatacctgtacacgcaggcgtggccggtgctcgcggatattgccgcggacgggcacgggcgcacggcgctcgactccgcccgcaagatgctcaacacgaagaaagggctcaaactctccacgcccggcttcaacggctacgaccagaccaagggcggcataaccacctacccgccgggagcgaaggagaacggcggcatattcctccacaccaacccgtggatgatgatcgccgaggcgctcatgggcgacggcaaccgcgcctacgagtactataa

SEQ ID NO: 56548 - protein, 243 aa, Unknown
  Obtained from environmental sample
  misc_feature (1)..(243): Xaa is any amino acid
MDSAGRGHIRKGDRRQRLPERIGLVLRERRLGGPGGVGQRVRPPREGVAIHQGEHGQPRSAAPRLRGLERLREPAHRRGIHLQHVPLQPRPARNDRLGDVPRPQGQGRGLQSRPRRHEEAPERTGVGRRLVRELLQRRRHAAGVKQQQRRQDIPVHAGVAGARGYCRGRARAHGARLRPQDAQHEERAQTLHARLQRLRPDQGRHNHLPAGSEGERRHIPPHQPVDDDRRGAHGRRQPRLRVL

SEQ ID NO: 56549 - DNA, 528 bp, Unknown
  Obtained from environmental sample
  misc_feature (1)..(528): n is a, c, g, or t
atgaagaatatctgcctattgcttgaaggcgtcgccggactctactacgcgtctctgtggcccggtatagtcgattgcgccaaagagaacgattgcaacgtcgtctgctttgccggaggagcgttgcgcatatcgccgcagaacccctacgaggtgcaacgcaacgtcatctacaatcacatagacacgtcgaaattcgacggcgtcataatctccggcacgctcaacaacttcatctccgagatggagttcgccaaattcatggaacgcttcagcgcgttgcccacggtctccctcgccccggcgcttgagcatattcccgccgtgattgtagacaactcgtccggcatgaaggggctgatttcgcacttggcgaactcgcacgattgcaagaagttcgcctttatcagcggccctaagggaaacttagacgccgaccagcggcttgacttcttccgaaagtacctgaagggaaaacggcatagcctgcgacgaggagcgcatagcggccggagacttttcgcgtag

SEQ ID NO: 56550 - protein, 175 aa, Unknown
  Obtained from environmental sample
  misc_feature (1)..(175): Xaa is any amino acid
MKNICLLLEGVAGLYYASLWPGIVDCAKENDCNVVCFAGGALRISPQNPYEVQRNVIYNHIDTSKFDGVIISGTLNNFISEMEFAKFMERFSALPTVSLAPALEHIPAVIVDNSSGMKGLISHLANSHDCKKFAFISGPKGNLDADQRLDFFRKYLKGKRHSLRRGAHSGRRLFA

SEQ ID NO: 56551 - DNA, 759 bp, Unknown
  Obtained from environmental sample
  misc_feature (1)..(759): n is a, c, g, or t
atgcgtgtttgcgcagcaaacagaacagcggctgccgcttacactatcgaagtcggcggatcaacttctgttaccncgctgatggaattgttggcaacagaatattccaaagttaaaccaaacatcaaggtaaacattaacggaacaggttcaggcgacggtatcaacaatgccggagttctttaccagattggtatgtcaagccgtgagcttacaccggcggaacagggcaagggattgaaagagacaatcatcgccattgacggtatagcggttatcatcaacaaaagtaacgccgtgaataaccttactgttgaacagataagaaacatttacacgggagcggttaccaactggagacaggtcggaggcaaaaacgccccaatcgctgttgtcagccgtgaagaaggttcgggaacaagaggcgcttttgaagagcttgcgggtttccaaggcaaacttctcgcaaaagcaaatcagcttacaagcacgggagcgattcttgccaacattgcgcaaaaccccaacgctatcggctatatctcgcttggatcggttaacgattcaatcaaggcggtttctgtcgacggaacagcggcaactaacgcaaatgttgtaagcggcgcttacaaaatcgcccgtccgtttatcgtccttacgggaaaaaatgtccatgctgaaagcaacgcttttattcaatggatactcggcgctgatggacaaaaagtagttagcaaaagctggattcccgtaaaataa

SEQ ID NO: 56552 - protein, 252 aa, Unknown
  Obtained from environmental sample
  misc_feature (1)..(252): Xaa is any amino acid
MRVCAANRTAAAAYTIEVGGSTSVTXLMELLATEYSKVKPNIKVNINGTGSGDGINNAGVLYQIGMSSRELTPAEQGKGLKETIIAIDGIAVIINKSNAVNNLTVEQIRNIYTGAVTNWRQVGGKNAPIAVVSREEGSGTRGAFEELAGFQGKLLAKANQLTSTGAILANIAQNPNAIGYISLGSVNDSIKAVSVDGTAATNANVVSGAYKIARPFIVLTGKNVHAESNAFIQWILGADGQKVVSKSWIPVK

SEQ ID NO: 56553 - DNA, 579 bp, Unknown
  Obtained from environmental sample
  misc_feature (1)..(579): n is a, c, g, or t
atgaaatatatccccatactagaattacctatattaattctcatgatattaattcgttctataatactcagtcgtcacggaataaaagcaatagtatttggcattaccgataaaaccgatttctttatgctccctataattctttgtttcttttatactttattatccgtatttttcaacttaccttttccgtccgtattaaaagaaatgttttgggaaaatgacattataattattatcgcgattgtcttatgtaccatcagcctaatatggtttggcataaccttaaaaacatttggaagatctttcagggttggcattgataaaaatacaaatgaaaaattaattacaagcggaacattttcaatcagccgaaacccgatttatatggcatttattgtatttttcattggcatttttaccgcatatccaaacataactacggcaatatttctagttcttctatttacagcggttcatcgccaaattttacgcgaagaaaaatttctaaaaaatccattatgggggaaaaaaacagggaatattgcaaaaaaaattagaaaggttattttagcataa

SEQ ID NO: 56554 - protein, 192 aa, Unknown
  Obtained from environmental sample
  misc_feature (1)..(192): Xaa is any amino acid
MKYIPILELPILILMILIRSIILSRHGIKAIVFGITDKTDFFMLPIILCFFYTLLSVFFNLPFPSVLKEMFWENDIIIIIAIVLCTISLIWFGITLKTFGRSFRVGIDKNTNEKLITSGTFSISRNPIYMAFIVFFIGIFTAYPNITTAIFLVLLFTAVHRQILREEKFLKNPLWGKKTGNIAKKIRKVILA

SEQ ID NO: 56555 - DNA, 1842 bp, Unknown
  Obtained from environmental sample
  misc_feature (1)..(1842): n is a, c, g, or t
atgcacgagaacgatttaacgcggataaatgtattcagaatcctgcttattatcattttttgcgtttattcggcaaggcttttcagtatgcagatactttcaggagatatttaccgctccagggcgcaggatatttcaagaagaacatattcaataccgactcaaagaggggaaatttacgaccgaaattatgacaaacctcttgttgtaaacaaagatactttcgcggtaagtattactccggcggaagtcccccgcggaagtatggacgaaattataaattcaatttcaggtattctgaacattaaagttgacgatataaaatcaagactgccaaaccaatacctgcaattataccaacctgtagaaatagcttctaacgttcccttttcagcgattgcggctatagcggaaagaaaaaacacgctgcccggcatttcatggaatattaaatcggtaagaaattatgaaaatgtcggaagtctttcgcacatactcggttatgtaggcgatattacccgcgatgaacttacctctctttataatcaggggtatcaacagggagacttaataggaaaatcgggaatagaaaagcaatatgattcgctgttaaggggcaaaccaggctgggaaacaagaaccgtcgattccagaggaagacggataacaggcgatgaaaatatcactcgcgttccgcccgatataggcaaaaatcttgttttaacgatagacgcttctttgcagactcttgtggagaaagcgataggcaatcaaatcggggcggctgttgttatgaaaccgtcaaccggagaaatcctcgcaatggtttcttatccttggtatgatcccaatatttttacagacagaaataattctgactatatggcgttagttgatgatccggcaaaaccttttattaaccgcgcgattcaatcaaattatcctcccgcgtcaacatttaaaataattttgtctaccgcaatagtgtctgaaaatcttttttctcccgatcaaactataatttgccgcggagtaatgagatacggcaaccgcgactggcattgccatcttcgttccggtcatggaagaatgaatttaacaaccgcgttaaatcaatcatgtaacatttattatatgacggtaggaagggattatgtcggcgctgaaagaatcgtatcctacgcgaaagaatacggttacggtgaaattacgggaattgatattcccggggaaatcgccggatttataccaacgccgcaatggaaagaacgccgttaccacgaaaaatgggtgttaggcgatacaatgaatatgtcaatcgggcaggggtttaatcttgttactccgttacaaatgactaatttagtcagtatgattgttaataacggaaaaaattacaaaccttatattttaaaagaagtgcgcgatcccgctacaggggcaatagaaaaaaccacagtgcctgaagtaatccacaccagcaatgttagccgcaacgtttatgacgctgtgcgccgcgatatgaggtatgttgtaagccagggaacggcgcaatatccgctgaatataaaaaccgtgcagattgccggaaaatcgggaacggcggaaatggggcttacagacagatggcattcatggtttacggcgtttgccccatataacagtaataatcccgatgaacagatcgtagtaacggttattatcgaggcttcaacttatcaggtttggatggcgtccgccgtaagcgcaattatttttcaaggttatttcgggaagcagaattttgatgacgctgttaagtcgctcgggtttcaagctatggtaacgacgagggggcaataa

SEQ ID NO: 56556 - protein, 613 aa, Unknown
  Obtained from environmental sample
  DOMAIN (51)...(226): Penicillin-binding Protein dimerisation domain
  misc_feature (1)..(613): Xaa is any amino acid
MHENDLTRINVFRILLIIIFCVYSARLFSMQILSGDIYRSRAQDISRRTYSIPTQRGEIYDRNYDKPLVVNKDTFAVSITPAEVPRGSMDEIINSISGILNIKVDDIKSRLPNQYLQLYQPVEIASNVPFSAIAAIAERKNTLPGISWNIKSVRNYENVGSLSHILGYVGDITRDELTSLYNQGYQQGDLIGKSGIEKQYDSLLRGKPGWETRTVDSRGRRITGDENITRVPPDIGKNLVLTIDASLQTLVEKAIGNQIGAAVVMKPSTGEILAMVSYPWYDPNIFTDRNNSDYMALVDDPAKPFINRAIQSNYPPASTFKIILSTAIVSENLFSPDQTIICRGVMRYGNRDWHCHLRSGHGRMNLTTALNQSCNIYYMTVGRDYVGAERIVSYAKEYGYGEITGIDIPGEIAGFIPTPQWKERRYHEKWVLGDTMNMSIGQGFNLVTPLQMTNLVSMIVNNGKNYKPYILKEVRDPATGAIEKTTVPEVIHTSNVSRNVYDAVRRDMRYVVSQGTAQYPLNIKTVQIAGKSGTAEMGLTDRWHSWFTAFAPYNSNNPDEQIVVTVIIEASTYQVWMASAVSAIIFQGYFGKQNFDDAVKSLGFQAMVTTRGQ

SEQ ID NO: 56557 - DNA, 1137 bp, Unknown
  Obtained from environmental sample
  misc_feature (1)..(1137): n is a, c, g, or t
atggcaaaaacaagcgcagcagcagacggcggggccgcggcagcgggcggcgccaagaaaaaaaagggcggaaaggagtataccggacgccaaaaatcagcaatcttcctcgttaccataggttcggagctttccgcggagatcttcaagtacctcagggaagatgaaattgaaacccttacttttgagatagcccgccttgagaaaatagactccgaggagaaggattccattctgcaggagttccaggaactcatgatggcgaaccagtttatctccacgggcggtatcgactacgccagggaactgctggaaaaatctctgggaagccagaaggccatcgacatcatcaaccgcctgacatcgagcctccaggtgcggcccttcgactttatacgcagaacagacccgactcaccttttgaacttcatccagcaggagcatccccagaccatagcccttatcctggcctatcttgagcctaacaaggcttcggttattttgcagaacctgaaccacgacgtgcaaagcgacgtagcccgcagaattgccacgatggaccgcaccagcccggaagtcctccgcgaggtcgagcgggtgcttgaaaagaaactttcaaccctctccagcgaggattacaccacggcgggcggcgttgaaagcatcgttgaaatcctcaaccttgttgaccgcgcctctgaaaaacagatcatcgaggccctggaagacgaggatcctgaacttgccgaagagatcaagaagaggatgttcgtgttcgaggatatcgttatgctggacgaccggtcaatccagaaagttatgcgggaagttgactcgcaggaacttgccaaagcgctcaagagcgtggataccgaggtacaggacaagatcttcaagaatatgtccaagcgcgcggccaccatgcttaaggaagacatggagtacatatccaaggatccggtactgcttaaagacattgaaatgattcggcacaagttcatttccattatccgccgccttgaagaagctggcgaaatcgttataccaaggggagaagccgtggttggaccttacgaagcaacaagtgaagcaacaggtaacgacgatttagatattgatcctgaaaaaatagattga

SEQ ID NO: 56558 - protein, 378 aa, Unknown
  Obtained from environmental sample
  DOMAIN (238)...(349): FliG C-terminal domain
  misc_feature (1)..(378): Xaa is any amino acid
MAKTSAAADGGAAAAGGAKKKKGGKEYTGRQKSAIFLVTIGSELSAEIFKYLREDEIETLTFEIARLEKIDSEEKDSILQEFQELMMANQFISTGGIDYARELLEKSLGSQKAIDIINRLTSSLQVRPFDFIRRTDPTHLLNFIQQEHPQTIALILAYLEPNKASVILQNLNHDVQSDVARRIATMDRTSPEVLREVERVLEKKLSTLSSEDYTTAGGVESIVEILNLVDRASEKQIIEALEDEDPELAEEIKKRMFVFEDIVMLDDRSIQKVMREVDSQELAKALKSVDTEVQDKIFKNMSKRAATMLKEDMEYISKDPVLLKDIEMIRHKFISIIRRLEEAGEIVIPRGEAVVGPYEATSEATGNDDLDIDPEKID

SEQ ID NO: 56559 - DNA, 951 bp, Unknown
  Obtained from environmental sample
  misc_feature (1)..(951): n is a, c, g, or t
atggaaagcaaaaagaaatcaaacggtaaattccgctttgtagattttcttgttattctgctctgtctttcgggagcggtctacagcgttaatttgttttgggaagatttgtttcaaaccctcaacgataaaaacaaaacgcccatagggtctgtgtccataaaaaggaatatcgttcaacgccgtatgtcggacagggtaatatgggacagattgattagagaatcgcccgtatattccaatgacatgatccgcgtgggagataattccgaagccgatcttcatgtcggcggcaatgacattactataaatgaaaatacgcttcttcgtctgcggtacgacaaggaaaccggcgaatatcaaattgaacttacttcaggaaacatagggcttgttaccaaccccaaagggaatgaagtcgctttgaacattatgggacggcaggtaaaagcaaaaccgggaaccgcccttaacgccgccgccggagataacggcatggctctgcaagtcagcgaaggttcggctgtaatcgcggaagaaaatcaaagtcgcgaacttgacgcgggaaaggctattgcgatggacttaagcggttcaatccgttccgcgccctcggtttttgtcattcaacccaaacctaacgccctttaccgtaagagtacgagtgaaccgcttaacatagatttttcatggaacaggatcaatctacagccggatgaaaccctgcgtcttgaagcagccgaagatcaatatttcagccgttccgtccgcgcccttaacggacttaacgattcggcgcagatggctctgaacgccggactttggaactggcggctgacttataacgacggcgctaacagcgtagttttggattcgggacgtttcaccataacggacgctaaagggcttgaattgttaagcccggcgaaaaaccggccagtttacctatga

SEQ ID NO: 56560 - protein, 316 aa, Unknown
  Obtained from environmental sample
  misc_feature (1)..(316): Xaa is any amino acid
MESKKKSNGKFRFVDFLVILLCLSGAVYSVNLFWEDLFQTLNDKNKTPIGSVSIKRNIVQRRMSDRVIWDRLIRESPVYSNDMIRVGDNSEADLHVGGNDITINENTLLRLRYDKETGEYQIELTSGNIGLVTNPKGNEVALNIMGRQVKAKPGTALNAAAGDNGMALQVSEGSAVIAEENQSRELDAGKAIAMDLSGSIRSAPSVFVIQPKPNALYRKSTSEPLNIDFSWNRINLQPDETLRLEAAEDQYFSRSVRALNGLNDSAQMALNAGLWNWRLTYNDGANSVVLDSGRFTITDAKGLELLSPAKNRPVYL

SEQ ID NO: 56561 - DNA, 1185 bp, Unknown
  Obtained from environmental sample
  misc_feature (1)..(1185): n is a, c, g, or t
ttgcggaacaggaaattatcatgcgtatattcgacagcccccgaccgtaacaaacagatgttagtcgatattgacaatgtacgccactaccttgcctatacccgattgaataccgcgggaagcgttgtaattaccacaatcgaatacgataaagtttttgaaggcataaacgcgaccacacggcgcaacctctaccttaccgccgcgatattgttcctttctattatgtgtatctggtttttcgcaaaaagcatttcagttccgcttaagacgcttgccggcgcggcgcgttctatcgagggcggtatttttaatattgagctaacgccggcaagcggcgatgaaataggcttgttaacttccagctttggaaaaatgtgcgccgcccttaatattttcggcaagttcacaaaccgcgacattgccgttcaagccatgcgagggcaaattaaaccgggcggcttgtcgaaacatgcgacaatctttttttccgatatccgcggctttacagaaaaatccgagaactttgtaaaggcattcggcagtgaagcttccgaccgaatcgttttctggcttaacgagtatttaacgcgcatggttgaatgtgtcgaaaaaaccaacggtattatcgataaatttatcggcgacgccgtgatggcgcattggggaaccgcttataccacgggaagcccgcaggcggacgcgctcaactgcgtcaaggcggcgatgatgatgagaatcgctctgtataaattaaatatgaaccgcaaaaaagaaaacatgggaaacccgcccattacaatcggctgcggcataaacacaggcgtagttaccgccggacagattggctccgatctccgcatggagtacaccgtcataggcgaccctgtgaatctcgcctcgcgtgttgaggcgcttaacaaaccgcttggtacggacattctgattaccgaagatacatggaaccttgtaaaggatcaatttattgttgaagaaatgccgtctgtaaccgtgaagggaaaagaaaaacccgtgcggctttttgcggttgtaaatcatatctccgttcaatcgggtccaaaaactttggcggaagtacggaaaatattaggtataaaaccgcctgatatttcaaaggcggatgtaaacgcagaagaagttaaatacaagattggcggcaaataa

SEQ ID NO: 56562 - protein, 394 aa, Unknown
  Obtained from environmental sample
  DOMAIN (63)...(132): HAMP domain
  misc_feature (1)..(394): Xaa is any amino acid
MRNRKLSCVYSTAPDRNKQMLVDIDNVRHYLAYTRLNTAGSVVITTIEYDKVFEGINATTRRNLYLTAAILFLSIMCIWFFAKSISVPLKTLAGAARSIEGGIFNIELTPASGDEIGLLTSSFGKMCAALNIFGKFTNRDIAVQAMRGQIKPGGLSKHATIFFSDIRGFTEKSENFVKAFGSEASDRIVFWLNEYLTRMVECVEKTNGIIDKFIGDAVMAHWGTAYTTGSPQADALNCVKAAMMMRIALYKLNMNRKKENMGNPPITIGCGINTGVVTAGQIGSDLRMEYTVIGDPVNLASRVEALNKPLGTDILITEDTWNLVKDQFIVEEMPSVTVKGKEKPVRLFAVVNHISVQSGPKTLAEVRKILGIKPPDISKADVNAEEVKYKIGGK

SEQ ID NO: 56563 - DNA, 780 bp, Unknown
  Obtained from environmental sample
  misc_feature (1)..(780): n is a, c, g, or t
atgggtaacagagggaaattcaaagaaagacgcagcggattaaaggtacgtttttctataggcgcaaaactaataaccattatctcaataatcgtattgatttccctcggttccataaccgtgttagtgtcatggctggtcagggaagatcttaaaatatccgcggaagaaaataatttcgaggtgaaccggagggcggcggcggaagcggaacagaccctcgaaagagcgcgtttgttttcccttgcgttctcccgcacggcggctcttgcggaacacgacggcgtaatacaggaagaagccgattatttctttgcacagaacccgcagattgcagctcttttctttaccacggacgagtccgccgcatggacaaacagggtatttgtaaacgagcgatttttcctttcaaggggaattcaggcgtctcttgcggatacattccccggctacggccaaaaaatgctggaaaacgcggggatggggcaaacgattcttatcaacgcctcgccttggattaataacgcgcaggtttcaacgtcccttgcggcaatgtttttccctataaagggaggaagctcgcttcctttaggaagcggctgcgttctgttcctgacagaaaacctgaacgaaagtttcggcattggcgttaactcgtctttccttataaacgccgacggcgatattgtcgcggacgccgacatagaaagggtaaaaaccaatgtaaatcttgcggaacaggaaattatcatgcgtatattcgacagcccccgaccgtaa

SEQ ID NO: 56564 - protein, 259 aa, Unknown
  Obtained from environmental sample
  misc_feature (1)..(259): Xaa is any amino acid
MGNRGKFKERRSGLKVRFSIGAKLITIISIIVLISLGSITVLVSWLVREDLKISAEENNFEVNRRAAAEAEQTLERARLFSLAFSRTAALAEHDGVIQEEADYFFAQNPQIAALFFTTDESAAWTNRVFVNERFFLSRGIQASLADTFPGYGQKMLENAGMGQTILINASPWINNAQVSTSLAAMFFPIKGGSSLPLGSGCVLFLTENLNESFGIGVNSSFLINADGDIVADADIERVKTNVNLAEQEIIMRIFDSPRP

SEQ ID NO: 56565 - DNA, 444 bp, Unknown
  Obtained from environmental sample
  misc_feature (1)..(444): n is a, c, g, or t
gtggcctaccttgaaacaatctacgaaaattctttccggcccctggcagacggagaaataagcgtaggcggagcttacacggaagccataaaccctttaaaagtttttatgtacgaccagatgcgggcaaggcccaggatcattgcgctcttcatggaaatgcgggggctgggcaagcctaacaccctggcggatgtgcctacctatgtactcatccctgcctttatcctgaatgaattgaccgtggcctttaagatgggcatattgctctttatcccatttatcgtgatcgacatggtggtagcaagcgccctcatgtccatgggtatgatcatgctgccccctgtgatgatctccatgccttttaaactcatcctgtttatcgtggtggacgggtgggggcttttaacgggacagttggttcaatcttttttacagaggtga

SEQ ID NO: 56566 - protein, 147 aa, Unknown
  Obtained from environmental sample
  DOMAIN (4)...(141): FliP family
  misc_feature (1)..(147): Xaa is any amino acid
MAYLETIYENSFRPLADGEISVGGAYTEAINPLKVFMYDQMRARPRIIALFMEMRGLGKPNTLADVPTYVLIPAFILNELTVAFKMGILLFIPFIVIDMVVASALMSMGMIMLPPVMISMPFKLILFIVVDGWGLLTGQLVQSFLQR

SEQ ID NO: 56567 - DNA, 456 bp, Unknown
  Obtained from environmental sample
  misc_feature (1)..(456): n is a, c, g, or t
atgagtgcgcgcctaattcttcctgctttgcttttgcttctcctggctctcctcccccaggcggcttatgcccaggatgcttcgaccgggacgttgtttccgggcatggctacggaggggactatgggcattccggagccgccttcaatgacccctgttccctttatcgatcttaccatcaggaacccggaaagcgggcaggaagttgctttttccctgcagcttgtgcttcttttgacgctccttgcgcttgcgccaagcattttaattctaatgacaagtttcctgcgaatcgccatagtgctggattttatcaaacgcgcgctttcgcttcagcaagttccgcctaaccaggtgctaatgggaatcgccctgtttatgaccatttttattatgtggcctaccttgaaacaatctacgaaaattctttccggcccctggcagacggagaaataa

SEQ ID NO: 56568 - protein, 151 aa, Unknown
  Obtained from environmental sample
  SIGNAL (1)...(24)
  DOMAIN (78)...(151): FliP family
  misc_feature (1)..(151): Xaa is any amino acid
MSARLILPALLLLLLALLPQAAYAQDASTGTLFPGMATEGTMGIPEPPSMTPVPFIDLTIRNPESGQEVAFSLQLVLLLTLLALAPSILILMTSFLRIAIVLDFIKRALSLQQVPPNQVLMGIALFMTIFIMWPTLKQSTKILSGPWQTEK

SEQ ID NO: 56569 - DNA, 660 bp, Unknown
  Obtained from environmental sample
  misc_feature (1)..(660): n is a, c, g, or t
ttgggaggggaaaaactgaaatcatcccggtcatatgtaggcgtctgttttggcgttttgcttttttttataggcttttttggcattgtaacccctttatttgctcaaaatccgcctgatcaggagcaggttcccgatgttttgccgtcaagaacaggcgttgatttatccacaataatccttgaagatgtccctgcttcacagacagtaaacgacagttcctcaatatttattatgctaaggatggttcttgttctcgcgcttgccgccctcgcgatttacggcgtagtttttcttatcaagcgcatggccctgccgagggaaaaccctgacccccatcttaaagttctggcgcgtgtccctcttacaagcgattctttcgccgcggtaatttcgcttggggcaaaagcctggctggtgggcggcggttcaggcggcgtaaatctgatttccgaagttgacgatgccgaatcccttgaaactatgcttcttgaagacgccaaaaaaaacaccgaacctcggcgttttttcgattttcgttctcttttgcggtttggccgtgacggaaaaaaaggtttatcggataacggttctcttacggaaaatggctatcctttggatagcttacgcaagcagcgtgaaaggctaaaggggctgtaa

SEQ ID NO: 56570 - protein, 219 aa, Unknown
  Obtained from environmental sample
  misc_feature (1)..(219): Xaa is any amino acid
MGGEKLKSSRSYVGVCFGVLLFFIGFFGIVTPLFAQNPPDQEQVPDVLPSRTGVDLSTIILEDVPASQTVNDSSSIFIMLRMVLVLALAALAIYGVVFLIKRMALPRENPDPHLKVLARVPLTSDSFAAVISLGAKAWLVGGGSGGVNLISEVDDAESLETMLLEDAKKNTEPRRFFDFRSLLRFGRDGKKGLSDNGSLTENGYPLDSLRKQRERLKGL

SEQ ID NO: 56571 - DNA, 438 bp, Unknown
  Obtained from environmental sample
  misc_feature (1)..(438): n is a, c, g, or t
atgggtgcacaggcgccgatgggcggcatgggcggcgggatgccgtcgatgggtatgccaatgggaggaatgggtatgggtatgccgggtatgcaaggcatgccgggtatgggcgttccgacaaatatccagaccgttcagtttcctaatttaatgccgcacaatatgcctcaggaagccggcaacatcagcctgataatggacgtcttcatggagatgaccgttgaattgggccgtaccaaaaagctcatcaaggaaatcctgagcatgggagaaggaacgatcatcgagctggacaaactggcaggcgaaccggttgacattttggtaaaccataaactcatagcaaagggcgaagttgttgtcattgatgaaaatttcggtgtccgcgttaccgagattgtttctccccttgaaagaatgaatgacatgagttaa

SEQ ID NO: 56572 - protein, 145 aa, Unknown
  Obtained from environmental sample
  DOMAIN (62)...(138): Surface presentation of antigens (SPOA) protein
  misc_feature (1)..(145): Xaa is any amino acid
MGAQAPMGGMGGGMPSMGMPMGGMGMGMPGMQGMPGMGVPTNIQTVQFPNLMPHNMPQEAGNISLIMDVFMEMTVELGRTKKLIKEILSMGEGTIIELDKLAGEPVDILVNHKLIAKGEVVVIDENFGVRVTEIVSPLERMNDMS

SEQ ID NO: 56573 - DNA, 1572 bp, Unknown
  Obtained from environmental sample
  misc_feature (1)..(1572): n is a, c, g, or t
ttgatcgccnacggccgaaagcccgcggctgttgtcgcccgaggtatgggaactccgtgcgtcgccggagcaaaaggcgtagttgttcagaataatatcgttactataggaaacgatacgtaccatgaaggcgactggatcactatcgacggctctacaggcgaagtatacgacggaaaattgccacttgtagcggcgacaatatcaaaagacatgaataccttccttaaatggtgcgatgatgtccgcagtaaggcggttcgcggtccaattaaaggctttaatgtcagaacaaacgccgatcagccggaggacgcaaaacgcgcggttgctttcggcgcgcagggtatcggtctttgccgcacggagcatatgttctttgataaagaaaaacttatccatttccgcgcgatgattgtcgcggattcggaagaagatcggaaaattcaattaaagaagatacttccccttcagcaaaaagatttctacggtattttcaaagcaatggaaggccgaccggttacaatccgtcttttagatccgcctttgcatgaatttgtaccacatactacagaagaaattaacgaacttgccgatcatttaggtatggatcattcaaagttactggcaaaagtaatgtcgcttgtcgaaagcaacccgatgcttggacaccgaggctgtcgtttggctgtaacgtatcctgaaatttacgatatgcaggtagaggcaatcgttcttgccgccgttgagtgtgttaaggaaaaaatacctgtacatcccgaaattatgattccgattgtcgttacggcaagggaactcaggcttttacgtccgaacgcggaaaaagtcattgaaaaagtgttaaaagaagcgggtgtaaaggttcccgttaccattggtacgatgattgaagttccgcgcgcggcgattcgctctgcgcatatcgcacagtacgctgactttttcagttttggaacaaacgatcttacacagatgaccttcgctttcagccgcgatgacattgcgtccttcctacccacctatctggaaaaaaatgttcttgacgttgatccgttcaagaccattgatcaagacggagtaggcaatttgattcaattcgcgattaaagaaagtcggtctgtaaaaccggatctcaaagttgggatctgcggagaacacggcggagacccggcaactattgacttctgttatagggctgggttgagctatgtatcatgttcaccattccgggtgccgttagcacgtcttgccggtgcgcaagccgttattaacaattccggaaacaatatattgggaggggggtccggaaagactaaacctaccgctgccacggtgaagggcagtaaaaaacctattagggggggtaagaaaatggcagtaacatctgcaaagaaacccgccgcgaagaaagcggcgaagaagcccgcgaagaaagcggcggcaaaaaagcccgcgaagaaaaccgcggcaaaaaagcccgcgaagaaaaccgcggcaaagaaacctgcggctaaaaaacccgcagccaagaaaccgaaagtagttctgtaa

SEQ ID NO: 56574 - protein, 523 aa, Unknown
  Obtained from environmental sample
  SIGNAL (1)...(22)
  DOMAIN (2)...(54): PEP-utilising enzyme, mobile domain
  misc_feature (1)..(523): Xaa is any amino acid
MIAXGRKPAAVVARGMGTPCVAGAKGVVVQNNIVTIGNDTYHEGDWITIDGSTGEVYDGKLPLVAATISKDMNTFLKWCDDVRSKAVRGPIKGFNVRTNADQPEDAKRAVAFGAQGIGLCRTEHMFFDKEKLIHFRAMIVADSEEDRKIQLKKILPLQQKDFYGIFKAMEGRPVTIRLLDPPLHEFVPHTTEEINELADHLGMDHSKLLAKVMSLVESNPMLGHRGCRLAVTYPEIYDMQVEAIVLAAVECVKEKIPVHPEIMIPIVVTARELRLLRPNAEKVIEKVLKEAGVKVPVTIGTMIEVPRAAIRSAHIAQYADFFSFGTNDLTQMTFAFSRDDIASFLPTYLEKNVLDVDPFKTIDQDGVGNLIQFAIKESRSVKPDLKVGICGEHGGDPATIDFCYRAGLSYVSCSPFRVPLARLAGAQAVINNSGNNILGGGSGKTKPTAATVKGSKKPIRGGKKMAVTSAKKPAAKKAAKKPAKKAAAKKPAKKTAAKKPAKKTAAKKPAAKKPAAKKPKVVL

SEQ ID NO: 56575 - DNA, 453 bp, Unknown
  Obtained from environmental sample
  misc_feature (1)..(453): n is a, c, g, or t
atgtttgtaaataaaaaaacctggtctgtaagtcgtacccaacgggtgccgtctcctttgaccaggctttttgtaaaaaaactttttaaataccaaaaaaccttaaattacagaactactttcggtttcttggctgcgggttttttagccgcaggtttctttgccgcggttttcttcgcgggcttttttgccgcggttttcttcgcgggcttttttgccgccgctttcttcgcgggcttcttcgccgctttcttcgcggcgggtttctttgcagatgttactgccattttcttaccccccctaataggttttttactgcccttcaccgtggcagcggtaggtttagtctttccggacccccctcccaatatattgtttccggaattgttaataacggcttgcgcaccggcaagacgtgctaacggcacccggaatggtgaacatgatacatag

SEQ ID NO: 56576 - protein, 150 aa, Unknown
  Obtained from environmental sample
  misc_feature (1)..(150): Xaa is any amino acid
MFVNKKTWSVSRTQRVPSPLTRLFVKKLFKYQKTLNYRTTFGFLAAGFLAAGFFAAVFFAGFFAAVFFAGFFAAAFFAGFFAAFFAAGFFADVTAIFLPPLIGFLLPFTVAAVGLVFPDPPPNILFPELLITACAPARRANGTRNGEHDT

SEQ ID NO: 56577 - DNA, 942 bp, Unknown
  Obtained from environmental sample
  misc_feature (1)..(942): n is a, c, g, or t
ttggaggaattgggcggtctggaatcaggcataacggtcagttccggcggtgttgcggcaaatgtggcaaaaattgccgcgatgctgaatatcaacgcggcttttgccggctgtaccggcggcgatgatctggccgctgtctttgaaaaagagctgcgggctgcgggtgttgttccctatcttactaccggcaaggaaaaaaccggcttatgttttgcctttaactgcggcggcgaaacccgccgcgaaactcgcgccgaacccgcagtccgcattgccgcctcgcccggcgccgcgctggaattcaccgaagccgatgtgcaggaagacctgatctccggagcggaagcggtagtgctggatggttacatgcttgaccgccggcctttggtacagcggatactgcagcttgccagccgccgcgggattcccattgcgctggatgccgcttcggtatttcagattcgtgaaaaaaccgaagaaatcttacactatagccgtaattaccctttgattgtttttatgaacgccgatgaaagcatcgttttttatgatactatcaggaaaggcggcaaaaaaaccgaagttaccggagagcaggaaaaggaaacgctgattctgcaggaaatctgcccggtactcaaatatatcaccgagggggaaatatttcccattattgttatcaagttggggggtaggggagcggtagttttggccgggggcagtatttaccgcgaggaaacttttacgatcattccccggaacaccgtcggcgcgggggatgctttttgcgccgcttttcttgccgcgtggattcggggcaaaccgatacgggaatgcgccgccctgggaaacaaagtcgcccgcaaaatccttgaggtgcccggcaccaaaattaacggtaataaactgaaatcgtttgccaggatattgcgtaagtag

SEQ ID NO: 56578 - protein, 313 aa, Unknown
  Obtained from environmental sample
  DOMAIN (7)...(304): pfkB family carbohydrate kinase
  misc_feature (1)..(313): Xaa is any amino acid
MEELGGLESGITVSSGGVAANVAKIAAMLNINAAFAGCTGGDDLAAVFEKELRAAGVVPYLTTGKEKTGLCFAFNCGGETRRETRAEPAVRIAASPGAALEFTEADVQEDLISGAEAVVLDGYMLDRRPLVQRILQLASRRGIPIALDAASVFQIREKTEEILHYSRNYPLIVFMNADESIVFYDTIRKGGKKTEVTGEQEKETLILQEICPVLKYITEGEIFPIIVIKLGGRGAVVLAGGSIYREETFTIIPRNTVGAGDAFCAAFLAAWIRGKPIRECAALGNKVARKILEVPGTKINGNKLKSFARILRK

SEQ ID NO: 56579 - DNA, 603 bp, Unknown
  Obtained from environmental sample
  misc_feature (1)..(603): n is a, c, g, or t
atgtatatcanaggagatttttatggcaaagaacgcaatcgtattatggccgaaggttttgaggaggtcgaggcggtaacacccattgattacctgcgccgcgcggggataaccgtcaccattgccgctgttggtgatactccatccgtcaaaggggcgcggggcataacggtaaacgctgacgctttgttacgcgacattattaaacagggggggacagccgctttggacgcatccgcatcttacgatgcggttataattcccggcggaatgcccggtgcgacaaacatcgccgcttcaaaagaagccggcgcgctcataacggaaatggcatcagccggaaaacaggtctgcgcaatctgcgcctctccggcggtggtattggccccgctgggtctcttgtccggtaaaaaatttacctgttaccccggcatggaagaaaaagtgcagggcagtaaatggacagacaacagcgtcgccgtagacggtaatattatcaccagccgcgccgcgggaaccgccggagaattcgccgtggcaattatcgcgcggcttcttaatcaaccggcaggggacaaaatcgcgcaggcagtactgctgtaa

SEQ ID NO: 56580 - protein, 200 aa, Unknown
  Obtained from environmental sample
  DOMAIN (38)...(186): DJ-1/PfpI family
  misc_feature (1)..(200): Xaa is any amino acid
MYIXGDFYGKERNRIMAEGFEEVEAVTPIDYLRRAGITVTIAAVGDTPSVKGARGITVNADALLRDIIKQGGTAALDASASYDAVIIPGGMPGATNIAASKEAGALITEMASAGKQVCAICASPAVVLAPLGLLSGKKFTCYPGMEEKVQGSKWTDNSVAVDGNIITSRAAGTAGEFAVAIIARLLNQPAGDKIAQAVLL

SEQ ID NO: 56581 - DNA, 642 bp, Unknown
  Obtained from environmental sample
  misc_feature (1)..(642): n is a, c, g, or t
ttgcagggtaaggctgacattatattttgcgccgccccgtcagcttcacaaagaaagcagttttatgataatggaataaatttaaacttagtccccatcggcagagaggcttttgtattctttgtcaataaaaaaaatatcgtagataatgtaactatagagaatattcagggaatatattccggtagaattataaactggaaagagttaaatggttctaatcaaaaaatcagagcttttcaaaggccggaaaattcgggaagccaaacggcgctggaaaaaataatggggaatatcctcattatggagcctcgcagggaggatgtatccaccggcatgggcggtataataaaccgggttgccgcttataaaaatttcccaaacgcgataggttattcatttttattttattcaacggaaatggtaaacaatgatcaaatcaaattattgtctattgagggtatttacccttcaagagaaacaatacaaaatgggcgttatccgttctctgacgatttttacgcgatatatattgatactgacgataaaaatgaaaatatcgaatcatacattgaatggatcttgtcagaacagggacaagaattggtttcaaagacggggtatataccgataaaacggtaa

SEQ ID NO: 56582 - protein, 213 aa, Unknown
  Obtained from environmental sample
  misc_feature (1)..(213): Xaa is any amino acid
MQGKADIIFCAAPSASQRKQFYDNGINLNLVPIGREAFVFFVNKKNIVDNVTIENIQGIYSGRIINWKELNGSNQKIRAFQRPENSGSQTALEKIMGNILIMEPRREDVSTGMGGIINRVAAYKNFPNAIGYSFLFYSTEMVNNDQIKLLSIEGIYPSRETIQNGRYPFSDDFYAIYIDTDDKNENIESYIEWILSEQGQELVSKTGYIPIKR

SEQ ID NO: 56583 - DNA, 771 bp, Unknown
  Obtained from environmental sample
  misc_feature (1)..(771): n is a, c, g, or t
ttgaatttgactttaaaaatcgacatgataacaaccgacaatacctgcccgctctgcggttccaccgctctgtcgctcatctgtaaagacgagcggcaagggcgttctttctacctctgccaagactgcggcctgatatccgtccccgcccgataccacctaagcgtacccgacgaactggcccgctacgctctgcacgacaacaccctgtccaaccaaggttacgtagacttcctatcggaaatcgccgacgtagccataaaagcggcctccgaaatgtcgtgcggccacgagtacgagtccgtgagcgaccccagggagcagccgataaagctgcttgatttcggatgcggcggcgaggcggtgctctgccgtttgcttttgaggcgcggggcggggatagactgttacccctacgacccgttgtacggcggtttgcgcaacctgtctgacgatgtttgcaagtacgatataattgtggcgagcgaggtggtagagcatctcagggacttatcgggagagttgcggtttataaacggattgttgcgtgacggcggggtgattatcatacggacgcaactttacgaagactccggcatcaacgtcgataccggcgccggtgccggcaaatcggagttccaaaaatggtggtacgctcaagaccctacgcatataaatttcttcaacaagaaatcgctttcaaggctggcgtcggccctgaataagcgggttgaggaaaccgggcgccgagatatatttattcttaggtaa

SEQ ID NO: 56584 - protein, 256 aa, Unknown
  Obtained from environmental sample
  DOMAIN (113)...(190): Methyltransferase domain
  misc_feature (1)..(256): Xaa is any amino acid
MNLTLKIDMITTDNTCPLCGSTALSLICKDERQGRSFYLCQDCGLISVPARYHLSVPDELARYALHDNTLSNQGYVDFLSEIADVAIKAASEMSCGHEYESVSDPREQPIKLLDFGCGGEAVLCRLLLRRGAGIDCYPYDPLYGGLRNLSDDVCKYDIIVASEVVEHLRDLSGELRFINGLLRDGGVIIIRTQLYEDSGINVDTGAGAGKSEFQKWWYAQDPTHINFFNKKSLSRLASALNKRVEETGRRDIFILR

SEQ ID NO: 56585 - DNA, 1365 bp, Unknown
  Obtained from environmental sample
  misc_feature (1)..(1365): n is a, c, g, or t
atggaagcactgaaaaaagccatagatgcctttgcgaatgcctttagggtagaagacctgcgtaaaaagctgctcttcacacttggcgttttgataatttatcgcattggttctcacataagcataccgggcgtggatccttcgcgtttggcaagttttttctcgcaaagctcaaataatctttttggtctctacgatagctttaccggtggtgcctttgcaaaagcaaccatattcgcgctaggcataatgccatacatcagcgcaagcataataattcaaattatgggcgcggttatacctcaaattcgccttttgcaaaaagaaggcgcagagggcagggcaaaactgaaccaatggacaagatatttcaccgttttgctcgctaccgtgcaaggctggggcattgcaatttggctttccagcgttagagtaaatgtaggcggtgcccaaggagtttctgtgctgctagacgattttgcaagcggcgcgngaaactggngttttagattgctcgctacgctcacaatgacaacaggtaccatattcgttatgtatttgggtgagcaaattaccagccgcggtgttggaaacggaatttccttaataatttttgcaggtattgttggcggtcttcctcgtgctatgattatggaatacgagcaattcgcggcaggcaaccaaaaattgatgatagaagttatgataattgctatggtgatagccattataggttttattgtatttattgagcaggcaaataggcgcattccgcttcaaagccccaaaagagttgttgggcgcaaggttatgggtgggcagtccagttatttgccattcaaggtaaataccgcaggcgttattccagttatttttgcatcttcaataatgtttgttccagctatgatagcttcttggttcccaaataccggttggatagaagcatttgccggagcctttttgcccggccacataacatatagcgttatatttgccttgttgattatattcttcacatatttctacaccgctattcaatataacccaagtgatatagcagacaatttaaagaaatcaggtggctttatccccggcattcgccctgggcgcaaaacagctgaatacatagataatattttaactcgcataacacttcctggtgcaatatttttagcaaccataagtgttggcccattgcaccttaaagatgctttgaatatgtctttttatatgggtggaacatctgttttaattgttgtgggtgttgccctagacactttaaggcaaatagaggctcagttgcacactaagaattacgaaggtttcttaaagcacggtcgcattcgcggcaggatggcatcttag

SEQ ID NO: 56586 - protein, 454 aa, Unknown
  Obtained from environmental sample
  DOMAIN (77)...(429): eubacterial secY protein
  misc_feature (1)..(454): Xaa is any amino acid
MEALKKAIDAFANAFRVEDLRKKLLFTLGVLIIYRIGSHISIPGVDPSRLASFFSQSSNNLFGLYDSFTGGAFAKATIFALGIMPYISASIIIQIMGAVIPQIRLLQKEGAEGRAKLNQWTRYFTVLLATVQGWGIAIWLSSVRVNVGGAQGVSVLLDDFASGAXNWXFRLLATLTMTTGTIFVMYLGEQITSRGVGNGISLIIFAGIVGGLPRAMIMEYEQFAAGNQKLMIEVMIIAMVIAIIGFIVFIEQANRRIPLQSPKRVVGRKVMGGQSSYLPFKVNTAGVIPVIFASSIMFVPAMIASWFPNTGWIEAFAGAFLPGHITYSVIFALLIIFFTYFYTAIQYNPSDIADNLKKSGGFIPGIRPGRKTAEYIDNILTRITLPGAIFLATISVGPLHLKDALNMSFYMGGTSVLIVVGVALDTLRQIEAQLHTKNYEGFLKHGRIRGRMAS

SEQ ID NO: 56587 - DNA, 507 bp, Unknown
  Obtained from environmental sample
  misc_feature (1)..(507): n is a, c, g, or t
ttggtttttgcggaattccgggcggcaaagggaaaaatggctacaggctggtatgttcttcatatctattccggttatgattttttaattgaaaaaactatncgcaatattttttttttgggagaactcgacaaggaagtcgtccgcgatataaagattcccgccgaagaagttaccgaggtaaaggacggaaagaagcgcaccataaccaaaaaattccttcccggttatatcctggtagaaatggatctccccgatgtggatatgggctggaaggaaccttgctccaaaattaaaaaaatccagggtgtcaccggttttgtgggaacccccgccggacgcaaaccccagccgcttaccggcgatgaggcgcgggctattttacagaaatccggcgagataaaaggcgagcgcccggtccgatctcgccacagctttaaccagggagagcaggttaaattgtcgatgggccgtttgagacctttaccggtacagttgatgaagtga

SEQ ID NO: 56588 - protein, 168 aa, Unknown
  Obtained from environmental sample
  DOMAIN (15)...(122): Transcription termination factor nusG
  misc_feature (1)..(168): Xaa is any amino acid
MVFAEFRAAKGKMATGWYVLHIYSGYDFLIEKTXRNIFFLGELDKEVVRDIKIPAEEVTEVKDGKKRTITKKFLPGYILVEMDLPDVDMGWKEPCSKIKKIQGVTGFVGTPAGRKPQPLTGDEARAILQKSGEIKGERPVRSRHSFNQGEQVKLSMGRLRPLPVQLMK

SEQ ID NO: 56589 - DNA, 432 bp, Unknown
  Obtained from environmental sample
  misc_feature (1)..(432): n is a, c, g, or t
atggcaaaaaaaagggttcaggctgtaattaagctgcaatgcccggcgggaaaggctacgccggcgccgcctgtaggacccgcgcttggcccccatgggatcagcgcgccacagtttgtccagcagtttaatgaccggacaaagagcatggaaccggggcttatcatcccggtggttatcaccgcctatgcggataaatcctttacgtttatcctcaaaacgccgcccgcgtccgttttggtaaaaaaggccatcgggctggaaaagggttcccctgagtcgcataagacaaaggttggaaaaatccccaaggcgaaacttgaggaaatcgccaaactgaagatgccggatctgacggctaacgacataaatgccgccatgcggattatcgccggtactgcccggtctatgggtgttgaggtggaaaaatga

SEQ ID NO: 56590 - protein, 143 aa, Unknown; identical to SEQ ID NO: 21734
  Obtained from environmental sample
  DOMAIN (9)...(68): Ribosomal protein L11, N-terminal domain
  misc_feature (1)..(143): Xaa is any amino acid

SEQ ID NO: 56591 - DNA, 522 bp, Unknown
  Obtained from environmental sample
  misc_feature (1)..(522): n is a, c, g, or t
gtgcgcgacaccgtagtcctgcccaaccagttcaggggcgagaaaaaaatcctggtgttctgcaagcctgaaaaggaaaaggaagcccaggacgccggcgcggcgtttgtgggcgctgacgaccttatagaaaaagtaaagggcggctggacggattttgatattgccgttgcgaccccggacatgatgaaggatgtcgggaagctcggtatggtgcttgggcgcaagggccttatgcccaacccgaaaaccggcaccgtcaccttcgatctaaagggaacgctggcggaactgaaaaaaggccgcacggaattccgggcggacaagaccggcgtaattcacttggccgtgggaaaggtttctatggccccggaacagattgccgataatgtcaacgcggttatcgtcgaagtaaagcggaaacgtcccgcggacgcgaaaggcgattttatcaaatcggtatcggttgcctcaaccatggggcccggcgtatgggttgccatcgctgaacaacaggaatag

SEQ ID NO: 56592 - protein, 173 aa, Unknown
  Obtained from environmental sample
  DOMAIN (1)...(163): Ribosomal protein L1p/L10e family
  misc_feature (1)..(173): Xaa is any amino acid
MRDTVVLPNQFRGEKKILVFCKPEKEKEAQDAGAAFVGADDLIEKVKGGWTDFDIAVATPDMMKDVGKLGMVLGRKGLMPNPKTGTVTFDLKGTLAELKKGRTEFRADKTGVIHLAVGKVSMAPEQIADNVNAVIVEVKRKRPADAKGDFIKSVSVASTMGPGVWVAIAEQQE

SEQ ID NO: 56593 - DNA, 969 bp, Unknown
  Obtained from environmental sample
  misc_feature (1)..(969): n is a, c, g, or t
atgatttgttttacctccggactgattcaatgcttaaatgatgacgaattagcatacgtcataggacatgaaatcgggcatttaatatttaaacacagtcagcttaatacggtttggggaattctggctaattccgaagaacctgtttcatcccagattagaaatttattctcgcgttgggataaatacgcggagatcagcgctgacagaatgggctatatagcccaaccgaatcttgaaactatcggtaaaacatttttcaaactggcaagcggtctttcggaagaacacttaaaatttaatatcaccgaatatatgaaacagcttgataaaatgacggatttgtccagagatgaattagtatcatctcatcctaaaaatttagtcagattaaaatgtcttgaacttttttcaaaatcagaattatttaattcctcaaataaatctgttatgacaaaagagcagctgcagaaagaaactaccgaggtattagacaaggaagaataccatcccactgaagaatggcaaattaaggttttagaatttatttccgcggttggcatgtatatttcaagtattgataatataatgaacccgaatgaatgggaaagattatacagtatggtttactgccatacttcacagccggaaaaatatcttacatttaaggatcttaacgaagttaaagaaaagaaaaacgctatttgtgaattctacgcgcagtcaaagaatgatcataaattcaccttatgtgaaatgatggtagatattgcaacctgcgacggaaaacttgatgaaaaggaaaaagccgcgctgtatgaaatagcacattcaatgaatattgatgaagaaaccataaaaagaatgattcaaaaagccagcaggaatatttctcttactccgggacaaaacgtatcaggcgtacagatagatactttcctgaatcaaatgatggataagaaaagataa

SEQ ID NO: 56594 - protein, 322 aa, Unknown
  Obtained from environmental sample
  misc_feature (1)..(322): Xaa is any amino acid
MICFTSGLIQCLNDDELAYVIGHEIGHLIFKHSQLNTVWGILANSEEPVSSQIRNLFSRWDKYAEISADRMGYIAQPNLETIGKTFFKLASGLSEEHLKFNITEYMKQLDKMTDLSRDELVSSHPKNLVRLKCLELFSKSELFNSSNKSVMTKEQLQKETTEVLDKEEYHPTEEWQIKVLEFISAVGMYISSIDNIMNPNEWERLYSMVYCHTSQPEKYLTFKDLNEVKEKKNAICEFYAQSKNDHKFTLCEMMVDIATCDGKLDEKEKAALYEIAHSMNIDEETIKRMIQKASRNISLTPGQNVSGVQIDTFLNQMMDKKR

SEQ ID NO: 56595 - DNA, 1071 bp, Unknown
  Obtained from environmental sample
  misc_feature (1)..(1071): n is a, c, g, or t
ttgctctatgccggaggcggagtcatcagctcgggtgcggaggaagaacttatcgcgcttgccgaaagactgaacgctcctgtggcattgagcctgatgggaataggggcgataccgaaagatcaccgcctgtgtacggggcttatcggaatgcacggaacagttgcgagcaacaaggcgacgcaaaagacggacttgctcctcgcgattggcgcgcgcttttcagaccgtgtaacaagcaagcccgatatgtttgcaaagaccgctaaggtaattcatttcgacattgatcccgcggagataagcaagaacattgaaacccacgcatgggtggtcggaaacttaaaggataccttagccgctttgctgaaaaaacttcccgcgcgccttaaaaccgaatggcacggtgagattgataaatggaaaacacatatgcctcagacatacactcatgaggttacattcgccaagaacgcgcttcacccgcgctttattattgaagagacagcgaaggcgctcggtccggagacaatcgctgttaccgatgtaggccagcatcagatgtgggcggcgcagttctttcccgccgagaagcccagatcatttatcagttccggcggacttggaacgatgggcttcggactgggagccgcttgcggcgccaaggtagccaacccgaaaaaacccgtggcgctttttacgggagacggcagtttcagaatgaactgcgcggagatggcgaccctcaccaacaataaaatcccgctgttgataattgtctttaacaacggagtcctcggcatggtaaggcagtggcagagtttcttttacgaaagccgctactcgcatacaactttgagcggagtccccgactttttaaaactgtgcgacgcttacggcgttacgggtttccgcgccgcggacagggagtccttcaagaaagcgctccacgccgccgccgcggaactgtccgacggaagagcggctctcattgcggcggacatagaccgcgacgagaacgtgctgcccatggttccgtcgggcaagcctattgatgagcagattttgtaa

SEQ ID NO: 56596 - protein, 356 aa, Unknown
  Obtained from environmental sample
  DOMAIN (1)...(138): Thiamine pyrophosphate enzyme, central domain
  misc_feature (1)..(356): Xaa is any amino acid
MLYAGGGVISSGAEEELIALAERLNAPVALSLMGIGAIPKDHRLCTGLIGMHGTVASNKATQKTDLLLAIGARFSDRVTSKPDMFAKTAKVIHFDIDPAEISKNIETHAWVVGNLKDTLAALLKKLPARLKTEWHGEIDKWKTHMPQTYTHEVTFAKNALHPRFIIEETAKALGPETIAVTDVGQHQMWAAQFFPAEKPRSFISSGGLGTMGFGLGAACGAKVANPKKPVALFTGDGSFRMNCAEMATLTNNKIPLLIIVFNNGVLGMVRQWQSFFYESRYSHTTLSGVPDFLKLCDAYGVTGFRAADRESFKKALHAAAAELSDGRAALIAADIDRDENVLPMVPSGKPIDEQIL

SEQ ID NO: 56597 - DNA, 426 bp, Unknown
  Obtained from environmental sample
  misc_feature (1)..(426): n is a, c, g, or t
atggggcttccctgcgaccataaccccgtactaatggcggcgaaaagacgtgaagcgtctccgtacaaaatcgaagatgtaaatgtaataggcgaagacctttcaagcataaaaatttccaattacaaattcccgtcaaccgtaaaaggcttcagcaaaactgtcgagaaaaatcccgttgtaaggaatatcttaaaatcggctttaactaaatttcccgtagtggcgaaaggaagatgtatcggctgcggcgtgtgcgcaaccgcctgtccgcaaaaaatgatcacaatgattacacaaaaaggcaagaaaaaagccgagataaacttaaaggaatgtatccgctgttactgctgccacgaattatgtccgcataaagcgattgacatgaagagcaaatttatttcaaaggcgttaaagatttag

SEQ ID NO: 56598 - protein, 141 aa, Unknown
  Obtained from environmental sample
  DOMAIN (106)...(129): 4Fe-4S binding domain
  misc_feature (1)..(141): Xaa is any amino acid
MGLPCDHNPVLMAAKRREASPYKIEDVNVIGEDLSSIKISNYKFPSTVKGFSKTVEKNPVVRNILKSALTKFPVVAKGRCIGCGVCATACPQKMITMITQKGKKKAEINLKECIRCYCCHELCPHKAIDMKSKFISKALKI

SEQ ID NO: 56599 - DNA, 1353 bp, Unknown
  Obtained from environmental sample
  misc_feature (1)..(1353): n is a, c, g, or t
atgggcaaccccgaagccgcggcttccgcctacagcctctacgactatgacatagccggagagttaggcggctggggcgccctcgccaacctcagggatcgctgcatgaagcgtggaataaggctcggctccgacatggtgccaaaccataccggcatagacagccgctggatggtagaacaccctgacagatttttgcagctgccgtatccgcccttccccacctacaactacaactgcgggaatctttcgggcagggacgatataaccgttcaaatcgaagaacattattttaaccacagcgacgcggcggtcgttttaaaaaggattgacaacaacacgggccatacccgttacatctaccacggcaatgacggcacgtcaatgccatggaacgataccgcccagatagacttccttaaccccgaagcgcgcgaagcggtgatccgcacgattatcggcgtatgccagcaattctctattgtgcgctttgacgcggcaatgaccctcgccaagcggcacattcagcgcctgtggttccccgtgccggggacgggcggggccatagcaagccgcgcggaacactccatttccaacgacgaattcaaccgccgtattccaaatgaattctggcgcgaggttgtggaccgctgcgcagccgaggccccccacaccctgctcctcgccgaggccttctggatgatggaaggctacttcgtccgcacgcttggcatgcaccgcgtgtacaattcggcgtttatgaatatgctgaaaaacgaggacaacgcgaagtaccgggcgacaattaaaaacactatggaattcgatccggaaatcctcaagcgttttgtcaattttatgaacaacccggacgaggaaaccgccgtggcgcagttcggcaagggcgataaatacttcgggatttgcaccctccttgtcaccatgccgggcctgcccatgttcgggcatggccagattgagggctttgaggaaaaatacggcatggagtaccgccgcgcctaccgcgacgaaaaacccgacggttatctggtggacaggcatgagcgtgaaattttcccgctgatgaaacggcgggctctgttttcgggcagcagcgggttcaggctctacgacgtatataccgagggcggatcagttaacgagaatgttttcgcgtattccaaccgcgcctggatctacggccatgaggaaagggcgcttatcttctataataactcgtattacgagaccgccggatggattaaaaccagcgatccggcgattccgcacggcaacggaggcagacagcgggacagcctgcacgagggccctctgtctgcaccatggggataa

SEQ ID NO: 56600 - protein, 450 aa, Unknown
  Obtained from environmental sample
  DOMAIN (1)...(369): Alpha amylase, catalytic domain
  misc_feature (1)..(450): Xaa is any amino acid
MGNPEAAASAYSLYDYDIAGELGGWGALANLRDRCMKRGIRLGSDMVPNHTGIDSRWMVEHPDRFLQLPYPPFPTYNYNCGNLSGRDDITVQIEEHYFNHSDAAVVLKRIDNNTGHTRYIYHGNDGTSMPWNDTAQIDFLNPEAREAVIRTIIGVCQQFSIVRFDAAMTLAKRHIQRLWFPVPGTGGAIASRAEHSISNDEFNRRIPNEFWREVVDRCAAEAPHTLLLAEAFWMMEGYFVRTLGMHRVYNSAFMNMLKNEDNAKYRATIKNTMEFDPEILKRFVNFMNNPDEETAVAQFGKGDKYFGICTLLVTMPGLPMFGHGQIEGFEEKYGMEYRRAYRDEKPDGYLVDRHEREIFPLMKRRALFSGSSGFRLYDVYTEGGSVNENVFAYSNRAWIYGHEERALIFYNNSYYETAGWIKTSDPAIPHGNGGRQRDSLHEGPLSAPWG

SEQ ID NO: 56601 - DNA, 1140 bp, Unknown
  Obtained from environmental sample
  misc_feature (1)..(1140): n is a, c, g, or t
atgttttcgcgtattccaaccgcgcctggatctacggccatgaggaaagggcgcttatcttctataataactcgtattacgagaccgccggatggattaaaaccagcgatccggcgattccgcacggcaacggaggcagacagcgggacagcctgcacgagggccctctgtctgcaccatggggataaatggtttacgctgttcagggatcagcgctccaacctgtggtacatacgctcatcaaaacagataaacgagaacgggttctttgtcgcgcttaaaggttatgaagcgcaggtattcattgacatatacgaaattgaggatgacgcgaaaggccgctgggcgcgcctgcaccacgacttgcagggccgcggggtggacaatccccaatcggctattatggatatttatcttggcgacctgtattaccggttcttaaaacccctcaagccggagcttgttaaccagctgcacgaattctttaccgcgggtacggtggacaaacaaaaagcccatgcctttgttgaatcgcttaaagagacggcggagaagtattttgaaaccgtagcttactttattaaaggggcggacgggaagtatgaagcgtggacagggactggggactcgggactcgggactggggaaaagaaaaaaggggtgaaacaccaaacggtgtcagataagaaagaacagagaacagagaacagagaacagagaatagagccgtgggaggaatttaaggggtatgttgaaagattgattgcactggttggatatcttaacgctaccgataaaactcccgcggagcgtatgctgaaagagcttgctttgcggatgaaggagagacagcttgtctgcgccgcggccctggggtacgggctgttgtccgtgctgcggccgataatcggcaaggccgacggaagcctcactgcaaacctcgcctttgagcattgggatttggatcgcaagctgaaagaacagttcaggatctttggcgcgaacgatgacgaggtttggcggcttggggaaatctgcaaggctgttttataccgaaccggcgcggataacgcggtaaatgccggagcggcaggcagtacngcggttataacgtcgtgccgaatgctgtgcgctgggtaa

SEQ ID NO: 56602 - protein, 379 aa, Unknown
  Obtained from environmental sample
  misc_feature (1)..(379): Xaa is any amino acid
MFSRIPTAPGSTAMRKGRLSSIITRITRPPDGLKPAIRRFRTATEADSGTACTRALCLHHGDKWFTLFRDQRSNLWYIRSSKQINENGFFVALKGYEAQVFIDIYEIEDDAKGRWARLHHDLQGRGVDNPQSAIMDIYLGDLYYRFLKPLKPELVNQLHEFFTAGTVDKQKAHAFVESLKETAEKYFETVAYFIKGADGKYEAWTGTGDSGLGTGEKKKGVKHQTVSDKKEQRTENREQRIEPWEEFKGYVERLIALVGYLNATDKTPAERMLKELALRMKERQLVCAAALGYGLLSVLRPIIGKADGSLTANLAFEHWDLDRKLKEQFRIFGANDDEVWRLGEICKAVLYRTGADNAVNAGAAGSTAVITSCRMLCAG

SEQ ID NO: 56603 - DNA, 1020 bp, Unknown
  Obtained from environmental sample
  misc_feature (1)..(1020): n is a, c, g, or t
atgaaaatattttacttgatttttttgctggttctttccgctcatgcacagcttaaaggcggcggaaatctagatgtgattaaagttggcaatgcgggtattagccaaggaaagatagatagcttggtaaaacagcttgcgcttgcgcaacaagctcaagcacctggtcaaaacattcccccagaagcgatgacccagttgcgttggtttgttatagataattttgttggcgaagagcttttaaaatcggagataaaaaaacagggtttaaaggcagatgcaaaaaaagtggatagccttgcggccatattcaaaaaacaattcccaaccgatgctatttttaaacagaaattgaaagaaagcggcataacagagattgattttattaaaaaaatagagaaccaacttttggcagaacagcttttagctgcgaaaattccagccccaaaagaccctacggacaaggagaaaaaggattattgggaaaaaaataaaggcaaagcggttatcaacgattccataagcggcataaaaatagttttaaatatcgctaaaggcgaaggtgctcaggaaattcaaaacaaaaaagatgttttaaaaggttatgcagctcaggcccgtatggtaaaagccagccctatggtgattgccgagcaattcagcatgacttcggccagaatcagcgaagacccgaatgcaaaaaaagacggcggagctatggttagatttttgcctaaaagccaaggcgcggaatttgagaaagcggtaaaaaatttgaaggtaggcgaggttagcgagccttttgtgcagagtgggaacaaagttatgatatttatgctaaccgagaaaaacgatggtaaatatgaaagctatgagcatcagatagactattcattgcggcttgaagccgaggccggtcgccaactagctgttaaaaattatctgaatcagctcgccaaaacctacaaggttcaatatttgaataaagattacacaccaccggaagctatagggatgtaa

SEQ ID NO: 56604 - protein, 339 aa, Unknown
  Obtained from environmental sample
  SIGNAL (1)...(16)
  misc_feature (1)..(339): Xaa is any amino acid
MKIFYLIFLLVLSAHAQLKGGGNLDVIKVGNAGISQGKIDSLVKQLALAQQAQAPGQNIPPEAMTQLRWFVIDNFVGEELLKSEIKKQGLKADAKKVDSLAAIFKKQFPTDAIFKQKLKESGITEIDFIKKIENQLLAEQLLAAKIPAPKDPTDKEKKDYWEKNKGKAVINDSISGIKIVLNIAKGEGAQEIQNKKDVLKGYAAQARMVKASPMVIAEQFSMTSARISEDPNAKKDGGAMVRFLPKSQGAEFEKAVKNLKVGEVSEPFVQSGNKVMIFMLTEKNDGKYESYEHQIDYSLRLEAEAGRQLAVKNYLNQLAKTYKVQYLNKDYTPPEAIGM

SEQ ID NO: 56605 - DNA, 633 bp, Unknown
  Obtained from environmental sample
  misc_feature (1)..(633): n is a, c, g, or t
atgctggagacgccgtataccagggaagaattgatctttatacaacagcttatgtcttttgtgtcccaggcgctcaaaaaccacctgcactatgaacacgcgctacgggacgtgaaaaccggattatacaatcacggcttttttatgacccgcttaaaagaggaaattgtcaggacaaagcgccagccccacgcctcgtcggtaatcgtaatggatgtggataaatttaaaaatttcaacgacacttacgggcaccttgcgggagatcaggttctggaaaagctggctcaggttatcaagcagagcgtccgttcggaggatattccttcgcggtttggaggggaggaatttaccgtccttttgccctccaccgaaatctcaaccgcgtggagaatttccgaacgcctcagaaccagcgtggcggcgatgcgggtgccctgggaaacccctctgccgaaggtgacaatcagcctgggcgtgttcgcttttgacaaggacagcgagctggacactgttggcattctccgccgcgccgacgaggcgttatacgtttccaaggcaaaaggcagaaactgcagcaccgtctgggctcccggcattatcgacagcatacacaaagaacaggggcaatga

SEQ ID NO: 56606 - protein, 210 aa, Unknown
  Obtained from environmental sample
  DOMAIN (31)...(192): GGDEF domain
  misc_feature (1)..(210): Xaa is any amino acid
MLETPYTREELIFIQQLMSFVSQALKNHLHYEHALRDVKTGLYNHGFFMTRLKEEIVRTKRQPHASSVIVMDVDKFKNFNDTYGHLAGDQVLEKLAQVIKQSVRSEDIPSRFGGEEFTVLLPSTEISTAWRISERLRTSVAAMRVPWETPLPKVTISLGVFAFDKDSELDTVGILRRADEALYVSKAKGRNCSTVWAPGIIDSIHKEQGQ

SEQ ID NO: 56607 - DNA, 609 bp, Unknown
  Obtained from environmental sample
  misc_feature (1)..(609): n is a, c, g, or t
atgaatacagaaaacagcgttatggtttatgtacagcaacacgcaggcaaggccgcagaggtgagtctggaactcgtttccaaggcgcgagagctcgcggacaagctgggggcggaggttagcgccgcgcttttcggcgacaaggtgtcgggggaagtcgcccgccttgccggctacggggccgaccgcgtgtatgttatggaagacccccgcctcaaattttacacgcccattccctacagcaagctgatgatacaggtggtctccgagaagaagccccagattgtgctgtacggcgcgaccaccgagggccgggatctagcgccgcgcgtcgcgtctcacctgaaagtgggattgaccgcggactgcacggatttgcagatcggggatcacaaacagcaggataccgaatacaaaaatatcctttaccagatacgccccgcttttggcggcaacataatcgccacaatcgtgtcgcccgagaaaaagcccagatggcgacagtccgcgagggcgttatgcgaatggcagcgcccaatgcttcgcgcnaagccgaaatcgtggatgtttccgcgaaactcaccccggaggattttcccagcgaaataa

SEQ ID NO: 56608 - protein, 202 aa, Unknown
  Obtained from environmental sample
  DOMAIN (6)...(202): Electron transfer flavoprotein domain
  misc_feature (1)..(202): Xaa is any amino acid
MNTENSVMVYVQQHAGKAAEVSLELVSKARELADKLGAEVSAALFGDKVSGEVARLAGYGADRVYVMEDPRLKFYTPIPYSKLMIQVVSEKKPQIVLYGATTEGRDLAPRVASHLKVGLTADCTDLQIGDHKQQDTEYKNILYQIRPAFGGNIIATIVSPEKKPRWRQSARALCEWQRPMLRAKPKSWMFPRNSPRRIFPAK

SEQ ID NO: 56609 - DNA, 654 bp, Unknown
  Obtained from environmental sample
  misc_feature (1)..(654): n is a, c, g, or t
atgttcaatttttgcccttcgtgcgcttccaaaaagctcacctttaatgaggggaagtttttccgctgtcccgactgcggtcttgtctattatcacaatgtcgcagccgcaacaggctgtattatcacagtgccgtatgaaaacacggaacggcttgttttccttgtccgaggcaaagaaccctgtgtcggcaaactcgatctgcccggcggctttgtcgatcccggcgaaggcgttctggacggtctttaccgtgagttacgggaagaaattaactggacgccgcctatcccaaacggcgcaaaattatccgatgtcttcaaattattcgcatctttttccaacgtgtacaaatacaagggcattgattacaacacctgcgatatgtacttttctatccaagcccccgctctaaaacccgaagacctgcgccgtcaggaagccgaaatctcggatattttattcttaaaacccgaagaaatcgattttttccgattcgcttttccgtctaccgtgaaagctgtaaaacgtatctcaacatccttgactaaaattgacataagttatcaaataatattatgtatcacggaaatatgtctgcaagttcttctctccccggcgaataccgtaaaacggctgaacgcctgtttttaa

SEQ ID NO: 56610 - protein, 217 aa, Unknown
  Obtained from environmental sample
  DOMAIN (33)...(178): NUDIX domain
  misc_feature (1)..(217): Xaa is any amino acid
MFNFCPSCASKKLTFNEGKFFRCPDCGLVYYHNVAAATGCIITVPYENTERLVFLVRGKEPCVGKLDLPGGFVDPGEGVLDGLYRELREEINWTPPIPNGAKLSDVFKLFASFSNVYKYKGIDYNTCDMYFSIQAPALKPEDLRRQEAEISDILFLKPEEIDFFRFAFPSTVKAVKRISTSLTKIDISYQIILCITEICLQVLLSPANTVKRLNACF

SEQ ID NO: 56611 - DNA, 585 bp, Unknown
  Obtained from environmental sample
  misc_feature (1)..(585): n is a, c, g, or t
atgtatcacggaaatatgtctgcaagttcttctctccccggcgaataccgtaaaacggctgaacgcctgtttttaaaagacggtttttccaaagggcaaaaacccgatataaaagccgccggagaatttgccaaatctcttggcatcggcgtcgagtatcagcggttattcgcgcttgaaacaaacagcggagaattaagaacttttttggatcagtttcaaaataatctggctttgttaataaaaaaaacatgggtggaagaagccgatgaaatccgcaaaggaaaattacacgacgatattccgtcttttatgaaaactatcgagcagccgaattacataaaggcaatagaagaattcagcgtggttcttgacgaactggcttatctttttttcggcaaacaaagcgaaaaagaagattttgccgagtataccttccgaattgacgcgcaaatgggtcttttctggtggtacggaagcagactaactttattaaaggaattgaaggataaaaatattgaccaaaacgacaaatgcttatgggcggttttacttcttggtctgtgttatctgacaaatttttaa

SEQ ID NO: 56612 - protein, 194 aa, Unknown
  Obtained from environmental sample
  misc_feature (1)..(194): Xaa is any amino acid
MYHGNMSASSSLPGEYRKTAERLFLKDGFSKGQKPDIKAAGEFAKSLGIGVEYQRLFALETNSGELRTFLDQFQNNLALLIKKTWVEEADEIRKGKLHDDIPSFMKTIEQPNYIKAIEEFSVVLDELAYLFFGKQSEKEDFAEYTFRIDAQMGLFWWYGSRLTLLKELKDKNIDQNDKCLWAVLLLGLCYLTNF

SEQ ID NO: 56613 - DNA, 816 bp, Unknown
  Obtained from environmental sample
  misc_feature (1)..(816): n is a, c, g, or t
atgggctataattgggaagaccgcgaatattacgcttccgattattacgagtacctttatgaattggcaattaaaatcatcaaaaagggaaaagcttatgttgacgatttaaccgataccgaaatgagcgagtaccgaggaaccgcggtcgcagataaaaacaatatcaccataacgccgccgggcaagaacagtccctacagagatcgttctatcgaagaaagccttgacctctttgcgcggatgcgtgcgggcgaattcgccgacggcgcaaaaaccctgcgcgcgaaaatcgatatgactcaccctaacctgctcctgcgtgatcctgtcatgtaccgcatacgcagagaaacccattaccgaaccggcaattcatggtgtatctatccaatgtatgattttcagcacccgctttccgatgcgaaagagggaatcactcactctctctgctcgcttgaatacgaaattcaccgcccattgtacgaatggtttatacaagaagctgaagtttttccttcacggcagattgaatttgcccgtcttaatttgagccataccgttatgagtaaacgctggcttttaaaactcgtgcaggacaaacgcgttacaggttgggacgatccgcgaatgcccacaatagccggtcttcgccgacggggttacactcctgaggcaattcgcagttttgtttcacagattggcatcgcanagactgacagtatggtagacatagcgttccttgaatactgtcttcgcgaagacctgaacaaacgtgctttgcgtgtaatggcggttttgcgtcccttaaattga

SEQ ID NO: 56614 - protein, 271 aa, Unknown
  Obtained from environmental sample
  DOMAIN (1)...(258): tRNA synthetases class I (E and Q), catalytic domain
  misc_feature (1)..(271): Xaa is any amino acid
MGYNWEDREYYASDYYEYLYELAIKIIKKGKAYVDDLTDTEMSEYRGTAVADKNNITITPPGKNSPYRDRSIEESLDLFARMRAGEFADGAKTLRAKIDMTHPNLLLRDPVMYRIRRETHYRTGNSWCIYPMYDFQHPLSDAKEGITHSLCSLEYEIHRPLYEWFIQEAEVFPSRQIEFARLNLSHTVMSKRWLLKLVQDKRVTGWDDPRMPTIAGLRRRGYTPEAIRSFVSQIGIAXTDSMVDIAFLEYCLREDLNKRALRVMAVLRPLN

SEQ ID NO: 56615 - DNA, 381 bp, Unknown
  Obtained from environmental sample
  misc_feature (1)..(381): n is a, c, g, or t
atgaacgggagtgctatgacaaaatatgtatttgtaacaggcggagttgtttccggccttggcaagggaatcaccgccgcatctttggggcggctgcttaaacagcgcgggttaaaggtagcggcgcaaaaacttgatccgtatatgaacattgatcccgggactatgagtccgtttcagcacggcgaagtattcgttacagacgacggcgcggagactgaccttgaccttggtcattacgagcgttttattgatgagaaccttacaaaattaagcaatttgacctccggtaaggtttactggaacgtacttgaacgtgaacgggctggcggctatctcggcggtacggtgcaggttatcccgcacgtacaaaaacgataa

SEQ ID NO: 56616 - protein, 126 aa, Unknown
  Obtained from environmental sample
  DOMAIN (7)...(126): CTP synthase N-terminus
  misc_feature (1)..(126): Xaa is any amino acid
MNGSAMTKYVFVTGGVVSGLGKGITAASLGRLLKQRGLKVAAQKLDPYMNIDPGTMSPFQHGEVFVTDDGAETDLDLGHYERFIDENLTKLSNLTSGKVYWNVLERERAGGYLGGTVQVIPHVQKR

SEQ ID NO: 56617 - DNA, 615 bp, Unknown
  Obtained from environmental sample
  misc_feature (1)..(615): n is a, c, g, or t
ttgaagcaagcagcggatttggcaaaatccggtatttccataagcattgccgttcccggcacagaatctctcgcgagcgcagtttctggctcggatttgagtgaaatagataatttttccctgtggttcacagatgatgtctctgcaaacgactcgcaggtaaaacctaattcaaacaccagcaataacattaaaattttagccgcctttgcagatgcaggcgttccaaaaagcaaacttgtgccaataatcccattttatggcaaatcattttacaaagcaaatgggcttggttcttctcaccagggtgcaggttctggcaacgatggcgttttgcaatataaagaaattatggataaattcaacaaaaaagatgcctatagtgtgtcttttgacgaatcttcaaaaagcgaagttgccgtgaacgataatgaaaccatagttttcaacggcatcccctctgttaaggctattaccgatgctgttaaagcaaatggctacggcggagttgccgcgtttgatatttctggagaccgcaaagaacccataatttcgcttttggtgaccataggtcaagttttgcgccccgaaatagactacaaaaagaaaaaataa

SEQ ID NO: 56618 - protein, 204 aa, Unknown
  Obtained from environmental sample
  misc_feature (1)..(204): Xaa is any amino acid
MKQAADLAKSGISISIAVPGTESLASAVSGSDLSEIDNFSLWFTDDVSANDSQVKPNSNTSNNIKILAAFADAGVPKSKLVPIIPFYGKSFYKANGLGSSHQGAGSGNDGVLQYKEIMDKFNKKDAYSVSFDESSKSEVAVNDNETIVFNGIPSVKAITDAVKANGYGGVAAFDISGDRKEPIISLLVTIGQVLRPEIDYKKKK

SEQ ID NO: 56619 - DNA, 669 bp, Unknown
  Obtained from environmental sample
  misc_feature (1)..(669): n is a, c, g, or t
atgaggtgtgatttactgatgattaatgctgtttctacttctcaaaacgactattctctgattgtaacctcagaaaatagcaaagaggccacaaatggtgagcaaaaacgcccagatgaagaaaatctgggctataaactctctttgtccgatgaaaattggaaaactttgggcaaaaaagggaatcaggaactcagcgaagatgaccaaagaaaagtagaagaactaagaaaaatagataaaagggttcacactcacgagcaagctcatttaagcgcggcagggggatatgttcgcggtggaggagcgcagtacgattatgtgacgggaccggacggcaataaatacgcaaacgccgggcacgtgaatttagatacaagcagggaaaaaactccagaagcaaccataagaaaagcaaacataatccaaaaagccgcccttgccccagcagacccatctccggcagacaagcaaatagcggccaatgccgcaaaaatggcattagatgctcaacaagaattagtagaagaacagaaggctaaaatgaaaagttccgaaacaacaaaaacgacaaaatcggcaaaaacacccgaaacacaagaaacgccagaaacgcctgaaaccccggatgcaccgcaagtggcaacagttagcgaatccagtggctaa

SEQ ID NO: 56620 - protein, 222 aa, Unknown
  Obtained from environmental sample
  misc_feature (1)..(222): Xaa is any amino acid
MRCDLLMINAVSTSQNDYSLIVTSENSKEATNGEQKRPDEENLGYKLSLSDENWKTLGKKGNQELSEDDQRKVEELRKIDKRVHTHEQAHLSAAGGYVRGGGAQYDYVTGPDGNKYANAGHVNLDTSREKTPEATIRKANIIQKAALAPADPSPADKQIAANAAKMALDAQQELVEEQKAKMKSSETTKTTKSAKTPETQETPETPETPDAPQVATVSESSG

SEQ ID NO: 56621 - DNA, 933 bp, Unknown
  Obtained from environmental sample
  misc_feature (1)..(933): n is a, c, g, or t
atgacagagtggccgagaattcattttttgataaaccctataagcggcggtggtcagggcaaggaagtttttgcttttttgccggagattatgcgttccatggattttaaggaagatgaatggaaaagcgagtttagcgttaaagacaactttgaggagcagattaaggaggctcttgcggattctgagtgccttatagcggttgggggcgatggcactatgacggctgtgttcagcgttcttttgcggcacgaggaattcaggaacataaagattgggcttatacctcttggaacaggaaacgacctggcaagggttttgaacctatattccgcgcttgtggatagaggcttgctgtacatagttcgcaaactcgttgtggcaaagcacagggagcttgacttgtggcaggtgaatgggaaatttgcaatggcaaattatttttccgcaggcatagatgcccacattgcctacgatttcaacaaagacagagccgaggggagaatagctggaaattccgtgctaaaaaacaaattgcattatgtgaagagattttttgccaataaaaactatcatttaaaatccggggagctgcatataacagatgagtttggcaaaaagaaagtttttcctctgcaaaacaacagcacggttatagtgggaaatatcccaagctttgccggaggcagcaatccttttggaaaatccgatatggcagatggcttgctggaggttttgagaatcaaatccattccaaactttttgagagccatttcaataggggcaggtagttttgttataaaagccaaggaaattgaaattcaccttgaaaaagaggaatttatccaaatagatggagaagacttcaaaaacaagctagaaatgccaattttgataaaatttggcggaaaagtaaatatgttgcatttatag

SEQ ID NO: 56622 - protein, 310 aa, Unknown
  Obtained from environmental sample
  DOMAIN (143)...(288): Diacylglycerol kinase accessory domain
  misc_feature (1)..(310): Xaa is any amino acid
MTEWPRIHFLINPISGGGQGKEVFAFLPEIMRSMDFKEDEWKSEFSVKDNFEEQIKEALADSECLIAVGGDGTMTAVFSVLLRHEEFRNIKIGLIPLGTGNDLARVLNLYSALVDRGLLYIVRKLVVAKHRELDLWQVNGKFAMANYFSAGIDAHIAYDFNKDRAEGRIAGNSVLKNKLHYVKRFFANKNYHLKSGELHITDEFGKKKVFPLQNNSTVIVGNIPSFAGGSNPFGKSDMADGLLEVLRIKSIPNFLRAISIGAGSFVIKAKEIEIHLEKEEFIQIDGEDFKNKLEMPILIKFGGKVNMLHL

SEQ ID NO: 56623 - DNA, 852 bp, Unknown
  Obtained from environmental sample
  misc_feature (1)..(852): n is a, c, g, or t
atgaaagagaacaagggaaggtacggcgcgacaaagatggccaaggtttttggggtaagccgtagcgggtattacgcatgggagtatcgggaatcaagcaagcgcgaacaaaaagacaaagaactggccctcgtcattctgcgcatattcaaagaacatctccagcgttacgggagcccccggatttgggaagaactgaagcatctgggcattcgggtggggcggaaacgtgtggaacggctgatgcgggagcagggattatgcgccagggagaggaggaaggccgtatatacgaccgattcccgccaccggctgccattggcggagaatatcctgaaccgggatttccgggcgttgcttcccggggagaaatgggtatcggacataacgtatttgcggacaaaggaaggctggctttatttgacggtggtagtcgatctttacgacaggaaggttgtcggctggtcgatgtctgacaaccttacggccgggcagacatgcctcgcgttggaaatggcggtggggaaccgccccccgcgggaagggctcatatttcattctgaccgtggcgtgcaatactgcagcgacgaatttcgttctacgttaaaacggctttgccccacggccgtccagagcatgagccggaaagggaactgctgggacaacgcctgcgcggagagttttttcaagacattgaaagctgagcttgacattctggaaaaaggaggtagcgcgaaacaaattaaaacagcagtatttgaatatatcgaggcttattataacaggtgtcgtagacattctgctcttggatatgctataccaatagcattagcacctaacgatgcggcttaa

SEQ ID NO: 56624 - protein, 283 aa, Unknown
  Obtained from environmental sample
  DOMAIN (117)...(279): Integrase core domain
  misc_feature (1)..(283): Xaa is any amino acid
MKENKGRYGATKMAKVFGVSRSGYYAWEYRESSKREQKDKELALVILRIFKEHLQRYGSPRIWEELKHLGIRVGRKRVERLMREQGLCARERRKAVYTTDSRHRLPLAENILNRDFRALLPGEKWVSDITYLRTKEGWLYLTVVVDLYDRKVVGWSMSDNLTAGQTCLALEMAVGNRPPREGLIFHSDRGVQYCSDEFRSTLKRLCPTAVQSMSRKGNCWDNACAESFFKTLKAELDILEKGGSAKQIKTAVFEYIEAYYNRCRRHSALGYAIPIALAPNDAA

SEQ ID NO: 56625 - DNA, 411 bp, Unknown
  Obtained from environmental sample
  misc_feature (1)..(411): n is a, c, g, or t
atgggtattgtttatgcggaaataactctcagaaattcagcagatttggctatggttaaacgcggcgttatgaacgaaagcgaaatccgtgaaaaaacggttacggcaatggttgacacgggggccgcgacattggtaataaatgaagatgttcgccggcatttggggcttggagtagaaaagacctacagagcaacacttgccgatggaacgaagcaggtatactccacgactgaacctgttcaaattcaatggaaagaccgggagcatgtatgccaggcaatattgattccttccgccgatgatatacttcttggggctattccgcttgaaggaatggatctggtgattaatcctcttaaacaggaattaaccggcgctcatggggatacagtgtttttcaggatatag

SEQ ID NO: 56626 - protein, 136 aa, Unknown
  Obtained from environmental sample
  misc_feature (1)..(136): Xaa is any amino acid
MGIVYAEITLRNSADLAMVKRGVMNESEIREKTVTAMVDTGAATLVINEDVRRHLGLGVEKTYRATLADGTKQVYSTTEPVQIQWKDREHVCQAILIPSADDILLGAIPLEGMDLVINPLKQELTGAHGDTVFFRI

SEQ ID NO: 56627 - DNA, 678 bp, Unknown
  Obtained from environmental sample
  misc_feature (1)..(678): n is a, c, g, or t
atggcaaaaatactgatatgcgatgacgaacccggactgcgctctgtaataaaacgttatgcgcagtttgacgggcacgaagcggcggaggccggtaacggcatcgaagcggtggaagcctgcaaaaaagaaaagttcgacattatcatcatggatataatgatgccggaattggacgggtttgcggcagtcaaagaaatacgaaaaacatctgacgtacctattatcatgctctcagccagaggcgaagaatacgacaaagttttaggctttgagtacggagtagacgattatgtcgtaaaacctttttcatcaaaagaaataatgctcagaattgccgccatactcagacggaaaggagcggccgccttcggcggcggcggacatgagatattcacaaaagacggattctcggccgacatgacagcatataaaatgttaattgacggcaaacaggtggaactggctccgaagttatacgatttgcttttcttcctgatacggaacaggaacgccgccataccccgtgaaaaaatactgactgacgtatgggggtataaaaacattgacgatgtaagaacgcttgatacgcacatgaaacttctgcgcaaggcaatggggccgtatgccggattaatcacaaccctgcggggtcatggttacagattcgagggataa

SEQ ID NO: 56628 - protein, 225 aa, Unknown
  Obtained from environmental sample
  DOMAIN (150)...(223): Transcriptional regulatory protein, C terminal
  misc_feature (1)..(225): Xaa is any amino acid
MAKILICDDEPGLRSVIKRYAQFDGHEAAEAGNGIEAVEACKKEKFDIIIMDIMMPELDGFAAVKEIRKTSDVPIIMLSARGEEYDKVLGFEYGVDDYVVKPFSSKEIMLRIAAILRRKGAAAFGGGGHEIFTKDGFSADMTAYKMLIDGKQVELAPKLYDLLFFLIRNRNAAIPREKILTDVWGYKNIDDVRTLDTHMKLLRKAMGPYAGLITTLRGHGYRFEG

SEQ ID NO: 56629 - DNA, 1401 bp, Unknown
  Obtained from environmental sample
  misc_feature (1)..(1401): n is a, c, g, or t
atggaatatataaactggtcagaaaaaaagatacctgttacaggcagttatgatctttttatcgcgggcggcggatgcgccggggtaggcgcggctatcgcggcggggcgttcgggaataaaaacctttgcggctgaacggatgtttgcgttaggcggaactatgacctgcgctatgatgagcaaaatcgcgatttcctcctgcaatcacgggattgccgaagagctgatcaaacgcctggacgcctatcaaaaatcgaatttccttgcctcgcgtcatgaggttccggttgatccagagctatgcaagtggatgctggacagaatggttattgatgaagctggaactgaagttcgattcgggacaacgatttgcgatgtaattgccaataaccgaaagattgaatacgcgatcatcgacagcatcaacggttttgaggcggttaaagcggattactttgccgattgtaccggcgacggccagctgagttttaaggccggggcttcttattcgattggcaacgatgagggttacggctcgtctccctcgctcctgttccgtatcgccaatgtggacatagaaaaactgatttccgatatggaagcccatcctgacacttacgcttcggaacgcaacacctattccaaccacaaattacgtcccggccaaaacagggaaaatattaccaatgataaatacgcccattttgccgactttgttcccctcattcggcagaaggcaaaggagaaccccgggtttctgacagaatgggaacttgagaagatccttcagcgcgggattatcttcatgaaccagcccaagggaacccatgtactggtgaactcaaccagggttccttattttaagggcaatgacagcaaagagctttctgacgcaatggtatcgggaagaaagcagatagaagcgacattccgttttatgaaggcgtttattcccggctttgaaaaagcctttatcatggataccgcaagtatgctgggtatccgcgagtcaagacggattacaggcgattatatttttaccgacgaggatgtgaacagctgccgcaaattcgacgacgctgtggtgagcaatttcggcggcgtggaaattcacgcggccaacgggcagggtacaaagattaacgagctgggaaagggcgatttttataacgttccttaccggagcattatcgccaaagattttgacaacctgtatgtggccggccgctgtttcagcgccaatcacgccgctctctcggcggcccggaacatcgcctattgcatggcgctgggacaggccgtgggaagcgccgccgcgcagcttgtacacagagggaaaaagaacattcgggaaatcgagataaaacccctgcaaaaagaactggcttctattatgtga

SEQ ID NO: 56630 - protein, 466 aa, Unknown
  Obtained from environmental sample
  misc_feature (1)..(466): Xaa is any amino acid
MEYINWSEKKIPVTGSYDLFIAGGGCAGVGAAIAAGRSGIKTFAAERMFALGGTMTCAMMSKIAISSCNHGIAEELIKRLDAYQKSNFLASRHEVPVDPELCKWMLDRMVIDEAGTEVRFGTTICDVIANNRKIEYAIIDSINGFEAVKADYFADCTGDGQLSFKAGASYSIGNDEGYGSSPSLLFRIANVDIEKLISDMEAHPDTYASERNTYSNHKLRPGQNRENITNDKYAHFADFVPLIRQKAKENPGFLTEWELEKILQRGIIFMNQPKGTHVLVNSTRVPYFKGNDSKELSDAMVSGRKQIEATFRFMKAFIPGFEKAFIMDTASMLGIRESRRITGDYIFTDEDVNSCRKFDDAVVSNFGGVEIHAANGQGTKINELGKGDFYNVPYRSIIAKDFDNLYVAGRCFSANHAALSAARNIAYCMALGQAVGSAAAQLVHRGKKNIREIEIKPLQKELASIM

SEQ ID NO: 56631 - DNA, 660 bp, Unknown
  Obtained from environmental sample
  misc_feature (1)..(660): n is a, c, g, or t
gtggcggtgggccagttcgccatcgccctgcttctggaaatctgtcaccacatcgggcatcacgacaaggcagtccacgagggcaggtgggaaaacaacgtggactggtgtttttgggactacccactgatcgagctcgcaggaaaaacaatcggcatcatcggctttggccgcatcgggcagacaacaggcacgatagcaaaagccctgggcatgaaggtcattgcctttgacagcactcccactgacagcggcaagaagatagcggagtatgttagcctggacaagcttttcgccgagtccgatgtggttgcgctccactgccccctgttccccgaaacccagggcatcatcaacaaggccaacatcgcaaagatgaaaggcggcgtaatcattttgaacaattcacgcgggccactggtggtggaacaagacctggccgatgcccttaacagcggcaaggtatacgcggctggccttgatgtcgtttcatcggaaccaataaagggaaacaaccccttgctcaaagcgaagaactgctttattaccccacacatttcctgggcgccaaaagaaagccgccagaggcttatggatatagccgtaggcaatctggccgccttcgttaagggcagtccaataaatgtagtaaacaagtaa

SEQ ID NO: 56632 - protein, 219 aa, Unknown
  Obtained from environmental sample
  DOMAIN (8)...(187): D-isomer specific 2-hydroxyacid dehydrogenase, NAD binding domain
  misc_feature (1)..(219): Xaa is any amino acid
MAVGQFAIALLLEICHHIGHHDKAVHEGRWENNVDWCFWDYPLIELAGKTIGIIGFGRIGQTTGTIAKALGMKVIAFDSTPTDSGKKIAEYVSLDKLFAESDVVALHCPLFPETQGIINKANIAKMKGGVIILNNSRGPLVVEQDLADALNSGKVYAAGLDVVSSEPIKGNNPLLKAKNCFITPHISWAPKESRQRLMDIAVGNLAAFVKGSPINVVNK

SEQ ID NO: 56633 - DNA, 1479 bp, Unknown
  Obtained from environmental sample
  misc_feature (1)..(1479): n is a, c, g, or t
atggcaggtgagctaaaaaaaattatcgtcgtagacgacatgcctgacaatttaagcgcccttaggaataccctgaaagaaatataccagatatatccctgcccatccgcagtaaagatgtttgatttgcttgaacacgttcagccggacttaatcctgctggacgtggaaatgccggatatggacgggtatgaagcgattaaaaagctgaaaagcattgataggttcaatgaaatacccgttattttcctgacttccatgagcgacccgcaaagcgaaatagagggcctggaacttggcgcccttgattatatacgcaagccctttgttaccccgctattgattcagcggataaaaacgcatctggccattttggaacagcaggaggaaaataagcatcttcttgaattaaagacagaagaagttaaactgcgggaagcggcggaactggaggcggagaacgcgtcccgcgccaagagtgatttcctttcccacatgagccatgaaatacgctctccgctaaacgctgttataggtatgataaacatcgcagacgaagaaaaaacccttgaaggtgtaaaagtctatcttgaaaaagcgggcaacgcggcaaagcacgttttgggcgtaatcaacgatattcttgatatgtccaagattgaggcgaataaacttgagctttccgacagtgaatttgatttagggaaaatgatgacaaacatcgtggatgtaacaagtatccgcgcccaggaaaaacatatacaagttgtcgttaacatgaatccgaatattcctaccttcgttataagcgacgaattgcgcctggcgcaggtcattaccaacctgatgaccaacgcgataaaattcacgcctgaaaacggcaaggttcagttgaacgcggaaaagctggaggaaaaagacgatgaagttacactaagaatagaagtcgcggacagtggcatcgggatttcgcctgaacagcagtcaaaacttttctccgcttacaaccaggccgaccgcaccatcgcgaaacaattcggcggcaccgggctggggcttgcgatttccaaacggattatagaactcatgcagggaaaaatttggattgaatcggaacttggcaagggcgcgaaatttatattcaccttaaaaatgaaaaagggaacacaaggcgcaagtaatgatataactgccaacgcgcctgcgtccggaataaaggcgaccgatttacatttacagagttataccatattggtggcggaagacatggatttcaacagggaggtattatcgaagtttctggaaaaaaccggcgtcaccattgattttgccgaaaacggcaaagaagctgttgaaaagttcaaggcgaattatgaaaaatacagcctgatttttatggacgtaaatatgccggaaatggacggagatgaagcgacaaagataatacgggcgctaggtataagaaagcctcgcccataa

SEQ ID NO: 56634 - protein, 492 aa, Unknown
  Obtained from environmental sample
  DOMAIN (158)...(223): His Kinase A (phosphoacceptor) domain
  misc_feature (1)..(492): Xaa is any amino acid
MAGELKKIIVVDDMPDNLSALRNTLKEIYQIYPCPSAVKMFDLLEHVQPDLILLDVEMPDMDGYEAIKKLKSIDRFNEIPVIFLTSMSDPQSEIEGLELGALDYIRKPFVTPLLIQRIKTHLAILEQQEENKHLLELKTEEVKLREAAELEAENASRAKSDFLSHMSHEIRSPLNAVIGMINIADEEKTLEGVKVYLEKAGNAAKHVLGVINDILDMSKIEANKLELSDSEFDLGKMMTNIVDVTSIRAQEKHIQVVVNMNPNIPTFVISDELRLAQVITNLMTNAIKFTPENGKVQLNAEKLEEKDDEVTLRIEVADSGIGISPEQQSKLFSAYNQADRTIAKQFGGTGLGLAISKRIIELMQGKIWIESELGKGAKFIFTLKMKKGTQGASNDITANAPASGIKATDLHLQSYTILVAEDMDFNREVLSKFLEKTGVTIDFAENGKEAVEKFKANYEKYSLIFMDVNMPEMDGDEATKIIRALGIRKPRP

SEQ ID NO: 56635 - DNA, 633 bp, Unknown
  Obtained from environmental sample
  misc_feature (1)..(633): n is a, c, g, or t
atggcggaaatgggatctgagtttatcccgataaaacaaaggagggggatttccacgcgccgaccggagactcgcgggnctttttatatgctgcgcgaaagcatgaatttcaaatactatgaagacaatcgggcgcaggccgtttcgcttagttttatgcagggcggcggaatgagcgtcatactccctaaaaccggcgccggaagcgcggaggatttgtattcttccatgacaaaggacggcttcactgaaatccgaagaaattcggttttggcggaaggcaaactggcgttgccgcgtttttccatagacaacgatgtcaaaggcttagtggacggccttaaggcgctgggggttccgttgtttgaccgagaaggccccatcacaaatttgattgaggaaagaatccgtttagcggtgacaagcgtggcgcagaaagcggttatcaaggtagatgagaaaggcacgaccgccgccgccgtaacggtaattgggataagcggcaacagcgttccgcaaccccaaagaaattttgaaatgatttgcgacaggccgtttgtgtttgttctatacgatagtacttatgacggaggcgatcaaatactgtttacgggcatcgtgaataagccgtag

SEQ ID NO: 56636 - protein, 210 aa, Unknown
  Obtained from environmental sample
  DOMAIN (1)...(210): Serpin (serine protease inhibitor)
  misc_feature (1)..(210): Xaa is any amino acid
MAEMGSEFIPIKQRRGISTRRPETRGXFYMLRESMNFKYYEDNRAQAVSLSFMQGGGMSVILPKTGAGSAEDLYSSMTKDGFTEIRRNSVLAEGKLALPRFSIDNDVKGLVDGLKALGVPLFDREGPITNLIEERIRLAVTSVAQKAVIKVDEKGTTAAAVTVIGISGNSVPQPQRNFEMICDRPFVFVLYDSTYDGGDQILFTGIVNKP

SEQ ID NO: 56637 - DNA, 2754 bp, Unknown
  Obtained from environmental sample
  misc_feature (1)..(2754): n is a, c, g, or t
atgttagaaaaatttataaaggctctgtttggctcccaacacgagagggatcttaaagctctgctgccgatattacattctgtcaatgaaaaagagtcctgggccgcggctctgcccgccgatgaatttccgaaacagactgcaaaattgcgcgagcgctgccaaaaaggcgaaagcctggatattcttttgccggaggcttttgccctggcgcgtgaggcggcaaggcggaacctcggcgagcgcccctacgacgtgcaggtaatgggttccattgttctgcaccagggcaagatcgtcgaaatgaaaacaggcgagggcaaaacattgatgtccgtcgccgcggcctatttgaacgccatacccggcaagggcatacatattgtaactgtcaatgattacctggcaagccgggacgccgagtggatgcggcctattttcagctatctgggcatgactgtcgggacgattctttccgatatggacaatgacaggcgcagggaaaactacgcttgcgacattacctacggcaccaacaacgaattcggttttgattacctgcgcgacaatatgcaccgcgaaatggagagaagggtgcagcgcgggcataactattgcattgttgacgagattgattccatccttatcgacgaggcccgcaccccgctgatcatttcaggcgccgcggaggatgataccttcaaattcgccgaggttgacaggcttttaggcagcctgaaggaagtcgaaaagaagcaaaacggcgaatatccggatgaaacccagggtgagcaggttgtcggcgattacaagatcaacgaaaagaataaaaatgtttcttttagcaaccagggtcttgccgccattgagaagattctgcagaagcgcggacttattcagggggccattgttgacgagggtaattttgaatacatacactactttacccaggcgctgaaagcccacaaactttttcacctggacgttgactacgtggtacaggacggtcaggtacagattgttgatgaatttaccgggcgcattttgcacggcaggcgttattcggacggtttgcaccaggcaatagaggcaaaagagcggattaaaatcgcccagcgcaatcgtactctggcgactatcaccttccagaattatttcaggctctactcgaaaatttcaggcatgacgggcacagcggataccgaggccgccgaattcagcaagatatacaaactcgaggttgtggttatcccgaccaacctgccggtcgcgcgtctggacgaggacgatgtggtgtacctgaacgagaccgacaagtacaaggccctttgcgatgaaatcgccgaggcgaacaaaaaaggccagcccatgctggtcggcacggtctcaatagagaaatcggagaagatctccgccctgctcacaaggcgcggcgtgcgccacgaggtgcttaacgccaagaaccacgcgcgcgaggcgctgataatagcggaggcgggcgcgaagggatcggtgacaatcgccaccaacatggcgggacgcggcacggacatcaaattgggcggcagccccgaatcccgcgccagaaggcgcgccggcacacaggcgacacccgaacaatacgcggaaatatacaaagaagaatacgcgaaatggaagaaggactatgaggaagtaaaatcggttggcggcctgtacgtcatcggcacggaacgccatgagagcagacgtatcgacaaccagctccggggccgttctggcaggcagggggatcccggcaggagcaaattctttatatcaatggacgacgagcttatgaggctgtttggcggcgagaaaatgaagaacgtcatgtccaggataggcatggagggcggcgagccgatttatcatccctggctgaacaagagcatagagaacgcccagaaaaaagtcgaggaaaggaacttcgagattcgcaagcatcttctggattacgacgacgtgctcaaccagcagcgcaaatttatttacgaacagcgcgacgccatcctgcttgacaaggatttgaaaaacagggtgaacgacgccaccgcaggccttgtgggcgagttgattgacgatttcaaccgggaacaaaggcaggacatggccgccgccctgaaaaatctgaaagaacagctccgaaccaaattcggctatcagttaacgcttgatcagaacgaagccaggaattccgacttgcttgaaaagaaaatcatcgccgatcttgaaaaggacattagcgacaaggaagcccttatcggcccggactatctcaacatgattataagggacagctatcttcacgcgattgacaataaatggcttgatcacctggaaaacatggaggcgctgcgcgaagccgtttacctgcgtcattacgcccagaaaaatcccttgacggaatacaaggtggaaggcttccagatttttgacagcatggtcgatgacatacgccaggagatagcgtcacgccttcaccttgtgaggattcaagtcgcgcccgcgggcgacgcccgcaggcccagccgcacaatcgccacatcgcagtcggcgagccacagcagcatggggtctttcggcggcgccggggggcgcggttccgcctctcctatgggcgcggcgagccgccccgacggcgcgaccgttatacgcagccaacccaaagtaggccgcaacgacccctgcccctgcggcagcgggcggaaatacaaacactgccacggaaaataa

SEQ ID NO: 56638 - protein, 917 aa, Unknown
  Obtained from environmental sample
  DOMAIN (899)...(917): SEC-C motif
  misc_feature (1)..(917): Xaa is any amino acid
MLEKFIKALFGSQHERDLKALLPILHSVNEKESWAAALPADEFPKQTAKLRERCQKGESLDILLPEAFALAREAARRNLGERPYDVQVMGSIVLHQGKIVEMKTGEGKTLMSVAAAYLNAIPGKGIHIVTVNDYLASRDAEWMRPIFSYLGMTVGTILSDMDNDRRRENYACDITYGTNNEFGFDYLRDNMHREMERRVQRGHNYCIVDEIDSILIDEARTPLIISGAAEDDTFKFAEVDRLLGSLKEVEKKQNGEYPDETQGEQVVGDYKINEKNKNVSFSNQGLAAIEKILQKRGLIQGAIVDEGNFEYIHYFTQALKAHKLFHLDVDYVVQDGQVQIVDEFTGRILHGRRYSDGLHQAIEAKERIKIAQRNRTLATITFQNYFRLYSKISGMTGTADTEAAEFSKIYKLEVVVIPTNLPVARLDEDDVVYLNETDKYKALCDEIAEANKKGQPMLVGTVSIEKSEKISALLTRRGVRHEVLNAKNHAREALIIAEAGAKGSVTIATNMAGRGTDIKLGGSPESRARRRAGTQATPEQYAEIYKEEYAKWKKDYEEVKSVGGLYVIGTERHESRRIDNQLRGRSGRQGDPGRSKFFISMDDELMRLFGGEKMKNVMSRIGMEGGEPIYHPWLNKSIENAQKKVEERNFEIRKHLLDYDDVLNQQRKFIYEQRDAILLDKDLKNRVNDATAGLVGELIDDFNREQRQDMAAALKNLKEQLRTKFGYQLTLDQNEARNSDLLEKKIIADLEKDISDKEALIGPDYLNMIIRDSYLHAIDNKWLDHLENMEALREAVYLRHYAQKNPLTEYKVEGFQIFDSMVDDIRQEIASRLHLVRIQVAPAGDARRPSRTIATSQSASHSSMGSFGGAGGRGSASPMGAASRPDGATVIRSQPKVGRNDPCPCGSGRKYKHCHGK

SEQ ID NO: 56639 - DNA, 942 bp, Unknown
  Obtained from environmental sample
  misc_feature (1)..(942): n is a, c, g, or t
atgaatgtaacccccatgcaggggcttctgtaccagcctgttcccgaatatgagaatcatctgtttgcggaactgcaaaaaccccaggacgggctttcccccattggaaatatcctgctccatgaccctggcgaaactgatacccctgttttctggtacagaaacctctggctaaaaccattccgcctggaattcacctccataaacgaagcggctgatgtcttacgcggcatacagcgcaactgggcggcgctcccattcacccaattccggcgcgccgcgttaatagaggcaaaactgccgcctgtcagcgcgaaaaagcgccccttcccctggcttatgggagagtcccccatgggcgcgtggacgctcattgatcggcatacaatgattgcgagcgccgcctgttccagtcctttccctaatggcataatcgaattcgcccaggacaaagaagggccgcctagccgcgcttacctgaagctctgggaggctttagtccgcctgcgccgctggcccaaacaaaatgaccgctgtcttgacgcgggagccagccccggcggctggacatgggcgcttgcggggcttggagctaatgtccttgccgttgaccgcgccccgcttgaacccggcattgccgccctgcccaacgtcgaatacatccgccacgacgccttcaccctaaagcccgaagacataggccctatagactggctgttctgcgacgtagcctgctaccctccccggctctaccaatggatagaaaaatggcttgagtccggcctatgcggtaatttcgtctgtacaatcaaaatgcaaggcggcgtccaagacatagactttgaaacgcccagacgttttgccgcaatccccaacagcgaggtggtccacctgtaccacaacaagcatgaactgacatggacaatgagcaatgagcagtga

SEQ ID NO: 56640 - protein, 313 aa, Unknown
  Obtained from environmental sample
  misc_feature (1)..(313): Xaa is any amino acid
MNVTPMQGLLYQPVPEYENHLFAELQKPQDGLSPIGNILLHDPGETDTPVFWYRNLWLKPFRLEFTSINEAADVLRGIQRNWAALPFTQFRRAALIEAKLPPVSAKKRPFPWLMGESPMGAWTLIDRHTMIASAACSSPFPNGIIEFAQDKEGPPSRAYLKLWEALVRLRRWPKQNDRCLDAGASPGGWTWALAGLGANVLAVDRAPLEPGIAALPNVEYIRHDAFTLKPEDIGPIDWLFCDVACYPPRLYQWIEKWLESGLCGNFVCTIKMQGGVQDIDFETPRRFAAIPNSEVVHLYHNKHELTWTMSNEQ

SEQ ID NO: 56641 - DNA, 885 bp, Unknown
  Obtained from environmental sample
  misc_feature (1)..(885): n is a, c, g, or t
atgcggacgcaaaggcccggtcagcgccgcggcgtacctattcttgcgccaattgttcaagcgcaaaagctccttgaccgctacctcaaggcagagttgcaagcggctttgattaactctctgttctcggtagtagtgacctctgaaaccccccaagcaatggccggagaatttggcttatcggagcctgatgatccaaatgataaaagaacccccagccagcgtttctatgataactatgggagcatagaaatgggtcccggtacggttgcattcgccgcgcctggcgacagcgtaacgccggtgaatgttacccgcccacatagcaacttcacaccgtttatcgacgcacagcttcgtatgattggcgcagcggtaggcgtaccgtttgagatgattgtgcagatgttcagcacgtcgttttccgccagccgcgccgcgatgaacatggcgacgactaatttcagagttatcagagactggctgacttattcattctgccaaccggtttatgaggcttttttagccgagtgcgtggcggtcggatatattcaaataccgggcttttttgacaacgagatcatcagacgggcgtgcagccttgccaagtggagcggcccgggtacgctgcagattgacgcgcaaaaagaattagccgcttatgagaaagctatcggattaggacttacttcacgcacacaggcatcgtctgaatataacggttctgattttcggcaaaatgcgtccgcgctttatgccgaacagcaaatcataaataaagctccgtggaatccgataccgttagctaaaacagataatgtcatagaagataaagaaggaggcggagaggttgccgaaactaaacccgctggcacagcagactaa

SEQ ID NO: 56642 - protein, 294 aa, Unknown
  Obtained from environmental sample
  misc_feature (1)..(294): Xaa is any amino acid
MRTQRPGQRRGVPILAPIVQAQKLLDRYLKAELQAALINSLFSVVVTSETPQAMAGEFGLSEPDDPNDKRTPSQRFYDNYGSIEMGPGTVAFAAPGDSVTPVNVTRPHSNFTPFIDAQLRMIGAAVGVPFEMIVQMFSTSFSASRAAMNMATTNFRVIRDWLTYSFCQPVYEAFLAECVAVGYIQIPGFFDNEIIRRACSLAKWSGPGTLQIDAQKELAAYEKAIGLGLTSRTQASSEYNGSDFRQNASALYAEQQIINKAPWNPIPLAKTDNVIEDKEGGGEVAETKPAGTAD

SEQ ID NO: 56643 - DNA, 432 bp, Unknown
  Obtained from environmental sample
  misc_feature (1)..(432): n is a, c, g, or t
atgaagagtgactatgaccgcgccatagcggattacactgagtcgatacggattaaacccaattacgcggatacctttaacaaccggggcattgcgtacagaaacaagggcgattatgaccgcgccatcgcggattacactgaggcgatacggattaaccccaatttcgcgaatgcctataacaaccggggcattgtgtactacaacaagaaagactatgaccgcgccatcgcggattacaatgaggcgatacggattgaccctaattacgcggatgcctattacaaccggggcattgcgtactacatgaaaaaagactatgacaaggcaatagccgacaacgaagccgccctgcggataaatccaaaccatgccaatgccaagaagtggcttgaaaacgcccgggaagaagccaagacgggcagcagatag

SEQ ID NO: 56644 - protein, 143 aa, Unknown
  Obtained from environmental sample
  DOMAIN (91)...(124): Tetratricopeptide repeat
  misc_feature (1)..(143): Xaa is any amino acid
MKSDYDRAIADYTESIRIKPNYADTFNNRGIAYRNKGDYDRAIADYTEAIRINPNFANAYNNRGIVYYNKKDYDRAIADYNEAIRIDPNYADAYYNRGIAYYMKKDYDKAIADNEAALRINPNHANAKKWLENAREEAKTGSR

SEQ ID NO: 56645 - DNA, 444 bp, Unknown
  Obtained from environmental sample
  misc_feature (1)..(444): n is a, c, g, or t
ttgaaggttgcgaccaaagcatacggcctgattgacgttgacgaacgccaaaagctcatctttccccagggcctgtttggttttgaggaactcagggactacctgcttctcgacgcggaacgccagcctttctactggctgcagtcaatggatgaggaagatgtggcgtttatccttgtcaacccttttcttttccggcctgattacgaggttaacatcagcaacgaggagcttgccgggataggcatccgttcgccggagaaggccctgattttttccatagtaaccatacctccggacggcagtcccatgacagctaaccttcaggggccgctgattatcaaccgtgataccaggatgggaaaacaggcggttctgtcagatgaccgctggaagaccaagcatgacattatggctgaactcgcggtgacggggaatcagtaa

SEQ ID NO: 56646 - protein, 147 aa, Unknown
  Obtained from environmental sample
  DOMAIN (17)...(140): Uncharacterized BCR, COG1699
  misc_feature (1)..(147): Xaa is any amino acid
MKVATKAYGLIDVDERQKLIFPQGLFGFEELRDYLLLDAERQPFYWLQSMDEEDVAFILVNPFLFRPDYEVNISNEELAGIGIRSPEKALIFSIVTIPPDGSPMTANLQGPLIINRDTRMGKQAVLSDDRWKTKHDIMAELAVTGNQ

SEQ ID NO: 56647 - DNA, 663 bp, Unknown
  Obtained from environmental sample
  misc_feature (1)..(663): n is a, c, g, or t
atgaattgcctctctgcaaaagatgatgcttttatacgcccttctccctccggttcttctttgggtggggtggcgcaaaaaactcgcgagtcaattctcctttgcgaggcagcaggttattccacaattttaatagaaactgttggcgttggacaaagcgaaaccgccgtacatggaatgacagatttctttttgcttttgatgcttgcgggcgcaggcgatgaactgcaaggcataaaacgcggcataatggaaatgtgcgatggcatggccataacaaaatgcgatggacaaaatatcacaaaagccctagccgcccgtagcgaatatcaaaacgcattgcacttattcccagcagcacaaagcggctggtctccaaaagttatagccacatcttctgttaccaaagaagggctcccagaagtttggcaaatgataactgaatttgaaaacacagttaagcaaaataactggttttatcaaaacagaaaagaacagcaaaaaaactggatggaaaacacaatacacgatagcttgatgttcaacttttacaaacaccccgatgtgcaaaaagaacttcccttggcagaacaagccgttttggaaggcagggaaagcccgttcaaggcagcaaatagattgctcagttatttttctcgctaa

SEQ ID NO: 56648 - protein, 220 aa, Unknown
  Obtained from environmental sample
  DOMAIN (1)...(188): ArgK protein
  misc_feature (1)..(220): Xaa is any amino acid
MNCLSAKDDAFIRPSPSGSSLGGVAQKTRESILLCEAAGYSTILIETVGVGQSETAVHGMTDFFLLLMLAGAGDELQGIKRGIMEMCDGMAITKCDGQNITKALAARSEYQNALHLFPAAQSGWSPKVIATSSVTKEGLPEVWQMITEFENTVKQNNWFYQNRKEQQKNWMENTIHDSLMFNFYKHPDVQKELPLAEQAVLEGRESPFKAANRLLSYFSR

SEQ ID NO: 56649 - DNA, 744 bp, Unknown
  Obtained from environmental sample
  misc_feature (1)..(744): n is a, c, g, or t
ttgaaaggcattcttttagctgggggcgcgggttctaggctttatcctttgagcgcggtggcaagcaagcaactgcaacccgtgtacgacaaaccgattatttattatcctctttccacgctgatgctcggcgggataagggatattttgctgataagcacaccagttgatttgccgcgctttgagagcttgcttggcaacggaaaccaatggggtttaaatattcaatatgcagctcaaccaaaaccagaaggcatagcgcaggcttttttgatagcagaagattttattaaagaccaatcttgcacactgattttaggcgataatattttttacggggcttttgatttatacggtataatggcagatgcaaaaaatttcacaggtgcgcgcatactaggctatgcggttaacgaccctgagcgttatggagttgttgaatttgatgcaaacggcaaagccctttctttagaagaaaaaccggcaaagccaaaaagcaattacgcagttccgggtttatatgtttacgacaaaacagttttggaaaaagccaagtctctaaaaccaagcgcaagaggcgaacttgaaataacagatataaacaaaatgtatttgcaagagggaaccttgtttgtgaaaaaaatagggcgcggagttgcgtggctagatacaggcacccatgcatcccttttggaagcgagcaatttgtttatacccttgaatccagacaaggtcttaaaatag

SEQ ID NO: 56650 - protein, 247 aa, Unknown
  Obtained from environmental sample
  SIGNAL (1)...(21)
  DOMAIN (2)...(241): Nucleotidyl transferase
  misc_feature (1)..(247): Xaa is any amino acid
MKGILLAGGAGSRLYPLSAVASKQLQPVYDKPIIYYPLSTLMLGGIRDILLISTPVDLPRFESLLGNGNQWGLNIQYAAQPKPEGIAQAFLIAEDFIKDQSCTLILGDNIFYGAFDLYGIMADAKNFTGARILGYAVNDPERYGVVEFDANGKALSLEEKPAKPKSNYAVPGLYVYDKTVLEKAKSLKPSARGELEITDINKMYLQEGTLFVKKIGRGVAWLDTGTHASLLEASNLFIPLNPDKVLK

SEQ ID NO: 56651 - DNA, 417 bp, Unknown
  Obtained from environmental sample
  misc_feature (1)..(417): n is a, c, g, or t
atggttcttggctatcagggcaaaaccccaagagaaccggataaggaaattgtccgaattgcaagcgaacagatgaagaaacccgtgttcacaggcaatcctctggatgttcttgaacccggaattccaaaagccaaaaaagttttggaagaaaataaattgccaacaacggatgaaaacattttcataatcggtgcgatggcaaccaaaggcggcaacaaaggtttggatttcttgcagggcaaagccagagtgagcgttcccaaaaagaaacccgctgctcctgctgcggccgcacctgctgctgcgccagctgcaactcctgcatctccactggtttttgctcccattagtggcaccgttaattatggcgttaccgttggcggaaaaacattcagtgtgcaggttagcgggtaa

SEQ ID NO: 56652 - protein, 138 aa, Unknown
  Obtained from environmental sample
  misc_feature (1)..(138): Xaa is any amino acid
MVLGYQGKTPREPDKEIVRIASEQMKKPVFTGNPLDVLEPGIPKAKKVLEENKLPTTDENIFIIGAMATKGGNKGLDFLQGKARVSVPKKKPAAPAAAAPAAAPAATPASPLVFAPISGTVNYGVTVGGKTFSVQVSG

SEQ ID NO: 56653 - DNA, 576 bp, Unknown
  Obtained from environmental sample
  misc_feature (1)..(576): n is a, c, g, or t
atggctgagactttacgcggcggtctttccctgggcctttcaggatttggtttctggagccacgacatcggcggttttgagggaacccccaacgccgccctgttcaaacgctggcttgcctttggactactttcctctcattcgcggcttcacggcagtacctcttaccgcgttccgtggagcgtggacgaagaatccgccgaagtctgccgcttctttaccgaattgaagctccgccttaaaccgtatattctgcgctctgcccgcgaggcctgcgatcggggcattccggtgttacgcgcaatgtttcttgagttcccggatgatccagcctgcgcgtatctggatcgccagtatatgcttgggccggatctgctggttgcccctgtcttcagcgaagacggaaaagtttcgtattacctgcccgaaggcgaatggacaagactcctgaccggagaaaaagttaagtccggctctgccggacacggcggctgctggaaaacagaacagcacggctttttaagcctgccgcttttagtgcggggtgatggcggacagcgcgaattgatcctatag

SEQ ID NO: 56654 - protein, 191 aa, Unknown
  Obtained from environmental sample
  DOMAIN (1)...(187): Glycosyl hydrolases family 31
  misc_feature (1)..(191): Xaa is any amino acid
MAETLRGGLSLGLSGFGFWSHDIGGFEGTPNAALFKRWLAFGLLSSHSRLHGSTSYRVPWSVDEESAEVCRFFTELKLRLKPYILRSAREACDRGIPVLRAMFLEFPDDPACAYLDRQYMLGPDLLVAPVFSEDGKVSYYLPEGEWTRLLTGEKVKSGSAGHGGCWKTEQHGFLSLPLLVRGDGGQRELIL

SEQ ID NO: 56655 - DNA, 930 bp, Unknown
  Obtained from environmental sample
  misc_feature (1)..(930): n is a, c, g, or t
ttgtcaaagatttgtttatgccttaccggcaaaacactgaaacaggatgttgaactgctgaataaataccgcagctacgccgacatagccgagttacgtgtcgactgtctggaaccgggcgagcgtttatatatccgccgatttcctgaacttgccggcattccggttattctgactgtcaggcgcgatgttgacggcggctattttacaggcggcgagggcgcaagattaaaattactcgcaaacgggcttgcgtacgcaaacgccgacagccgctttaacttcgcctacgttgatattgaggaagattttaacataccaagccttgaagaagcggcgcgcacgttcggaacaagaattatccgctcatgccatgacttagacggaagcgttaccgatatcgccgcaaaaatgaaatcaatgaaacacgcgggagatgaaatagtaaaagtggctgtcgccgtaaaaaacacccatgacgttttaaatgttttccgcgcgtcgggctcttttaccaatcaggataaaattcttatttgcatggggcattacggaatttattcaaggattcttgcggaaaaattcggctcttttttaacttattcaagcgcgttatctgaaaacgttatccccggcgctcccgggcaaatggatgtaaaagagctttcagaattgtaccgtttccgtaaaataacaaaaaaaacaaaaatatacggaattataggcaacccgttaaaaaaaagcgtcagcccctggtttcataacactattttaaatcttgaagatgcggatgccgtatatgtcccctttccgataaccgacatcggtgattttatggaactcgctaaaggcttagatattcaggggctttcggttaccgtcccttacaaggaagcgattcttccgtatcttgggaaaaatcggaaatag

SEQ ID NO: 56656 - protein, 309 aa, Unknown
  Obtained from environmental sample
  DOMAIN (240)...(304): Shikimate dehydrogenase substrate binding domain
  misc_feature (1)..(309): Xaa is any amino acid
MSKICLCLTGKTLKQDVELLNKYRSYADIAELRVDCLEPGERLYIRRFPELAGIPVILTVRRDVDGGYFTGGEGARLKLLANGLAYANADSRFNFAYVDIEEDFNIPSLEEAARTFGTRIIRSCHDLDGSVTDIAAKMKSMKHAGDEIVKVAVAVKNTHDVLNVFRASGSFTNQDKILICMGHYGIYSRILAEKFGSFLTYSSALSENVIPGAPGQMDVKELSELYRFRKITKKTKIYGIIGNPLKKSVSPWFHNTILNLEDADAVYVPFPITDIGDFMELAKGLDIQGLSVTVPYKEAILPYLGKNRK

SEQ ID NO: 56657 - DNA, 1263 bp, Unknown
  Obtained from environmental sample
  misc_feature (1)..(1263): n is a, c, g, or t
ttgcgaaaaatcggggcaagaggaagcttatataacatgaagacgccccgcgttaacaaaaacaaacgcgtcatattaatatcaacggcgatagccgccgttgtcttcgccgttgcggccctctcaagcggctgttgctacattgccaaacagggtgtgggcctcattgcccgccaaaaccgcaccgtatccatagacaagatgctcagggacgacggcggcgccaaagatgttgctccggagatgcgtgaattcctgctgcgggtcggcgacattcgttctttcgcgatggacaccctcggactcaaacgcaataacaattacaaaaaatacctccgcgttgacaaagactatgccgtcgatgtcgtgactgcttccaaggacgacgcttttgtgccgtacaagtggtggtttccggtggtcggcagcattacctacaagggtttctttgacaagacggatgccgagagagaagtaagtaggatcaagaagaaaggcggttacgatatatacatggggcgtgccgacgcgttcagcacgcttgggttcttcagcgaccccatatactcgttcatggcgaactacagcgtgtacgacttagcgtcgctcatcatccatgagcagacccacgcgaccgtgtacgtgaggaaccagacgcagttgagcgaggagatcgccacatttgtcggggatgttggcggactgctgtacgtggagaggcggtttggggcggagtcggaggagtatcgggcggcggttctgtctaaggaagattacgcgacgtacatcggcttgatgcggtggctgcacggcgagcttacggcgctttacgggggggattacgggcgtgagcgcaagcttttggagaaggagcggatattcacggatttcaggggcagggtgtcgagcggatatgactcgttgttcaggacgcccaggtacgctgggttgaaggaggctaagcttaacaatgcggtgattgcggctaggatgacgtataatatggatatggcgttgtattatgaattgtatgatagcgagggagaggatttggcggcggtcataaaaaagttggcggcgcttaaaaaggttaagggggagtataaagagtatatcaggggggatgataaaaaagtcaaattcaaatcacgctctgccctctccgccgacatcaagacccgtccgccccgcaaccccatagggcggctgccgcccgatcactcccactccaccgtagcgggcggcttagacgtaatgtcgtag

SEQ ID NO: 56658 - protein, 420 aa, Unknown
  Obtained from environmental sample
  misc_feature (1)..(420): Xaa is any amino acid
MRKIGARGSLYNMKTPRVNKNKRVILISTAIAAVVFAVAALSSGCCYIAKQGVGLIARQNRTVSIDKMLRDDGGAKDVAPEMREFLLRVGDIRSFAMDTLGLKRNNNYKKYLRVDKDYAVDVVTASKDDAFVPYKWWFPVVGSITYKGFFDKTDAEREVSRIKKKGGYDIYMGRADAFSTLGFFSDPIYSFMANYSVYDLASLIIHEQTHATVYVRNQTQLSEEIATFVGDVGGLLYVERRFGAESEEYRAAVLSKEDYATYIGLMRWLHGELTALYGGDYGRERKLLEKERIFTDFRGRVSSGYDSLFRTPRYAGLKEAKLNNAVIAARMTYNMDMALYYELYDSEGEDLAAVIKKLAALKKVKGEYKEYIRGDDKKVKFKSRSALSADIKTRPPRNPIGRLPPDHSHSTVAGGLDVMS

SEQ ID NO: 56659 - DNA, 1305 bp, Unknown
  Obtained from environmental sample
  misc_feature (1)..(1305): n is a, c, g, or t
ttgggtattcccattcttggcatttgctacggaatgcatttaatgtgctatacgctcggcggcaaagttgaatcgggcgatgtcggcgaatacggacgagttccggtaactcccgttagaaaatcaaaattattaagcgacgtaaaaaaaccgtttaccgcgcttatgagccacagggattccgttacgcgaatgccggaaggtttttacataacggcaaaaacttcttcctgcatcgccgcctgcgaaaacgccgcgagaaaactttacaatacgcaattccaccccgaaacgaaacacaccaaaggcggaaaaaaaatcatcagccggtttttattcgatatatgcggcgctaaaggcgattacagactggataattatattgatactcagacaaaaaaagtgcgaaaaaaaatcggcgaaaaaaaagttctgctcgctctgtccggcggcgtggattcttccgtatgcgcaagtcttttatccaaagcgataccgggacagctaacctgtatctttgtggatcacggtcttatgcgtttaaacgaaggcgacgagatagaaaaagttttttccaaaaggaatcttcgctttatccgcgttaacgcgaaagagcgctttctttcaaaattaaagggtgtgtcggaacctgaggcaaagcgtaaaataatcggcgaagaatttatccgcgtattcgaggaggagtccgcaaagttaggcgacatcccgtttttggcgcaggggacgatctaccccgacatagtcgaatccggcggaatctacggcgccacgatcaagagccaccacaacgtcggcggcctccccaaaaacctgaaattcaccggcgtagtggaacccctctccggcctcttcaaagacgaagtccgcatcctgggcaggaaactcggattgccggcctccctggtcaaccgccaacccttccccggccccggcctggccatcagagtcgtgggcgaggtcacggaggaaaaactgaacgtcctgcgcaaagccgacgcgatactgcgcgaagagctggacggcgccaaaaacaggccggatcaatacttcaccgtgctgaccgacagctgctcggtgggcgtaaagggcgatgagagaacatacagccccgtaatagccgtccgcgccgtaataacaggcgatttcatgacgtgcgactacgcccctatcccgcataaaacactaggccgcgtatcgtcaagaatcacaagcgaaatcccgtccgtgagccgcgtggtctacgacattacgtctaagccgcccgctacggtggagtgggagtga

SEQ ID NO: 56660 - protein, 434 aa, Unknown
  Obtained from environmental sample
  DOMAIN (2)...(115): Glutamine amidotransferase class-I
  misc_feature (1)..(434): Xaa is any amino acid
MGIPILGICYGMHLMCYTLGGKVESGDVGEYGRVPVTPVRKSKLLSDVKKPFTALMSHRDSVTRMPEGFYITAKTSSCIAACENAARKLYNTQFHPETKHTKGGKKIISRFLFDICGAKGDYRLDNYIDTQTKKVRKKIGEKKVLLALSGGVDSSVCASLLSKAIPGQLTCIFVDHGLMRLNEGDEIEKVFSKRNLRFIRVNAKERFLSKLKGVSEPEAKRKIIGEEFIRVFEEESAKLGDIPFLAQGTIYPDIVESGGIYGATIKSHHNVGGLPKNLKFTGVVEPLSGLFKDEVRILGRKLGLPASLVNRQPFPGPGLAIRVVGEVTEEKLNVLRKADAILREELDGAKNRPDQYFTVLTDSCSVGVKGDERTYSPVIAVRAVITGDFMTCDYAPIPHKTLGRVSSRITSEIPSVSRVVYDITSKPPATVEWE

SEQ ID NO: 56661 - DNA, 609 bp, Unknown
  Obtained from environmental sample
  misc_feature (1)..(609): n is a, c, g, or t
atggacgaattatttaacgaaaaaaacaaatctttagccaatcctcttgcggatagaatgcgtccgcgcgttctggaagacattataggccaggatcatatagtaggccagggaagacttctgcgccgcgccattcaagccgaccgtctttcttcaataatcctatatggtccgccggggacggggaaaacgtcccttgcggcggttatcgccaatacaacccgcgccgcttttgaaaaattaaacgccgttctttccggtgttaaagacatccgcgaagtaatagaccgctcagacgaccgtttcaggctttacggcaaaagaaccatcctgtttgtagacgaagtccaccgctggaataaagcccagcaggacgcgcttcttccatgggtggaaaacggcaccgtaattcttgtcggcgcgacgactgaaaatccctttttcgaggtaaaccgcgcccttgtcagcagaagcagaattttccagctaaaacccatgggacagcctgaattgcttgaaaccgcccggcggacgcttgcggacaaagaacgcggttacggaaaatggaatatcagttttgaagaagggcgctttggaacacattgttga

SEQ ID NO: 56662 - protein, 202 aa, Unknown
  Obtained from environmental sample
  DOMAIN (52)...(201): ATPase family associated with various cellular activities (AAA)
  misc_feature (1)..(202): Xaa is any amino acid
MDELFNEKNKSLANPLADRMRPRVLEDIIGQDHIVGQGRLLRRAIQADRLSSIILYGPPGTGKTSLAAVIANTTRAAFEKLNAVLSGVKDIREVIDRSDDRFRLYGKRTILFVDEVHRWNKAQQDALLPWVENGTVILVGATTENPFFEVNRALVSRSRIFQLKPMGQPELLETARRTLADKERGYGKWNISFEEGRFGTHC

SEQ ID NO: 56663 - DNA, 1212 bp, Unknown
  Obtained from environmental sample
  misc_feature (1)..(1212): n is a, c, g, or t
atgaaagcggacgccgacgcggtggcaagactatttgggcggcgtactgagcttagcaccgccttacagggacttcagcagcagcgcaataacaacgcggcggcaatgaagggaaaaatggaagccgctgagaggacggctttagttgaggaagggaaaaagctaaaagagtcaatagcggccgccgaagcggaactaggccaggtggaggcggagcttgaaaaagaggctctgaagatacccaacatggcccacccttccgctcctgtcggaaaagaagaaaaggacaatctggaagttaagcgttttggggagccaaaaaagttcgactttgagccgctggatcatgtcgctattgggcaaaacctggacattattgactttgattcggcgacaaaggtgtcgggcatcaagttttattacctgaaaaacgaaggggtttttcttgagttggccctggtgcgctatgccctggatattttgcaaaaaaagggttttaccccctttattacccccgatgtggccagggaagaaatccttgaaggtattggctttaacccgcgcggcgcagaatccaatgtttacggccttgagggcgagggaacctgccttgtcggcacggcggaaataacccttggcggctattactcaaacatgatcctgccgaaggaaaaactcccgatacgcatggccgggatttcccactgtttccgccgcgaggccggggccgccggacagttctcgaaaggcctgtaccgcgtgcaccagtttaccaagctggaaatgttcgtgtactgcctgccggaagaatccggtaaattccatgaagaattacgcctaatagaagaagagatttttaagggccttgacattcccttccgcgtggtagacacctgcaccggcgaccttggcgcgcccgcctaccgcaaatgggaccttgaggcgtggatgccgggccgcaacggcggcgaatggggcgaagtgacatcgacttcaaactgcaccgactaccagtccaggcgcttgaatatacggtacaaggacgacgacggcaaaaacaagttcgtacaccttttgaacggcacggcaatagccatatcaagggccatcatcgccatacttgaaaacttccagatagaggacggttccgtgcggatccccgcggcgcttgtcccctatgtcgggtttgacataataaggagaagggactag

SEQ ID NO: 56664 - protein, 403 aa, Unknown
  Obtained from environmental sample
  DOMAIN (1)...(84): Seryl-tRNA synthetase N-terminal domain
  misc_feature (1)..(403): Xaa is any amino acid
MKADADAVARLFGRRTELSTALQGLQQQRNNNAAAMKGKMEAAERTALVEEGKKLKESIAAAEAELGQVEAELEKEALKIPNMAHPSAPVGKEEKDNLEVKRFGEPKKFDFEPLDHVAIGQNLDIIDFDSATKVSGIKFYYLKNEGVFLELALVRYALDILQKKGFTPFITPDVAREEILEGIGFNPRGAESNVYGLEGEGTCLVGTAEITLGGYYSNMILPKEKLPIRMAGISHCFRREAGAAGQFSKGLYRVHQFTKLEMFVYCLPEESGKFHEELRLIEEEIFKGLDIPFRVVDTCTGDLGAPAYRKWDLEAWMPGRNGGEWGEVTSTSNCTDYQSRRLNIRYKDDDGKNKFVHLLNGTAIAISRAIIAILENFQIEDGSVRIPAALVPYVGFDIIRRRD

SEQ ID NO: 56665 - DNA, 312 bp, Unknown
  Obtained from environmental sample
  misc_feature (1)..(312): n is a, c, g, or t
atgattgaaccaaaagtactaaaaggtttcagggattttttgcccgcggcggaaatggtacgtcgcaatctgacagaaaaaatcgagtattcgctgcgctctttcgggtttgtgcctatcgacacccccgcgcttgaatacgcggaaatacttctgggcaagggcgggggcgaaaccgaaaagcagatctaccgctttacggataacggcgggcgcgatgtcgcgctccgtttcgatctaaccgttcccttcgcccgcttcaccgcgcttcaccagcaggaacttgcctttcccttcagcgttaccatatag

SEQ ID NO: 56666 - protein, 103 aa, Unknown
  Obtained from environmental sample
  misc_feature (1)..(103): Xaa is any amino acid
MIEPKVLKGFRDFLPAAEMVRRNLTEKIEYSLRSFGFVPIDTPALEYAEILLGKGGGETEKQIYRFTDNGGRDVALRFDLTVPFARFTALHQQELAFPFSVTI

SEQ ID NO: 56667 - DNA, 984 bp, Unknown
  Obtained from environmental sample
  misc_feature (1)..(984): n is a, c, g, or t
gtgtggcgcggggagaacacccagcggggccgttaccgtgaattcacccagtgtgattttgacattataggcagcgacagccccgcggcggatttcgagattattctgatgatccgcaccacgctgatggacttggggctcaacgtggatataaaaatcaaccacaggggcctgttcaaccgtttcctctctcatatagggcaattggaaaattccgttgaaatactccgtactgtagacaaaatttccaaagtcggcatggatgaaacaatgaaaacccttaccggtattgccggggacgcgaacgggcaaaagatacttgaatatatcaacgcgggggcggaggaaaaagccgcctccttcgaactgacgcttgatcgcataacgcagctttcaggcggaccttcccccgaatcggaacgcttacgcctgctccaccgatttatgaaagatacaggagggacattctcccttgacccttcgattacgcgggggcttgattactataccggcgttgtgtttgaaacatttttaacagagcttcccgaaatcggctcaatatgctcaggcgggcgttacgacaaccttgccggcctttatacaaagaacgcgatcagcggggtgggctcttccatcggccttgaccgcatgatcgccgcccttgaaagcctgaacaaactgcccccttcaagcggatttgcaatagccgctatcgcctgtgtaaagcaggaagactcagggttataccaggcccttgccggcaaattccggcgcgacggcatcccctgcgaagtttttacggactcgggcgacagcaaaaaccttgtcaaacaatttgtgttagctgaaaagaaaggctatcaatgggtgattatccccggcgaggagcccctgcacagcccgcttaccctgcgtaaccttgtaacaaggaaaaaccaggaaaatctgtctgtagaaaaagttgtaagcattattaaaaattag

SEQ ID NO: 56668 - protein, 327 aa, Unknown
  Obtained from environmental sample
  misc_feature (1)..(327): Xaa is any amino acid
MWRGENTQRGRYREFTQCDFDIIGSDSPAADFEIILMIRTTLMDLGLNVDIKINHRGLFNRFLSHIGQLENSVEILRTVDKISKVGMDETMKTLTGIAGDANGQKILEYINAGAEEKAASFELTLDRITQLSGGPSPESERLRLLHRFMKDTGGTFSLDPSITRGLDYYTGVVFETFLTELPEIGSICSGGRYDNLAGLYTKNAISGVGSSIGLDRMIAALESLNKLPPSSGFAIAAIACVKQEDSGLYQALAGKFRRDGIPCEVFTDSGDSKNLVKQFVLAEKKGYQWVIIPGEEPLHSPLTLRNLVTRKNQENLSVEKVVSIIKN

SEQ ID NO: 56669 - DNA, 399 bp, Unknown
  Obtained from environmental sample
  misc_feature (1)..(399): n is a, c, g, or t
atgggacagaattcggcacgagtgcagcgcatagtggctgaacttaccgatgccatagttgacgtaggcgtttacgcccgcaggcgcgacgcatttacggcagttctggatgaagccggaattgaatacgccgttccggaaggggcgttctatttattctgcaaggttccttcgaagaagggcagttctaaagaaccagccgtttctaacgaaccggccgcttctaaagaaccgggcgatgatttggaatttgtgaaccacttgaaacaatacttgattctgggcgttcccggaacaggtttcggcaaacccggctggcttcgtttcgcgtactgtgtggacgagaaaaacataagagcaagtgcagaggcgtttaaacgcgcgatggaggaatggtaa

SEQ ID NO: 56670 - protein, 132 aa, Unknown
  Obtained from environmental sample
  misc_feature (1)..(132): Xaa is any amino acid
MGQNSARVQRIVAELTDAIVDVGVYARRRDAFTAVLDEAGIEYAVPEGAFYLFCKVPSKKGSSKEPAVSNEPAASKEPGDDLEFVNHLKQYLILGVPGTGFGKPGWLRFAYCVDEKNIRASAEAFKRAMEEW

SEQ ID NO: 56671 - DNA, 1395 bp, Unknown
  Obtained from environmental sample
  misc_feature (1)..(1395): n is a, c, g, or t
gtgcgaggcgaccgcatagatatttaccctagctatgacgatattggacttcgcattgaactctttggcgatacgatagaaaaactctcttggttccatttggtatctggcgagaccataaaagaagttggcgaaattgttgttgctcctgcaaaacattttgtaaccagagaagagagcagaaatagaataataaatagaattcaaaaagaactggatatgagattgtacgaattgcaagcagaaggcaaagatttggaagcagctcgattaaacagccgcgctcattatgatatggaactcataagagaaacaggaatttgcccagggatagaaaactattcgcgaattgtagaaaacagaagaccaggcaccagacccttcacgcttttggattattttggcaaagactggcttatgattattgacgaatcacacgccagcattccgcaggttggtgccatgagcgagggcgacaaggttcgcaaaacaactcttgtggaatacggctggcgcctgccctgcgccttggataaccgccctatgaacttcacggaatttgagtatgaaatgccaaaaaacgtgctttttgtcagcgcaacgcccgcagattacgaactcaaaaaaacagttggaaatattgttgaacaaataaaccgtcccacgggtttgctagacccaaaaattgatgttatgccagtggaagggcaaatgaaagacttgctctcacatataacagcaaccgtttcagatggaaatagggttcttgtaacaacgcttacaaaaaaaatggctcaagacttaacggattttttactggacaaaaggataaaagcgagatatttgcacagcgatattaaaactctagacaggcacgggattatacgcgaccttaggattggaaaatttgatgttttggttgggataaatcttttgcgcgagggcttggatttgccagaagttgctttggttgctgttttggatgcagacaaggaaggttttctaagaaactacaaaagcctcattcaaactatgggcagggcgagcagaaatgtgaaaggcagggttattctctacgcagacaaaatgaccgactctatgaaaaaagccattctggaaacaaaccgccgccgaaacaagcaaattgaattcaacagacaacacaatataaccccaaaaaatgtgcagagaaagctggaagatttaatggaaattcaagaccccttaatggatgttcgtggcaaaaataagaaaattggcgataaacggaaaaaggattcaagttcagacaatattgaggaattggagcaggcaatgaaaacggcggcagcgcggcttgattttgaagaagcggcacggattagggatattattcgtaccttaacgcctcaatag

SEQ ID NO: 56672 - protein, 464 aa, Unknown
  Obtained from environmental sample
  DOMAIN (429)...(464): UvrB/uvrC motif
  misc_feature (1)..(464): Xaa is any amino acid
MRGDRIDIYPSYDDIGLRIELFGDTIEKLSWFHLVSGETIKEVGEIVVAPAKHFVTREESRNRIINRIQKELDMRLYELQAEGKDLEAARLNSRAHYDMELIRETGICPGIENYSRIVENRRPGTRPFTLLDYFGKDWLMIIDESHASIPQVGAMSEGDKVRKTTLVEYGWRLPCALDNRPMNFTEFEYEMPKNVLFVSATPADYELKKTVGNIVEQINRPTGLLDPKIDVMPVEGQMKDLLSHITATVSDGNRVLVTTLTKKMAQDLTDFLLDKRIKARYLHSDIKTLDRHGIIRDLRIGKFDVLVGINLLREGLDLPEVALVAVLDADKEGFLRNYKSLIQTMGRASRNVKGRVILYADKMTDSMKKAILETNRRRNKQIEFNRQHNITPKNVQRKLEDLMEIQDPLMDVRGKNKKIGDKRKKDSSSDNIEELEQAMKTAAARLDFEEAARIRDIIRTLTPQ

SEQ ID NO: 56673 - DNA, 717 bp, Unknown
  Obtained from environmental sample
  misc_feature (1)..(717): n is a, c, g, or t
ttgtcagccgtacttggggaacggaactatctttcaagggcgatgaaaataaattcttccgatccacagacaaattacaatatggctgtagttaagctggaactgaaaaaaaacagtgaagcgcttagttatgctaagttagcggtagatgcgaatccttccaatgcggtttatgtttatactttaggactcgcgtgcgaagcaattggcgcttttgagcagtccgtttcggcgtataaaaaagccgcgtctatggacgcgaaatacctgcgtcctagaattaatcttggcagtatttatcttgcaaacggaaattattcggaggctatttcatggcttaacgaagcgtatgcgattgattcttcaaattttgaagtaaataacaatttaggcgcagtttacgcgaaacaggaaatttggtcttccagcattgtctattatgagcgcgctttgaatattaagcagaatgattccatagtacgccttaatctcgcgcgcgcctatacgggagcgggcgatcttcaaaaagcgcagaatgcttatcaggcggtactgcgtgtggctcccgacaactgggacgctatgtacgagcttggaatgacatgcgtaacgcttggacagaacgctgacgcgaaacgttatttgcaggatttggttagcagaaacccgaattattccggtaaagcggaagcggaaaggattctaagaagtctatga

SEQ ID NO: 56674 - protein, 238 aa, Unknown
  Obtained from environmental sample
  DOMAIN (124)...(157): Tetratricopeptide repeat
  misc_feature (1)..(238): Xaa is any amino acid
MSAVLGERNYLSRAMKINSSDPQTNYNMAVVKLELKKNSEALSYAKLAVDANPSNAVYVYTLGLACEAIGAFEQSVSAYKKAASMDAKYLRPRINLGSIYLANGNYSEAISWLNEAYAIDSSNFEVNNNLGAVYAKQEIWSSSIVYYERALNIKQNDSIVRLNLARAYTGAGDLQKAQNAYQAVLRVAPDNWDAMYELGMTCVTLGQNADAKRYLQDLVSRNPNYSGKAEAERILRSL

SEQ ID NO: 56675 - DNA, 648 bp, Unknown
  Obtained from environmental sample
  misc_feature (1)..(648): n is a, c, g, or t
atgttatttacaccgtttgaaattaaagaaacagtagatatgtttatgcgttacaaactggacatacgcgccataacgcttggtgtttctttgttggattgcattagttctacgggagatgttacgcgaaaaaaaatacgagaaaaacttttgcgcgtcgccggtccgcttgttaaaacaggctgtgatattgaaaccgaatacggtattccgataattaataagcgcatatccgttactccaatttcacttgtcgccgcttcctgtgaggatgaaaattatacgccgttcgctaaaacaatggatgagaccgcgaaagaactcggcgttgattttatcggcggcttttcagcccttgttcaaaaggggatttcatcgggcgatgaaaaactgattaagtctttacctgacgcgctttcatcgacggaaagaacatgcgcttccgtgaatgtcgcgtcttcaaagagcggtattaacatggacgcccgtgcgtcttatgggagagacaataaaaaaaatagccgaagcgaccgcggacagaagcggcatcggttgcgcgaaattggttgttttctgcaacgcccccgaagacaatccctttatggcgggagcttttcacggagtaggggaggccgagagcgtacttaa

SEQ ID NO: 56676 - protein, 215 aa, Unknown
  Obtained from environmental sample
  DOMAIN (1)...(215): Uncharacterized ACR (DUF711)
  misc_feature (1)..(215): Xaa is any amino acid
MLFTPFEIKETVDMFMRYKLDIRAITLGVSLLDCISSTGDVTRKKIREKLLRVAGPLVKTGCDIETEYGIPIINKRISVTPISLVAASCEDENYTPFAKTMDETAKELGVDFIGGFSALVQKGISSGDEKLIKSLPDALSSTERTCASVNVASSKSGINMDARASYGRDNKKNSRSDRGQKRHRLREIGCFLQRPRRQSLYGGSFSRSRGGRERT

SEQ ID NO: 56677 - DNA, 564 bp, Unknown
  Obtained from environmental sample
  misc_feature (1)..(564): n is a, c, g, or t
atgcctatcgccatctcatcggcgataattgcggcgattgtcgccgctgacgtttcaccgggaagggggatcatgtccagccctacggaacagacgcaggtcatcgcttcaagtttatcaagggagagtgagccgtttttgaccgccgccaccatgccttcgtcctcggaaactggaataaacgcgccggaaaagccgcctacatgggtagacgccattactccgcctttttttaccatgtcggttaacatagcgagagcggcggtcgttccgtgggttccggctgcttcaaggccgatttcttcaagtattcgcgcgactgagtcccctaccgcgggagtcggcgcaagcgaaagatccaaaatgccgaagggaacccctattctgcgggcagcttcaaacccgacaagctgtcccatgcgcgttattttaaaagcggtttttttgattgtgtcagctaacgcgtcaaagttcatctcacgacaattttcaagcgccgcttttatcacgccgggtccggaaactcccacgttaagtacgctctcggcctcccctactccgtga

SEQ ID NO: 56678 - protein, 187 aa, Unknown
  Obtained from environmental sample
  SIGNAL (1)...(16)
  misc_feature (1)..(187): Xaa is any amino acid
MPIAISSAIIAAIVAADVSPGRGIMSSPTEQTQVIASSLSRESEPFLTAATMPSSSETGINAPEKPPTWVDAITPPFFTMSVNIARAAVVPWVPAASRPISSSIRATESPTAGVGASERSKMPKGTPILRAASNPTSCPMRVILKAVFLIVSANASKFISRQFSSAAFITPGPETPTLSTLSASPTP

SEQ ID NO: 56679 - DNA, 810 bp, Unknown
  Obtained from environmental sample
  misc_feature (1)..(810): n is a, c, g, or t
ttggcaatgacgcccgacagcggagcgcgcggataccaaaaatcttttttctgcgggagcgaatggatgagcttgtctgaagacatatcacaggaagatatcgattcacaaaataacattgaccccctgagcggtattgaaagcgggcaatcggaaaacgtggcaaacagcttgttttctggcgatatgggggaactgcctttggatacacggcgcacgctggtacaattattgtcaggtccgtctctggatgaacgcagacattcaaaactctggtctgttcttttacgtgatgagaatatcatccgacgacgtcttgccgatttatttctggaattagtcatagaccgtgatcttcaagtcgctttcacccgtcagtttgacacaggcgatttagaagacgcaaagttacttcgcagatctcagttgacttttattgattctgtactccttctctacttacggcagcaactggcgcaagccgcctcacacggagaacgcgcagttgtatcaaaggaagaaattgtagaaaatctcaaaatatatgagaaaaccggaagtactgacaaagccggatttgataagcgaattcacgcgtcaattgagaagcttaaaaagaataacattatacaaaaaattcgctccagtgatgatcgctttgaggtttcaccgactttgaaactgctgttctctgcggaggaaattcaagctttatcaaaactttatcaacgcatagccgaagacggactgcagaaccacgaagacgcaccgcaagaagaagaggactataagttcgaggaagaagaatga

SEQ ID NO: 56680 - protein, 269 aa, Unknown
  Obtained from environmental sample
  misc_feature (1)..(269): Xaa is any amino acid
MAMTPDSGARGYQKSFFCGSEWMSLSEDISQEDIDSQNNIDPLSGIESGQSENVANSLFSGDMGELPLDTRRTLVQLLSGPSLDERRHSKLWSVLLRDENIIRRRLADLFLELVIDRDLQVAFTRQFDTGDLEDAKLLRRSQLTFIDSVLLLYLRQQLAQAASHGERAVVSKEEIVENLKIYEKTGSTDKAGFDKRIHASIEKLKKNNIIQKIRSSDDRFEVSPTLKLLFSAEEIQALSKLYQRIAEDGLQNHEDAPQEEEDYKFEEEE

SEQ ID NO: 56681 - DNA, 663 bp, Unknown
  Obtained from environmental sample
  misc_feature (1)..(663): n is a, c, g, or t
gtgatgtcccgcgagttcgtcacgcagctggacgtgaacgacaagcgcttcctcttgcgtatgacgcgcagcctacttgaacagggtggggctgttcatgaagtattgcagacctttgcacgcagcctcaaacactttgttcagagccgcgaataccttgagcagcggcgcttaaaccagctcttgaaagacgcggaacacacggccctttcgctcaaggatgagcttaaggcgacagaagagcttaaatacacgcttgtgctgaccagcagccgcatccgatcattgtctcaatgggtgctttacgatccgtctctccaggccttgcctgacggaatgcgggatggggatgcttcaaacatggatttggaatctgtaggagaattgcttgcccagtcggagatagattttcgatctctcaaggcgaatgtacgcgacgtgctagaaaacctttcccaggcgtcaatccatgacgtgcttgaacagcatcccgcatctcagggactgggcagcgttgttgggcttatcgcgctgggcagccggcacggtgtaacgtcagagaaccgggagacagtttcctgggttggcaatgacgcccgacagcggagcgcgcggataccaaaaatcttttttctgcgggagcgaatggatgagcttgtctga

SEQ ID NO: 56682 - protein, 220 aa, Unknown
  Obtained from environmental sample
  misc_feature (1)..(220): Xaa is any amino acid
MMSREFVTQLDVNDKRFLLRMTRSLLEQGGAVHEVLQTFARSLKHFVQSREYLEQRRLNQLLKDAEHTALSLKDELKATEELKYTLVLTSSRIRSLSQWVLYDPSLQALPDGMRDGDASNMDLESVGELLAQSEIDFRSLKANVRDVLENLSQASIHDVLEQHPASQGLGSVVGLIALGSRHGVTSENRETVSWVGNDARQRSARIPKIFFLRERMDELV

SEQ ID NO: 56683 - DNA, 1071 bp, Unknown
  Obtained from environmental sample
  misc_feature (1)..(1071): n is a, c, g, or t
atgaaagcggccattgtcgggcttgggcgcatcgccagcctgcttgaggaagacagcctgcgggaaaaaccctgcacccacgccggggcaataacagccaaccaggactgcgagcttgttgccggatgcgatattgacgaagaacgccgtagtttattcacgcaaaaatggcaagttcccgtgtacgttaacgctgctgaaatgctccgcgtacacaaaccgcaaattctggcaattgccacccacccggacagccattaccattactgccgccttgccgcggagatgggggtacaggtggtgatctgcgaaaaacccctggccggcaatatcggtgaagcgcggaaaatcgcacggctggcgaaaaacggccttgttatcattaccaaccacgaacggcgctattcggaagattacgcctgcgcaaaggcaatccttaacagtggaaaacttggtggccttttaagcgtgcgggccgtcctctacatgggcatgacaaagcggctcctggacgtgctctggcacgacggaacccatcttgcagacgcgatcatgttccttacaggcatgagcctgaaacacaaaaaacgccggggcgcgaaactttcagctaacgccgggacggcatggctggaagctgaattaacaattaggagtgaggagttaggaattaggaataggcttcctgttccgccttccactttcttatctcgccttattcctcattcctcattcctaattcctcatttttccttcgtccccattaatattgaaattggggcggggcgggatcaccttgtgtttgaaatggaattttcctgcgagaaaggccggctgagaatcggcaacggggtctttgaggtttgggaaagcgtcccaagtccctacgcggaaaaattccgttcgctcaggcaaacagacgaaaaattcaacgggccgactggttactttgccaacatggtaaaagacgcagtcgcctgcgtgaaggagccgggcagacaaccccgttccggcgccgccgacggcctaagggtcatagagtaccttcatccagtaaaggcctggggataa

SEQ ID NO: 56684 - protein, 356 aa, Unknown
  Obtained from environmental sample
  DOMAIN (1)...(131): Dihydrodipicolinate reductase, N-terminus
  misc_feature (1)..(356): Xaa is any amino acid
MKAAIVGLGRIASLLEEDSLREKPCTHAGAITANQDCELVAGCDIDEERRSLFTQKWQVPVYVNAAEMLRVHKPQILAIATHPDSHYHYCRLAAEMGVQVVICEKPLAGNIGEARKIARLAKNGLVIITNHERRYSEDYACAKAILNSGKLGGLLSVRAVLYMGMTKRLLDVLWHDGTHLADAIMFLTGMSLKHKKRRGAKLSANAGTAWLEAELTIRSEELGIRNRLPVPPSTFLSRLIPHSSFLIPHFSFVPINIEIGAGRDHLVFEMEFSCEKGRLRIGNGVFEVWESVPSPYAEKFRSLRQTDEKFNGPTGYFANMVKDAVACVKEPGRQPRSGAADGLRVIEYLHPVKAWG

SEQ ID NO: 56685 - DNA, 372 bp, Unknown
  Obtained from environmental sample
  misc_feature (1)..(372): n is a, c, g, or t
atgaaaaaaggccttaattattacctgaatcttccatacagcttcaaaattgaatggagtgatgttgatacctgttatattgctactgttgaggaaataccggagtgtcagtcaaacgggaatacgccggatgaagctctctgtatgattaaagacgcgctcaagtcccatattagctgttgcttgcattatggtgattcaattccggaaccggtaaaaattgtggattataaagggaagattcactttcgcacaactccgcaaaaacattatatgctcgacaagcaggcaaaaatatcaggtgaaagcattaataccattattaacaccgccatagactgctattttaacaataatactgcacaggcataa

SEQ ID NO: 56686 - protein, 123 aa, Unknown
  Obtained from environmental sample
  DOMAIN (12)...(60): Uncharacterised protein family (UPF0150)
  misc_feature (1)..(123): Xaa is any amino acid
MKKGLNYYLNLPYSFKIEWSDVDTCYIATVEEIPECQSNGNTPDEALCMIKDALKSHISCCLHYGDSIPEPVKIVDYKGKIHFRTTPQKHYMLDKQAKISGESINTIINTAIDCYFNNNTAQA

SEQ ID NO: 56687 - DNA, 810 bp, Unknown
  Obtained from environmental sample
  misc_feature (1)..(810): n is a, c, g, or t
gtggactctgaagcctacgatgacagccaaggtgaactatttggcgggcctggtaatgataacaatattgaatattattccaatatcagagaaacggatattgcgattgtcacggggatgcattcggaaaccgggattgacttttctgttttgcagcctgaaatccttcgtttttacgagctttcagttgacgccttctgcgcggttgtcaatgcctggatgagcgagcttccggtcacagggcagataatccggtttggtaaaaaagtccttgcatctcaaaaaacgattaccggcaataacggatcagctcaacgcggaaagattgaaacaatgcggcgtaaagcggcgaaaatagccgcgactgaccgcggcgatccggatgcgcaggctgtgcgggaagcggcatacaaagtgtggcatgaaatcaacaggttaaccggtcttctgcgtttttgtcccgatgaaaaaggcgtgtatacagcccaatgcgagccggatcattttgtgctgcccgctttgggcccgcatttcatggaacgctttggtgaaacgccctgggctataattgataataagcgccgcctcagccttagctgtgaaacgggacagccatgcgcttccggtaaagcccttgtattttcagccaataccgaaaacatgatatcttttgaaaaagggcagacaggcgaatgggagaatctgtggaagcattaccataaaaccatcaacaacgaaagcaggaataaccctgatctgcaaaaacgattcatgcccacacgctactggaaatacttaacagaggtgtaa

SEQ ID NO: 56688 - protein, 269 aa, Unknown
  Obtained from environmental sample
  misc_feature (1)..(269): Xaa is any amino acid
MDSEAYDDSQGELFGGPGNDNNIEYYSNIRETDIAIVTGMHSETGIDFSVLQPEILRFYELSVDAFCAVVNAWMSELPVTGQIIRFGKKVLASQKTITGNNGSAQRGKIETMRRKAAKIAATDRGDPDAQAVREAAYKVWHEINRLTGLLRFCPDEKGVYTAQCEPDHFVLPALGPHFMERFGETPWAIIDNKRRLSLSCETGQPCASGKALVFSANTENMISFEKGQTGEWENLWKHYHKTINNESRNNPDLQKRFMPTRYWKYLTEV

SEQ ID NO: 56689 - DNA, 495 bp, Unknown
  Obtained from environmental sample
  misc_feature (1)..(495): n is a, c, g, or t
atgcatgaaaagttacgcgaggacatagaactggtaaactccaactacggcggtatcggaagaggattggggcaactcgtggaacttatagtcgttcccaaaatacgcctcgacatcaataagttcggacacgaatttaagcgcacccgcgcaaacaagatatttcgcctcaatcgccatacgccaaaccgcaaagaaacaaccgtggaagtcgatctgttcctatacaacggcacggaaacaatggccgttgagataaagaccagcctatcggtgcaagacgtggaaaaacacattaaccaactcaaaacgatgcgcaaatacgaagacgaaacggatatgcaaggcaaaaaactctacggggcgatagtcggagtgttcgtggattaccacgcccgcaaacttgcgatgaaaaacgggctgtacattttggagatcatcgaagaagaaaaccgcctgaaaacatcggcgccgaaacgggcgcgcgcttggtag

SEQ ID NO: 56690 - protein, 164 aa, Unknown
  Obtained from environmental sample
  misc_feature (1)..(164): Xaa is any amino acid
MHEKLREDIELVNSNYGGIGRGLGQLVELIVVPKIRLDINKFGHEFKRTRANKIFRLNRHTPNRKETTVEVDLFLYNGTETMAVEIKTSLSVQDVEKHINQLKTMRKYEDETDMQGKKLYGAIVGVFVDYHARKLAMKNGLYILEIIEEENRLKTSAPKRARAW

SEQ ID NO: 56691 - DNA, 1029 bp, Unknown
  Obtained from environmental sample
  misc_feature (1)..(1029): n is a, c, g, or t
atgacagattggccganccttaccgcacgcgttgcggagcttataactcggctcagcgagacgcaggggccgctggcgctctcggaactggggtggctcgattacaaggtctctatgctctttcttgaaagcgtcaaaaacgtgctctccggcgtgccaaaagccatcggcgcgccgcactacgccgtgctgaacaagcctacgctctggaagggcgctaccggcgagaatctgcagcagagcagctggaacctcaccgtgggcgacgaggtctttctggccaacgccttgggcgtgccggtgctcaccgagtttctacgccacaatatcctcgccggagggtcgggtgtactgcccaccgttccgggcagcattactgtcgccaagcatacgatgggagtagggcttttcgtcaatatcggagtcgtctcccggatgaccgttatcgacaacaacacgcagaccctgctcttcgagtcggacacggggccgggaaccgttatcatagacaagtgcgcgcaagaggcggagtgcgccgacggatttgaccgcgacggcgctctgaccgccacgggcgcccccaacgccgagtgcctcgagatattggccgccgacccgtggataaccaaagccgcgcccaaacaagcgtcgccggagatattttcgcacctgctcaaccacccatgtctcaagtccctgtccctagtagacaagctagcgacggtcacggcgctcacggccaagagcatctacgacttctaccgcagggagtacaaggaggcggcgcaaccatcggcgctctggatatccggcggaggcgcccaacacttggcgctggtcgatttccttaaagcctcgttcgaccccataccggtgcgcagcgtggaagacctgaacgtcccgcccgacatgaaggtcccgttgacgctcgccctgacggtcgacgcgttcgtctgcggaaaagagatcccgtgggagtcggggagcaaccccaaaatcaaaccgctgggacggtgggcgcttccgtag

SEQ ID NO: 56692 - protein, 342 aa, Unknown
  Obtained from environmental sample
  DOMAIN (2)...(332): Uncharacterised protein family (UPF0075)
  misc_feature (1)..(342): Xaa is any amino acid
MTDWPXLTARVAELITRLSETQGPLALSELGWLDYKVSMLFLESVKNVLSGVPKAIGAPHYAVLNKPTLWKGATGENLQQSSWNLTVGDEVFLANALGVPVLTEFLRHNILAGGSGVLPTVPGSITVAKHTMGVGLFVNIGVVSRMTVIDNNTQTLLFESDTGPGTVIIDKCAQEAECADGFDRDGALTATGAPNAECLEILAADPWITKAAPKQASPEIFSHLLNHPCLKSLSLVDKLATVTALTAKSIYDFYRREYKEAAQPSALWISGGGAQHLALVDFLKASFDPIPVRSVEDLNVPPDMKVPLTLALTVDAFVCGKEIPWESGSNPKIKPLGRWALP

SEQ ID NO: 56693 - DNA, 1425 bp, Unknown
  Obtained from environmental sample
  misc_feature (1)..(1425): n is a, c, g, or t
ttggattcactgacaggtgatattgttttttcctactcccgctgtatttatgacaacaacgggaatcgtgtaggcgttgtcgctttagatatagaggcagggcatatcggtgaaaaggtcgctaatacctctcttaccaaaggcggttacggaatattgaccagccaggatttaacggtaattggccatataaacacggattttctcggaatgaaaatgtacgacccgagaatccccgtttcatttttaactgatgaattggtacgcacggaaaaaataacaggcgccgaatgggttaactggagaggcgaaaaggtcgttggttttttaaagacgctttccaacggatggactttaggccttttggcgccaaaatatatatattttaaacctgtatataaaatggcgctgaccctcagtttattgggcggggcgcttgcctcggtgttgataatcgtcctgattcgcgttgacgcggcgaaaaataaatcaaacatggaaagcaggcgcaagagcgcgttccttgccaacatgagccacgagatacgcacgcctatgaacgcgataatcggaatgctcacgataggtaagaccgcttccgaaattgaacgcaaagactactgctttacgaaaatagaagacgccgcgaaccacctgctcgggttaataaacgatattctggatatgtcaaaaatagaagcaaacaaatttgaaatttctccggttgaatttaattttgaggaaatgctccggcaggcggtgaatgtcatcaatttccgcatagatgaaaaacatcaaaaattcacggtacacatcgaccgttcaattccccggactctcataggggacgatcaacggataacgcaggtcatcaccaacctgctgggaaacgcggtaaagttcacccccgaaaacggcgttataagccttgacgcgcgtcttgccggagaggaaaacggtctctgtactttacaggtttctgtaactgataccgggatcggcataagcgccgaacagcagaaaaaacttttccagtcttttgagcaggccgaatccagcacaacccgcaaatacggaggaacggggctggggcttgcgatttccaaaagaatagtggaaatgatggacggaacaatatgggtggaatcagaacccgggaaaggctcaacttttacctttgcgattcaagcgcggcgcggaacggaagtcattaatgaatgttccaatccggacaatcagaaggtcgaagaagctcaagccccggaaattgagggcatttttgcggggcggcgcatactgctggctgaagatgtggagattaaccgcgagattgtacaggccctgcttgagccgacacagttggatattgactgcgctgaaaacgggggcggagccgttcgtaaatttaccgaggcccccgcttaa

SEQ ID NO: 56694 - protein, 474 aa, Unknown
  Obtained from environmental sample
  DOMAIN (170)...(235): His Kinase A (phosphoacceptor) domain
  misc_feature (1)..(474): Xaa is any amino acid
MDSLTGDIVFSYSRCIYDNNGNRVGVVALDIEAGHIGEKVANTSLTKGGYGILTSQDLTVIGHINTDFLGMKMYDPRIPVSFLTDELVRTEKITGAEWVNWRGEKVVGFLKTLSNGWTLGLLAPKYIYFKPVYKMALTLSLLGGALASVLIIVLIRVDAAKNKSNMESRRKSAFLANMSHEIRTPMNAIIGMLTIGKTASEIERKDYCFTKIEDAANHLLGLINDILDMSKIEANKFEISPVEFNFEEMLRQAVNVINFRIDEKHQKFTVHIDRSIPRTLIGDDQRITQVITNLLGNAVKFTPENGVISLDARLAGEENGLCTLQVSVTDTGIGISAEQQKKLFQSFEQAESSTTRKYGGTGLGLAISKRIVEMMDGTIWVESEPGKGSTFTFAIQARRGTEVINECSNPDNQKVEEAQAPEIEGIFAGRRILLAEDVEINREIVQALLEPTQLDIDCAENGGGAVRKFTEAPA

SEQ ID NO: 56695 - DNA, 486 bp, Unknown
  Obtained from environmental sample
  misc_feature (1)..(486): n is a, c, g, or t
ttgcgattcaagcgcggcgcggaacggaagtcattaatgaatgttccaatccggacaatcagaaggtcgaagaagctcaagccccggaaattgagggcatttttgcggggcggcgcatactgctggctgaagatgtggagattaaccgcgagattgtacaggccctgcttgagccgacacagttggatattgactgcgctgaaaacgggggcggagccgttcgtaaatttaccgaggcccccgcttaagtacgatttgatttttatggacgtgcagatgcccgaaatggacggttatgaggcgacgcggcatatacgggtcatggacataccaaaagccaaaaccattccgataatcgccatgaccgctaacgtgttccgcgaggatattgaaaagtgcattgaagccggtatgaacagccatgtcggaaagccattggatttcgatgaagttctgggcaagctgcgctttttcttgagtttatga

SEQ ID NO: 56696 - protein, 161 aa, Unknown
  Obtained from environmental sample
  DOMAIN (47)...(156): Response regulator receiver domain
  misc_feature (1)..(161): Xaa is any amino acid
MRFKRGAERKSLMNVPIRTIRRSKKLKPRKLRAFLRGGAYCWLKMWRLTARLYRPCLSRHSWILTALKTGAEPFVNLPRPPLKYDLIFMDVQMPEMDGYEATRHIRVMDIPKAKTIPIIAMTANVFREDIEKCIEAGMNSHVGKPLDFDEVLGKLRFFLSL

SEQ ID NO: 56697 - DNA, 801 bp, Unknown
  Obtained from environmental sample
  misc_feature (1)..(801): n is a, c, g, or t
atgagagagacgagaattaaaccggtaaaaataaaaaaacgccgacttaaatacattgccgtcttgccctcgtttattaccctgattaacggggcctgcggttttatcgcgattgttttcgcgagccgcggcaccgaagtcaggtggaatgttttttttgtacgcaatctgaatatgtcttctcttgttttggcggggtacatgatactccttgcgatgcttgcggacatgatggacggaagggtagcaaggcttacaagaaccacctcaagtttcggcgggcagctggacagcctttcggacacaataagtttcggcgccgctcccgcttttttgatgatgaaggttgttgagcatcacattgatcgtccggatttttaccacttcgggttttcgctgcttgtcggcaggtgcattttattttccgcgattttctacgctatgtgcgcgatagtccgcctggcaagatttaatgtagagaacgatgaaaacgaagcggcccacatgaatttcactggccttccttcgcctgccgcggcgggggtaattgtaagccttgtgattattcaccagcaaattcttccaagaatattggctagggctccggagatggataaaactctagattttgttacgattaccgtttttccgcttattacctttctttccggtattttgatggtttccaggataaggtatccccatctgggccatcagctgctcaggggcaaaaatcgctttcatgctatactgctgttcgctgcggtcttttatattatggaatctcaacggccatggtaa

SEQ ID NO: 56698 - protein, 266 aa, Unknown
  Obtained from environmental sample
  DOMAIN (66)...(233): CDP-alcohol phosphatidyltransferase
  misc_feature (1)..(266): Xaa is any amino acid
MRETRIKPVKIKKRRLKYIAVLPSFITLINGACGFIAIVFASRGTEVRWNVFFVRNLNMSSLVLAGYMILLAMLADMMDGRVARLTRTTSSFGGQLDSLSDTISFGAAPAFLMMKVVEHHIDRPDFYHFGFSLLVGRCILFSAIFYAMCAIVRLARFNVENDENEAAHMNFTGLPSPAAAGVIVSLVIIHQQILPRILARAPEMDKTLDFVTITVFPLITFLSGILMVSRIRYPHLGHQLLRGKNRFHAILLFAAVFYIMESQRPW

SEQ ID NO: 56699 - DNA, 303 bp, Unknown
  Obtained from environmental sample
  misc_feature (1)..(303): n is a, c, g, or t
atgaaggtacgcaggaccagcgtttacaagaaatggattaatggcttacgggacagccgggcgcgataccggatatttacccggattaagcggctcgaggaagggaaccccggcgacgtagagccagtaggcgagggcatttccgaactgcgtatccattacggccccggataccgggtctattacaaggacaccggcatggagatcgtcattctgctatgcggcggggataaaaccacccagcaggaagacataaccagggcgaaacaaatagcgctatcgcctttggaagaggaggaataa

SEQ ID NO: 56700 - protein, 100 aa, Unknown
  Obtained from environmental sample
  DOMAIN (44)...(95): Phage derived protein Gp49-like (DUF891)
  misc_feature (1)..(100): Xaa is any amino acid
MKVRRTSVYKKWINGLRDSRARYRIFTRIKRLEEGNPGDVEPVGEGISELRIHYGPGYRVYYKDTGMEIVILLCGGDKTTQQEDITRAKQIALSPLEEEE

SEQ ID NO: 56701 - DNA, 345 bp, Unknown
  Obtained from environmental sample
  misc_feature (1)..(345): n is a, c, g, or t
atgggaattaccagatcgacgttaagggttggtcaaaagccacctaaagaagttattaagcaggtaagaaaagctgtcagggaagcgcggaaagcgcctccagtttatgatcctgattgcccgccttccacgccggaagcgttaaaagaattcgcgcacctggccgcagaacgcaacaggcgcaagaaaaagaagtcgataacgatccgcattgccccggatgttttggaaagctacaaaacaatgggggacggctataccgacatcatggccgacgtgctgaattacgtcgccaacaatccggagatactttcaaaagcatccggctcggccgtctcccagtaa

SEQ ID NO: 56702 - protein, 114 aa, Unknown
  Obtained from environmental sample
  misc_feature (1)..(114): Xaa is any amino acid
MGITRSTLRVGQKPPKEVIKQVRKAVREARKAPPVYDPDCPPSTPEALKEFAHLAAERNRRKKKKSITIRIAPDVLESYKTMGDGYTDIMADVLNYVANNPEILSKASGSAVSQ

SEQ ID NO: 56703 - DNA, 585 bp, Unknown
  Obtained from environmental sample
  misc_feature (1)..(585): n is a, c, g, or t
gtgagaattcctgacggcgttacattcattggtgacaatgtttttttctccaacaaactggcagaaatagacattcctgagagtgtcacttccatcgggatgctcgcgttcgcgagcaaccagttaatttctgtttatattccccaaaacatcgaaaccataggatatggcgtgttttcgaataacctgctcggcagtgtgacgattcccggcaaggtcacatccatcaggaactatgctttcgaaaacaaccggcttgcggatatagacattcctgagaatgtcgcctccatcgggaacagggcctttgccaacaatatgctcaccgatgtcaggttttcagagggtcttaaatccataggggacggcgcttttgcgtataacaagctgacaggcattgagcttcctgaaagcgtagaatccataggggacggcgcttttgagaacaataatctggccgctataaccataggcgacaaagttacatcaatcggaaaaagcgcgtttgcgaacaatgaattggaagatataaccattggagaaggtgtaatttcgcgttggggactatgcttttgcgtacaataa

SEQ ID NO: 56704 - protein, 194 aa, Unknown
  Obtained from environmental sample
  misc_feature (1)..(194): Xaa is any amino acid
MRIPDGVTFIGDNVFFSNKLAEIDIPESVTSIGMLAFASNQLISVYIPQNIETIGYGVFSNNLLGSVTIPGKVTSIRNYAFENNRLADIDIPENVASIGNRAFANNMLTDVRFSEGLKSIGDGAFAYNKLTGIELPESVESIGDGAFENNNLAAITIGDKVTSIGKSAFANNELEDITIGEGVISRWGLCFCVQ

SEQ ID NO: 56705 - DNA, 777 bp, Unknown
  Obtained from environmental sample
  misc_feature (1)..(777): n is a, c, g, or t
gtggaaactatagaacacaccgtcaaagaaatggaaacggagatggaaacagaccgtgaagcggcattagctgatatgcgttatcaatttattgaggatatttgtaaaaaatgcgtaataaaagcgcatgaaagccgcgaataccggcgcagcgtgagtctggactcaatattaacccacaagtttttcgcgtttccggcttttttgggaataatgctgctggtcttcgctcttaccttcggagttatcggaaacagactgagcgatttattggaatcgggagtggactttgtaagcggcattgtagataacgcattgacagcttacggcataaatcccgtagtacagtctctgttgattcatggaatattcgccggagttggagcggttttaagttttgtcccgataatcgttgtgttatttttctttctgtccctgctggaagattcaggatacatggcgcgtgttgcgtttgtcatggacaagccgttacgcaaaatcgggctttcagggcgcagttttgttccgatgctcatgggctttggctgttcggttccggcgattatggcgacccggacgcttgcaagcgagcgcgataaaaaaatgactattctgcttacgccatttatgagttgcagcgcanaagtccctatctacgccttgtttgccgccgcgttctttccgggacattcaacgctggtaatgagcagtttgtacttacttggaattttattcggcgtaatttcaggttttataatggaaaaaaccgtcttttag

SEQ ID NO: 56706 - protein, 258 aa, Unknown
  Obtained from environmental sample
  DOMAIN (1)...(126): Ferrous iron transport protein B
  misc_feature (1)..(258): Xaa is any amino acid
METIEHTVKEMETEMETDREAALADMRYQFIEDICKKCVIKAHESREYRRSVSLDSILTHKFFAFPAFLGIMLLVFALTFGVIGNRLSDLLESGVDFVSGIVDNALTAYGINPVVQSLLIHGIFAGVGAVLSFVPIIVVLFFFLSLLEDSGYMARVAFVMDKPLRKIGLSGRSFVPMLMGFGCSVPAIMATRTLASERDKKMTILLTPFMSCSAXVPIYALFAAAFFPGHSTLVMSSLYLLGILFGVISGFIMEKTVF

SEQ ID NO: 56707 - DNA, 549 bp, Unknown
  Obtained from environmental sample
  misc_feature (1)..(549): n is a, c, g, or t
atggaattgcccaattaccgtttcccttccgccaaaaccgtattacaactttgttgggataaggcaaaggattttattcaaagggcgtttaccgttatctttttggcgacggttataatatggtttttacaatcctttgatttacggttgaactatgttagaggcggcgaaggctcgctgcttgcgttaatcgggcggttggtaagcgggatatttgttcctctgggttttttcgactggcggatttccacggcgctcattaccggttttaccgcgaaggaagccgttataagcacattggcggtattgaccaactctaacgccacaggacttgtaaacactttacattcattgttttcttcattaagcgcgttcagcttccttgtgtttacgcttttatacactccatgcgtggcggcaatcgcgacagtaaaacgcgaatatggcggtgtaaaaggtttgatttttataattgtgtatcagaccgccattgcgtggcttgccgcgttctgcgtgtatagaataggttctttactggggatacactaa

SEQ ID NO: 56708 - protein, 182 aa, Unknown
  Obtained from environmental sample
  DOMAIN (26)...(152): Nucleoside recognition
  misc_feature (1)..(182): Xaa is any amino acid
MELPNYRFPSAKTVLQLCWDKAKDFIQRAFTVIFLATVIIWFLQSFDLRLNYVRGGEGSLLALIGRLVSGIFVPLGFFDWRISTALITGFTAKEAVISTLAVLTNSNATGLVNTLHSLFSSLSAFSFLVFTLLYTPCVAAIATVKREYGGVKGLIFIIVYQTAIAWLAAFCVYRIGSLLGIH

SEQ ID NO: 56709 - DNA, 423 bp, Unknown
  Obtained from environmental sample
  misc_feature (1)..(423): n is a, c, g, or t
atgacgataaggtatgccgaaataaccgatttcttatggttaaaggaacatgaacgatatatttccgatcaaatactggaaataaaaataaaaacaaaagaaatatatattgttcaggaaaaagaagaaataataggctggcttcgttataatttattctgggataacgtgccatttatgaacaagatatattttttggaagaattcaggcaaaaaggatacggacggaaattgctgcattattgggaaaacgaaatgaaagaaaaaggttataaaaatgtattaaccacaacgcaatcaaacgaagaagggcagcatttttacagaaaaatgggatatacagaaattggcggcctaaagtatttagatgagccgtatgagattattttttataagaaaatagttgagatggacgccgtgtaa

SEQ ID NO: 56710 - protein, 140 aa, Unknown
  Obtained from environmental sample
  DOMAIN (36)...(114): Acetyltransferase (GNAT) family
  misc_feature (1)..(140): Xaa is any amino acid
MTIRYAEITDFLWLKEHERYISDQILEIKIKTKEIYIVQEKEEIIGWLRYNLFWDNVPFMNKIYFLEEFRQKGYGRKLLHYWENEMKEKGYKNVLTTTQSNEEGQHFYRKMGYTEIGGLKYLDEPYEIIFYKKIVEMDAV

SEQ ID NO: 56711 - DNA, 1437 bp, Unknown
  Obtained from environmental sample
  misc_feature (1)..(1437): n is a, c, g, or t
atgaagtgggaaacagtcatcggccttgaggttcacgccgagctttcaacaagatcaaaaattttctgcgcctgtactactgcctatggcggagaaccgaacacccacgtctgtcccgtctgcgcgggaatgcccggcgttttacccgtgcttaaccgctccgtagtagagtacgctatccggctcggtcttgcccttgactgcaccattaccaaatactgcaagtttgaccgtaaaaattatttttaccccgatctgccgaaagcctaccaagtatcacaactgtacgccccaatctgccgtgacggtcatcttgacattgaagccggcgggcaaaaaaagacaatcaacatacgcgagatacacatggaagaagacgcgggtaaattgattcacgacgcaaacggcgcaggtacatttatggacttcacccgctgcggggtaccgcttttagaaatagtttcgcagcccgacttccgtaatgccgctgaagtgatcgcctatcttgagaaactgcgcgagacgcttttgtaccttgacatttgcgattgcaaaatgcaggaaggctccatccgtgcagacatcaacctttcagtgcgccgagaaggcgatgaattaggaacgcgtaccgagacaaaaaacatgaactcgtttaaagctattgccagggccatagaatacgagacagcgcgtcagatcgaaatacttgaagacggcgggcaggttgtccaggaaacgcgccgctgggatgacgagaaacttgaatcatatagcatgcgttcaaaagaaaacgcgcaggactaccgctactttccggaacctgaccttttaccgattgacattgatgaggagtggctagcgagcgtcagaaaaaacctgccggaactggcgcatcaaaaacgtgaacgctactgccgtgatttcaggataagcgaaggcgaggctattgttcttaccgtccataaaaaaatttgcgatctgttcgaggccattgtgaaaaaaagcgttcagcccgttgaagcggcgcacctcttaaccggagaaattatgcggctgatgaacaacgccaatattctgcctgaagatttatctattgacgcggacaagctttctacgcttattacgcttgttaccagcggaaaaatcaaccgaaacgcttataaagaaaccatcgaggcggtattcacgcgcaatgttgatcctgaaagctacatcgccgaaaaaggtttaatgatgattaacgacgacaacgcggtcttcaaagcggtacagacggtaataactgaaaatcaggactctgtcgcggattaccgtgccggcaaggaaaaagtattcgcctttttaatggggcaggttatgaaaaagctgggtggaaagggaaatcccgacatgataaaaaagacattaacagagatgctaagagaggagagtaaatga

SEQ ID NO: 56712 - protein, 478 aa, Unknown
  Obtained from environmental sample
  DOMAIN (256)...(324): PET112 family, C terminal region
  misc_feature (1)..(478): Xaa is any amino acid
MKWETVIGLEVHAELSTRSKIFCACTTAYGGEPNTHVCPVCAGMPGVLPVLNRSVVEYAIRLGLALDCTITKYCKFDRKNYFYPDLPKAYQVSQLYAPICRDGHLDIEAGGQKKTINIREIHMEEDAGKLIHDANGAGTFMDFTRCGVPLLEIVSQPDFRNAAEVIAYLEKLRETLLYLDICDCKMQEGSIRADINLSVRREGDELGTRTETKNMNSFKAIARAIEYETARQIEILEDGGQVVQETRRWDDEKLESYSMRSKENAQDYRYFPEPDLLPIDIDEEWLASVRKNLPELAHQKRERYCRDFRISEGEAIVLTVHKKICDLFEAIVKKSVQPVEAAHLLTGEIMRLMNNANILPEDLSIDADKLSTLITLVTSGKINRNAYKETIEAVFTRNVDPESYIAEKGLMMINDDNAVFKAVQTVITENQDSVADYRAGKEKVFAFLMGQVMKKLGGKGNPDMIKKTLTEMLREESK

SEQ ID NO: 56713 - DNA, 393 bp, Unknown
  Obtained from environmental sample
  misc_feature (1)..(393): n is a, c, g, or t
atgctcggctcgtttgtgctttcatcggggtattacgacgcgtattacaaaaaagccctgcaggtacgctcccttataaaagacgcttacacgcggctgttcaaaaagtatgacatgatactctctcctgtcgcccccacaacggcgtaccgtatcggggaaaattcaggcgacccgatgaagatgtacatgggagacatttacacagtgtcgatcaatttagcgggactccccgccgcggcgctcccctgcggatttgactcggcaggtttgccaatcggcttccagcttatcggggacgctttctcggagaacaaacttatcggcgcggcgcgggtttatcaatcccgtactgattaccatttgcaaaaaccaaaagggataaaagcatga

SEQ ID NO: 56714 - protein, 130 aa, Unknown
  Obtained from environmental sample
  misc_feature (1)..(130): Xaa is any amino acid
MLGSFVLSSGYYDAYYKKALQVRSLIKDAYTRLFKKYDMILSPVAPTTAYRIGENSGDPMKMYMGDIYTVSINLAGLPAAALPCGFDSAGLPIGFQLIGDAFSENKLIGAARVYQSRTDYHLQKPKGIKA

SEQ ID NO: 56715 - DNA, 771 bp, Unknown
  Obtained from environmental sample
  misc_feature (1)..(771): n is a, c, g, or t
gtgttcaacgcggcggttattgataaactggaaaaagccggcatggttgtcatcgggaaagtcaatatggacgagtacgctatgggcggctccagcgaaacgggcgtaaaaggcccggttcacaatccctgggatgtcacgcgcgttgccggcggttcctctggtggcagcgccgccgctgtaatcgccggcgagacgcccatagcgcttggctccgacaccgggggcagtatacgccagccttgctctttctgcggcgttacgggcatcaagccgacttacggctctgtgtcgcgctacgggctgctggcttacgcgtcatccctcgaccagatcggccctatcgggcaaaacattgaggattgcgccgctttactgtcgatcatttcagggccggattcgcgggacagcacctgcgttatagaaaaaccctttgatttcggcgaaccaaaaacaaaacttgacggcgtaaagatagggcttcctcgcaattattacggcagcggtattgatgatgaagtaaagaacgctgtcctggctgtcgcgaaagaacttgaggcgtcaggcgcaactatagaagaatttgaaatgccgctgatggattacatgatcccaacttattacatcatcgcctgcgccgaagcgtcgtcaaacctttcccgctacgatggcttgaaatacggttaccgcagccctaacgcccagtctctttccgaagtataccggctttcccgaaacgagggcttcgggctggaagtaaaaagagaataa

SEQ ID NO: 56716 - protein, 256 aa, Unknown
  Obtained from environmental sample
  DOMAIN (2)...(256): Amidase
  misc_feature (1)..(256): Xaa is any amino acid
MFNAAVIDKLEKAGMVVIGKVNMDEYAMGGSSETGVKGPVHNPWDVTRVAGGSSGGSAAAVIAGETPIALGSDTGGSIRQPCSFCGVTGIKPTYGSVSRYGLLAYASSLDQIGPIGQNIEDCAALLSIISGPDSRDSTCVIEKPFDFGEPKTKLDGVKIGLPRNYYGSGIDDEVKNAVLAVAKELEASGATIEEFEMPLMDYMIPTYYIIACAEASSNLSRYDGLKYGYRSPNAQSLSEVYRLSRNEGFGLEVKRE

SEQ ID NO: 56717 - DNA, 942 bp, Unknown
  Obtained from environmental sample
  misc_feature (1)..(942): n is a, c, g, or t
ttgatgataaaaccagtgtctgtggctgctttgcccgttgcggagaacttcattatacagaagaaccgcatagagaacgatgcaggagcagggtgcaagcgagtttgcgttgttacaggaactcacggagacgaattggaagggcaatatgtctgtgcacagctagcgaagattttgaacgaagataaacagaaactctctggcatcgtggatatttatcccgctctgaatccactgggaattgattccgttacgcgtggatttccgatgtttgatttagatatgaaccgcatattcccaggctcgcaaaccggcttgctcgcagaagttgtggctcatgatgtaatccacgatattgacggcgcggatatgtgcatagacatacattccagcaacatcttcctgcgcgagataccgcaggcccgcgtgagcgaacagacggcggacgaactgctgccctacgcgctgatggtcaacgtcgatctcgtatggatacactcgtcggcgaccgtattggaatcgacgctcgcgcactcgctcaatatacgcggcgttaagacgctggtagtcgagatgggcgtcggaatgcgcataacggagagtttctgtacgcagttcgtggacggcatactgaatctgctgcgcgaactgggaatgtggaacggaaccggcggaaagaccaggcagccgcttgtctcaaaggatcacagcgtcggctttctgaactcggacgcgcacgggatatttatcccctacgccgcgcacggcagccatgtaaactcgggcgaccgcatcggatgcgtcatagacccgcttacgggaaacgtcgtcgaggaaacgctcgcgccctgcggcggcctgctgtttacgttacgcgaataccccgtcgtcttcggcggctcgcttctggcgcggatcatggaggacactcgaaatggataa

SEQ ID NO: 56718 - protein, 313 aa, Unknown
  Obtained from environmental sample
  DOMAIN (31)...(309): Succinylglutamate desuccinylase / Aspartoacylase family
  misc_feature (1)..(313): Xaa is any amino acid
MMIKPVSVAALPVAENFIIQKNRIENDAGAGCKRVCVVTGTHGDELEGQYVCAQLAKILNEDKQKLSGIVDIYPALNPLGIDSVTRGFPMFDLDMNRIFPGSQTGLLAEVVAHDVIHDIDGADMCIDIHSSNIFLREIPQARVSEQTADELLPYALMVNVDLVWIHSSATVLESTLAHSLNIRGVKTLVVEMGVGMRITESFCTQFVDGILNLLRELGMWNGTGGKTRQPLVSKDHSVGFLNSDAHGIFIPYAAHGSHVNSGDRIGCVIDPLTGNVVEETLAPCGGLLFTLREYPVVFGGSLLARIMEDTRNG

SEQ ID NO: 56719 - DNA, 1398 bp, Unknown
  Obtained from environmental sample
  misc_feature (1)..(1398): n is a, c, g, or t
atgatggcgaggcgcaaacagatttcagttacggctaataaggaagcgacgttgcgcctgccgattgctacgacgatcggcgtgttgacgggggcgcggggacagataaacgcttcggcgaagatcagcagccttaacggaaaagttaccgtcagccttccagcgcggtcatacagaaacgcggaagtcttgctgtatacggtaaacggaaagatgattctgcgctctaacgtgtcggcggcaaactcggtcaataacatatcgcgcacgaatctcgcgacgggggtctacctgctctcggtgaggggcgcggagagtaacatcgcgacgtcccgcgtaacgcacaacggcggggggttgaatatcggcgtggctttcgcgggcgaagaggcggcttccgataagcggttggcgaaaggggcggaggcgggggattggacgataaccgtatcggcgggcgggtacattgatagcgtgtatacgttgcgtccggctgtggggaataacgcgcggcagaagataaccttgcgcactgtgccgccaaccgtacccgacgtccccgcaaatgtaaccgcaacggcgaagtcaaagaccagtattagcgtgagttggtcaaaggtctcaggggctacgaaatattatgtatatcgtagcgctacaaacggtgatgattccaatagttatagtttatcggctacaataaataccggttggggtttatcggctgcaatatccaccaccatatcgcatatagataccggattatcgatgggtacgacctattactataaagtagccgcctcaaacagcgttggggaaggggctcaatcagcttatgtttttgcggtgccaagaatcataacagatatattaactgataccagagacaataagacgtacaagacggtcaatataggcagtcagacttggatggctgagaatctgaattttgagaacgcggggggttcgtggtgttatgcggataaggctgatagctgtgctaagtatggcaggttgtacgaatggaatacggcgatgacagtctgccccagcggatggcacttgccgactcgccaagaatggggggatttagctgtttttgcaggcggcacgggtaactatggtacatcgggtacggccggtaaggcgctgaaatcgacaagcggttgggatggtacagatgaatttggcttttcggccctgcccggcggcaaccgcgaccccgatggcaatttcggcagcgccggcagcttcggcttttggtggacggctacggagaacggcggcggcaacagcgccgacagtcggtatatgtacgatgactacaacagcgtgtatgagggcaacagcaactacaagagcagcgggtattcggtgcggtgcgttaagaacgaataa

SEQ ID NO: 56720 - protein, 465 aa, Unknown
  Obtained from environmental sample
  DOMAIN (184)...(277): Fibronectin type III domain
  misc_feature (1)..(465): Xaa is any amino acid
MMARRKQISVTANKEATLRLPIATTIGVLTGARGQINASAKISSLNGKVTVSLPARSYRNAEVLLYTVNGKMILRSNVSAANSVNNISRTNLATGVYLLSVRGAESNIATSRVTHNGGGLNIGVAFAGEEAASDKRLAKGAEAGDWTITVSAGGYIDSVYTLRPAVGNNARQKITLRTVPPTVPDVPANVTATAKSKTSISVSWSKVSGATKYYVYRSATNGDDSNSYSLSATINTGWGLSAAISTTISHIDTGLSMGTTYYYKVAASNSVGEGAQSAYVFAVPRIITDILTDTRDNKTYKTVNIGSQTWMAENLNFENAGGSWCYADKADSCAKYGRLYEWNTAMTVCPSGWHLPTRQEWGDLAVFAGGTGNYGTSGTAGKALKSTSGWDGTDEFGFSALPGGNRDPDGNFGSAGSFGFWWTATENGGGNSADSRYMYDDYNSVYEGNSNYKSSGYSVRCVKNE

SEQ ID NO: 56721 - DNA, 711 bp, Unknown
  Obtained from environmental sample
  misc_feature (1)..(711): n is a, c, g, or t
gtgcagcccaaactggaagagaccataaaagggcaagaagaaattgtcgccatgtccatttacaccaactcagggtttattatggggaatctggttccggatcgaatcggcaagacactgaaagaagcggagacaatatacggtaaatatctggatcaagctaacgatgccgtcattaacggcaaaccattccagtgcagaagctattcgcaggtgttgaaaacagatgtgtcaattgacttaatgcctcttaatataggcggttctgacataacgtggacaataatgattgcgtcgtcggatgagtacattttaaaagaagtaaaagagattacgacattcgtcatcattttatcggcggtagcccttgtaatatcagtgctggttatatattttgtattggatgttaccataaaaccaattgttcacgtagctgaaaccctcaaagatatctccgaaggcgaaggcgatttaacacggcaccttgatgtcaattccaaagacgaaatcggcgatctatcccattatttcaacaaaactcttaataaaattaaagacctcgtactgctcatcaagagagaagcggcaggcctccacaacatcggtgatgatcttgccagcaacatgaccgaaaccgccgcggcaattaacgaaattaccgccaatatccagaatatcaagagcagagtcataagccaaagcgcagcgtaa

SEQ ID NO: 56722 - protein, 236 aa, Unknown
  Obtained from environmental sample
  DOMAIN (115)...(186): HAMP domain
  misc_feature (1)..(236): Xaa is any amino acid
MQPKLEETIKGQEEIVAMSIYTNSGFIMGNLVPDRIGKTLKEAETIYGKYLDQANDAVINGKPFQCRSYSQVLKTDVSIDLMPLNIGGSDITWTIMIASSDEYILKEVKEITTFVIILSAVALVISVLVIYFVLDVTIKPIVHVAETLKDISEGEGDLTRHLDVNSKDEIGDLSHYFNKTLNKIKDLVLLIKREAAGLHNIGDDLASNMTETAAAINEITANIQNIKSRVISQSAA

SEQ ID NO: 56723 - DNA, 747 bp, Unknown
  Obtained from environmental sample
  misc_feature (1)..(747): n is a, c, g, or t
atggaacaggttatcgccaacatcaacaaactcaatggtcatgtagaaaaccagagcagtaatgtttctcaggcgtcatccgctattgaggaaatggtagccaatatcagttctgtcaccaacacactgatcaacaacgccattaatgtaagcacattaaaagaagcatccgaagtaggaaagacggggttgcaggatgtagcgtccgacattcaggaaatatcccgagagtctgaaggattgctggaaattaactcagtaatggaaaatatagccagccagaccaacctgctttcgatgaacgccgctatagaagccgctcatgcgggagaggcaggcaagggctttgccgtagtcgcagatgaaatccgcaagttggcggaaagttccagcgaacagtccaaaacgattggtacggtactgaaaaagatagcagaatctattaaaaaaattacaggctccacagataacgtgctaactaaattcggggcgattgacacaggggtcaggattgtctcggatcaggaagaaaacatccgtaacgcaatggaagagcagggagaagggagtaaacaagtgcttaaaagcgcaagcagtttaagcgaacttacacagcaggtaaaaagcagttccgaggaaatgctgagcggtagccatgaagtaatgaatgaaagccggaatctggaaaaggtaacacaggaaataacaggcggcatgaatgagatggcaagcggagcgaagcaataa

SEQ ID NO: 56724 - protein, 248 aa, Unknown
  Obtained from environmental sample
  DOMAIN (16)...(236): Methyl-accepting chemotaxis protein (MCP) signaling domain
  misc_feature (1)..(248): Xaa is any amino acid
MEQVIANINKLNGHVENQSSNVSQASSAIEEMVANISSVTNTLINNAINVSTLKEASEVGKTGLQDVASDIQEISRESEGLLEINSVMENIASQTNLLSMNAAIEAAHAGEAGKGFAVVADEIRKLAESSSEQSKTIGTVLKKIAESIKKITGSTDNVLTKFGAIDTGVRIVSDQEENIRNAMEEQGEGSKQVLKSASSLSELTQQVKSSSEEMLSGSHEVMNESRNLEKVTQEITGGMNEMASGAKQ

SEQ ID NO: 56725 - DNA, 633 bp, Unknown
  Obtained from environmental sample
  misc_feature (1)..(633): n is a, c, g, or t
ttgttccaggcttcccgcgccgccggaggcgatgacgggaaccggcacagcgttaaggattgtcccggtaagttccagatcgtaacccgcacctgtcccgtccgcgtcaatggaattgagaagtatttcccccgttcccagctccaccgccctcactgcccactcaacggcgtcaatgcccgtatcggttctgccgccgtgggaaaaagcgtgccatcgccccggttcaacacgggccgcgtctatcgaaagaaccacacactggctgccataggcctttgccatttcaccaagcaattcgggccgctggagcgccgaagtacacaccgaaaccttgtcggccccggcgttcatcgcttccctcatgttgtccaccgtgcggattccgccgcccacgcaaagggggataaaaacttccgccgccacctgccgcaccacttccagcagggtcgccctgcttttgtacgacgcgccaatgtccagaaagaccagctcatcggccccttcctcgttgtagcgccgggcaagctccaccgggtctcccgcgtccttaatccccttaaactttattccctttacaactctgccgtcgtcaacgtcaagacaggggataatccgttttgcctgcattga

SEQ ID NO: 56726 - protein, 210 aa, Unknown
  Obtained from environmental sample
  misc_feature (1)..(210): Xaa is any amino acid
MFQASRAAGGDDGNRHSVKDCPGKFQIVTRTCPVRVNGIEKYFPRSQLHRPHCPLNGVNARIGSAAVGKSVPSPRFNTGRVYRKNHTLAAIGLCHFTKQFGPLERRSTHRNLVGPGVHRFPHVVHRADSAAHAKGDKNFRRHLPHHFQQGRPAFVRRANVQKDQLIGPFLVVAPGKLHRVSRVLNPLKLYSLYNSAVVNVKTGDNPFCLH

SEQ ID NO: 56727 - DNA, 672 bp, Unknown
  Obtained from environmental sample
  misc_feature (1)..(672): n is a, c, g, or t
atgtatcccggcgagtgttttataagtgtaaaaaatagcttcatttcattgttgccagaaatgttaagttattcagaagaatatttatctgaaaaaataaatggaaaaacgtctttatcaatatcaattcttgataaagaaatcgaaaagaaagaattattggaaaaatacggttatacaaaaattcaatctataccggtaactatattctcatatgaaaacccattcccaaatcaaattcttcccgaagggttttctgttatatcattggatgatgaaaatgattttaaaaaaataaatgattgcctatggtatggatttgatcatggtcccgaacccgacccggacaatgatattgatagccgaatattaatgcaaagcggaccgaattttcgtaaagacctgactactataataaaagccccaaatggcgaatatgcgtgttttgccggaatgtggtttgataaaaaaaataactatgcgtatttggaaccattagcgactgtaccagaatatcggcgcatggggttggcgacaatcgcattagttacgggaatgagaaaaacagaaaagttgggtgcaaaatattgctttggaggaatgggggagttttataaaagcattggttttaaggaaattgcaaaccgtgaattatggaaaaaggaatggtag

SEQ ID NO: 56728 - protein, 223 aa, Unknown
  Obtained from environmental sample
  DOMAIN (138)...(211): Acetyltransferase (GNAT) family
  misc_feature (1)..(223): Xaa is any amino acid
MYPGECFISVKNSFISLLPEMLSYSEEYLSEKINGKTSLSISILDKEIEKKELLEKYGYTKIQSIPVTIFSYENPFPNQILPEGFSVISLDDENDFKKINDCLWYGFDHGPEPDPDNDIDSRILMQSGPNFRKDLTTIIKAPNGEYACFAGMWFDKKNNYAYLEPLATVPEYRRMGLATIALVTGMRKTEKLGAKYCFGGMGEFYKSIGFKEIANRELWKKEW

SEQ ID NO: 56729 - DNA, 627 bp, Unknown
  Obtained from environmental sample
  misc_feature (1)..(627): n is a, c, g, or t
ttgcgtccgtctgggcgtaataaaaatagaacacggcaaggggctatggaacagcaggcacaacaggcggcggacgacggtcagttgttcgacaagtggctcggcggcgaccctaaggggttttccgagctgtatggtaggtatagcggccgcgtcttcggctttttgctgcgcatgacgggcgatcgcgaggtcgccgaggacatgctgcaggagacgtttttggcggctatacgcaacgtcggccaatttgaccgttccaggagcttcttgagctggctcttcgggatagcccacaagcggacgatagactactaccgccacgctaaggttgaggccgaacacgccgaagataccggcgggtcggtcgggagcaggcttgattcaccggaggacagcttgtcgaacaagcgcctccgaaagatagtaggcgaggcggtgcagcggcttgagccgtcgcaacgcgaggtttttatgcttagggagctcggcggagtcccgtttaaggaaatcgccgagatgatgggatgccccataaacacggcgctagggcgtatgcgcttggcgcttataaatatgcgcaaagaactgaaaaaaagggggatcgacagtgtgcaacaaatttga

SEQ ID NO: 56730 - protein, 208 aa, Unknown
  Obtained from environmental sample
  DOMAIN (146)...(195): Sigma-70, region 4
  misc_feature (1)..(208): Xaa is any amino acid
MRPSGRNKNRTRQGAMEQQAQQAADDGQLFDKWLGGDPKGFSELYGRYSGRVFGFLLRMTGDREVAEDMLQETFLAAIRNVGQFDRSRSFLSWLFGIAHKRTIDYYRHAKVEAEHAEDTGGSVGSRLDSPEDSLSNKRLRKIVGEAVQRLEPSQREVFMLRELGGVPFKEIAEMMGCPINTALGRMRLALINMRKELKKRGIDSVQQI

SEQ ID NO: 56731 - DNA, 843 bp, Unknown
  Obtained from environmental sample
  misc_feature (1)..(843): n is a, c, g, or t
atgtaccggcccctcggcgcgggaaatgctgattacgcgatcttccagcggttcccgcaaagcctgcaatacattgattttaaattccggcgcttcatcaagaaacagcactccaaaatgggcaagggtaatttcgccgggacggggagttctgccgccgcccaaaattccctcggcgcttgccgaatgatgcggggcgcggaacggcggattggtgatgagacgatcgatatagccgccgtccgcagttccggttttgaaaggacccgccagactgtgcagccgcgtaacttcaaccgcttcatcgggactgagcggcgccattatggacgacagccgccgggcaagcatggtttttcccgcgcccggcggaccaaaaaccagcatattgtggcctccggcggcggcgatttccagcgcccgcttataaacagtttgcccgcgtacatcggcaaaatcaccggcggtttccgccgcgtccggcgcatcgcacggcgggggcgaaatcaacggcagcgcgccggtttcttcgcggataaacagcgcgtcaaccgcttccttcagagtggaagccgccgtaaaacgcatgtcggggagtattgccgcttccctgccgttttccgccggaacaataaattcgctgataccttcttccctgcccgcggccattgccgccagaacaccccgcaccggacgtatcctgccagaaagttccagttcccccatgaccagcaaattgggaggaacgggggcaagttccgcggcggccatcaccgcaagagcaatgggcaggtcgagcgccgccccgtcttttttcagtcccgccggcgcaagatttattaa

SEQ ID NO: 56732 - protein, 280 aa, Unknown
  Obtained from environmental sample
  misc_feature (1)..(280): Xaa is any amino acid
MYRPLGAGNADYAIFQRFPQSLQYIDFKFRRFIKKQHSKMGKGNFAGTGSSAAAQNSLGACRMMRGAERRIGDETIDIAAVRSSGFERTRQTVQPRNFNRFIGTERRHYGRQPPGKHGFSRARRTKNQHIVASGGGDFQRPLINSLPAYIGKITGGFRRVRRIARRGRNQRQRAGFFADKQRVNRFLQSGSRRKTHVGEYCRFPAVFRRNNKFADTFFPARGHCRQNTPHRTYPARKFQFPHDQQIGRNGGKFRGGHHRKSNGQVERRPVFFQSRRRKIY

SEQ ID NO: 56733 - DNA, 441 bp, Unknown
  Obtained from environmental sample
  misc_feature (1)..(441): n is a, c, g, or t
gtggaagccgccgtaaaacgcatgtcggggagtattgccgcttccctgccgttttccgccggaacaataaattcgctgataccttcttccctgcccgcggccattgccgccagaacaccccgcaccggacgtatcctgccagaaagttccagttcccccatgaccagcaaattgggaggaacgggggcaagttccgcggcggccatcaccgcaagagcaatgggcaggtcgagcgccgccccgtcttttttcagtcccgccggcgcaagatttattaatattctgtccagcggaaaacgaaaccccgaatttctaaaggcggcccgcactcgttcccgcgcttcccgtaccgcgccttcggcaagtccggtaatgtcaatgccgggaatgccccggcgaatatccgcttcaacccggataatgattccacccgcgccataa

SEQ ID NO: 56734 - protein, 146 aa, Unknown
  Obtained from environmental sample
  SIGNAL (1)...(20)
  misc_feature (1)..(146): Xaa is any amino acid
MEAAVKRMSGSIAASLPFSAGTINSLIPSSLPAAIAARTPRTGRILPESSSSPMTSKLGGTGASSAAAITARAMGRSSAAPSFFSPAGARFINILSSGKRNPEFLKAARTRSRASRTAPSASPVMSMPGMPRRISASTRIMIPPAP

SEQ ID NO: 56735 - DNA, 927 bp, Unknown
  Obtained from environmental sample
  misc_feature (1)..(927): n is a, c, g, or t
atgatggccgagccccagcggccacgttacgcctcatgccgggcaggccgcttttcatcagtttccgcgcaaacaggggaaatttggaacggcataacccaacttgaatttgcccaccgtcttgccgaactcgacaccgccgaagccgccgccaaactgcacaatctgcgtgaagcgatagcgtcaggcggccttatcgccaacatgagcggttccgccgcggcgcttaaatccggcggcgcattgattgcccagcggttcagccgcatcggtccgccaaaagcaggtatcgggaatcagggattggggaccggggattcatcttcaacccccataaaagaagtttttgcttctccttcattgcaaattggttttgccgccatgacactgcgggccgcggcttttgacactccggcgcaaaccgccgaaacggtattggcccaccaactttacaccggcgcgctatgggaagatatacgcatgaaaggcggcgcttatggggctttcgccgccagcgacagccttgaacgctgtttctctctttcaacgtaccgtgatcccaatcccctgcgttcgctggattcgttttccgccatacttacaacaaacgatattaccacacgagatgatgacctggaaaaaatgatcatcggctgttattcccgtgagacccgcccccgcagtccttcggaaaaaggaattgccgactttctccgttttatttcccgtattgaaaacgattaccgcagacgacggctgcagcggcttatcgccgtttccgccgatgacatttccgccgctttgggagaacttgcgtcacaagttgctgacggtgccgccgcaagccgggttattattaccggaatgaaaggcgcggaacaggctgccaaagcgctgggaactgaagtacggacgctgccagtgtaa

SEQ ID NO: 56736 - protein, 308 aa, Unknown
  Obtained from environmental sample
  misc_feature (1)..(308): Xaa is any amino acid
MMAEPQRPRYASCRAGRFSSVSAQTGEIWNGITQLEFAHRLAELDTAEAAAKLHNLREAIASGGLIANMSGSAAALKSGGALIAQRFSRIGPPKAGIGNQGLGTGDSSSTPIKEVFASPSLQIGFAAMTLRAAAFDTPAQTAETVLAHQLYTGALWEDIRMKGGAYGAFAASDSLERCFSLSTYRDPNPLRSLDSFSAILTTNDITTRDDDLEKMIIGCYSRETRPRSPSEKGIADFLRFISRIENDYRRRRLQRLIAVSADDISAALGELASQVADGAAASRVIITGMKGAEQAAKALGTEVRTLPV

SEQ ID NO: 56737 - DNA, 1155 bp, Unknown
  Obtained from environmental sample
  misc_feature (1)..(1155): n is a, c, g, or t
atgaaattatcgcaaatgtcaatcaaaagcaagatgcttgttttttcaggccttttctttatgaccgtagccgtcctcggaacagcggcgttcttcttttcaatgaggcagatagtccgttcaagcgcggcgcanaaacttacgcaatttgttgaaatcaaaatatttcaactggaaaaatcggtcattaaagaaatagccatagccgttaaaatggctgactcgcctttaataaaagagcattttttgaatcccgcagatcaaacgcttaaagaacttgcctttagggaatttgcgggatacagaagggcgtttaccggaaacaatattttctggataagcgacacggataaaaggtatcattttggcgatgagtatgtgtacactttggatatatccgaacccgattcggcgtggtatccggcaacattaaaacaaaaggaactatacagttttaatataaattatgacatcggggttcaaaagacgatgctgtggatcaacgccccggtctttgaaggcgggcgggcaatcggtattgtcgggacaggcattgacctttcaggttttattgattcgctatatgcggactttgacccttccatgcccttctatctgttcaataaatcatcagaaataacaggagcgcgggatcattctctggtaatcaacaagaaaacaataaacgattactttggagaggcgggggcttctattctcaaatcagccgcgcaatccggcaaagttccgcaaacattttttcttggcaacagcgaatatgtcgtgggaagtattgaaagcctggactggcatatcaccgccattcttcccattaccgcctcggacaccctgaacagcggagtaaccatattcttcatggtaatgctggcagtcatagctgtcattctcattatttcttttatatttatcagcagccttctcaaacccatgcgttacatgatacaaacgctggatcaaatagctaaaaaccgggacctcacccggcggcttaaattcaagcaccatgacgaaatcggaacagtgggtgatttttttaaccgtacttttgaagaattcagaattcttgtagggacaataaaatataaaatcaacggggctaaaccataccagnttttgagctttccgaccatatga

SEQ ID NO: 56738 - protein, 384 aa, Unknown
  Obtained from environmental sample
  SIGNAL (1)...(27)
  DOMAIN (291)...(361): HAMP domain
  misc_feature (1)..(384): Xaa is any amino acid
MKLSQMSIKSKMLVFSGLFFMTVAVLGTAAFFFSMRQIVRSSAAXKLTQFVEIKIFQLEKSVIKEIAIAVKMADSPLIKEHFLNPADQTLKELAFREFAGYRRAFTGNNIFWISDTDKRYHFGDEYVYTLDISEPDSAWYPATLKQKELYSFNINYDIGVQKTMLWINAPVFEGGRAIGIVGTGIDLSGFIDSLYADFDPSMPFYLFNKSSEITGARDHSLVINKKTINDYFGEAGASILKSAAQSGKVPQTFFLGNSEYVVGSIESLDWHITAILPITASDTLNSGVTIFFMVMLAVIAVILIISFIFISSLLKPMRYMIQTLDQIAKNRDLTRRLKFKHHDEIGTVGDFFNRTFEEFRILVGTIKYKINGAKPYQXLSFPTI

SEQ ID NO: 56739 - DNA, 477 bp, Unknown
  Obtained from environmental sample
  misc_feature (1)..(477): n is a, c, g, or t
atgtgcctttacgctcctggtgtaacgcaaggaccggatggacggtactatttgttttatgttcttgataaagtaaatgttgtgtccgtggcggtttgtaattctcccgccggagaatttaaattccacggctatgtacattatccggacggaacaaagcttggcgagcgaaaaggagaccagcctcaatttgatccgggcgttttaacggaaggcgataaaacatatctctttacaggtttttgcggacgcgacgataaaacaagaataggcgctacagcgataacgctgggaaaagatatgctaactatacttgatgatcctgttcttgtcgttcccggggtacataacagcaagggtacaagttttgaaggctgtgaattttttgaagctccgtccataagaaagcgcggcgacacatactattttatctattcatcaattttgtctaacgagcttttgttacgcgaccagtaa

SEQ ID NO: 56740 - protein, 158 aa, Unknown
  Obtained from environmental sample
  misc_feature (1)..(158): Xaa is any amino acid
MCLYAPGVTQGPDGRYYLFYVLDKVNVVSVAVCNSPAGEFKFHGYVHYPDGTKLGERKGDQPQFDPGVLTEGDKTYLFTGFCGRDDKTRIGATAITLGKDMLTILDDPVLVVPGVHNSKGTSFEGCEFFEAPSIRKRGDTYYFIYSSILSNELLLRDQ

SEQ ID NO: 56741 - DNA, 687 bp, Unknown
  Obtained from environmental sample
  misc_feature (1)..(687): n is a, c, g, or t
atgtttacggcggcgttatcatcagcaacgccgacgtgcatatcggctcatataaacccgccgattaaaccaatgggctgcggcggcaataatcacggaagcatcatcgaaataaaaaacaaatggtatattttttatcacaggcataccaatggaaacgaattcagccgtcagggatgtcttgagccgatagaaataaaggcggacggttctattccgcaggtggagacgacttcgtgcggaccaaacggcaaaccgcttatcggcaaaggggaatatccggcatatattgcatgtaacatattttccgtggaaaataatcggcagttagaaagacaatggccgcttcacaaccagtctctgcctaaaatttcgcaggatggacgggatggcgatgaagaaacgggttatgtaacaaatatttccgacaatcacggtattggatttaagtattttgattgcaaaggaattaaaagaataaagataaaaacgcgaggttacaacaacggtgtttttcatgttaaaacaaaatgggacggcgaatctttagcgtgcataaaaattgaatacagcaatatttgggtggaatattcttcggatataaaccttcctgacggaatacacgccctttactttatttataaaggtaatggatacgcttccattgcttcctttactttggaataa

SEQ ID NO: 56742 - protein, 228 aa, Unknown
  Obtained from environmental sample
  misc_feature (1)..(228): Xaa is any amino acid
MFTAALSSATPTCISAHINPPIKPMGCGGNNHGSIIEIKNKWYIFYHRHTNGNEFSRQGCLEPIEIKADGSIPQVETTSCGPNGKPLIGKGEYPAYIACNIFSVENNRQLERQWPLHNQSLPKISQDGRDGDEETGYVTNISDNHGIGFKYFDCKGIKRIKIKTRGYNNGVFHVKTKWDGESLACIKIEYSNIWVEYSSDINLPDGIHALYFIYKGNGYASIASFTLE

SEQ ID NO: 56743 - DNA, 1584 bp, Unknown
  Obtained from environmental sample
  misc_feature (1)..(1584): n is a, c, g, or t
atggacgtaaaacaggctattatcgaaaataaaacttctcttggcatagagtttggctccacgcggataaaagcaatattaattgatacgcaatacacgcctatcgctcaaggcagtcacgattgggaaaacagactggaagaacggagttggacgtatcaccttgacgatgtgtgggctggactgcaggactgtttcgcgaagctggcctttgatgtaaaaaatcgctatggccttgccctttcttcggtcggcgctatcggtgtttccgccatgatgcacgggtatctggtatttgacaaagacggcaatcagctcgttcccttccgtacctggcgcaataccataaccgaaaaagccgccgccgtgcttacagaaaaattcaatttcaatattccccagcgctggagcatcgcccatttatatcaggcaatcctgaacggggaaacccatgtaaaggatattgattatataacgacccttgccggttatgtgcattggaaattaacaggaaaaaaaacgcttggtattggcgacgcttcgggtatgtttcctgtgtacggtgataattacaatcctttgatgttaaagcagtttgacactcttatcgctccctgtaattacggatggaaaattacggatattctccccgccgttttgagcgccggcagaaacgccggctcgctgactgccgaaggggcgaagctgcttgatccgtccggctctttgcaagcgggcatacccctctgcccgcctgaaggagacgcgggtacgggcatggttgcgactaacagcgtggctgaaaggacaggaaatgtttcggcgggcacgtcgatctttgcgatgattgtactggaaaaggcgttgtcaagactttaccccgaaattgacatggtgactaccccgaccggcaagccggcagccatggttcattgtaataattgcacaacagatcttgacgcatgggtaaagctgttcagggaactggcggatcttgcaggggcgaaaattgaaaagccagccctgtatgacgccctgtattttaaagcactggaaggggaagctgactgcggaggcttgttgtcttacaattatcattccggggaacacattaccggttatgaacaaggccgccctttgtttgtacgctcccaggaaagcaattttactatggcaaattttatgcgtacccttcttttctctacaatggctaccctgaaacttggaatggatatattgactgaaaaagagcacatacgacttgacaacctgttaggccatggcggcttgtttaagacgaagggggtagggcaaaggctgatggcaggggctctcaatacgccagtgtctgtgatggaaagcgccggtgagggcggggcctggggcatcgcccttcttgcggcttttttaacgcataagccgaagggcatgtcgcttgaaaaattcctggcggaagaagtttttggaggagcaaagggcgacagggtggagccggatcaaaaggacatacagggctttaaaaaatttatggaaaggtattcggcaggtctaaaaatagagcgggctgccgtggaaaatttgtaa

SEQ ID NO: 56744 - protein, 527 aa, Unknown
  Obtained from environmental sample
  DOMAIN (265)...(500): FGGY family of carbohydrate kinases, C-terminal domain
  misc_feature (1)..(527): Xaa is any amino acid
MDVKQAIIENKTSLGIEFGSTRIKAILIDTQYTPIAQGSHDWENRLEERSWTYHLDDVWAGLQDCFAKLAFDVKNRYGLALSSVGAIGVSAMMHGYLVFDKDGNQLVPFRTWRNTITEKAAAVLTEKFNFNIPQRWSIAHLYQAILNGETHVKDIDYITTLAGYVHWKLTGKKTLGIGDASGMFPVYGDNYNPLMLKQFDTLIAPCNYGWKITDILPAVLSAGRNAGSLTAEGAKLLDPSGSLQAGIPLCPPEGDAGTGMVATNSVAERTGNVSAGTSIFAMIVLEKALSRLYPEIDMVTTPTGKPAAMVHCNNCTTDLDAWVKLFRELADLAGAKIEKPALYDALYFKALEGEADCGGLLSYNYHSGEHITGYEQGRPLFVRSQESNFTMANFMRTLLFSTMATLKLGMDILTEKEHIRLDNLLGHGGLFKTKGVGQRLMAGALNTPVSVMESAGEGGAWGIALLAAFLTHKPKGMSLEKFLAEEVFGGAKGDRVEPDQKDIQGFKKFMERYSAGLKIERAAVENL

SEQ ID NO: 56745 - DNA, 1443 bp, Unknown
  Obtained from environmental sample
  misc_feature (1)..(1443): n is a, c, g, or t
atgctgttcaaggtaaaccgggacgctgatttttccgttgacgagcgcagggacgaggattttattgaggcgatggcggaggtaattgaaggcagggaaacatcggcgcctgtcaacatgatctattcaccgggcagcgacaggttaagggacgagctggcaaagcggtttgttctgcgaagcggcgatctgtacgagcttgagggcccttttaaccccggcggcctggccgagttggcgggcgttgcgggtttcgagcagctgcatgaaaaggcatggaaaatacatccagctcccggctttagcgacgaagtatcgatttgggatcgtttaagccagggcgacattatgcttcatttcccctaccagtcatttgatcctgtagtccgtttcttccaggatgccgcggcggatccccaggttatctcgattaaaacggcgctttaccgcacgggtgggggagcccagcaggtttcgctcattgtgcgctctcttgaacaggcggcccttaacggcaagcatgtgacggcgctggtggaattaaaagcgcgctttgacgaggaacgcaacatatcctgggcaaaccgcctggaaaaagccggggtgatagtggtatacgggctttcacagcttaaagtgcacgcgaaggttacaatggtgctgcggcgcgaacacgagcgcgtcaggcgttatgtgcatctttccaccggcaattacaatgacaagaccgccaaattgtacgaagacatctgcctttttacctgccgtgaggaaatcgcctatgacgccggattgctgtttaacatgatcaccggctattcgctgagacaggccatgcggcgtctggtaatcgccccctacagcctgaaaccaaaacttttggaactggtggagcgcgaggcgacgcgttccaatcaccagtattccggcaagataatgataaagtgcaattccattacagataacgatacgattaacgccctgtaccgcgcttcccgcgccggagtgaagattttaatatgcgtcaggggaatatgcgccctggttcccggcgttcaggggctttccgaaaacatcaaggttatcagtgttatagactattaccttgaacattcaagaatctactactttgccaacggcggggcggaggaactgtacctttccagcgccgaccttatgcaccgcaaccttgaacgccgcgttgaaataatgtttcccgtacaggatgaaaagatacggaatgagcttcttgacgtattaaacggttattttctggacaactgccaggcgagggcgcttgattcctcgggaacatggaaacagctcagcccgtcccagggtgaaaagcccttccgcgcccagaaagacatgctttcccgcgccgccagggattctgacagccctgtggccgttaagcaggaattcacggtaagaagggcctga

SEQ ID NO: 56746 - protein, 480 aa, Unknown
  Obtained from environmental sample
  DOMAIN (1)...(463): Polyphosphate kinase
  misc_feature (1)..(480): Xaa is any amino acid
MLFKVNRDADFSVDERRDEDFIEAMAEVIEGRETSAPVNMIYSPGSDRLRDELAKRFVLRSGDLYELEGPFNPGGLAELAGVAGFEQLHEKAWKIHPAPGFSDEVSIWDRLSQGDIMLHFPYQSFDPVVRFFQDAAADPQVISIKTALYRTGGGAQQVSLIVRSLEQAALNGKHVTALVELKARFDEERNISWANRLEKAGVIVVYGLSQLKVHAKVTMVLRREHERVRRYVHLSTGNYNDKTAKLYEDICLFTCREEIAYDAGLLFNMITGYSLRQAMRRLVIAPYSLKPKLLELVEREATRSNHQYSGKIMIKCNSITDNDTINALYRASRAGVKILICVRGICALVPGVQGLSENIKVISVIDYYLEHSRIYYFANGGAEELYLSSADLMHRNLERRVEIMFPVQDEKIRNELLDVLNGYFLDNCQARALDSSGTWKQLSPSQGEKPFRAQKDMLSRAARDSDSPVAVKQEFTVRRA

SEQ ID NO: 56747 - DNA, 375 bp, Unknown
  Obtained from environmental sample
  misc_feature (1)..(375): n is a, c, g, or t
gtgagttcccttgaagctgacgagctctttcgggcatgttctgaatccctgaagcagggaaactgcctcattattttccccgaaggaaccagaaccccaagaacaggaaaaatagttatcaagaaaggcgctgcccgtattgccctggcttcgggctgcggtatattaccaatacatatacgcggcactgataaatacggtttgggtaagggtgatccctggactgcctttaatccccaagaacgctacgtctaccggatgagcatgggaaccgagattaaccctgagaaataccggcgcctttccaatcccgcggcggtacgggcattgacaggggagattttctcatccctattcccccaatacgaaaaatga

SEQ ID NO: 56748 - protein, 124 aa, Unknown
  Obtained from environmental sample
  misc_feature (1)..(124): Xaa is any amino acid
MSSLEADELFRACSESLKQGNCLIIFPEGTRTPRTGKIVIKKGAARIALASGCGILPIHIRGTDKYGLGKGDPWTAFNPQERYVYRMSMGTEINPEKYRRLSNPAAVRALTGEIFSSLFPQYEK

SEQ ID NO: 56749 - DNA, 759 bp, Unknown
  Obtained from environmental sample
  misc_feature (1)..(759): n is a, c, g, or t
atgaaaaacttatgcgtgttccttggggttttgcttctttccgcctgccaaagcataaaccgtaataacgcggagttacacatagttcctcctatggttatcctcagctttgatgacggcccaaacgccgagggcgatacaaccgcccgtcttttggatatgctcaaaaaatacgaaatccgcgcactgttttgtttactgggtgaaaatgccgaagcctatccccatctggtcaggcgtattcatgatgaggggcattatatcatcaaccacggttattttgacaaatgggcgatcagaatgggggaagatgaattcctgaataaccttatgttaggggagagggcgatctccgcggccttggggaaagaattgaatccaaaactgtaccggccccacggcggtttttacagttccgggcaggaaaaaatcattcgtgacgagggttatatgctggttccgggcaatatcagggtgtatgacgcggttattgacgggacaaaacaggataaagttgtaaggagaataataaaaaaagttaaaaaacatggcggaggaatcattttactccatgacgcaagggattcttataccctggcggaaacgtggattgaaaaaaaaccatatggcgtttttagccgctcatggattccagacacagtggaagagataattactgcccttttggaaaaagattttattatgaacaatccggatatattcaattggttactggaagcgggttataagggtaattga

SEQ ID NO: 56750 - protein, 252 aa, Unknown
  Obtained from environmental sample
  SIGNAL (1)...(23)
  DOMAIN (26)...(153): Polysaccharide deacetylase
  misc_feature (1)..(252): Xaa is any amino acid
MKNLCVFLGVLLLSACQSINRNNAELHIVPPMVILSFDDGPNAEGDTTARLLDMLKKYEIRALFCLLGENAEAYPHLVRRIHDEGHYIINHGYFDKWAIRMGEDEFLNNLMLGERAISAALGKELNPKLYRPHGGFYSSGQEKIIRDEGYMLVPGNIRVYDAVIDGTKQDKVVRRIIKKVKKHGGGIILLHDARDSYTLAETWIEKKPYGVFSRSWIPDTVEEIITALLEKDFIMNNPDIFNWLLEAGYKGN

SEQ ID NO: 56751 - DNA, 507 bp, Unknown
  Obtained from environmental sample
  misc_feature (1)..(507): n is a, c, g, or t
atgtgtatcaggctatttatgacacatcgcgattatataaaagaacgcgttaagcgttaccacgaccacggcatcggcgtagagggcacgatccttttgggattggataatcaaacggaagacggttgcagacggcttatcgacttcctgctggaaattaaccttgatcttgcggagttcacggtaatgacccctttcccccacaccaaagcctgggacgaccttgcgcgacaggggcgcatttttgaccgcgattgggatcattttaacgccggtcaggtggtctttaccccgaaaaacatgagcgccgaacgcctgcaggaactgtacgattacgcctggaaaaccttttatcaggatgagactcaggaagaaaaaatgtttcacttgctttcatcggttgtcagccgcgaaatggacgacggaacttaccgcccccgcaaccggcggctgattcataaatcattcgggaaagacgtcgtacggggcgttggggcgggcagttaa

SEQ ID NO: 56752 - protein, 168 aa, Unknown
  Obtained from environmental sample
  misc_feature (1)..(168): Xaa is any amino acid
MCIRLFMTHRDYIKERVKRYHDHGIGVEGTILLGLDNQTEDGCRRLIDFLLEINLDLAEFTVMTPFPHTKAWDDLARQGRIFDRDWDHFNAGQVVFTPKNMSAERLQELYDYAWKTFYQDETQEEKMFHLLSSVVSREMDDGTYRPRNRRLIHKSFGKDVVRGVGAGS

SEQ ID NO: 56753 - DNA, 429 bp, Unknown
  Obtained from environmental sample
  misc_feature (1)..(429): n is a, c, g, or t
atgggtagattacaagatatagaagaaaaattaaaacaaataaacgatgccgtttttcaagaattatgtgattgctttttatctttaagaaatgataattataaagctttttcaagaattggtagtcaaaaaggaaagcaaaaaacaataaagggaactcctgatactttattattacttccaaatggaaaatatgctttcgttgaatattctacaaatatttctttgggattgtcaaagataaaagaagatattgaaaaatgtcttgatgacaaaaagacaaatatacctctggaaaatatagatgaaataatttattgtgtaaatttcgagcttgatacaaatgaaataaatgaattcaataatttattatcagaaacagaaataacacttgatttatttttaaaaaatcatggagggaaagtgtga

SEQ ID NO: 56754 - protein, 142 aa, Unknown
  Obtained from environmental sample
  misc_feature (1)..(142): Xaa is any amino acid
MGRLQDIEEKLKQINDAVFQELCDCFLSLRNDNYKAFSRIGSQKGKQKTIKGTPDTLLLLPNGKYAFVEYSTNISLGLSKIKEDIEKCLDDKKTNIPLENIDEIIYCVNFELDTNEINEFNNLLSETEITLDLFLKNHGGKV

SEQ ID NO: 56755 - DNA, 573 bp, Unknown
  Obtained from environmental sample
  misc_feature (1)..(573): n is a, c, g, or t
ttgttggagttatctatgcccttaactaataatcaacttaacttcatcgcttcaatcaaggaaaaaatccgccttgctcaatacgaagccctaaaggaagtgaatactcagcttattaagctctattgggagataggcaaggatatttcagaaagacaggcggaaagctggggagaatcaatagtttcagttctttctaaggagttacagaacgaattcccaggaattagcggattttcagaacgtaatttgtggcttatgacacagttttacaacgaataccaaaatgctgaatttctgcaaccactggttgcagaaattagctggacaaaacatattacaataatgagtaaatgcaaggataatgaggaacggcgtttttatattatggcaactaanaattttggctggacgaaaaatgtccttatccaccaaatagaaagcaaaacctatgaaaaataccttttaggtcaaacaaatttcgatacaacacttccagacagcatcaaaaatcaagcggttctagcgataaaagaagaatacacctttgacttcatggattttggccgatga

SEQ ID NO: 56756 - protein, 190 aa, Unknown
  Obtained from environmental sample
  DOMAIN (15)...(188): Protein of unknown function (DUF1016)
  misc_feature (1)..(190): Xaa is any amino acid
MLELSMPLTNNQLNFIASIKEKIRLAQYEALKEVNTQLIKLYWEIGKDISERQAESWGESIVSVLSKELQNEFPGISGFSERNLWLMTQFYNEYQNAEFLQPLVAEISWTKHITIMSKCKDNEERRFYIMATXNFGWTKNVLIHQIESKTYEKYLLGQTNFDTTLPDSIKNQAVLAIKEEYTFDFMDFGR

SEQ ID NO: 56757 - DNA, 501 bp, Unknown
  Obtained from environmental sample
  misc_feature (1)..(501): n is a, c, g, or t
ttgacttcatggattttggccgatgaccacagcgaacggcagttgaaagcggcattagtcaacaatgtccgttcatttctactggaaatgggttcacaatttacctttattggaaatcagtacaagattaagctcgaggataaagagtattttattgaccttttattgtatcatcgtgaattgcaatgccttgtagccattgaacttaaaatcggcgaattccagccagaatacaagggaaagatggaattctacctctcattattgaatgaaagggtaaaactaccccatgaaaacgactctattggtatcataatctgtaaagagaaaaatcggacaatagttgaatactcattaaaaacaagttccatgccaataggcgtatcaacctatacaactacggcaaaactccccaaagattataggaatttattgcctgacagtaaaacaatcagccaaaaaatagatatgctgtttaaagataatgacaaacaaaaatag

SEQ ID NO: 56758 - protein, 166 aa, Unknown
  Obtained from environmental sample
  DOMAIN (1)...(148): Protein of unknown function (DUF1016)
  misc_feature (1)..(166): Xaa is any amino acid
MTSWILADDHSERQLKAALVNNVRSFLLEMGSQFTFIGNQYKIKLEDKEYFIDLLLYHRELQCLVAIELKIGEFQPEYKGKMEFYLSLLNERVKLPHENDSIGIIICKEKNRTIVEYSLKTSSMPIGVSTYTTTAKLPKDYRNLLPDSKTISQKIDMLFKDNDKQK

SEQ ID NO: 56759 - DNA, 1365 bp, Unknown
  Obtained from environmental sample
  misc_feature (1)..(1365): n is a, c, g, or t
ttgggttccgccgactttttcaagattgataacaaattttttatttattcttcggccataccgcatacgggctggattcttgtgtcaacaataccgtcatccgtgatctttgatgatattaataccctgatcattcgccttgttattttatgtatagcgatgctcgcggtagttgtttttatattaatcttttttgtcgtgcgaagaatcagctcaccgataaaggcgatccactcggctctggaaaagttaaaggacggggatttaaccgtaaaagcagccgttaagtccgaagatgaaataggggaattgtcagactttttcaatatgacactggaaaaaatcaaaaaccttgtagggacgataaaatacaaaatcaacgggcttacccataccggttttgaactttcctccaatatgagcaaaacctctacggccgtacagcagatttcgtctaaccttgacaacatggaaaaccttatggtcaagcaggaaaacggcgccgaagaagccggcaaggctgtagggaaaattaaaacaaatattgacagtcttaacaaaatgatagaagagcagaccgaaagcgtaaacttgtcgtccacggccattgaggaaatgacggctaacattcattcggtaacgcanacgcttgcggaaaacagcaaaaatgtcggcgttttggccgaagcgtcggagaacgggaaaacgggactgcagacggtcgcgcagganatacaggaaatagcccatgattccgaagggcttttggaaataaactctgttatggcaaatatcgctagccagaccaacctgctttcgatgaacgccgcgatagaggctgcccacgcgggggaagcgggcaagggcttcgccgtagtcgccgatgagatacgcaaacttgcggaaaattccagcgtacagtccaagaccgtcggcgcggtacttaaaaagatcaagggatctatcgacaagatagggcgttccacagaaaacgtactcaacaaatttgaagcgattgatttgagcgtcaggactgtcgtgcggcaggaagaaaacatacgaaacgcgatggaagaacaaggcgcggggagcaagcagatacttgaaggatcgggcagattgaatgaaataaccggtcaggtaaagggcggctcccatgaaatgcacgaaggggcgcaggaagttatccatgaaagcgaaaaccttgaaaaagcgaccgcggaaatcacggcgggcataaacgagatggccgctggggcggctcatatcaattcggcggtaaactatgtcaacgaaataagcggcaggaaccgcgaggccattgatgtcgtaataagggaagtctcgcggttcaaggtggggtaa

SEQ ID NO: 56760 - protein, 454 aa, Unknown
  Obtained from environmental sample
  DOMAIN (190)...(410): Methyl-accepting chemotaxis protein (MCP) signaling domain
  misc_feature (1)..(454): Xaa is any amino acid
MGSADFFKIDNKFFIYSSAIPHTGWILVSTIPSSVIFDDINTLIIRLVILCIAMLAVVVFILIFFVVRRISSPIKAIHSALEKLKDGDLTVKAAVKSEDEIGELSDFFNMTLEKIKNLVGTIKYKINGLTHTGFELSSNMSKTSTAVQQISSNLDNMENLMVKQENGAEEAGKAVGKIKTNIDSLNKMIEEQTESVNLSSTAIEEMTANIHSVTXTLAENSKNVGVLAEASENGKTGLQTVAQXIQEIAHDSEGLLEINSVMANIASQTNLLSMNAAIEAAHAGEAGKGFAVVADEIRKLAENSSVQSKTVGAVLKKIKGSIDKIGRSTENVLNKFEAIDLSVRTVVRQEENIRNAMEEQGAGSKQILEGSGRLNEITGQVKGGSHEMHEGAQEVIHESENLEKATAEITAGINEMAAGAAHINSAVNYVNEISGRNREAIDVVIREVSRFKVG

SEQ ID NO: 56761 - DNA, 465 bp, Unknown
  Obtained from environmental sample
  misc_feature (1)..(465): n is a, c, g, or t
ttgctccccgcgccttgttcttccatcgcgtttcgtatgttttcttcctgccgcacgacagtcctgacgctcaaatcaatcgcttcaaatttgttgagtacgttttctgtggaacgccctatcttgtcgatagatcccttgatctttttaagtaccgcgccgacggtcttggactgtacgctggaattttccgcaagtttgcgtatctcatcggcgactacggcgaagcccttgcccgcttcccccgcgtgggcagcctctatcgcggcgttcatcgaaagcaggttggtctggctagcgatatttgccataacagagtttatttccaaaagcccttcggaatcatgggctatttcctgtatntcctgcgcgaccgtctgcagtcccgttttcccgttctccgacgcttcggccaaaacgccgacatttttgctgttttccgcaagcgtntgcgttaccgaatga

SEQ ID NO: 56762 - protein, 154 aa, Unknown
  Obtained from environmental sample
  misc_feature (1)..(154): Xaa is any amino acid
MLPAPCSSIAFRMFSSCRTTVLTLKSIASNLLSTFSVERPILSIDPLIFLSTAPTVLDCTLEFSASLRISSATTAKPLPASPAWAASIAAFIESRLVWLAIFAITEFISKSPSESWAISCXSCATVCSPVFPFSDASAKTPTFLLFSASVCVTE

SEQ ID NO: 56763 - DNA, 951 bp, Unknown
  Obtained from environmental sample
  misc_feature (1)..(951): n is a, c, g, or t
ttgactttaagggagagggaagaaatagcgttggggcttgaaatagggttaaaacagcgcgaaatcgcaacaaacctcaaccgttccccaggcacaatatcgcgcgaaataaaaaggaataagttatatgcaaggggagcaaaatacagggcaacctgggcacagttccaaacagacgagcggaagaagaacagccataaaaaagttagaatgcccaataaaaaactgaggcgctttattcaggaactgttaaaaaagggatattcgccggaaataattgccgttatggcttttgaaaaaaacgaaagatggaagaccaactatgagacaatttatcaatgggtatacagcgacaggaaagatttaaaaccgtttcttgcaaaaagccatcgaaccaggcgaaaaagagggtctgcaaggcaaaaacggtgccctaaaataccaaaccgtacaatgattgagaaacggcccgatcatataaacctcaggtcggaaataggccattgggaaatagatacggcaatatccagaataagtaaagcggcaataatggttttggtggaaaggaaaacaagatatgtaattatcaaaaaacttgcggcaaaaacggcatgtttcatgcatgacgctacggtaaaaagcctaaaagattatccaacaaatattaggcaaagtattacctatgacaatggaactgaaaacacttttcatgaacttaccaataaagttcttggaaccaaatcgtatttttgtaatccctaccacagctgggaaaagggcactgttgaaaatgtcattggcattatcagaaggttttatccaaagaaaacagattggaaatatattacccaacgggacttgaataaagttgcaagatttatcaataataggcctatgaagctgttaggcttcaagacaccttatcaggtcttcgttgcacttgcgtcttga

SEQ ID NO: 56764 - protein, 316 aa, Unknown
  Obtained from environmental sample
  DOMAIN (161)...(312): Integrase core domain
  misc_feature (1)..(316): Xaa is any amino acid
MTLREREEIALGLEIGLKQREIATNLNRSPGTISREIKRNKLYARGAKYRATWAQFQTDERKKNSHKKVRMPNKKLRRFIQELLKKGYSPEIIAVMAFEKNERWKTNYETIYQWVYSDRKDLKPFLAKSHRTRRKRGSARQKRCPKIPNRTMIEKRPDHINLRSEIGHWEIDTAISRISKAAIMVLVERKTRYVIIKKLAAKTACFMHDATVKSLKDYPTNIRQSITYDNGTENTFHELTNKVLGTKSYFCNPYHSWEKGTVENVIGIIRRFYPKKTDWKYITQRDLNKVARFINNRPMKLLGFKTPYQVFVALAS

SEQ ID NO: 56765 - DNA, 471 bp, Unknown
  Obtained from environmental sample
  misc_feature (1)..(471): n is a, c, g, or t
gtgcgcaatggggcagccaatctctttatgatgttcgagccgcttgtcgggcggcgcgaagtgaaagtaacggaacgacgaaccggaaaagattttgcaggctgccttaaagaattggcagaaatacaatatccagacgctgaaaaaatagtgcttgttatggacaacctgaatacccatacgctcgcttctttgtactccgcatttgaaccggaagttgctttgcgccttgcccagcgtttcgagatccatttcactcccaaacatggttcctggcttaatatggctgagttagaaataggagtaatgagccggcaatgcctaaaaaggagaataccgactattgaaaagatggcaggtgaagttcaagcctgggttgctgaacggaacgataatagaaccactgttcactggcagttcactaccgaagatgcccgcattaagctgagacacttgtatccaaaattttaa

SEQ ID NO: 56766 - protein, 156 aa, Unknown
  Obtained from environmental sample
  misc_feature (1)..(156): Xaa is any amino acid
MRNGAANLFMMFEPLVGRREVKVTERRTGKDFAGCLKELAEIQYPDAEKIVLVMDNLNTHTLASLYSAFEPEVALRLAQRFEIHFTPKHGSWLNMAELEIGVMSRQCLKRRIPTIEKMAGEVQAWVAERNDNRTTVHWQFTTEDARIKLRHLYPKF

SEQ ID NO: 56767 - DNA, 330 bp, Unknown
  Obtained from environmental sample
  misc_feature (1)..(330): n is a, c, g, or t
gtgctcaaagagaaatccggcggcgaatcccagaccccctattatgtggccattgccgcgagtttctaccgtttctacaaggcccgccccgaaacaaccgtgcgcctggtgatctttgacgaagcctttaaccgcatggacgatgagcggatcggcaagatactctcgttttataataacctgaatctccagataatcacttcggttccgccggaaaaaatcgaggccatcgccccctatatggatcgcatcaatgtgattagccgtttcggcagcgcggtaaaagtaagggattgccacattgatgacattgacacgggtacgccatga

SEQ ID NO: 56768 - protein, 109 aa, Unknown
  Obtained from environmental sample
  misc_feature (1)..(109): Xaa is any amino acid
MLKEKSGGESQTPYYVAIAASFYRFYKARPETTVRLVIFDEAFNRMDDERIGKILSFYNNLNLQIITSVPPEKIEAIAPYMDRINVISRFGSAVKVRDCHIDDIDTGTP

SEQ ID NO: 56769 - DNA, 1203 bp, Unknown
  Obtained from environmental sample
  misc_feature (1)..(1203): n is a, c, g, or t
atggatttacagaaggggcaaaaactcgactcaggttttaccattatcgacatagtcgatcttaccgagatgaaagcggttggaatttgggcaaggcatgataaaaccaacgctgaagtttttcatgttttcaatgatgacagcgagaatcttttcgctttcgcttttgccacaactccgcaggatgataccggcgtatcgcatatccttgaacactcggtgctgtgcggttctgaacgctatccgcttaaagacgcttttcttgttcttgcgcagggaagcctgcaaaccttccttaatgcgtggactttccccgataaaaccgtttatccggccagttccgtaaatgagcgcgattacttcaatcttatgtcagtgtacggcgacgcggtgttcagcccactgcttgccgaatggacattcctccaggaagggcaccgttatcaattcggaaaagacggcaaagggctctccgttaccggcgtggtttacaacgagatgaaaggggtttattcgtcgccggacagctacgcccatctctggtcggtaaaagccgttttgccggataccccgtacagctttgaatccggcggagcccccgaacatatccccgagctgacatgggaaggcttaaaagactttcaccgccgccgttattcgccggcgaactgccgcgtctttctggcggggaacatacccaccgaaaaacagctcgccttcctgaacgacaatttttttgcgtcaatacatggaggcacaacctgcgcgcgaattggcaaacagaaacgctggaccgagccaaaagaattcaatgtcccctgccccgccggttccgcggaagacgcgtcatctgccggtgacggctacaaatccacggtttttctgtcatggcttctctgtaacgccgtcgacacggatgaaaatatcgcccttgccgcgttaggtgaaattctactgggccatgacggttcccctctgacaaaggcgcttatacagtcgggtcttggcgaggatatttccccggttaccggcattgaaagcgaactgggagaaacgatttttactgtcggtctgcgcggggtcagcggcgttgccgcctcgagcggcgccgctgcttcgacaggctcagcaaccggtacggataaaaagattgaggcgcttatactgggggaactgaggcggcttgtatctcggccgatctga

SEQ ID NO: 56770 - protein, 400 aa, Unknown
  Obtained from environmental sample
  DOMAIN (205)...(396): Peptidase M16 inactive domain
  misc_feature (1)..(400): Xaa is any amino acid
MDLQKGQKLDSGFTIIDIVDLTEMKAVGIWARHDKTNAEVFHVFNDDSENLFAFAFATTPQDDTGVSHILEHSVLCGSERYPLKDAFLVLAQGSLQTFLNAWTFPDKTVYPASSVNERDYFNLMSVYGDAVFSPLLAEWTFLQEGHRYQFGKDGKGLSVTGVVYNEMKGVYSSPDSYAHLWSVKAVLPDTPYSFESGGAPEHIPELTWEGLKDFHRRRYSPANCRVFLAGNIPTEKQLAFLNDNFFASIHGGTTCARIGKQKRWTEPKEFNVPCPAGSAEDASSAGDGYKSTVFLSWLLCNAVDTDENIALAALGEILLGHDGSPLTKALIQSGLGEDISPVTGIESELGETIFTVGLRGVSGVAASSGAAASTGSATGTDKKIEALILGELRRLVSRPI

SEQ ID NO: 56771 - DNA, 447 bp, Unknown
  Obtained from environmental sample
  misc_feature (1)..(447): n is a, c, g, or t
atggttcaaattgattcatggcatgaatgtggcgatggaacaaaattgtatctgcgccgatgggaaatctggtctgctgcgcagcccttgtctgttgcgcagcccgggtcttctttgaagcccttggctgtggtgcagatactgcacggaatggcggaacactcacagcgttacagccgtcttgcggaaaaactctgcggggccggaattgaagtatgggccgcggatcagaggggacacggaaaaaccgcggatttaaacgtcaatgcccctgataaaggcggaatattggggcactgcgctgataacgatacctttgaacgaatcgcctgcgacgcgctcagcataaaccaaacaatactaaagacacacccggggatacctctgttcctgatgggtcattccctggggttcttttatcgcgcagtattatatcgaaaaccatga

SEQ ID NO: 56772 - protein, 148 aa, Unknown
  Obtained from environmental sample
  misc_feature (1)..(148): Xaa is any amino acid
MVQIDSWHECGDGTKLYLRRWEIWSAAQPLSVAQPGSSLKPLAVVQILHGMAEHSQRYSRLAEKLCGAGIEVWAADQRGHGKTADLNVNAPDKGGILGHCADNDTFERIACDALSINQTILKTHPGIPLFLMGHSLGFFYRAVLYRKP

SEQ ID NO: 56773 - DNA, 1008 bp, Unknown
  Obtained from environmental sample
  misc_feature (1)..(1008): n is a, c, g, or t
ttggagttttcctattttggcgacccagtcacccaaaccagcttcaacacagccggcgacccagaccttaaagatgaccagatggccaaccgcaaccgtggcggcgatagctacctcatccgccacgtgggggcgctggccagcaatttgacttgggaaaataccataggcatccacaagacttccttttacacctacccgatgacaccggaagcagggccgtacaggtctattttggactcgccagaaaatgagacctttgggagataccccgatgagaggctggagcgccagagaaacctcagcctgcgaagcgaaattactctgatcgctggcccgaatcacgccaagatgggcttccagagcctacagagcgaatttacccaagcatttgcccgcgtacgcgcaagcgggggaataagctatctagatagggccgcaggcgggaatggcccagacgatagcaccgtggcggcaatccgcaatgggctggcagagtacaacaatggctcaaacttcgattatagaaatgagttcagccgaatcgcggtcagccccgtatcgggcaaattggtgggagcacacgaagcctatctttaccagcgcacgttgatgttaatggaagaatacggcagcccgctcaagtcccgtatcgtgggtgcctatgttcaggacgacttacagctgggccgctgctgggtaatcaatttgggctttcgcatagaccaggctaagctcaatggggaagatggaaaagaactctttagccaaaatctctttagccctagggtgggcgcgtcttgggacccatttgcaaagggtacgttcaggttttttgcgtactatggccgcatctacagcccgccaacgcctgggaactttattgccgccggagcgacgaccggcgggcccgcgactgaactccaagtgctgattcccgacatctatgcagtggccggggagctcggctggaaaaacttggcagaaagctggtgtaaagggcgttga

SEQ ID NO: 56774 - protein, 335 aa, Unknown
  Obtained from environmental sample
  misc_feature (1)..(335): Xaa is any amino acid
MEFSYFGDPVTQTSFNTAGDPDLKDDQMANRNRGGDSYLIRHVGALASNLTWENTIGIHKTSFYTYPMTPEAGPYRSILDSPENETFGRYPDERLERQRNLSLRSEITLIAGPNHAKMGFQSLQSEFTQAFARVRASGGISYLDRAAGGNGPDDSTVAAIRNGLAEYNNGSNFDYRNEFSRIAVSPVSGKLVGAHEAYLYQRTLMLMEEYGSPLKSRIVGAYVQDDLQLGRCWVINLGFRIDQAKLNGEDGKELFSQNLFSPRVGASWDPFAKGTFRFFAYYGRIYSPPTPGNFIAAGATTGGPATELQVLIPDIYAVAGELGWKNLAESWCKGR

SEQ ID NO: 56775 - DNA, 1050 bp, Unknown
  Obtained from environmental sample
  misc_feature (1)..(1050): n is a, c, g, or t
ttgttgattcaaaaaacgggcggcaggctattcattatcccgatccccgtctggaagacgtactcaaggaaacctacggcgttatcgtatatcaggaacaggtcatgcaggttgcgcggattatcgcccggttacagtttaggacaggccgatatactccgccgcgcaatgggaaaaaagaaaaaagaaattattgacgcggaaaaaattaattttattgaaggcgcggagcgacagggctattcaaaaaccaaagccggtcaaatttatgatatactggttccttttgccggttacggctttaacaaaagtcatgcggcggcgtattcggtgatcgcttaccacaccgcctatcttaaagccaattttcccgcagaatttatggccgccaatcttaccaatgagattcacagcgccaataaggaaaaattatctgaatgtattgacgaggctcgcaagatgggcattgcgattgatccgcccgatgttaatcattccgaaaaactttttaccattgtggacgggcgtatcatttacggacttttggggataaagggcctgggcgacgtccccgccgatgaaattgtgcgttgccgcaaggacggtttttatcatgactttatggattttctgtcaagagttgacatcaaactggtggggaaggcggttattgaaaaattgatacagaccggagcctttgaccgtttgggtataagcagggaaaatcttttgggtaatctggaacgggcggttgagtatgctcaaaaacaaaaagaagataaaaaattcggacagaccagtttgtttgggggaaccgacgaaaaagagtacaccgattttgtgtttgagaattttcctgaaacaagccgccttgaaaaattaaaaattgaaaaacagcttatcggtttttatttctccggccatcccatggacgaataccgggacttgtgggaaaaaatagtaaaggttgatcttggacatctggcggcaagccgccttgaaaccatagaaccgggaaatcaaattcttgttggtattataaaacaatag

SEQ ID NO: 56776 - protein, 349 aa, Unknown
  Obtained from environmental sample
  misc_feature (1)..(349): Xaa is any amino acid
MLIQKTGGRLFIIPIPVWKTYSRKPTALSYIRNRSCRLRGLSPGYSLGQADILRRAMGKKKKEIIDAEKINFIEGAERQGYSKTKAGQIYDILVPFAGYGFNKSHAAAYSVIAYHTAYLKANFPAEFMAANLTNEIHSANKEKLSECIDEARKMGIAIDPPDVNHSEKLFTIVDGRIIYGLLGIKGLGDVPADEIVRCRKDGFYHDFMDFLSRVDIKLVGKAVIEKLIQTGAFDRLGISRENLLGNLERAVEYAQKQKEDKKFGQTSLFGGTDEKEYTDFVFENFPETSRLEKLKIEKQLIGFYFSGHPMDEYRDLWEKIVKVDLGHLAASRLETIEPGNQILVGIIKQ

SEQ ID NO: 56777 - DNA, 684 bp, Unknown
  Obtained from environmental sample
  misc_feature (1)..(684): n is a, c, g, or t
atggaagccgatccccgctacaccgaactttttgcccttgcccgcaagctggaggggctgaaccgtcattccagcctgcacgccgccggcgtggtgataggcaagtctgccctgcacaatctggttcctattttcaaggataccaaaaccggggctattgccacccagtacgacatgaatcatctggaaacctgcggtctggtaaaaatggattttctgggacttaaaacgctggatgttatcaggcacaccgaagaaattatccgccgcaggggcggggaatacgcccatttcaaagtggaaaacgcccccgaaaatgatgaggcgactttcaggatgttaggtgaaggacaaagttttgaaatctttcagtttgaatctgacgggatgcgtaacattcttaaacaggtaaaacccggcaaaattgaagacctcattgcgttgaacgcgctgtaccggcccggccctatggcctttattccccagtttgttgattcaaaaaacgggcggcaggctattcattatcccgatccccgtctggaagacgtactcaaggaaacctacggcgttatcgtatatcaggaacaggtcatgcaggttgcgcggattatcgcccggttacagtttaggacaggccgatatactccgccgcgcaatgggaaaaaagaaaaaagaaattattga

SEQ ID NO: 56778 - protein, 227 aa, Unknown
  Obtained from environmental sample
  DOMAIN (1)...(225): Bacterial DNA polymerase III alpha subunit
  misc_feature (1)..(227): Xaa is any amino acid
MEADPRYTELFALARKLEGLNRHSSLHAAGVVIGKSALHNLVPIFKDTKTGAIATQYDMNHLETCGLVKMDFLGLKTLDVIRHTEEIIRRRGGEYAHFKVENAPENDEATFRMLGEGQSFEIFQFESDGMRNILKQVKPGKIEDLIALNALYRPGPMAFIPQFVDSKNGRQAIHYPDPRLEDVLKETYGVIVYQEQVMQVARIIARLQFRTGRYTPPRNGKKEKRNY

SEQ ID NO: 56779 - DNA, 573 bp, Unknown
  Obtained from environmental sample
  misc_feature (1)..(573): n is a, c, g, or t
atgaaaattaacaggtgtgcgcggaatcgttttgtattcgcggctgttttcgcggctctaatcgccgtttctaacttttttcaaatccctacctccataggcgtacctatagtccttaaaaatatgtttgtagtcctttcggggacaatactcggaagtttttacggcagtttctcggtactaattttaatcgcggcaggacttatcggcgtaccagtttttgtcattccgggaggcataggggtttttattactccccttggcggctatataatcggttattttaccgcaagtttgtgttcggggctggtttgcggacttcctaaaatatgcgaaagaagaatcaaacctgttcagtttataagggtttgttttgggtctttttttgggtttgccctgattttagtgtgcggctccctttacatgacctttcttaaatcaatgacgcttaaagctgcctttctggccggtactgcacccttcgctgtcgccgacacaattaaatttgtactgagtattcctttggctctcgctctccggcctatagctgcaaggtatattaacaatgaatag

SEQ ID NO: 56780 - protein, 190 aa, Unknown
  Obtained from environmental sample
  SIGNAL (1)...(28)
  DOMAIN (29)...(183): BioY family
  misc_feature (1)..(190): Xaa is any amino acid
MKINRCARNRFVFAAVFAALIAVSNFFQIPTSIGVPIVLKNMFVVLSGTILGSFYGSFSVLILIAAGLIGVPVFVIPGGIGVFITPLGGYIIGYFTASLCSGLVCGLPKICERRIKPVQFIRVCFGSFFGFALILVCGSLYMTFLKSMTLKAAFLAGTAPFAVADTIKFVLSIPLALALRPIAARYINNE

SEQ ID NO: 56781 - DNA, 777 bp, Unknown
  Obtained from environmental sample
  misc_feature (1)..(777): n is a, c, g, or t
atggaagcgataggcgaagcggtcaggcaggaggcaaaaagcggcgcggtgcggatcatcttcaattttcccaacaacccttcgggttattcggccacaatgcaggaagcgcaaacccttgtaagcctccttaaggaaaccgccgagaacggggcggacgtactcgtgatctgcgacgacgcttacttcggcctgttttacgaagacgacatctcaaaggaatcgctgttcgcgaaattcgccaacctccacgagcgtgtgctggcgattaagctcgacgggcccactaaagaagattatgtatgggggcttcgcatgggcttcctcactttcggctcaaaaggattaaaccagacccattatgacgcgctggtgaaaaaactgatgggggctatccgctcttcggtatcctgctccaatacgagcgcccagcacctcatgctcaaagctatggaagattcccgcacgccgaaagagaaagcggctttccgggacatgctgcggaggcgctacaatctggtaaaggatttcttaaaactcaacccgaaccatccggtattggagcccatgccctttaattcaggctattttatgagtttccgctgtaagacggacgcggaagccatacggcaggaactcctgcaaaaacacggcatcggcgttatctcccttggcaaacaatgcctgcgcgtggcgttttccagcatagacgaggaaaaaatccccgcggtatacggacagatctataaaacagcggcggaactaggtaacaattaa

SEQ ID NO: 56782 - protein, 258 aa, Unknown
  Obtained from environmental sample
  misc_feature (1)..(258): Xaa is any amino acid
MEAIGEAVRQEAKSGAVRIIFNFPNNPSGYSATMQEAQTLVSLLKETAENGADVLVICDDAYFGLFYEDDISKESLFAKFANLHERVLAIKLDGPTKEDYVWGLRMGFLTFGSKGLNQTHYDALVKKLMGAIRSSVSCSNTSAQHLMLKAMEDSRTPKEKAAFRDMLRRRYNLVKDFLKLNPNHPVLEPMPFNSGYFMSFRCKTDAEAIRQELLQKHGIGVISLGKQCLRVAFSSIDEEKIPAVYGQIYKTAAELGNN

SEQ ID NO: 56783 - DNA, 1332 bp, Unknown
  Obtained from environmental sample
  misc_feature (1)..(1332): n is a, c, g, or t
gtgaaaaggattatcaagcgggacgtaatgataccacgattagattacagtcaaaaacattgttcattgatcattgctcattgctcattgctcattgctctctgctctctgttctttgctctcttgtcatgcggcaacaacaatacggcggtactttggtcagacaggccggaattcgcattttatggcgaatttttcaactcagcccaggagcaatacaaagtagaaacgcgttattacgattatcccgccctgaaactcgcggatatttttagcaagtccggttcaaagcgcgagtcacctgacattgtagcgggaagctggctgaaaagcgcttcaacacgagcgtacttcaagccgcttaacgattattttaaatacaaaatccttgaaaaggaggctttctatccccggcttctttccatggggaacattgacgataaacaatatttactgcccgtgtcgtttaacgcccctatggtaatttttgccggagacaaagcggaccggttttccaatccttttaccgtagattttaacgagatgaaaaaacttggaaaaagctataacgccgaaaccaggggcgtttacacacagatgggtttttctccggtatgggatgacaatttcctgtttgtcgccgcgacattgtttaacgcctcgttcagagaagcggagccattgacctgggaacctccggcgcttgagcgtgcgatggactttatttttgaatggatccgcgaggcgaattcgagcattcaggctgttgacgattttaccttcaaatattactacaatcccccggcaaaactcgcgctttccggacgcatactcttgtcgtatatggacagcgatgctttttttacacttgccgaggatcagcgcagccgtcttgatttccgctggcttgcggaggaagaaacaatcccccttaacgaaaggtctgtgtatcttggactggtaaaaaagggcaaggctccaaaagccgccgaggcattcctccgctggtttttcaacccccagacccagcgcggcctgctggaaaaaagcattcaactgcggattcaggaaacctcgtttggcatagccggaggcttttccgccatgcgtccggttacggagcagatccttccccagttctatcccgacctgctcaggcacatgcccccccaggacttcctttccccggccaatatacttcccagcaactggatggcgctgaaggagcgggtcgtcctcccctatctccatgaccgagccaggcagccggacaataacgatatactcccgcttgaacgccgtctcgcggactggcgcagggtgaacagataa

SEQ ID NO: 56784 - protein, 443 aa, Unknown
  Obtained from environmental sample
  misc_feature (1)..(443): Xaa is any amino acid
MKRIIKRDVMIPRLDYSQKHCSLIIAHCSLLIALCSLFFALLSCGNNNTAVLWSDRPEFAFYGEFFNSAQEQYKVETRYYDYPALKLADIFSKSGSKRESPDIVAGSWLKSASTRAYFKPLNDYFKYKILEKEAFYPRLLSMGNIDDKQYLLPVSFNAPMVIFAGDKADRFSNPFTVDFNEMKKLGKSYNAETRGVYTQMGFSPVWDDNFLFVAATLFNASFREAEPLTWEPPALERAMDFIFEWIREANSSIQAVDDFTFKYYYNPPAKLALSGRILLSYMDSDAFFTLAEDQRSRLDFRWLAEEETIPLNERSVYLGLVKKGKAPKAAEAFLRWFFNPQTQRGLLEKSIQLRIQETSFGIAGGFSAMRPVTEQILPQFYPDLLRHMPPQDFLSPANILPSNWMALKERVVLPYLHDRARQPDNNDILPLERRLADWRRVNR

SEQ ID NO: 56785 - DNA, 372 bp, Unknown
  Obtained from environmental sample
  misc_feature (1)..(372): n is a, c, g, or t
atgctgcgtgtcgataacggtaaagaccggccccctgaaaaaatagaaaaaatgcttatccttaccgaattcggctatggcaaaagggttgacttcggcgaattctcatcgcacgggcgagggacgggcggtcagaaaatctacacggtcagcgaaaaaaccggcgagattgtcggctgcgtttcactgcttgacgatgatgagataatgtgtattaccagccaggggaaatcaatcaaactgaaggtagacgagatacgcgttatgggccgcgccgcccagggcgtgaggatactcagcatagacaagccggattttgtcatcggccttgaccgtgtagtaaaagaggacgaacctcttgaaggagaataa

SEQ ID NO: 56786 - protein, 123 aa, Unknown
  Obtained from environmental sample
  DOMAIN (16)...(65): DNA gyrase C-terminal domain, beta-propeller
  misc_feature (1)..(123): Xaa is any amino acid
MLRVDNGKDRPPEKIEKMLILTEFGYGKRVDFGEFSSHGRGTGGQKIYTVSEKTGEIVGCVSLLDDDEIMCITSQGKSIKLKVDEIRVMGRAAQGVRILSIDKPDFVIGLDRVVKEDEPLEGE

SEQ ID NO: 56787 - DNA, 585 bp, Unknown
  Obtained from environmental sample
  misc_feature (1)..(585): n is a, c, g, or t
ttgattatacgatcggcgcagaggatgttcgcaatgatggagccggcggggccgcagagctatgtcttaaaacgctccgcaccaaaaaaccgcgtgaagaacccagcccgcggctcctgcctgcaccgtactttttttgaaagagaccttgagtatttttgcaacggctttaagtattgttacgcgaaatacggcacgcttgaaaaattgttttcgtccaagccggacgtgtggcggggtataagcctgttcagggaagaaatggccgccggaaacgacggcctttataccgcgcatatcgcaaatcctgacgcgaattcagcctgcaagcgcatcaatatggctctgcgctggctggtaaggaaaagcccggttgacatgggcctgtggaaaagcataaagccctcgtccctgtacattccgttggacgttcatgtcgcgcgtaacgcgcggaatatcggtttgctggaaagaaagtcaaacgataaaaaagccgttattgaaattaccgaaaaactacgtcaattctgcccggaaggaccctgtaaaatacgactttgttttattttcaatcggctagactga

SEQ ID NO: 56788 - protein, 194 aa, Unknown
  Obtained from environmental sample
  misc_feature (1)..(194): Xaa is any amino acid
MIIRSAQRMFAMMEPAGPQSYVLKRSAPKNRVKNPARGSCLHRTFFERDLEYFCNGFKYCYAKYGTLEKLFSSKPDVWRGISLFREEMAAGNDGLYTAHIANPDANSACKRINMALRWLVRKSPVDMGLWKSIKPSSLYIPLDVHVARNARNIGLLERKSNDKKAVIEITEKLRQFCPEGPCKIRLCFIFNRLD

SEQ ID NO: 56789 - DNA, 861 bp, Unknown
  Obtained from environmental sample
  misc_feature (1)..(861): n is a, c, g, or t
atggacgcgatcagcggtataaagaaagattttaacatccccgtaatcggaggaaatgtcgcgtccaaagaaggaacgcgccgcctgatcgaggcgggggcggacgcggtaaaagtgggcataggtccgggatccatctgcacaacacgtataattgcgggcataggaatgccgcagtttaccgcggtgctggactgcgccggggaagcgtcaaaatcgaatattcccgttattgcagacggaggcataaaattctccggggatattaccaaggccataggagcgggcgccaatgttgtaatgataggcaacctctttgcggggctcaaggaagcgccgggcagggaaataattttcgacggcagaatcttcaaggagtaccgcggcatgggcagcatgggggcgattgcagacggcgcgggagaccgttaccaaatgggcaaggacgaggagccggtccccgaaggcattgaaggccgcgttccattcaagggcgagctaagcagttatataagccagcttgtcgcggggcttagaaaaggaatgggctattgcggctgccataatatagaagaattaagaaaataccgcaagtttgtgcggattaccgccgccggtctcagggaaagccacgcgcatgatattacaatcacccnaggaagccccgaattactcgcgctcctgataacgcgcggattcaagaaacgcttgattgcctctataatgaatttagcgggtccaaatcctctgtcaaggattttatcgaacatgatccggttcaatttccactccgttacgcgaaacaacgccccaaaaatcaggcggatattgaaattgccgcgttcctggccgcgacaatag

SEQ ID NO: 56790 - protein, 286 aa, Unknown
  Obtained from environmental sample
  DOMAIN (1)...(213): IMP dehydrogenase / GMP reductase domain
  misc_feature (1)..(286): Xaa is any amino acid
MDAISGIKKDFNIPVIGGNVASKEGTRRLIEAGADAVKVGIGPGSICTTRIIAGIGMPQFTAVLDCAGEASKSNIPVIADGGIKFSGDITKAIGAGANVVMIGNLFAGLKEAPGREIIFDGRIFKEYRGMGSMGAIADGAGDRYQMGKDEEPVPEGIEGRVPFKGELSSYISQLVAGLRKGMGYCGCHNIEELRKYRKFVRITAAGLRESHAHDITITXGSPELLALLITRGFKKRLIASIMNLAGPNPLSRILSNMIRFNFHSVTRNNAPKIRRILKLPRSWPRQ

SEQ ID NO: 56791 - DNA, 687 bp, Unknown
  Obtained from environmental sample
  misc_feature (1)..(687): n is a, c, g, or t
atgagaatattatatgtttgtttattcttcattgtttttgcgatattgccgacacatgcagaaaaagttgatgccgatagagcaggaaaagttgcacggcgatatatacagacaaaacaaaagtttcgtacaaaacaaccagacgtacgcctgaaatatacagcgacaaggcgccacgaacacaggacaggtacaacaggcaaaacacgcaatacaacatcgaaaactcagcaggacactgcatattattatgtgttcagcatagacgaaacctcagacggcggttttgtgattattgccggcgaggatgcagtaaaaccggtacttggttattcgaataatggaaaatacgacgaaaacaacatcccgccaaatttcgcctactggatggaatttctccgacaggaaatagaatttgcgattaaacataatattccggttagcgatgctatcaagaacgagtgggacaaatatacaagcgataacgatggcgtaggaattatgcctgtatcaacatccgaaggtatggtaaaaactatatggaatcagagtacgccgtataacaatctatgtccacaggaaagcaaccgcagtgttaccggatgcgttgctacagcaatggcacaaattatgaaatatcacaatttatctgaccgtatccaacaacgataccagttacaaaactaa

SEQ ID NO: 56792 - protein, 228 aa, Unknown
  Obtained from environmental sample
  SIGNAL (1)...(20)
  misc_feature (1)..(228): Xaa is any amino acid
MRILYVCLFFIVFAILPTHAEKVDADRAGKVARRYIQTKQKFRTKQPDVRLKYTATRRHEHRTGTTGKTRNTTSKTQQDTAYYYVFSIDETSDGGFVIIAGEDAVKPVLGYSNNGKYDENNIPPNFAYWMEFLRQEIEFAIKHNIPVSDAIKNEWDKYTSDNDGVGIMPVSTSEGMVKTIWNQSTPYNNLCPQESNRSVTGCVATAMAQIMKYHNLSDRIQQRYQLQN

SEQ ID NO: 56793 - DNA, 348 bp, Unknown
  Obtained from environmental sample
  misc_feature (1)..(348): n is a, c, g, or t
gtgccagacggttggcatttgccgtcacgtttggagtggggagagttggtggcagaggtgggtggtgagatggcaggtgcggcgttgaaatcgacaagcgattgggacggaaatggtaatgagacagatgattttgaattttcggccctgccgggcgggtacggtggccccggtggtatcggcttcaacagtataggtaccaacggcaattggtggacggctacggaggacgataattatcacgcttatggcctaggcatgagtagcggcagcaaccacgtgggttatagctacaactacaaggccggaggattgtcggtgcggtgtgttaaagatgatgagcgctag

SEQ ID NO: 56794 - protein, 115 aa, Unknown
  Obtained from environmental sample
  misc_feature (1)..(115): Xaa is any amino acid
MPDGWHLPSRLEWGELVAEVGGEMAGAALKSTSDWDGNGNETDDFEFSALPGGYGGPGGIGFNSIGTNGNWWTATEDDNYHAYGLGMSSGSNHVGYSYNYKAGGLSVRCVKDDER

SEQ ID NO: 56795 - DNA, 744 bp, Unknown
  Obtained from environmental sample
  misc_feature (1)..(744): n is a, c, g, or t
gtgtggagcgaagggggtgacaagtcagccaaaacccataacaaagcatgcaaggtacaaggagaccaccaaagcatggaacaagagttgcgggatttaaggtatctgtccaagaagtatgcgcaagtgcagacgctaatgccacgcattaacgaacaagccttaatcgcggaacacaggaagcaggaacggaagaaagcgagcggagtggacggcgtaacgaaagacgagtacggagagaacctgagcgacaatattgccgatttgttgaatcggatgaaaacgttcgggtacaaaccgtgtcccgtgagacggacatacatccccaaagcgaacgggaaaatgcgtccgttagggataccatcctacgaggacaaactcgtgcagggcgtaatggcagaaatactgaccgagatatacgaggttcgctttagcgatagttcgtatgggttcagaccgaagaggagcgcccacgacgcaatacgttacattgaccatatcataatgacgaagaaagtcaattatgtactggaagcagacataaaaggctttttcgacaatgtgagccacgactggctgatgaagttcctagcgcacgacatcgccgacaagaacttcttgaggtatatcaagaggttcctgaaaggcggggtaatggatggtactgaacggcaaaagaggcatttgactatctcggattcacgttctacaacacgaagacgaagggaggcaaatatagggtag

SEQ ID NO: 56796 - protein, 247 aa, Unknown
  Obtained from environmental sample
  misc_feature (1)..(247): Xaa is any amino acid
MWSEGGDKSAKTHNKACKVQGDHQSMEQELRDLRYLSKKYAQVQTLMPRINEQALIAEHRKQERKKASGVDGVTKDEYGENLSDNIADLLNRMKTFGYKPCPVRRTYIPKANGKMRPLGIPSYEDKLVQGVMAEILTEIYEVRFSDSSYGFRPKRSAHDAIRYIDHIIMTKKVNYVLEADIKGFFDNVSHDWLMKFLAHDIADKNFLRYIKRFLKGGVMDGTERQKRHLTISDSRSTTRRRREANIG

SEQ ID NO: 56797 - DNA, 1368 bp, Unknown
  Obtained from environmental sample
  misc_feature (1)..(1368): n is a, c, g, or t
atgggaaaaacgctttatcagaaaatttttgagaaatacacggttgccaaattgccctctggacaatttcagcttttcataggcttgcatttgctgcacgaggtcacaagtccgcaggcattttcaatgattagggaagacgggctgcccgttctttaccccaatcgctcttttgccacggttgaccacattatacccaccacaagcgacgagcgttcaagaccgctcaaagacccgattgcagaagagatgtttgcccgcttggaacagaattgcaaggattttggcattcgcttttttggtccagataccgaagaacaaggcgttatacacatagttggtcccgaagagggagttacccagcccggaatgacaatagcctgcggagatagccacacggcaactcacggagcctttggctccatagcttttggcataggttcctcgcaagtcgcagacgtgcttgcctctcaaacgctcgcaatgagccctttgaaagttcgcaggattaaattcacaggcaagctgggcaaaggcgtttttccaaaagatgtcgcccttgcatacataaataaactcggcgtgaacggcggcgttggctatgcttatgaatttgccggaaatgtggtagaagaaatggatatggaaggcagaatgaccttgtgcaaccttgccattgaaggcggagcaagagttggctactgcaatccagaccaaaaaacttttgactttttgaaagacaagccatattcacccaagggcgaggcatgggacaaagccgttgaaaactggaaaagtgttgccagtgaccccgatgctgtttatgatgatgaagttgaaattgactgcaacaaacttgtaccatttgtcacttggggcataacccctgagcaaagcgttatggtgaatgaaaaaatccccgaaggcacaggcgaagcctacgattatatgggtttcaaaggcggaacgcccattgctggaattcccatagatattgcttttgtgggcagttgcacaaatggcaggttgggagacttaaaagctgccgccgaaattttgaaagggaaaaaggtgaacccaaatgtgaaactctgggttgtgccaggttcgcaaaaaataaaaaaagaagccgaagctctcggtttggataaaattttcaccgaagcgggtgcggagtggcgcgaagcaggctgttccttgtgcctcgctatgaatccagacaaattgcaaggcaggcaaataagcgcaagttctagcaacaggaatttcaaaggcaggcagggtagcccaacggggagaaccttgctgatgagtccggcgatggtagctgcggcagcgattaaggggtgtgttacgcctataacctaa

SEQ ID NO: 56798 - protein, 455 aa, Unknown
  Obtained from environmental sample
  DOMAIN (4)...(449): Aconitase family (aconitate hydratase)
  misc_feature (1)..(455): Xaa is any amino acid
MGKTLYQKIFEKYTVAKLPSGQFQLFIGLHLLHEVTSPQAFSMIREDGLPVLYPNRSFATVDHIIPTTSDERSRPLKDPIAEEMFARLEQNCKDFGIRFFGPDTEEQGVIHIVGPEEGVTQPGMTIACGDSHTATHGAFGSIAFGIGSSQVADVLASQTLAMSPLKVRRIKFTGKLGKGVFPKDVALAYINKLGVNGGVGYAYEFAGNVVEEMDMEGRMTLCNLAIEGGARVGYCNPDQKTFDFLKDKPYSPKGEAWDKAVENWKSVASDPDAVYDDEVEIDCNKLVPFVTWGITPEQSVMVNEKIPEGTGEAYDYMGFKGGTPIAGIPIDIAFVGSCTNGRLGDLKAAAEILKGKKVNPNVKLWVVPGSQKIKKEAEALGLDKIFTEAGAEWREAGCSLCLAMNPDKLQGRQISASSSNRNFKGRQGSPTGRTLLMSPAMVAAAAIKGCVTPIT

SEQ ID NO: 56799 - DNA, 615 bp, Unknown
  Obtained from environmental sample
  misc_feature (1)..(615): n is a, c, g, or t
gtgtgttacgcctataacctaaaaacttcccaaaaaacacaactttttagggttataaccgaaaaacttttctatattgcatttatggaaaaacttttcggcagggcaaatgctctcaaacaaatagagccttttatagataaacctttcataaaggtaataacaggaattcgccgctgcggcaaatcctcaattctgcttttgctggcaaagcacttaaaagaaaagaaaatttcaagcgaacagataattttcatcaattttgaagatatggaatacgcagagttgaataccgccccaaaactccataaatatatcaaaactcaaatgaaaactaaaaagaaatactatatttttctggacgaaattcaagaagttcaaaactgggaaaaggcagttaattctctattgcaaggtaaaaacgcagatatttatataacaggctcaaactcaaaattgctgtcttccgagctttcaacttatattgcaggtcgttatgtagagtttcaaataaaaccgctttcttttgaggaatttagagaattcaatggaaaaacatctgtggaaaaagatttcaaggatttttgcgaaaaggtggattccagctcgcgataa

SEQ ID NO: 56800 - protein, 204 aa, Unknown
  Obtained from environmental sample
  DOMAIN (31)...(200): Archaeal ATPase
  misc_feature (1)..(204): Xaa is any amino acid
MCYAYNLKTSQKTQLFRVITEKLFYIAFMEKLFGRANALKQIEPFIDKPFIKVITGIRRCGKSSILLLLAKHLKEKKISSEQIIFINFEDMEYAELNTAPKLHKYIKTQMKTKKKYYIFLDEIQEVQNWEKAVNSLLQGKNADIYITGSNSKLLSSELSTYIAGRYVEFQIKPLSFEEFREFNGKTSVEKDFKDFCEKVDSSSR

SEQ ID NO: 56801 - DNA, 780 bp, Unknown
  Obtained from environmental sample
  misc_feature (1)..(780): n is a, c, g, or t
atggaaaccggacgctttgactcgcttctggaaaaaatcgccgcgttttcaggagacgcgatcatagacctttccctttggggtgagctttccctccatcctcaaaaaatggagcttattgaaatggttttgcgccgtccggaattgtatctgataatagaaacttccggcataggctggaaagacgatgaacttgataaatgcgcggcgcttgccaaaacggcgtcccccggcaaaaacaaattcaggctttcgtggattgtttcgctggataccgcggatccggctcgttacagggaaatccgcggaacgggctttgccgaggcaaacgaccttgcgaaaaaactcctgaccctttttcccaaagacgcttatgtacaggcggtacggacggcgggagcggaagacgatatanaaaaattttataaagcatggaaagaaattacacctaacatatcaaatatcattatacagaaatatgacgatttttgcggctttctgcccaggaaacaggcgtcggatctttcccccgtacagagacagccatgctggcatcttatgagggatatgccggtgctgattgacggcgctgtgcccttgtgcagggagcagattgcgggcagagccctaaatcttgggaacgcctttactgaaccacttgaatctatctgggaaaaggggcagcaattttacacggagcaggcgggcaaaatgcccggcgggaaaaaatacgattctctgtgcgcggggtgcgatgagtactatacctacaacttttaa

SEQ ID NO: 56802 - protein, 259 aa, Unknown
  Obtained from environmental sample
  misc_feature (1)..(259): Xaa is any amino acid
METGRFDSLLEKIAAFSGDAIIDLSLWGELSLHPQKMELIEMVLRRPELYLIIETSGIGWKDDELDKCAALAKTASPGKNKFRLSWIVSLDTADPARYREIRGTGFAEANDLAKKLLTLFPKDAYVQAVRTAGAEDDIXKFYKAWKEITPNISNIIIQKYDDFCGFLPRKQASDLSPVQRQPCWHLMRDMPVLIDGAVPLCREQIAGRALNLGNAFTEPLESIWEKGQQFYTEQAGKMPGGKKYDSLCAGCDEYYTYNF

SEQ ID NO: 56803 - DNA, 1140 bp, Unknown
  Obtained from environmental sample
  misc_feature (1)..(1140): n is a, c, g, or t
ttgggaacgcctttactgaaccacttgaatctatctgggaaaaggggcagcaattttacacggagcaggcgggcaaaatgcccggcgggaaaaaatacgattctctgtgcgcggggtgcgatgagtactatacctacaacttttaaccataacttcccgtcatatactgttgtcggagccggggaaaggcataatacaacagggctttccgttatattgctgaacaggggcggacgctatgcccggcgcggtttgttccatgactttgaaaaaacaggctttgacaccattgtttccgtggagccggaacccgcacattacgatcttgacgatcttgccgcccgctttccgtttgtccggttcgtaataccgcatacccggatcagtcttggcgaacagatcaatctggcggtatctgaacttacttccccgctctttttcgtcctctggaacgatcttaaaatgatcgccgggggcgctgcccacaggatggcggaaagggtgacccgccccgttgacagcaagggtaacggaaaaagtaaaagtaacggaaaaaaccaattcatgcggctctgtacggtccccgtgattcagaactcgcgccatgatacgattcctaccgtgatagccccggtaatacgccaaaagaaaattcaaacccgctttctcaacccctcaagcgagggactcccaagcctgtacccgtttgacggcgtaggcatttacgacagggagcgctttatccagttggggggctttgacggaactttgcaaaaccgtttctggcagcttatggattttgggttccgcgcgtatctctggggagaggagatatgccttaaccaggcgcttaagttttcgtatgaggccgcgatccccgccgaggacaactcggcaggcggcgactattcccgtttttaccttaaaaatatcgccccggtgttccgtaatgactgcgcccttctgcctgtacgccgttttcccggttttcttctgatagcgaataacggcatattcaacgcctgggatgatttctccgaaagccgccgttgggtaactaccaacagcttccggtggcgctgcagtccaaaaaccattgccagctactggaatctggaaactccgaaaaaggtgaattaa

SEQ ID NO: 56804 - protein, 379 aa, Unknown
  Obtained from environmental sample
  misc_feature (1)..(379): Xaa is any amino acid
MGTPLLNHLNLSGKRGSNFTRSRRAKCPAGKNTILCARGAMSTIPTTFNHNFPSYTVVGAGERHNTTGLSVILLNRGGRYARRGLFHDFEKTGFDTIVSVEPEPAHYDLDDLAARFPFVRFVIPHTRISLGEQINLAVSELTSPLFFVLWNDLKMIAGGAAHRMAERVTRPVDSKGNGKSKSNGKNQFMRLCTVPVIQNSRHDTIPTVIAPVIRQKKIQTRFLNPSSEGLPSLYPFDGVGIYDRERFIQLGGFDGTLQNRFWQLMDFGFRAYLWGEEICLNQALKFSYEAAIPAEDNSAGGDYSRFYLKNIAPVFRNDCALLPVRRFPGFLLIANNGIFNAWDDFSESRRWVTTNSFRWRCSPKTIASYWNLETPKKVN

SEQ ID NO: 56805 - DNA, 702 bp, Unknown
  Obtained from environmental sample
  misc_feature (1)..(702): n is a, c, g, or t
atgctggccattatactgcaggcccgcgttgattcctcgcgtctgccggggaaggcgctgctcccccttggcgggaagccgatgatattgcgcgtaatggaagcattgaacagaatccccgccgagttgagggtactggcctgcgccgaagattcaagctccgcttttacggaacttaccaaggaagcgggttttacgttgtttgccggccccaaagaagacgtgcttggccgtttctgtcactgtctgcgcaattttaacatacggcacctgataagggccaccggtgacaatccctttgtttttactgatgcggtctataccataaccactgaggcattgactctgaacgcggattacgcgggatacagcgggcttcccctgggctcaggagttgaatatgtaaacgcaaacgcgttgttgcgcgccggggatgaagcctcatcccaatatgatcgtgaacatgtctgtccctacttatacacccacccggaaaagtttctccttcaccgtccgcttgccccgcagcattggcaatttcctgagatccgcctgacagtagacacccaacaggactatgaacaggcgcagtctttgtacgcggcgctggacagcatggaaaagaccggcaagctgtccgaaggcgagcggtataagggcaaagtgataatcaatgcctatactgatagttgccgcctgtga

SEQ ID NO: 56806 - protein, 233 aa, Unknown
  Obtained from environmental sample
  DOMAIN (3)...(212): Cytidylyltransferase
  misc_feature (1)..(233): Xaa is any amino acid
MLAIILQARVDSSRLPGKALLPLGGKPMILRVMEALNRIPAELRVLACAEDSSSAFTELTKEAGFTLFAGPKEDVLGRFCHCLRNFNIRHLIRATGDNPFVFTDAVYTITTEALTLNADYAGYSGLPLGSGVEYVNANALLRAGDEASSQYDREHVCPYLYTHPEKFLLHRPLAPQHWQFPEIRLTVDTQQDYEQAQSLYAALDSMEKTGKLSEGERYKGKVIINAYTDSCRL

SEQ ID NO: 56807 - DNA, 447 bp, Unknown
  Obtained from environmental sample
  misc_feature (1)..(447): n is a, c, g, or t
atggttctaagacttgagcaaaacacaacacaaaatgatattgaaatactaattaaataccctgtaaagaataaagttgttgaacgtattgtctcattgataaaatccgttgatatgcaaatagaatgttattcagatgacgaagtaaaactggtaaatgcttctgatatttattacatagaaagcgttgacggcaaaactattgtctgctgtgaaaaggagaattattttgttaaaagccgtttgtatcagatatatgaaaaattaaaggacaatggttttatacaagttagcaagtattgcattttaaacattaacaaactggacaaattcaggccgctgggcaataatcgtcttgaagcggtgttatctaacggtgtttttttatgtattaccagaaaatatattccggggataaagcagatattaaaggagatgaataaatga

SEQ ID NO: 56808 - protein, 148 aa, Unknown
  Obtained from environmental sample
  DOMAIN (47)...(144): LytTr DNA-binding domain
  misc_feature (1)..(148): Xaa is any amino acid
MVLRLEQNTTQNDIEILIKYPVKNKVVERIVSLIKSVDMQIECYSDDEVKLVNASDIYYIESVDGKTIVCCEKENYFVKSRLYQIYEKLKDNGFIQVSKYCILNINKLDKFRPLGNNRLEAVLSNGVFLCITRKYIPGIKQILKEMNK

SEQ ID NO: 56809 - DNA, 420 bp, Unknown
  Obtained from environmental sample
  misc_feature (1)..(420): n is a, c, g, or t
atgaaaactataaaaactattattaattttattatgtttgttacaggcgcggctgtggtaatattggcgttattttcattatttttcaaagttgaaattaatttagttcccactgtttttcaaattttcgtcgcaaatatcgttattatcctcggtctttttctgcgcatgaaatttgaaatccgcagtattattctggaatatctaattgatatcagctatattatcggcgttcttattgtattcgggcttatatttgattggtattcctcaataccgatatggcttcttgtcgtaatggctgttgtaatctacatattcgcgacgataatcaccgttacaatgataagaaatgacgcgaaagaattaaacaaattgcttcaaaaacatcaggaaaaacaagccgataatgcatcttaa

SEQ ID NO: 56810 - protein, 139 aa, Unknown
  Obtained from environmental sample
  SIGNAL (1)...(26)
  misc_feature (1)..(139): Xaa is any amino acid
MKTIKTIINFIMFVTGAAVVILALFSLFFKVEINLVPTVFQIFVANIVIILGLFLRMKFEIRSIILEYLIDISYIIGVLIVFGLIFDWYSSIPIWLLVVMAVVIYIFATIITVTMIRNDAKELNKLLQKHQEKQADNAS

SEQ ID NO: 56811 - DNA, 855 bp, Unknown
  Obtained from environmental sample
  misc_feature (1)..(855): n is a, c, g, or t
ttgagaatattatttttgtttgataaaaaggactgcaaaatgaatttaaaaaaacggattgtttttaccctcgttatcattctgagcctgtgtctcgcaatgtccgcttgcaaccgcagtgggcaaaccaagacgggaacaaccgccaccccgctccctgccgattcaatcacatgggagccgggctggagttggcaaagtcaatatgtaaactatcgtaccgatcgggataccgtgtattcaggcaaatactcgattgtggttgacaacacttattttaacgacgcgtgggcggttgtaaaatatcctgtgattcccaattccatttacagaatcagcgcaatggttaaaatggaaaatttccgcgcaaaaccagacgaccttatcggaggggcaagtatcggcattgcgggaaaaccctatcaatcccgcagtcacaccaccgaccaatggacgcggctggagtttgagttcctttcccacgaaatgagcgaaatgtcaatcgccttgcgtaatgggaataacggcgccaccaacagcggaacagcctacttttcggacatcagagttgaaagagctgataccgtaacctcaaacgaatggaatattcttaccctgattttcaccaactttaacgcgccgggttttgcgccggaaagccttaataaagaggatgttaatcatatcaaaaaaacgatcagcatggttaaagactctatagcttcaatttccggcggacttatgaaaattaacccgcatgattttgcggttattgacgagcctatacaggtattaaatcccggcacgaacagtaccaaccatgaaccatcagccatattttggatgggcatctga

SEQ ID NO: 56812 - protein, 284 aa, Unknown
  Obtained from environmental sample
  misc_feature (1)..(284): Xaa is any amino acid
MRILFLFDKKDCKMNLKKRIVFTLVIILSLCLAMSACNRSGQTKTGTTATPLPADSITWEPGWSWQSQYVNYRTDRDTVYSGKYSIVVDNTYFNDAWAVVKYPVIPNSIYRISAMVKMENFRAKPDDLIGGASIGIAGKPYQSRSHTTDQWTRLEFEFLSHEMSEMSIALRNGNNGATNSGTAYFSDIRVERADTVTSNEWNILTLIFTNFNAPGFAPESLNKEDVNHIKKTISMVKDSIASISGGLMKINPHDFAVIDEPIQVLNPGTNSTNHEPSAIFWMGI

SEQ ID NO: 56813 - DNA, 507 bp, Unknown
  Obtained from environmental sample
  misc_feature (1)..(507): n is a, c, g, or t
atgaaaaaaataatcgcccttgttataggtttatcaattgccgcagtatgttttgcccaaagtgatcctgttgaaggctactggataagcattgatgaaaagaccaataaagccacggccggctggcaaatttatcaacaaaatggcattctttacggaaaaattttatcattagcagaagacccaaaaggcacaattgccgacaaagtcaaggaaagttataaagacttccccattcccggaaaagtaaacaaaatggaagttgcaggccccccatggattttcgggcttaccaaaaaaaatataggcgaatggacaggcggcaaaataattgaccccgcagacggaaatatttacaactgtaagatcactttccataaagccgacggcaagaagtatgcgaatgacactcttgaaatgcgcggcgaaataggacttggcataggacgcagccaatactggcgcaaaaccgatgcgacaactgcgggaaatttgtggcctaagtga

SEQ ID NO: 56814 - protein, 168 aa, Unknown
  Obtained from environmental sample
  SIGNAL (1)...(19)
  misc_feature (1)..(168): Xaa is any amino acid
MKKIIALVIGLSIAAVCFAQSDPVEGYWISIDEKTNKATAGWQIYQQNGILYGKILSLAEDPKGTIADKVKESYKDFPIPGKVNKMEVAGPPWIFGLTKKNIGEWTGGKIIDPADGNIYNCKITFHKADGKKYANDTLEMRGEIGLGIGRSQYWRKTDATTAGNLWPK

SEQ ID NO: 56815 - DNA, 378 bp, Unknown
  Obtained from environmental sample
  misc_feature (1)..(378): n is a, c, g, or t
atgaaagtaatatcaaccaattcagcgcctgcggcaatcggaccgtattctcaggctatcgtaacaaacggactgctctttgcttcggggcaaattccattgtcgccggaaacgggagctgtggtatcgggcggcataaaagagcaggcggagcaagttatgaaaaatatagcggctgtgctcgcggcggcgggaagcgattttacaaaggttgtaaagacgacctgctttctaacaagcatggatgattttgccgcattcaacgaagtttacgcaaaatactttacggaaaaacccgctcgttcctgcgtcgccgtatccgctctgccaaaaggcgtttcggtcgaagttgaagttatcgccgaagtttccaaataa

SEQ ID NO: 56816 - protein, 125 aa, Unknown
  Obtained from environmental sample
  SIGNAL (1)...(19)
  DOMAIN (6)...(123): Endoribonuclease L-PSP
  misc_feature (1)..(125): Xaa is any amino acid
MKVISTNSAPAAIGPYSQAIVTNGLLFASGQIPLSPETGAVVSGGIKEQAEQVMKNIAAVLAAAGSDFTKVVKTTCFLTSMDDFAAFNEVYAKYFTEKPARSCVAVSALPKGVSVEVEVIAEVSK

SEQ ID NO: 56817 - DNA, 426 bp, Unknown
  Obtained from environmental sample
  misc_feature (1)..(426): n is a, c, g, or t
atggcggcaaagcaggcggcaagctcaggcaggacggatgcggcggttatttcttcccgtgattgcgccgaattgtacggtctgcacgccctttcgtttaacattcaaaacaccgacaacaactacacacgttttatttgcatttcaaaaaaactcgaaatatacccgggcgctcataaaaccagtcttatactcgctcttaaacacaagcccggttctttgtacagcgtacttgcgaaattttacgcacacggaataaatatgcacaaactggaaagccgccccatttcgggtcaggcttttgagtttatgttttattttgacattgacacgcctgtaatttcggaagaattgaaacaggtactggcggagttggaacaggaaaccgatatgttcagtttcttgggaacatatcaggaattttag

SEQ ID NO: 56818 - protein, 141 aa, Unknown
  Obtained from environmental sample
  DOMAIN (61)...(134): ACT domain
  misc_feature (1)..(141): Xaa is any amino acid
MAAKQAASSGRTDAAVISSRDCAELYGLHALSFNIQNTDNNYTRFICISKKLEIYPGAHKTSLILALKHKPGSLYSVLAKFYAHGINMHKLESRPISGQAFEFMFYFDIDTPVISEELKQVLAELEQETDMFSFLGTYQEF

SEQ ID NO: 56819 - DNA, 669 bp, Unknown
  Obtained from environmental sample
  misc_feature (1)..(669): n is a, c, g, or t
atggacattgataaattgaatgaagaagtggacagcgttgatgatcagctgttaagcctgtttgagcggcgcatggagattgcgcaggaaatcgggcggcaaaaaaatgaactttcgctgcctgttgcagattcagaacatgaacgtaaaaccctgtacaggttatgtgaaaaagcgcgtcctgaacttgcgggatatgtaaaggttttgttttcttcccttttcgagataagccgaagcaaccggaaagcgcagagccattacgactcggcggtaaaaaaactgcttgatgcggctgccggtcaaaaacatgaagccttcccgttacgcgcaacagtagcctgtcagggcgttgaaggagcatattctcaggcagcctgcgacaaactgttttctccggctgacatcacttatttcaacagctttgagggagtttttcaggcagtggacagcagtctgtgccgtttcggaataataccgctggaaaacagctccgcgggatcggtcaatgaagtgtatgatctgatgaaccgctaccggttctatattgtgcgcagtataaaactgccgataacgcatacattactggcagccccgggcgcgaaaatagacgatataaaggaagtgttttcacatgagcaggctatccgccaatgcagtaatttttaa

SEQ ID NO: 56820 - protein, 222 aa, Unknown
  Obtained from environmental sample
  DOMAIN (113)...(222): Prephenate dehydratase
  misc_feature (1)..(222): Xaa is any amino acid
MDIDKLNEEVDSVDDQLLSLFERRMEIAQEIGRQKNELSLPVADSEHERKTLYRLCEKARPELAGYVKVLFSSLFEISRSNRKAQSHYDSAVKKLLDAAAGQKHEAFPLRATVACQGVEGAYSQAACDKLFSPADITYFNSFEGVFQAVDSSLCRFGIIPLENSSAGSVNEVYDLMNRYRFYIVRSIKLPITHTLLAAPGAKIDDIKEVFSHEQAIRQCSNF

SEQ ID NO: 56821 - DNA, 2193 bp, Unknown
  Obtained from environmental sample
  misc_feature (1)..(2193): n is a, c, g, or t
atggaagacctgaaacagtacaagaaaataatagccgtttccgcacctgctgccgcttcgtttttccccgagcaatttctcaacttaaacggctggcttaaatcactgggcgttgaagccttttttgatgtgggcatgggcgcggaacttaccgtcatgtcctacctcaactacatcaaagagaaaaaaccccggacggtaatttcccagccttgcccggcaattgtaacttttatcgaacttttccaccctgaactattgccttatctcgctccggcggacagcccaatactgcatatcataaaaatgatcaaagagtattatcctcaatataaaaaccacaaagtagcggtaatttccccctgcatcgccaaacggcgggagtatgacgaaacaggcatgggcgattacaacgttacaatggttgaattaaaaaatcttctggacagtcagaaaataaacctctcctcatttccaaaagtagaatataccggagtaagagcagaacgtgcggtggggtttccaattcccggcggtcttttggatacagccgagcgttttgaaccggggattagacggaacaccgaaaagattgaaggtgtatttaccatctatccttatttgaaagaaatctccgaaatattgaacacaaatgatgaattaccgctgttgatagactgcctgaattgcgaaaaaggctgtcttggcggtcccggaacggggaacgccgaaaaaccgctggctgaccttaaagcccctgtacgaaaacgcatggctaagctggaaaaagagcataatcccaaaaaagcaaaaagcgcatacaaaaaataccacgatgttttgaaaaagtactggaaaaaaggtctgtataaccggagctatcgtaatctttcagaaaacaatacgatcaaacatccagacgaggctgaaataactaaaatctttcgcagtatgaagaaattcgggaaggaagatatatacaactgtacctgctgcggttacggaagctgcaaagcgatggcaacggcaatatacaacaaactgaacaaacctgaaaattgcgcccattatattctggctttgctcacggaaaaaaccaataccgaagaacttaaccgccagcttcaggaacacatttcccaggcttcagagcttattgaaggaataaataatttaataaacaaactgaatgtctctatcaattcacaagcggaaacaatcgcccaatcttcggtttcaaccgaaaaaatgatcacctcgctcaaagatacttcggaactttcccgaagcaaacaggagagtataaaagggctgatacaaaacacggagaanagccaggagtccatgcgggagacaattcaattggttgagggcatttccaaatcggtggaaggcatagcttcggcaattaaaataatcagcacaatagcggctaacaccaatttattgtccatgaacgcggcgatagaatccgcgcatgccggagaggcgggcaggggctttgcggttgttgccggcgagatacgccgcctttctgaaaataccagggaaaattcggttaacatttccaagacgctgaaaagtattattgacggggtagccgttaccgaaaaacaatcagagaacaccggatcgcggattaacacaatgtcaaaagagatcggcagttttgccgaaaccatgtctgatttgatcaataccttcggcgaactttcggcgcaaagcagtgagattaccgccgcgctgagcagccttcacaatcaaagcgacatggtaaaaaccgactatgccgacatactgaaaatgacggaaaaactgcacgaggcaatggttgatttgaatatgctgtcgaaaaagaaggttcttatagttgatgatgaggaaatcacacttatcatgacaaaagaaatgctgaaaaatgattttaatgttaccacagtcagttcagccaaggatgctttggaattgttcctggacgggtatactcctaatttaattttgctggatttgtatatgcctgaaatgggcggctgggacgcccttatcagaatacgcaacctcagcaaattacatcagaccaggatagtgatatacacgggatcggacgacccaaaagacagggcaaaggcgaagagccttggcgcggttgattttattcacaagccgatccataaagaagaactgctgggatag

SEQ ID NO: 56822 - protein, 730 aa, Unknown
  Obtained from environmental sample
  DOMAIN (1)...(241): Iron only hydrogenase large subunit, C-terminal domain
  misc_feature (1)..(730): Xaa is any amino acid
MEDLKQYKKIIAVSAPAAASFFPEQFLNLNGWLKSLGVEAFFDVGMGAELTVMSYLNYIKEKKPRTVISQPCPAIVTFIELFHPELLPYLAPADSPILHIIKMIKEYYPQYKNHKVAVISPCIAKRREYDETGMGDYNVTMVELKNLLDSQKINLSSFPKVEYTGVRAERAVGFPIPGGLLDTAERFEPGIRRNTEKIEGVFTIYPYLKEISEILNTNDELPLLIDCLNCEKGCLGGPGTGNAEKPLADLKAPVRKRMAKLEKEHNPKKAKSAYKKYHDVLKKYWKKGLYNRSYRNLSENNTIKHPDEAEITKIFRSMKKFGKEDIYNCTCCGYGSCKAMATAIYNKLNKPENCAHYILALLTEKTNTEELNRQLQEHISQASELIEGINNLINKLNVSINSQAETIAQSSVSTEKMITSLKDTSELSRSKQESIKGLIQNTEXSQESMRETIQLVEGISKSVEGIASAIKIISTIAANTNLLSMNAAIESAHAGEAGRGFAVVAGEIRRLSENTRENSVNISKTLKSIIDGVAVTEKQSENTGSRINTMSKEIGSFAETMSDLINTFGELSAQSSEITAALSSLHNQSDMVKTDYADILKMTEKLHEAMVDLNMLSKKKVLIVDDEEITLIMTKEMLKNDFNVTTVSSAKDALELFLDGYTPNLILLDLYMPEMGGWDALIRIRNLSKLHQTRIVIYTGSDDPKDRAKAKSLGAVDFIHKPIHKEELLG

SEQ ID NO: 56823 - DNA, 339 bp, Unknown
  Obtained from environmental sample
  misc_feature (1)..(339): n is a, c, g, or t
ttgatcaaatcagacatggtttcggcaaaactgccgatctcttttgacattgtgttaatccgcgatccggtgttctctgattgtttttcggtaacggctaccccgtcaataatacttttcagcgtcttggaaatgttaaccgaattttccctggtattttcagaaaggcggcgtatctcgccggcaacaaccgcaaagcccctgcccgcctctccggcatgcgcggattctatcgccgcgttcatggacaataaattggtgttagccgctattgtgctgattattttaattgccgaagctatgccttccaccgatttggaaatgccctcaaccaattga

SEQ ID NO: 56824 - protein, 112 aa, Unknown
  Obtained from environmental sample
  misc_feature (1)..(112): Xaa is any amino acid
MIKSDMVSAKLPISFDIVLIRDPVFSDCFSVTATPSIILFSVLEMLTEFSLVFSERRRISPATTAKPLPASPACADSIAAFMDNKLVLAAIVLIILIAEAMPSTDLEMPSTN

SEQ ID NO: 56825 - DNA, 642 bp, Unknown
  Obtained from environmental sample
  misc_feature (1)..(642): n is a, c, g, or t
ttgtgttttcttcagcgcggcggtttcggcgagcctgagtatcttcccattgacgaaaagcaccctacaaagccggagaattactacggctttacaaaactggagattgagcgtttcctgggctggtatgaaaaactcaggggcatacgttatgcctgtctgcgctactttaacgccgcgggctatgatgtaaagggtagtataaaaggactggaacagaatccgacgaatctgctgccggtcgttatggaaacagcctgcggcatgagggcggagtttcagattttcggcagcgactacgacacgccggacggaaccggcattcgggattatatccatgtcagcgatcttgccacaggccacgctgttgcgctggattacatcatcaagaacaataaaagcctgatcgtgaacctgggcagcgaaacaggatattcggtaaaagaagttctggaaaccgcgcggcgggtgacaggcaagcccattccctcgaagatagttgacagacgccccggtgatccggcaaaaatgaccgcgtcgtcagcccttgcccgtgaattgcttggctggtcggcaaaatattcagatatggaaactttgatacggacaagctgggaagtgtataaggagactattttatga

SEQ ID NO: 56826 - protein, 213 aa, Unknown
  Obtained from environmental sample
  DOMAIN (1)...(140): NAD dependent epimerase/dehydratase family
  misc_feature (1)..(213): Xaa is any amino acid
MCFLQRGGFGEPEYLPIDEKHPTKPENYYGFTKLEIERFLGWYEKLRGIRYACLRYFNAAGYDVKGSIKGLEQNPTNLLPVVMETACGMRAEFQIFGSDYDTPDGTGIRDYIHVSDLATGHAVALDYIIKNNKSLIVNLGSETGYSVKEVLETARRVTGKPIPSKIVDRRPGDPAKMTASSALARELLGWSAKYSDMETLIRTSWEVYKETIL

SEQ ID NO: 56827 - DNA, 1263 bp, Unknown
  Obtained from environmental sample
  misc_feature (1)..(1263): n is a, c, g, or t
atgaaaaagaaaattttcaaatggatcgataaggcggtttctcttgcggtcgagcttcagggcgaattgaccaaacgtcccgctgtttctccggattcaggcggtgaaggcgaactggataaatgcatatttctggaaggctggcttaaagcgcacggtatcacccacctggaacgcctcgacgctcctgacaaacacgccaaaggatgggtgcgtcccaatcttgttgccaccataccgggtaaaggcaatgaggcggacggttgcctgtggatcatcagccatcttgatgtcgtgcctccgggcgaggcctcacactgggaaagcgacccctggacaatggtggaaaccaaaaatggaccgcttggacacaggcttatcggcagaggcgtggaggacaaccagcagggactgacttcttccgtgcttgcggccatggcccttgtcaaactgggcatacagccttgccgcaccgtaaaactccttttcgtggctgacgaggaaatgggcaacgattatggcatcgcgtggcttttgaaacatcacagtgatatattcaataaaaatgataacgcgctcatccctgattggggggacacaaagggcgaaggcatcgagattgccgaaaaaaacatgatctgggtccgctttacaaccacgggcatacaaacccacgcttccaggcccgatcttggcgcaaacgcctttcttgccggctctgaccttgccctgcggcttcactacgggctttccgaaaaattcaacggcagggacagcctttttgaacctgaatactccaccttccagcctaccaaaaaagaagccaatgttcccaatgtaaacaccattccgggcggagatgttttttatattgatatgcgcgtgcttccccgttattcgataaaggaagtgttagacgaagttgacatcatcaaggaagaggttgcggcgaagcacaaggttaccattgaatataatgttctgctttcaaacgaatcccccgccacttcggcggaagctccttttattaaatccctctcgcttgcgataaacgaagtctacggcgaaacggcccgtcccgtcggcataggcggcggcactgttgcgtcgtttcttcgcaagataggaattgacagcgcggtctgggcgcggctcagcggtactgcccaccagcccaatgaatattcccttgtcaaagacatactgggcgacgcaaaggttatggcgctgttgatgcggggaacggacaacaaccaggaataa

SEQ ID NO: 56828 - protein, 420 aa, Unknown
  Obtained from environmental sample
  DOMAIN (207)...(320): Peptidase dimerisation domain
  misc_feature (1)..(420): Xaa is any amino acid
MKKKIFKWIDKAVSLAVELQGELTKRPAVSPDSGGEGELDKCIFLEGWLKAHGITHLERLDAPDKHAKGWVRPNLVATIPGKGNEADGCLWIISHLDVVPPGEASHWESDPWTMVETKNGPLGHRLIGRGVEDNQQGLTSSVLAAMALVKLGIQPCRTVKLLFVADEEMGNDYGIAWLLKHHSDIFNKNDNALIPDWGDTKGEGIEIAEKNMIWVRFTTTGIQTHASRPDLGANAFLAGSDLALRLHYGLSEKFNGRDSLFEPEYSTFQPTKKEANVPNVNTIPGGDVFYIDMRVLPRYSIKEVLDEVDIIKEEVAAKHKVTIEYNVLLSNESPATSAEAPFIKSLSLAINEVYGETARPVGIGGGTVASFLRKIGIDSAVWARLSGTAHQPNEYSLVKDILGDAKVMALLMRGTDNNQE

SEQ ID NO: 56829 - DNA, 444 bp, Unknown
  Obtained from environmental sample
  misc_feature (1)..(444): n is a, c, g, or t
atgcggccgtacttaaagaaaggaaaactgccccgggttgtattccgcagaaaggtatttgtaatttttacccttcttgtgcaaatcctgttctttgtttttctgattgccggaaccagcatatatattcgttacgctaactgggttcttcatattatcagcataattgtctgtgtgtatattattaacaaacacgcgaaagccgcgtataagatcacatggattttcctgatcatgttattccccatctttggcggaatcctgtatatcgtttttttctatgcctcaaaccccagaaaactcaaacgtttaattcaacgtaatataagggagagccggagcgctttttatttgggcggggacagcctgcccgatctcgacaggacatatccggaattcaagccccaggcgcattattgcaggagtacgctcgtgccgatctga

SEQ ID NO: 56830 - protein, 147 aa, Unknown
  Obtained from environmental sample
  misc_feature (1)..(147): Xaa is any amino acid
MRPYLKKGKLPRVVFRRKVFVIFTLLVQILFFVFLIAGTSIYIRYANWVLHIISIIVCVYIINKHAKAAYKITWIFLIMLFPIFGGILYIVFFYASNPRKLKRLIQRNIRESRSAFYLGGDSLPDLDRTYPEFKPQAHYCRSTLVPI

SEQ ID NO: 56831 - DNA, 444 bp, Unknown
  Obtained from environmental sample
  misc_feature (1)..(444): n is a, c, g, or t
ttgataatgatgttatcaccgatcgtgcgttggagaacctacggctgcgccagcgccatcgcgtcaacaagcatgctgtcagatgtaataaagggcatgaaaatagaggatgcctacaaagtaaagcccgaagacctcgttgaaaaactcggcggcctgccctcatacaagatccactgttctgtgttaggcgacaaggccctccgcgccgccattgacgactaccttgccaaaaccggaaggaccggaatgttacaggaagaggccacggagatttgccactgcctcggcatcaccgacaaggacattgaaaacgctttccagaacggagcccgcaactgggaagatttgcagcaggccaccaagatcggcacagtttgcggaagttgtaaggaaaaagcgatggaacttctgcacggcctggaacacatctacgggatgtaa

SEQ ID NO: 56832 - protein, 147 aa, Unknown
  Obtained from environmental sample
  DOMAIN (1)...(82): NifU-like N terminal domain
  misc_feature (1)..(147): Xaa is any amino acid
MIMMLSPIVRWRTYGCASAIASTSMLSDVIKGMKIEDAYKVKPEDLVEKLGGLPSYKIHCSVLGDKALRAAIDDYLAKTGRTGMLQEEATEICHCLGITDKDIENAFQNGARNWEDLQQATKIGTVCGSCKEKAMELLHGLEHIYGM

SEQ ID NO: 56833 - DNA, 348 bp, Unknown
  Obtained from environmental sample
  misc_feature (1)..(348): n is a, c, g, or t
atgggagatggtcttttcaaagcgatacccaatataaagataaacggccatcctgtggatgtgttgccgaatacgttaaacgtttctttccccggcgctgaaggcgaggctatcctcctctccatggatctaattggaatagaagcgtcaacgggatcggcttgcgcctcaggcagccttgagccgtcccatgttcttatggcgacaggtgtagggccggaactggcccacggctcgatccgtttcagcttgggctgggggctttctgtggaagatgtcgattatataatagaaacactgccacctataatcgcccggctgagggcaatgggaggaatttatgcctga

SEQ ID NO: 56834 - protein, 115 aa, Unknown
  Obtained from environmental sample
  misc_feature (1)..(115): Xaa is any amino acid
MGDGLFKAIPNIKINGHPVDVLPNTLNVSFPGAEGEAILLSMDLIGIEASTGSACASGSLEPSHVLMATGVGPELAHGSIRFSLGWGLSVEDVDYIIETLPPIIARLRAMGGIYA

SEQ ID NO: 56835 - DNA, 768 bp, Unknown
  Obtained from environmental sample
  misc_feature (1)..(768): n is a, c, g, or t
atgacgcgaaaagtctatgttgattacaatgccaccaccccgctcaggccggaagtaaaagccgccatcgtggaagatctggatattttcgggaacgcttccagcatgcactcttccggacggctcgcccactcgcgggtggaggaagccagaacctgcgtggaaaaactgatgagggcgcagccgcgtaccgtcatttttacctcaggcggatcggaatcaaataacgccgtgtttcagacaatgaggcagcttgcttcaacccccaacggcggcccgctgaaagagggccgctgtgagttcatcaccagcgccatagagcatccctgcgtgcttaactccgcgaaaaacctgcaagacttaggctttaaggtcagcttcctgcctgttgacgaatacggcaagattgacatggacgccttcaaaaaggcgttaagcgacaaaacgcttcttgtgtcgataatggcagctaacaacgaaataggcaccattcaggacatcaagaaaatcgcctctctcgcgaaggcagccggcgcgtggatgcacaccgacgcggtacaggcgcttggcaagatacccgtcaatgttgacgatcttggcgtggattaccttaccgtgtcggcgcacaagatttacgggccaaagggcattggcgccctgtacgcgcggaaagactcgccgcttcgccccctgatccacggcgggcatcaggaggaaggcctgagagcggggacctacaacaacatcggcatactgggctttggctaa

SEQ ID NO: 56836 - protein, 255 aa, Unknown
  Obtained from environmental sample
  DOMAIN (5)...(255): Aminotransferase class-V
  misc_feature (1)..(255): Xaa is any amino acid
MTRKVYVDYNATTPLRPEVKAAIVEDLDIFGNASSMHSSGRLAHSRVEEARTCVEKLMRAQPRTVIFTSGGSESNNAVFQTMRQLASTPNGGPLKEGRCEFITSAIEHPCVLNSAKNLQDLGFKVSFLPVDEYGKIDMDAFKKALSDKTLLVSIMAANNEIGTIQDIKKIASLAKAAGAWMHTDAVQALGKIPVNVDDLGVDYLTVSAHKIYGPKGIGALYARKDSPLRPLIHGGHQEEGLRAGTYNNIGILGFG

SEQ ID NO: 56837 - DNA, 813 bp, Unknown
  Obtained from environmental sample
  misc_feature (1)..(813): n is a, c, g, or t
atgaaaaaaatattaacaataactctgctgttccttgcgggttttctgtatgcccaaaataacaacaggccggtcaacggcgaactggtcctgcgatcttttcagaaatgcttccctgacaaaaccgggaccgtcgcttttattgataatgactggacaataaccgcggggggcgagatttttttttgggcgggcggcaggctgcttcctggagcggagaagaacaagaccgattcctacagtcctcattttttttatataatccccgccaaacccgcgccgcctgattcatacccgccacagtatatagaaaacctgcgaagccggggcagcagagaggcacggcttgagagaagggacattaaccggaaatttatgggtattctgtacggcgggcttgagcgaaaagagatcgaagctatgattgcacgcgttgattttctcggctacaaagtaaatgtccacaagaatattgccggaccgctaaggcgggtcgataccgaaatcagaaaatggagcggggccagggattttatatcttcaatagggagcatcgacggatacagttggaggcagatagccgggacgcagcgcatgagctatcatagctggggcctggctgttgatattctgccaaaaagactcggcggaaaggcgatctactggctgtgggaaatggaaaagaacaaggattggatgcttgtccctctggaaaaccgctggaacccgccccttcaggtaattgaggcctttgagaaggaaggctttatctggggcggaaaatggccgggtagacaacctcggccgatctga

SEQ ID NO: 56838 - protein, 270 aa, Unknown
  Obtained from environmental sample
  SIGNAL (1)...(18)
  misc_feature (1)..(270): Xaa is any amino acid
MKKILTITLLFLAGFLYAQNNNRPVNGELVLRSFQKCFPDKTGTVAFIDNDWTITAGGEIFFWAGGRLLPGAEKNKTDSYSPHFFYIIPAKPAPPDSYPPQYIENLRSRGSREARLERRDINRKFMGILYGGLERKEIEAMIARVDFLGYKVNVHKNIAGPLRRVDTEIRKWSGARDFISSIGSIDGYSWRQIAGTQRMSYHSWGLAVDILPKRLGGKAIYWLWEMEKNKDWMLVPLENRWNPPLQVIEAFEKEGFIWGGKWPGRQPRPI

SEQ ID NO: 56839 - DNA, 315 bp, Unknown
  Obtained from environmental sample
  misc_feature (1)..(315): n is a, c, g, or t
atggatgataattcaggcaataagaagattctccttgttgatgataatgaagtccagctttctatttccgaagtacagttaaataaagaatacgaagttactaccgcaaaatccggaaaagaagcgctggattatttatttcacggctacgttcctgacctgattatgctggatattttaatgcccgatatggacggatgggaaacatttggcaggctaagggctatcagcaagcttcatgaagtccccatactattcatgtcgtccataaacgataaaatgagatcgaccgcgcttttgacatgggcgccgtag

SEQ ID NO: 56840 - protein, 104 aa, Unknown
  Obtained from environmental sample
  DOMAIN (8)...(99): Response regulator receiver domain
  misc_feature (1)..(104): Xaa is any amino acid
MDDNSGNKKILLVDDNEVQLSISEVQLNKEYEVTTAKSGKEALDYLFHGYVPDLIMLDILMPDMDGWETFGRLRAISKLHEVPILFMSSINDKMRSTALLTWAP

SEQ ID NO: 56841 - DNA, 699 bp, Unknown
  Obtained from environmental sample
  misc_feature (1)..(699): n is a, c, g, or t
ttgggtggcgatcccatggtaattaccgaatttgacatgattctcaggctggttctagggtttttggcggggggaataataggcctggagcgttccagccggcgccaggtggccggccttaggacgcacatcttaattgccaccggggcaaccctcctgatgctcctgtcaatctacattcctcagcatattaatcccgagaaaagcagcgatccagggcgaattgccgcccaggtagtttcgggcatcgggttccttggggcaggggccattatcaggctgggaaacagcatacggggactaactaccgcggcctctttatggtttgtcgcggctgttgggcttgccataggcgcgggaatgtacctggtagccgccgccgcggaagctctgggcattacaacccttatgttcctgtatgtttttgagaaaagaatgtttcctgccgaaaggcttaaattgatggaaataagctacaaaaacgacaactctgtaagcgtcaaggaagccatggagataatcaaaaaagccgggatgtctgttctgtctacagatttcaaccaaagttccgacaaaaaaggaagcaagctaaggctttttattagaattcccggcgctttggatattgcttccatcgctcaatctatcaaagccctggacaacgttagcagggtagaaattaaagaaaagtattcctaa

SEQ ID NO: 56842 - protein, 232 aa, Unknown
  Obtained from environmental sample
  DOMAIN (17)...(148): MgtC family
  misc_feature (1)..(232): Xaa is any amino acid
MGGDPMVITEFDMILRLVLGFLAGGIIGLERSSRRQVAGLRTHILIATGATLLMLLSIYIPQHINPEKSSDPGRIAAQVVSGIGFLGAGAIIRLGNSIRGLTTAASLWFVAAVGLAIGAGMYLVAAAAEALGITTLMFLYVFEKRMFPAERLKLMEISYKNDNSVSVKEAMEIIKKAGMSVLSTDFNQSSDKKGSKLRLFIRIPGALDIASIAQSIKALDNVSRVEIKEKYS

SEQ ID NO: 56843 - DNA, 759 bp, Unknown
  Obtained from environmental sample
  misc_feature (1)..(759): n is a, c, g, or t
atgacctccttcagccgccttggtgaaaaacaaagggaggatttcgcggttctgcgtctgcccatgggaacggcaaatgacggagcggattcatttgatttaggggaagctctggatttgattattgagcctccggcgcttcaaaaacaaagggcagtacggcttaagaccgcaagcggaaaaggccctttccatgcctttaatattctttccgtaggccttgacgcctttgtaacgaacatgacaaacaagatgaaagacaagctccctggcgattcctataaattatgggtggatatcgcggctcttctctacgacaaaatctacaaggttggcgtaatggatgtgcatagctttgatgagcaggggaatgaaatacaaacactggaagagaagcttctcctgattgcgatgggcgaaagcggcaggcgctgctacggttcgcagcaatggatactcccggacgacaggaacgtctgcgccatcaagcagatgcccctttataaaaagcttgcccttaaagggcttttatccagcggaaatcacgcgggcagagacgaggcaattttttggaatgccgcccgcatcgaattccaaagccaatacccgctattggctcaaatggacggagaggctgttctccttaaggaaaatgattttcccgctgtaattgaactaactgagcctttaatcaatatacttggaaaaaaggatcggcggccctgggccagtaatggttctggaactgtaattgtttag

SEQ ID NO: 56844 - protein, 252 aa, Unknown
  Obtained from environmental sample
  misc_feature (1)..(252): Xaa is any amino acid
MTSFSRLGEKQREDFAVLRLPMGTANDGADSFDLGEALDLIIEPPALQKQRAVRLKTASGKGPFHAFNILSVGLDAFVTNMTNKMKDKLPGDSYKLWVDIAALLYDKIYKVGVMDVHSFDEQGNEIQTLEEKLLLIAMGESGRRCYGSQQWILPDDRNVCAIKQMPLYKKLALKGLLSSGNHAGRDEAIFWNAARIEFQSQYPLLAQMDGEAVLLKENDFPAVIELTEPLINILGKKDRRPWASNGSGTVIV

SEQ ID NO: 56845 - DNA, 474 bp, Unknown
  Obtained from environmental sample
  misc_feature (1)..(474): n is a, c, g, or t
ttgcctgtgatcatgtgtactgcccgaggcgaggaaaccgacatagtcgcgggactggaattgggggccgacgattatgtggttaagccctacagccccagggtattggctgcgcgtatacgcgcggctctcaggcggaaagaagctgtctctgctgaaaccgggggctccaaaagcaagacgttctttcagcagggaaagctaaagatagacatcgagcggcatacggcctttctggaagaaacgcccctggatctttttcccacggaatttgcaatccttgcccattttttgagtaaccccgatattgttttttcccgccagagacttatcaccgcgatccgtggacacgattaccctgtaacggatcgttccattgatgtgcaaattatgggattgagaaaaaagctcaggtgttacggcgatatgattgaaaccatccggggcattggttacaggttcaagacggaatga

SEQ ID NO: 56846 - protein, 157 aa, Unknown
  Obtained from environmental sample
  DOMAIN (81)...(154): Transcriptional regulatory protein, C terminal
  misc_feature (1)..(157): Xaa is any amino acid
MPVIMCTARGEETDIVAGLELGADDYVVKPYSPRVLAARIRAALRRKEAVSAETGGSKSKTFFQQGKLKIDIERHTAFLEETPLDLFPTEFAILAHFLSNPDIVFSRQRLITAIRGHDYPVTDRSIDVQIMGLRKKLRCYGDMIETIRGIGYRFKTE

SEQ ID NO: 56847 - DNA, 621 bp, Unknown
  Obtained from environmental sample
  misc_feature (1)..(621): n is a, c, g, or t
ttgcggcaggagcttgctctcatggccgcgagggtgggaggagatattggaaaggcgcttgccatactccgttccggcgataaggagcttgcggaagaagtaaaagaaaacggcaaagttgtagatgcccatcagttaaagatagaagacatagctttggttcttatcgctacccagcagcctgtggcgcgggatttgcgggaactcataaccgtttttaaaattaccgcgaaccttgagcgtatcggcgattatgggattcatcttgtaaaggcagcggtaaaattgtcagcgcgtccttcgtttcgttctattgtacgaattgaacacatggttgagaccgcccaggaaatgctgaaagaggcgttttccgcttaccttgcgcaggatccaaagtccgcaagaaaagcagccgcgcttgatgataaaatagacggcgagcataaggccctcaccgaggagatccttgccctcatgaaaaaagagccgcagcttatcaaagccgccgccaggctcttaaagctttcagggtatatggaacgccttggggatcacatcaccaatatctgcgagggaatcatttatatgattgaaggaaaacatgaggatctaaacgattga

SEQ ID NO: 56848 - protein, 206 aa, Unknown
  Obtained from environmental sample
  DOMAIN (108)...(193): PhoU family
  misc_feature (1)..(206): Xaa is any amino acid
MRQELALMAARVGGDIGKALAILRSGDKELAEEVKENGKVVDAHQLKIEDIALVLIATQQPVARDLRELITVFKITANLERIGDYGIHLVKAAVKLSARPSFRSIVRIEHMVETAQEMLKEAFSAYLAQDPKSARKAAALDDKIDGEHKALTEEILALMKKEPQLIKAAARLLKLSGYMERLGDHITNICEGIIYMIEGKHEDLND

SEQ ID NO: 56849 - DNA, 1377 bp, Unknown
  Obtained from environmental sample
  misc_feature (1)..(1377): n is a, c, g, or t
atgacggggaagcagacatttaacatggaagatgaatttgcggggctggactgcaactcaagccgccttgaaaagcggtttataaggaccatggaaacgctgtccaaacagccggacaaatcaatatggtcctgcagcgaaaaccgggcggaggccaaagccatataccggatgcttggcaacgggaaccttgatcgcgaagaaatactgcgggcgcatcgggaggctaccgtaaggcgcatggtacagtcagggggaaccatcctggcagtgcaagataccacaagcctgaactacaacacccatgagaaaatggaagggatagggtatatcggcgaaaagacgctgggggtaaatatccacagctgccttgcgcttacaaccgaagggttagtgcttggggtattggaacaaacatcgtacaaccgcactcaggcaaaggacgacagccgcagccacgacagcaaaaagacacggacattgagaaagaaagagagttaccgatgggttcaaaccctttgggagagtaccaacggcctgcctgacggaatgcatgttgttaccgtatgcgacagggaaggggacatgtatgcgctgtttgacgaagcggatcggtggggccaggcatttctaatacggatagcgcagaaccgaataaccgcagaaaaccataaaatattggataaaatccgggaaaaacagtgtatgggcaaggtaaaaacaaatatcccccgcgattcccgcaaaggccttgcggaacgccacgcggtattgcagatacggtatggcggctttgaaataaaacgcccgcagatcctcaacaagaataaaaagctcagaggcacgcaggaagcaaacaaaatatatgtcagggaagaacagcaggacaaagccgtagagcctttggaatggtttttgatgacaaacgagccggtccggactgtcgaagacgcatacgaaaaagccgtatggtatatgcagcggtggaagatagagcagttccactatgtgctgaaatccggctgtacggttgagaagctgcaggaacggagcatggaaaaaacaacgatgctggtcctgatgtattccataattgcttcggcaattatgaacataacttatgttgcacgaatacacccgctgcttccctgtacgattttctttgaggaagacgaatggaaggtactgtaccgcaccgcaaacaagacaaaaaaaatacctaaaaagccgtatacgattgctgaagcagtaacctacttaagctggctgggagggcccaaacgggctcccagcgacggccctcctggcgtcaaaacaatttggattgggcttgataaatttaacaccttgcttgcatacaaggaatggatgtcataa

SEQ ID NO: 56850 - protein, 458 aa, Unknown
  Obtained from environmental sample
  misc_feature (1)..(458): Xaa is any amino acid
MTGKQTFNMEDEFAGLDCNSSRLEKRFIRTMETLSKQPDKSIWSCSENRAEAKAIYRMLGNGNLDREEILRAHREATVRRMVQSGGTILAVQDTTSLNYNTHEKMEGIGYIGEKTLGVNIHSCLALTTEGLVLGVLEQTSYNRTQAKDDSRSHDSKKTRTLRKKESYRWVQTLWESTNGLPDGMHVVTVCDREGDMYALFDEADRWGQAFLIRIAQNRITAENHKILDKIREKQCMGKVKTNIPRDSRKGLAERHAVLQIRYGGFEIKRPQILNKNKKLRGTQEANKIYVREEQQDKAVEPLEWFLMTNEPVRTVEDAYEKAVWYMQRWKIEQFHYVLKSGCTVEKLQERSMEKTTMLVLMYSIIASAIMNITYVARIHPLLPCTIFFEEDEWKVLYRTANKTKKIPKKPYTIAEAVTYLSWLGGPKRAPSDGPPGVKTIWIGLDKFNTLLAYKEWMS

SEQ ID NO: 56851 - DNA, 1155 bp, Unknown
  Obtained from environmental sample
  misc_feature (1)..(1155): n is a, c, g, or t
atgacagaatcggcacgagagctgcctataaaatgctattccgagaggcttcgtcccacggaacctttgataacaaaacagagaattgtggacactttcttccccgtgaacagaggcggagttttctgcgttcctggaccttttggcgcaggtaaaacagtgttgcagcaattaaccgctcgccacgcagaagtggacattgtgatcattgccgcttgcggcgagcgcgctggtgaagttgtggagacgttgaaagaatttccagagcaaatagaccctcgcactgggcgtagcttaatggagcgcactttaattatatgcaacacaagctccatgcccgttgctgctcgcgaagcatctgtttatacaggtgtgacacttgccgaatattaccggcaaatgggtctcaacgtgctgctgcttgcagattcaacaagccgctgggcgcaggctcttagagagatgagcggtcgcttggaagaaatccctggcgaagaagctttccctgcatatttggaatctgttattgcgagcttctatgaaagaggtggcatagttcgccttaaaaacggagaaactggttctgtgaccattggtggaaacgtctctcctgcaggcggaaactttgaggagcctgttacgcaggcaacgcttaaagtggttggcgcattccacgggctttcaagagaacgttccgatcagcgccgctttccggcaattcacccgcttgagagctggtctaaatataatggtttaatagacagtgcaaaaacatctgaggtgcacaaaattttgagcaaaggcaatgatgtggggcaaatgatgaaagttgtgggcgaagaaggcacctcaatggacgattttgttctttaccttaaaggtgaatttttggatgctgtttatttgcagcaagatgcctataataaaatagatgaggcttgccccggagataggcaagaatatgtgttcaataaaatttatcaaatcttgaaaactccggttactttcaaggaaaaagacacagcgcgttcctttttcttaaagttgactcaaacagcaaaagactggaaccgagtggagttcaaatccaaagaatttcaggatttggaaggcaacattctaaaagccgtagcggaggtaactgtaaatgcataa

SEQ ID NO: 56852 - protein, 384 aa, Unknown
  Obtained from environmental sample
  DOMAIN (25)...(247): ATP synthase alpha/beta family, nucleotide-binding domain
  misc_feature (1)..(384): Xaa is any amino acid
MTESARELPIKCYSERLRPTEPLITKQRIVDTFFPVNRGGVFCVPGPFGAGKTVLQQLTARHAEVDIVIIAACGERAGEVVETLKEFPEQIDPRTGRSLMERTLIICNTSSMPVAAREASVYTGVTLAEYYRQMGLNVLLLADSTSRWAQALREMSGRLEEIPGEEAFPAYLESVIASFYERGGIVRLKNGETGSVTIGGNVSPAGGNFEEPVTQATLKVVGAFHGLSRERSDQRRFPAIHPLESWSKYNGLIDSAKTSEVHKILSKGNDVGQMMKVVGEEGTSMDDFVLYLKGEFLDAVYLQQDAYNKIDEACPGDRQEYVFNKIYQILKTPVTFKEKDTARSFFLKLTQTAKDWNRVEFKSKEFQDLEGNILKAVAEVTVNA

SEQ ID NO: 56853 - DNA, 300 bp, Unknown
  Obtained from environmental sample
  misc_feature (1)..(300): n is a, c, g, or t
atggagcttgtgttgcatataattaaagtgcgctccattaagctacgcccagtgcgagggtctatttgctctggaaattctttcaacgtctccacaacttcaccagcgcgctcgccgcaagcggcaatgatcacaatgtccacttctgcgtggcgagcggttaattgctgcaacactgttttacctgcgccaaaaggtccaggaacgcagaaaactccgcctctgttcacggggaagaaagtgtccacaattctctgttttgttatcaaaggttccgtgggacgaagcctctcggaatag

SEQ ID NO: 56854 - protein, 99 aa, Unknown
  Obtained from environmental sample
  misc_feature (1)..(99): Xaa is any amino acid
MELVLHIIKVRSIKLRPVRGSICSGNSFNVSTTSPARSPQAAMITMSTSAWRAVNCCNTVLPAPKGPGTQKTPPLFTGKKVSTILCFVIKGSVGRSLSE

SEQ ID NO: 56855 - DNA, 1293 bp, Unknown
  Obtained from environmental sample
  misc_feature (1)..(1293): n is a, c, g, or t
atgcataaggtttatcataaaattgaaagaattgcaggcaacgttattacagttgccgcagacggcgttagctataacgaattggcacaggtgcaaagcccaaggggaacctctttggcacaggtgattcgcttggataacggtatggttgatttacaggtttttgctggtagccgcggcatttccacagattcacaggtgcgctttttaggcaagccaatgcaggttccttttagcgattctttgctagggcgcgtgttttctggagcaggcgagcctcgtgacaaaggtcctgtgataaatgagaatttgattgaaattggcggtccttccgttaatccttcaaagagaattatcccaaaaaatatggtgcgcactggaattccgatgattgatgtgttcaacaccttggttgttagccaaaagctccctattttctcaatagctggcgaaccatataacgaactactcgctcgcatagctttgcaagcagaagttgacgttattattcttggcggtatgggactaaaatacgatgattatctgtttttcagggatttcttggaagaacacggtgctcttagccgcacggtttcttttatgcacacagcctctgaccccattgtggaatgtttgcttgttccagatgcagcactcgcggttgcagaacaattcgcaactcagggcaaaaaagtgctagtgcttttaaccgatatgacaaactttgccgatgcaatgaaagaaattgctattacaatggaacaggtgccctctaatcgtggttatcctggcgatttgtattctcagcttgccagccgctatgaaaaagcggtggattttgaaggttcgggttcaataaccattcttgccgttacaacaatgccaggcgatgatgtaactcaccctgttccagataacaccggttatataaccgagggtcagttctatttgcgcaaaggcagaattgaaccatttggttctcttagccgcttaaagcagcaggttaacggcgatacccgccaggatcaccgcacaataatgaacacaatgattcagctttattccagctacaaagaaaccttagaaaagcagtctatgggtttccgtatgagcaattgggatgcaaagctcttgaaatacggtgttcgttttgaaaaggaaatgatggatttgtccgtaaacattcctttggaagcggctttggatctcggttggaaaatccttgcagattgctttaaacccgaagaaacgggcattccaagcaagctgatagagaagttctggccaaagtaa

SEQ ID NO: 56856 - protein, 430 aa, Unknown
  Obtained from environmental sample
  DOMAIN (8)...(71): ATP synthase alpha/beta family, beta-barrel domain
  misc_feature (1)..(430): Xaa is any amino acid
MHKVYHKIERIAGNVITVAADGVSYNELAQVQSPRGTSLAQVIRLDNGMVDLQVFAGSRGISTDSQVRFLGKPMQVPFSDSLLGRVFSGAGEPRDKGPVINENLIEIGGPSVNPSKRIIPKNMVRTGIPMIDVFNTLVVSQKLPIFSIAGEPYNELLARIALQAEVDVIILGGMGLKYDDYLFFRDFLEEHGALSRTVSFMHTASDPIVECLLVPDAALAVAEQFATQGKKVLVLLTDMTNFADAMKEIAITMEQVPSNRGYPGDLYSQLASRYEKAVDFEGSGSITILAVTTMPGDDVTHPVPDNTGYITEGQFYLRKGRIEPFGSLSRLKQQVNGDTRQDHRTIMNTMIQLYSSYKETLEKQSMGFRMSNWDAKLLKYGVRFEKEMMDLSVNIPLEAALDLGWKILADCFKPEETGIPSKLIEKFWPK

SEQ ID NO: 56857 - DNA, 498 bp, Unknown
  Obtained from environmental sample
  misc_feature (1)..(498): n is a, c, g, or t
atggctcaaaacacattcaagaacttactggaaataatgcagcggctccgttctgcggacggttgcccttgggatagggagcagaatttcaatagtttgctcccttatcttttagaagaatcttacgaatatatagacgctgttcaaagcgaaaaccttaaagatatggtagaagaacttggcgatgtgcttttacaagtggtatttcattcccaaatagccaaggaagagggcaaattcacaatagacgatgttatagagggaatttgcgaaaaaatggttaggcggcaccctcacgtttttggctcagaaacactaggaacttccaaggaggttcttaaaaaatgggaagagataaagagtgaggaaaagaaggaaaaacctgcctccgctatggacaaggtgcctcgttcaatggtagctctttcccgtgcccaagagctttcaaggcgggctgcaaaggtcggttttgattggagcgattcggggcccgtttag

SEQ ID NO: 56858 - protein, 165 aa, Unknown
  Obtained from environmental sample
  DOMAIN (28)...(101): MazG nucleotide pyrophosphohydrolase domain
  misc_feature (1)..(165): Xaa is any amino acid
MAQNTFKNLLEIMQRLRSADGCPWDREQNFNSLLPYLLEESYEYIDAVQSENLKDMVEELGDVLLQVVFHSQIAKEEGKFTIDDVIEGICEKMVRRHPHVFGSETLGTSKEVLKKWEEIKSEEKKEKPASAMDKVPRSMVALSRAQELSRRAAKVGFDWSDSGPV

SEQ ID NO: 56859 - DNA, 672 bp, Unknown
  Obtained from environmental sample
  misc_feature (1)..(672): n is a, c, g, or t
ttgcacaaagggcatatttggagcgctctctgcgttgcttccgttgcaaaggcaaaaaatgcctccattcatttgagaattgaagaccacgataaattgcgttgttcaaagcatttttcggatattataaaaaaggatttggaatggcttggttttgaatggcaaagcgaaagcattcaaagcgaaagatatgaaatttatgaaaagtattttgaaattttgcaaaaaaaagatttgctctatgaattgttcaaaaccgataaacctaaaattatgctgaaaaattccgaaggcgaagattttgcaattagagatgctctagggcaatggacttatcagtttgccgttgtaattgacgattttgaagaggacatagacttgattgtgcgtggcgaagatttgaaagattctgtggataagcaaataactctcgcgaaaatcataggcagaacaaaaatgccgctgttcattcaccacagccttatttacggttcagacggaaaaaaactgagcaagagagatggctcagacggaatttgcagggagagagaaaaaggtgtttctccaaaaaaagttttgagcgaaatttgccgtcttatgctgcctaacaaaaatattccagatgagattgggtggggagaggctgttgaaattgccttcaatgaggtctaa

SEQ ID NO: 56860 - protein, 223 aa, Unknown
  Obtained from environmental sample
  SIGNAL (1)...(18)
  DOMAIN (2)...(220): tRNA synthetases class I (E and Q), catalytic domain
  misc_feature (1)..(223): Xaa is any amino acid
MHKGHIWSALCVASVAKAKNASIHLRIEDHDKLRCSKHFSDIIKKDLEWLGFEWQSESIQSERYEIYEKYFEILQKKDLLYELFKTDKPKIMLKNSEGEDFAIRDALGQWTYQFAVVIDDFEEDIDLIVRGEDLKDSVDKQITLAKIIGRTKMPLFIHHSLIYGSDGKKLSKRDGSDGICREREKGVSPKKVLSEICRLMLPNKNIPDEIGWGEAVEIAFNEV

SEQ ID NO: 56861 - DNA, 345 bp, Unknown
  Obtained from environmental sample
  misc_feature (1)..(345): n is a, c, g, or t
ttgccatttttgtggcttgagcaacttttggcatccgagccggaaaaccatgttgctttgaacaacttgggctatatgctgatagaccgcgacatagatgtgaacaaaggtttgtccctagtggaaaaagccttgcatcgctcgccagaagaatcctcatatttagactcaaaagcctgggggctatacaaaataggcaaatacgaagaagcactaaaaatacttgaaggtttagaagcctcaggaatgaaagcaaacgaactttggctacacctagcaaaagtctgcgaagccttgaaactagaagaaagagcaaaagcgtataaagaaaagattagggaatga

SEQ ID NO: 56862 - protein, 114 aa, Unknown
  Obtained from environmental sample
  misc_feature (1)..(114): Xaa is any amino acid
MPFLWLEQLLASEPENHVALNNLGYMLIDRDIDVNKGLSLVEKALHRSPEESSYLDSKAWGLYKIGKYEEALKILEGLEASGMKANELWLHLAKVCEALKLEERAKAYKEKIRE

SEQ ID NO: 56863 - DNA, 705 bp, Unknown
  Obtained from environmental sample
  misc_feature (1)..(705): n is a, c, g, or t
ttgctcgggctcaccgtgggcctgatcctggccgagccggacctcggcacggctttttccgtggccctgatcgccttcatcatgatgtgcgtggccggcatcaagatatggcacctggccgccctgagcctggccggcggcgcggtcctctattatgaaataaccagttacgcctaccgcctccggcgcatcgccgccttcctggatccctggtccgcgccccaggacgccggctatcacatcatccactccttttacgccttcgccaccggcgggctgttgggccaggggccgggggccagccagcaaaagctcttctttctgcccgagccgcataccgatttcatcttttccgtgctggccgaggagatcggcctggcgggcgttctggtggtcggggccttgtttctcgccttggtcgtccgggggctggccatcgcccgggccatcgcggtccgggataaaagcggggtttacctggccctgggtagcacgatggtggtggccgtgcccgcctttttaaacatggccgtggttacggccttgatccccaccaagggtctgcccctgccgtttttcagctacggtggaaccaacctcctggtctgctgcgcggctatggggctcttgatgaacgtttccagccagtgtcacggtgaaaaacgcccgggccgagcccaccggggctcggcggccaggtcgtga

SEQ ID NO: 56864 - protein, 234 aa, Unknown
  Obtained from environmental sample
  DOMAIN (1)...(219): Cell cycle protein
  misc_feature (1)..(234): Xaa is any amino acid
MLGLTVGLILAEPDLGTAFSVALIAFIMMCVAGIKIWHLAALSLAGGAVLYYEITSYAYRLRRIAAFLDPWSAPQDAGYHIIHSFYAFATGGLLGQGPGASQQKLFFLPEPHTDFIFSVLAEEIGLAGVLVVGALFLALVVRGLAIARAIAVRDKSGVYLALGSTMVVAVPAFLNMAVVTALIPTKGLPLPFFSYGGTNLLVCCAAMGLLMNVSSQCHGEKRPGRAHRGSAARS

SEQ ID NO: 56865 - DNA, 1137 bp, Unknown
  Obtained from environmental sample
  misc_feature (1)..(1137): n is a, c, g, or t
gtgaggggtatggggttgatgaataagggcgccatgactgaagcgcgtttcatcctggccgccggcggcacgggcggtcatttatggccggccctctccctggccctggcccttaaaaaacttcggccggcggccgattgcctgtttgtgggcaccggccggcccgtggaggcggccatcctggacccctccggcttccgccgggtggcgctccgggccggcggctggaaaggcctggggccggccgcccgcttaaagggcctccggctggcctgggccgggttttgggaagctttgaggcttttgcgttcctatcgccccctggtctgtttcggggccggcggctatgtgaccgtgccggtgggtctggccgcctggtttctgggtgtgcccctggtcatccacgagcagaattcccgggccggcttgagcaacaaggtcctgggccgcctggcctcccgggtcggcttgggtttcgaagaagccgcgccggccttcccggccggccgggtcgtcttcaccggcaaccctgtccgcccggagatagcggctcttcggcaaatggaaagaaatttcgaccgccggcccctctgcgtcctggtcaccggcggcagtcagggcgcccgggccctgaacctggcggcggctccggccttggccggcctggtccggcggggtctggcgaaagtcattcatcagaccgggacggccggcctggccgaggtgcggcgcatttaccgggaggccggcgcggaggccgagacggcgggaatctaccaggacatggccgggctttaccgccgggccgacctggtcgtgggccgggcccgcgccatcaccttggcggaactggccgcggccggactgccggccgtcctggtgcctttgccgactgcggccgacggccaccaagccgccaacgccgattttttcgaaaaggccggggcggccctggttttggcgcaagaaaggctctcgcccgagactttggccgaggttcttgggggcctcctggccaacccggccaggctggccgccctgtcccgggccaccctcggcctggcccggccggacgccgatgtccggctggccgggatctgcctggaactggccgaaaggccgaggaagcacaaatga

SEQ ID NO: 56866 - protein, 378 aa, Unknown
  Obtained from environmental sample
  DOMAIN (17)...(157): Glycosyltransferase family 28 N-terminal domain
  misc_feature (1)..(378): Xaa is any amino acid
MRGMGLMNKGAMTEARFILAAGGTGGHLWPALSLALALKKLRPAADCLFVGTGRPVEAAILDPSGFRRVALRAGGWKGLGPAARLKGLRLAWAGFWEALRLLRSYRPLVCFGAGGYVTVPVGLAAWFLGVPLVIHEQNSRAGLSNKVLGRLASRVGLGFEEAAPAFPAGRVVFTGNPVRPEIAALRQMERNFDRRPLCVLVTGGSQGARALNLAAAPALAGLVRRGLAKVIHQTGTAGLAEVRRIYREAGAEAETAGIYQDMAGLYRRADLVVGRARAITLAELAAAGLPAVLVPLPTAADGHQAANADFFEKAGAALVLAQERLSPETLAEVLGGLLANPARLAALSRATLGLARPDADVRLAGICLELAERPRKHK

SEQ ID NO: 56867 - DNA, 879 bp, Unknown
  Obtained from environmental sample
  misc_feature (1)..(879): n is a, c, g, or t
gtgcttcctcggcctttcggccagttccaggcagatcccggccagccggacatcggcgtccggccgggccaggccgagggtggcccgggacagggcggccagcctggccgggttggccaggaggcccccaagaacctcggccaaagtctcgggcgagagcctttcttgcgccaaaaccagggccgccccggccttttcgaaaaaatcggcgttggcggcttggtggccgtcggccgcagtcggcaaaggcaccaggacggccggcagtccggccgcggccagttccgccaaggtgatggcgcgggcccggcccacgaccaggtcggcccggcggtaaagcccggccatgtcctggtagattcccgccgtctcggcctccgcgccggcctcccggtaaatgcgccgcacctcggccaggccggccgtcccggtctgatgaatgactttcgccagaccccgccggaccaggccggccaaggccggagccgccgccaggttcagggcccgggcgccctgactgccgccggtgaccaggacgcagaggggccggcggtcgaaatttctttccatttgccgaagagccgctatctccgggcggacagggttgccggtgaagacgacccggccggccgggaaggccggcgcggcttcttcgaaacccaagccgacccgggaggccaggcggcccaggaccttgttgctcaagccggcccgggaattctgctcgtggatgaccaggggcacacccagaaaccaggcggccagacccaccggcacggtcacatagccgccggccccgaaacagaccagggggcgataggaacgcaaaagcctcaaagcttcccaaaacccggcccaggccagccggaggccctttaa

SEQ ID NO: 56868 - protein, 292 aa, Unknown
  Obtained from environmental sample
  misc_feature (1)..(292): Xaa is any amino acid
MLPRPFGQFQADPGQPDIGVRPGQAEGGPGQGGQPGRVGQEAPKNLGQSLGREPFLRQNQGRPGLFEKIGVGGLVAVGRSRQRHQDGRQSGRGQFRQGDGAGPAHDQVGPAVKPGHVLVDSRRLGLRAGLPVNAPHLGQAGRPGLMNDFRQTPPDQAGQGRSRRQVQGPGALTAAGDQDAEGPAVEISFHLPKSRYLRADRVAGEDDPAGREGRRGFFETQADPGGQAAQDLVAQAGPGILLVDDQGHTQKPGGQTHRHGHIAAGPETDQGAIGTQKPQSFPKPGPGQPEAL

SEQ ID NO: 56869 - DNA, 825 bp, Unknown
  Obtained from environmental sample
  misc_feature (1)..(825): n is a, c, g, or t
atggttggggagaggatcagaaaggagccgtccgattcgtcggcttcagccaccatgagttcgccctggcccaggcgggcccccacgcccaagtggttgagccggccgccgatgaccagggtggggtccaacccggcccgggtcaggacggtgcccaccagggaggtcgtggtggtcttgccgtggctgccggccacggtcacggcgtatttcaggcgcatcagctccgccagcatttcggcccggggaatgaccgggataagatcgcgccgggccgcgacgacttcgggattgtcgccgggcacggccgaggagaccaccaccacttccgccccgcgcacgttgaagccggaatgcccgatggtgatttccgcccccatttccgccagccggcgggttatgtcgctggacttgaggtccgaaccgctgacctggtggcccaggttcaagagaacttcggccaggccgcacatgccgatgccgccgatgcccacaaagtgtatgtgccgttttcttctgaacatcatttgtgcttcctcggcctttcggccagttccaggcagatcccggccagccggacatcggcgtccggccgggccaggccgagggtggcccgggacagggcggccagcctggccgggttggccaggaggcccccaagaacctcggccaaagtctcgggcgagagcctttcttgcgccaaaaccagggccgccccggccttttcgaaaaaatcggcgttggcggcttggtggccgtcggccgcagtcggcaaaggcaccaggacggccggcagtccggccgcggccagttccgccaaggtga

SEQ ID NO: 56870 - protein, 274 aa, Unknown
  Obtained from environmental sample
  misc_feature (1)..(274): Xaa is any amino acid
MVGERIRKEPSDSSASATMSSPWPRRAPTPKWLSRPPMTRVGSNPARVRTVPTREVVVVLPWLPATVTAYFRRISSASISARGMTGIRSRRAATTSGLSPGTAEETTTTSAPRTLKPECPMVISAPISASRRVMSLDLRSEPLTWWPRFKRTSARPHMPMPPMPTKCMCRFLLNIICASSAFRPVPGRSRPAGHRRPAGPGRGWPGTGRPAWPGWPGGPQEPRPKSRARAFLAPKPGPPRPFRKNRRWRLGGRRPQSAKAPGRPAVRPRPVPPR

SEQ ID NO: 56871 - DNA, 615 bp, Unknown
  Obtained from environmental sample
  misc_feature (1)..(615): n is a, c, g, or t
ttgggggcctcctggccaacccggccaggctggccgccctgtcccgggccaccctcggcctggcccggccggacgccgatgtccggctggccgggatctgcctggaactggccgaaaggccgaggaagcacaaatgatgttcagaagaaaacggcacatacactttgtgggcatcggcggcatcggcatgtgcggcctggccgaagttctcttgaacctgggccaccaggtcagcggttcggacctcaagtccagcgacataacccgccggctggcggaaatgggggcggaaatcaccatcgggcattccggcttcaacgtgcgcggggcggaagtggtggtggtctcctcggccgtgcccggcgacaatcccgaagtcgtcgcggcccggcgcgatcttatcccggtcattccccgggccgaaatgctggcggagctgatgcgcctgaaatacgccgtgaccgtggccggcagccacggcaagaccaccacgacctccctggtgggcaccgtcctgacccgggccgggttggaccccaccctggtcatcggcggccggctcaaccacttgggcgtgggggcccgcctgggccagggcgaactcatggtggctga

SEQ ID NO: 56872 - protein, 204 aa, Unknown
  Obtained from environmental sample
  misc_feature (1)..(204): Xaa is any amino acid
MGASWPTRPGWPPCPGPPSAWPGRTPMSGWPGSAWNWPKGRGSTNDVQKKTAHTLCGHRRHRHVRPGRSSLEPGPPGQRFGPQVQRHNPPAGGNGGGNHHRAFRLQRARGGSGGGLLGRARRQSRSRRGPARSYPGHSPGRNAGGADAPEIRRDRGRQPRQDHHDLPGGHRPDPGRVGPHPGHRRPAQPLGRGGPPGPGRTHGG

SEQ ID NO: 56873 - DNA, 1272 bp, Unknown
  Obtained from environmental sample
  misc_feature (1)..(1272): n is a, c, g, or t
atggagggcgcgaagttttatttcatgattggccttccgcttgaaggttcttataccaataaagaatcttcttctacagaagaatttgaaatagccgcctttgttgaaaaaatagctagacaaaccggaatgcgctttaacgtaaatataggaacttttgttcccaaagctcatacgccttttcagtgggccaggcaaattcgcgcggaagaggcggagaaaaaactcacttacatacgaaacagattaaaggcgcaggggcacaaagtcggcattcaggatccctttatctcagtgatagaaggcattgcgagccgaggggacgaaagggcaggggccatttttgaggaagccttcagatcgggatgcaggcttgattcctggacagagtacataaataaggaaatctggataaagctctttgaaaagtataaaaaacttcttgatgtttttctggctgagaaagaaacctccgctttgcttccttggtcatctgtttgctcaggtgtgagcgaaaagttttatttgcgagaactggagaagtcccaaaacggagaacctacttgttcatgtataaaaaaatgcacaaattgcggtatttgtgaagatttcataaaatttgtagaaaattctatacaacttaaagagaactatgacgatnaagtgcaggaaaaacaggaaggctgcaaaacagaccccgatacttacaggatcatcttctcattttccaagcaggacagcgctgtttttcatccccaccttgggcttttggaaattttctcgatggcctttttaagggcaggtattcccgttatttatacgcagggatttaaccctttgccaaaactggaaatcgcttcgccgctttcgttgggcatcaaggccgtctctgagattgcggctattgaaacggacgggtatttttctgccgaacaatttaaaaagagccttaacgcattttttcctgagggtttgcaaattgtcgaagcgatgaatgtctttattccgtctggcgggaaaaagcattcgctttcgtctcttctgtgggggtatgtgtatgcaggggaagacagtgaaaaggaaattgtagaagcgaaagaagaaaagtcttaccgcgaagcaaggattggctctgcgggaagtatatacagcctggaaaggctttcgcttattgccagcttgaatggagcgaaggataaatctggaggggcttcctactttgaggtttacaggtcgctatatcctaaaaccggagaagagaggaagccatag

SEQ ID NO: 56874 - protein, 423 aa, Unknown
  Obtained from environmental sample
  misc_feature (1)..(423): Xaa is any amino acid
MEGAKFYFMIGLPLEGSYTNKESSSTEEFEIAAFVEKIARQTGMRFNVNIGTFVPKAHTPFQWARQIRAEEAEKKLTYIRNRLKAQGHKVGIQDPFISVIEGIASRGDERAGAIFEEAFRSGCRLDSWTEYINKEIWIKLFEKYKKLLDVFLAEKETSALLPWSSVCSGVSEKFYLRELEKSQNGEPTCSCIKKCTNCGICEDFIKFVENSIQLKENYDDXVQEKQEGCKTDPDTYRIIFSFSKQDSAVFHPHLGLLEIFSMAFLRAGIPVIYTQGFNPLPKLEIASPLSLGIKAVSEIAAIETDGYFSAEQFKKSLNAFFPEGLQIVEAMNVFIPSGGKKHSLSSLLWGYVYAGEDSEKEIVEAKEEKSYREARIGSAGSIYSLERLSLIASLNGAKDKSGGASYFEVYRSLYPKTGEERKP

SEQ ID NO: 56875 - DNA, 417 bp, Unknown
  Obtained from environmental sample
  misc_feature (1)..(417): n is a, c, g, or t
gtgagcatgcttctcgacacgcatgtcgtgctgtggtggctgatggatgatccgattctctccgatgagctcaaggaccggctcgaccatgaacccgacgcgtgtgtcagcgcggtgacaacctgggaagtggcgatcaagcaggccattggcaagctgtcaggtccggaggacctgcccgagcgcatcccccaatgcggcttcaccccgcttccgattatcgccgagcacacaatggtcgcggggcgactgcccttgcatcaccgtgatcccttcgaccggatgcttgccgccccagcgcagtacgagcacctgacgctgggtcaccgccaacgccaactgttgcaaataccacgtaagcatccttgccgtctgaccaggccactttatttcctccgtgggttcggggcgctctga

SEQ ID NO: 56876 - protein, 138 aa, Unknown
  Obtained from environmental sample
  DOMAIN (3)...(117): PIN domain
  misc_feature (1)..(138): Xaa is any amino acid
MSMLLDTHVVLWWLMDDPILSDELKDRLDHEPDACVSAVTTWEVAIKQAIGKLSGPEDLPERIPQCGFTPLPIIAEHTMVAGRLPLHHRDPFDRMLAAPAQYEHLTLGHRQRQLLQIPRKHPCRLTRPLYFLRGFGAL

SEQ ID NO: 56877 - DNA, 441 bp, Unknown
  Obtained from environmental sample
  misc_feature (1)..(441): n is a, c, g, or t
atgatgagatgcgcggtattcatagacggcaacaacgtgttccattcctcaaggatgcttggcctcgaagtggattacgcgaagctgctggagattttgataaacaaaggcgacatgctgattcgcgcatttttccacaccggcgtgaacgaagccctggaaaagcagaaaggcttcctgcgatggatgaagcgcaacggcttcatggtggtggagagaaaggtggagacggacagggacgggaaaaggagggccaacctggacgttgaaatcacaacggacatgctggccctcgcagacaggctggacatggtgatactcgtatcccacgatggggacttcgtctatccgctgcaggcactggcgcagcgcggcgtgcggattgtggtagcgggctttaggagcataatgaacggcgacctgatgacgctggacaagtga

SEQ ID NO: 56878 - protein, 146 aa, Unknown
  Obtained from environmental sample
  DOMAIN (1)...(142): Protein of unknown function DUF88
  misc_feature (1)..(146): Xaa is any amino acid
MMRCAVFIDGNNVFHSSRMLGLEVDYAKLLEILINKGDMLIRAFFHTGVNEALEKQKGFLRWMKRNGFMVVERKVETDRDGKRRANLDVEITTDMLALADRLDMVILVSHDGDFVYPLQALAQRGVRIVVAGFRSIMNGDLMTLDK

SEQ ID NO: 56879 - DNA, 621 bp, Unknown
  Obtained from environmental sample
  misc_feature (1)..(621): n is a, c, g, or t
atgaccattgacaataccgcttacaaggaagggttcacggaacattatgcggaaggccggccggtttgggatataggccggccgcaggcgccgtttgtggagattgcggaccaggtgaaaggcccgattctggacgtgggctgcggaacaggcagcgtggcgatttttttcgcggaaaaaggccatgccgtaacgggaatagacctcgtggacaaggccatagagcgcgcccgggaaaaagcggccggaaagaacccgaccttcctggtcaaggacgcctttaccctggttgacagcgactggcgtttccccagccttatcgacagcgggctgtttcatgttttcgccaaggatttggaacggcagcgcctctatgtcaaagccctggcccaggtcatcgagccgggcgggacgctctacctcatggcggccaaggaccagccggaaggcagcgccgctctttccggatatagctacgatgaactgtgcaatgccttttcagaagggtggaaaattgagtccataaaagaattcgtggcggaagtcaccccggaaaccgccttaaagcaccctgacgcggaatggatcacctggtttgccgtcatcaagcgcggcgaataa

SEQ ID NO: 56880 - protein, 206 aa, Unknown
  Obtained from environmental sample
  DOMAIN (7)...(201): Thiopurine S-methyltransferase (TPMT)
  misc_feature (1)..(206): Xaa is any amino acid
MTIDNTAYKEGFTEHYAEGRPVWDIGRPQAPFVEIADQVKGPILDVGCGTGSVAIFFAEKGHAVTGIDLVDKAIERAREKAAGKNPTFLVKDAFTLVDSDWRFPSLIDSGLFHVFAKDLERQRLYVKALAQVIEPGGTLYLMAAKDQPEGSAALSGYSYDELCNAFSEGWKIESIKEFVAEVTPETALKHPDAEWITWFAVIKRGE

SEQ ID NO: 56881 - DNA, 918 bp, Unknown
  Obtained from environmental sample
  misc_feature (1)..(918): n is a, c, g, or t
atggtattcggttacatcagggtaagcacaaataaacaggatgttgagagtcaaaaaattggcatagtcaaaaagtcggaagaacttggcttgccgattgacgaatggatagcggatgaaggagtcagcggaataaaagaatataataaaagaaatttgggcgttcttatggaaaaaattaaaagcggagatacattgatagtttcggaaatatcccgtcttgcccggtccgtatttatgctgtttaggatagtagaacattgcatccaaacaaataactgcacgatttacgccgtaaaagaaaatcaagtattcaaaaaaagcgacgttatttctgcaattactctctctatttttggagccgcagcgcaaattgaaagagaaatgattattaaaagaactacagaaggacttgaaaggcgtaaaagagaaggtgttatttttggcaagcctgtagggtttaaaaaagttacattaaagttagccgcatcgcataaaaaattacttgaatatataaaacggggggtcagcaaacaaaaaattgcaagtttattaaaatgctcaaaaactactttgagttattatttatatcgcaataaaataaattatgaagggcaaagaaaaaacaaaacttattacaattatcataatatagaatgtcataagatttcaaagaagcgacaaaaatgtttaaacaaaaataaggcatatatcttaaagctgattaaaaacgaaagaatagtatcaccaaagaaaattttagaaaagttgaaagataggaaattagacataagccctagctcgctccgcttatggttttataagaatcctaatttacattctttattagtaaaggaaaatactaaagaacggagaatacgtaatatcaaactcgctccggctggtctaggttactaa

SEQ ID NO: 56882 - protein, 305 aa, Unknown
  Obtained from environmental sample
  DOMAIN (2)...(147): Resolvase, N terminal domain
  misc_feature (1)..(305): Xaa is any amino acid
MVFGYIRVSTNKQDVESQKIGIVKKSEELGLPIDEWIADEGVSGIKEYNKRNLGVLMEKIKSGDTLIVSEISRLARSVFMLFRIVEHCIQTNNCTIYAVKENQVFKKSDVISAITLSIFGAAAQIEREMIIKRTTEGLERRKREGVIFGKPVGFKKVTLKLAASHKKLLEYIKRGVSKQKIASLLKCSKTTLSYYLYRNKINYEGQRKNKTYYNYHNIECHKISKKRQKCLNKNKAYILKLIKNERIVSPKKILEKLKDRKLDISPSSLRLWFYKNPNLHSLLVKENTKERRIRNIKLAPAGLGY

SEQ ID NO: 56883 - DNA, 735 bp, Unknown
  Obtained from environmental sample
  misc_feature (1)..(735): n is a, c, g, or t
atggagcgccgcccgccaaccattcttgtagcgcattacgaccgcaccgaaggcagccccggtgcgaacgacaacagcaccggggtttttcttcttattgaaaccgcaatgaaactaataaagaaaaacaggagtaactggcaggtaatctttacagacagggaagagttaaaatcaggcggaaaacttcagtcccagggggcttatggccttgccgagcactttaaaaacttaaaaatggaaaagtcaaagatattcagttttgatgcgtgcggtaccggagataccctgatcatctccaccacgcttgaacttttattaaaaaaagatggaaccggggaaaagctaagggattccatactggagcttcgcaaatacgcccttgacaccgccagaaacctcaacatggctaaagtactccttgcccccacgcctttttcagacgacgcgggctttatccgcgccgggttaatcgcccagaccgttaccatgctcccgtccagcgagtgcatccggctggttgccgaactccgtaaaaagccggaattcgccgaggcgcttatcaacgccagcatcaggcagacgagccgtttacaatccatcccggagacctggcgcggccttaacactcccaccgacagccacctgcgcctgacgccggaacacttccgcactgtgtcaaagttcgcggaagctttgtgcaaccgggtaagggaaactataaagtactgttaa

SEQ ID NO: 56884 - protein, 244 aa, Unknown
  Obtained from environmental sample
  DOMAIN (5)...(188): Peptidase family M28
  misc_feature (1)..(244): Xaa is any amino acid
MERRPPTILVAHYDRTEGSPGANDNSTGVFLLIETAMKLIKKNRSNWQVIFTDREELKSGGKLQSQGAYGLAEHFKNLKMEKSKIFSFDACGTGDTLIISTTLELLLKKDGTGEKLRDSILELRKYALDTARNLNMAKVLLAPTPFSDDAGFIRAGLIAQTVTMLPSSECIRLVAELRKKPEFAEALINASIRQTSRLQSIPETWRGLNTPTDSHLRLTPEHFRTVSKFAEALCNRVRETIKYC

SEQ ID NO: 56885 - DNA, 495 bp, Unknown
  Obtained from environmental sample
  misc_feature (1)..(495): n is a, c, g, or t
atgaaacattatcttgccatagacatcggcgcatcttccggtcggcatatcgtaggcatatgcgatggtacggaaattcgcacggacgaagtataccgttttgccaacggcatggaggaaaacggcggacacctcacgtggaacattgagcgtatttttacagaagtcaaagcaggtattcacgcggctttagcgatgtatgtgagtatcgaaagcctgtccattgatacctggggcgtagattatgtcctgatgcgcggcgataccgaggtttttccgtgttatgcttaccgtgacaacagaacggaatccgctatctctgccgttcacggacaaataccgtttgttgaactctactcacttaccggaatccagttccagccattcaataccatttatcagttatatgctgataaattatccgacagattggacggcgtaacggatttcctgatgatgcccgagtatcttgatgtacaaactttcccggagtaa

SEQ ID NO: 56886 - protein, 164 aa, Unknown
  Obtained from environmental sample
  misc_feature (1)..(164): Xaa is any amino acid
MKHYLAIDIGASSGRHIVGICDGTEIRTDEVYRFANGMEENGGHLTWNIERIFTEVKAGIHAALAMYVSIESLSIDTWGVDYVLMRGDTEVFPCYAYRDNRTESAISAVHGQIPFVELYSLTGIQFQPFNTIYQLYADKLSDRLDGVTDFLMMPEYLDVQTFPE

SEQ ID NO: 56887 - DNA, 417 bp, Unknown
  Obtained from environmental sample
  misc_feature (1)..(417): n is a, c, g, or t
ttgtcggctgtaatttcaaagggaattttttgtagccgaacagatgtttttgcgaaaacattgaaagctgcagtcatggttaatcctacattggcgcaaatagaaaaactaaaagaagcccaaagcggcattggaaagatgcccttttacggatgggcccctaagatggtttctggagcgcctaaggcttgggccagcctcgccgggcgttttgggaagctcccccttgaaaaatcaatggaaggggcaattcattacgctcgggaaggttatcctatagccgccaccaaagcggccgctttttatcaggcggctgaacgctacaaaacggctggaagagattttgatcaaaaagtttttgatgaatggttcaaaactttcatgcccaatggggaggtcccaagacaggggacatga

SEQ ID NO: 56888 - protein, 138 aa, Unknown
  Obtained from environmental sample
  misc_feature (1)..(138): Xaa is any amino acid
MSAVISKGIFCSRTDVFAKTLKAAVMVNPTLAQIEKLKEAQSGIGKMPFYGWAPKMVSGAPKAWASLAGRFGKLPLEKSMEGAIHYAREGYPIAATKAAAFYQAAERYKTAGRDFDQKVFDEWFKTFMPNGEVPRQGT

SEQ ID NO: 56889 - DNA, 882 bp, Unknown
  Obtained from environmental sample
  misc_feature (1)..(882): n is a, c, g, or t
atgactttgctaaacgtttgggttccgggctgggctatccagtttgaagcccaacgttttatgctccaggattacccacgatcactttataaagacggaaaatcaacatttgattctcttgcacctttcctcatcgaccgtgaacgcgatttttctttcaattctgaaggaagccatttcgattccagttattaccttacctttatctggcgtcctccttcggaaggcgttaaaaaacttgctaacatgttcattaatagcggcggccagggtgaagacggcatgaatgttaaacaaaacgtcgaatttttcgtgaacgaatctgattcagtcgcgagcctcctctccaacaaccttattctcgtaccgcttaataatgatttaaccgtcgccttccttcattccacaatttccttcaaacgccatgaaattaattatccccatacacaaattttccttgaccgcattcttcccgactgcgaacttcacaacgatataccgatgaaacttggggacatgttcattcccatcgtcggcgttaacgatttccctgaggaaacttatcccgccatccttgacggactaaaccgtgcacgtctcgaataccgttgggttacgcgctacatctgcctagacaaggaagaaggcgtcaaagaagccaggaaaaaagaaaaattccacagggggagcagaacgacccttcttcaaactttcgcggaacagacttccggcgaagccgcaaaagcggtaaaccacggcgccagcgtcaaagaaagcgattccatacaggcgaacgtcgagattgaaaatgatgtcgccgccctcggttacctcaccacctgcgtaataatatgggacgcgtccctaaaaaagcgaaaataa

SEQ ID NO: 56890 - protein, 293 aa, Unknown
  Obtained from environmental sample
  misc_feature (1)..(293): Xaa is any amino acid
MTLLNVWVPGWAIQFEAQRFMLQDYPRSLYKDGKSTFDSLAPFLIDRERDFSFNSEGSHFDSSYYLTFIWRPPSEGVKKLANMFINSGGQGEDGMNVKQNVEFFVNESDSVASLLSNNLILVPLNNDLTVAFLHSTISFKRHEINYPHTQIFLDRILPDCELHNDIPMKLGDMFIPIVGVNDFPEETYPAILDGLNRARLEYRWVTRYICLDKEEGVKEARKKEKFHRGSRTTLLQTFAEQTSGEAAKAVNHGASVKESDSIQANVEIENDVAALGYLTTCVIIWDASLKKRK

SEQ ID NO: 56891 - DNA, 717 bp, Unknown
  Obtained from environmental sample
  misc_feature (1)..(717): n is a, c, g, or t
gtggacgacgtcggtctgggagtgctttacggcctctactactggaagtacgacaccactgcactgctcatgcacgccgagcatctggaggccgcgaggggcgtaggcccccacaccatatccgtgccgcgcctgcggaccgcggccggtatggcaccgggggacttcccctacttggtgtccgacgcgcacttcaagcagttagtcgccatactgcgcctggccgtaccctacacagggatgatactttccacccgcgagccttccgacttccgcagggaagtgatagccgtgggaatatcgcaagttagcgccggctcctgcaccggcgtgggcggctacgccggctcggctaaactggaaaaagaatcggagtgcgcggcaggatgcgcggcactgcgccagttcgagccggaggaccgccgctcccccacggaagtcctgaagacactgctgaaggacggctacctgccgagctactgtacagcttgctaccgcgaagggcgcaccggcgaccgcttcatgcagttggcgaagtccggccagattgccaacgtctgccaggccaacgccatcctgaccctgcaggaatacctgattgactacggcgacgccgaattgaaggagctgggcgagcaggtcataccgcgcgaattggaaaccatgcccaacaaaaaaggccagagaaaaagccgtccaaatgcttgcgcaaattaa

SEQ ID NO: 56892 - protein, 238 aa, Unknown
  Obtained from environmental sample
  DOMAIN (39)...(158): Biotin and Thiamin Synthesis associated domain
  misc_feature (1)..(238): Xaa is any amino acid
MDDVGLGVLYGLYYWKYDTTALLMHAEHLEAARGVGPHTISVPRLRTAAGMAPGDFPYLVSDAHFKQLVAILRLAVPYTGMILSTREPSDFRREVIAVGISQVSAGSCTGVGGYAGSAKLEKESECAAGCAALRQFEPEDRRSPTEVLKTLLKDGYLPSYCTACYREGRTGDRFMQLAKSGQIANVCQANAILTLQEYLIDYGDAELKELGEQVIPRELETMPNKKGQRKSRPNACAN

SEQ ID NO: 56893 - DNA, 1371 bp, Unknown
  Obtained from environmental sample
  misc_feature (1)..(1371): n is a, c, g, or t
gtggcagnntgggccacgctcggccttaacgcaacggaaaagcaggcggacgtggtgcgcctgctgatgaacgacgcatccctgttcgtgggcgtccgcaacgcggtgatggccccaataagggatgtaggtctggtaatagtggacgaagagcaggaaggctcgtacaaatcggaagagcacccaaggatcaacgccagggacctggccgtcaagcgcgcccagttggaaggctgccccgtcctgctggggagcgccacgcccagcctggagagctggcaggcggcaaaacttgggcgctacaaactgctgaggctcacgcagagaccgctgggggcgaacctgccggaggtccaggtggttgacctgagggagtgctaccgcgccgagagaaggaaggtactgttttcaccaccgctgataaaggcaatgggggaggcgctggataggggcgaacagtcaatgctgctgctaaacaggcgcggcttcgagaacttctggatctgcatggcctgcggcaaaacgctgggctgcaagaactgcgacgtgagcctcacctaccacaagggcgcgtggcggctgcgctgccacttgtgcggctatgaaaatgtcccgcccgagatctgcccccactgcggcgcgaagcatctgaggggcgtgggagacggaacggagcgcgtcgaggacatgttgcaggaatgtttccccaaggccaagatactccgactggacagggacaccacgtccaggcgcggtactctggaggcgggcctgctggccgcagagcaaggcgaggtggatattctggtgggcacacaaatgctggcgaagggccacactttcccaaaactgacgctggtgggcatcctgaacgctgaccttggtttaaggattcctgacttccgcagcggcgagaggacattccacctgctgacgcaagtcgccgggcgggcaggacgcgcggagcgccccggccgcgtgatactacagacctatagccccgaccatccggccatagtccacgcggttgcgcaggactttgagggcttcgccgacagcgagctgccctaccgccgcgcccttggctatcccccctttacatccatggcgctcctgaggtcggacggcgacaacaccgacgcagcgcgaaaacccctagacgacctgcgaagactcttcatggcctgccccggcctgaagatactgggcccactggaaacccaagtaccccgcgtcaaaaaccgctactggcaacagttgctgctgaaagccgaaaaccgccaggacctaagccgcgctctgcaaacagtgcatatagacaggtcgggcagcgtccaggtggacagagacccggtgaactttggggtgtag

SEQ ID NO: 56894 - protein, 456 aa, Unknown
  Obtained from environmental sample
  DOMAIN (232)...(322): Helicase conserved C-terminal domain
  misc_feature (1)..(456): Xaa is any amino acid
MAXWATLGLNATEKQADVVRLLMNDASLFVGVRNAVMAPIRDVGLVIVDEEQEGSYKSEEHPRINARDLAVKRAQLEGCPVLLGSATPSLESWQAAKLGRYKLLRLTQRPLGANLPEVQVVDLRECYRAERRKVLFSPPLIKAMGEALDRGEQSMLLLNRRGFENFWICMACGKTLGCKNCDVSLTYHKGAWRLRCHLCGYENVPPEICPHCGAKHLRGVGDGTERVEDMLQECFPKAKILRLDRDTTSRRGTLEAGLLAAEQGEVDILVGTQMLAKGHTFPKLTLVGILNADLGLRIPDFRSGERTFHLLTQVAGRAGRAERPGRVILQTYSPDHPAIVHAVAQDFEGFADSELPYRRALGYPPFTSMALLRSDGDNTDAARKPLDDLRRLFMACPGLKILGPLETQVPRVKNRYWQQLLLKAENRQDLSRALQTVHIDRSGSVQVDRDPVNFGV

SEQ ID NO: 56895 - DNA, 735 bp, Unknown
  Obtained from environmental sample
  misc_feature (1)..(735): n is a, c, g, or t
gtgcatgccttctcgtatttagggggagtgccccgggtagcggtacctgacaactgccggacggcggtgagccggagcaactattacgaccccgcgataaaccgggcttatgaggatatggcggcctattacaacattgcggtcatcccggcgcgggtgcggcggccgcgggataaaaatttggtggaaggcagcatcggctggcttgagacgtggcttgtggaatggctgcgcgatcaggggccgtttgacagctttagggaattgaaccgcgcggtcagggagcgcatggcggaactggtgcaacggccgtttcataaaagggcgggaagccgcgagtcggtgttcagggaaatcgacaaaccggcgctgcgccccctgcctccggccccctatgagcttgccgagtatcagagccgccgagttccggataactaccaccttgagtatgacgccttttattactcagtcccctatgagtattacaaacaggatgtgaccatgcggattaccacgtccatgattgaggtatatgacgggcataacaaacgtattgcgctgcgtcagaggcggtataccggcccgagatatgccacctgtaccgaacatatgccgccccatcatcagtttaaggcgatggcggaccgttttgacggggagaggtaccgcgagctgggcccgttccataggggaacatacctactctgtcatcgacagcttgggggccaatgctag

SEQ ID NO: 56896 - protein, 244 aa, Unknown
  Obtained from environmental sample
  misc_feature (1)..(244): Xaa is any amino acid
MHAFSYLGGVPRVAVPDNCRTAVSRSNYYDPAINRAYEDMAAYYNIAVIPARVRRPRDKNLVEGSIGWLETWLVEWLRDQGPFDSFRELNRAVRERMAELVQRPFHKRAGSRESVFREIDKPALRPLPPAPYELAEYQSRRVPDNYHLEYDAFYYSVPYEYYKQDVTMRITTSMIEVYDGHNKRIALRQRRYTGPRYATCTEHMPPHHQFKAMADRFDGERYRELGPFHRGTYLLCHRQLGGQC

SEQ ID NO: 56897 - DNA, 651 bp, Unknown
  Obtained from environmental sample
  misc_feature (1)..(651): n is a, c, g, or t
ttgattatgcgaaaatccattcgtgcttttacagatgaagttgtccctgccgatctcgtgcagtctgtggtgcttgaggcgggtcgcgcgcccagcagcaagaatacacagccttggaaacttattttggttaaagggcaggctttggaaaatttgcgggtggattatatggcagcctttaacagcggaagagctccggcttttgagtataagtacagcttagatcctttgccagaagtttacaaaaaaagagccatcgatttgggaaaggcttttttaacccataaaggcataggtagggaagacaaagaaaagcgcaaggaacacgacgcggaaaattatcgcttttttggtgcaaaacaggttttctttttggcggtgaacaaaggagaatatgggcaaggtacctttttggattgcggactttttttccaagcccttataacagaattgtacaataataatttgggctgttgccctcaatatagtgctatggcttatccagacttgctgcacaagcacattccaaattccgagaacttgctatttttgctcgctttgccatttggctatgcaaaagcagacagcttggtgaactcttttgaaagcaaaagagaacctttggatgttttttttaaagttgtggagtag

SEQ ID NO: 56898 - protein, 216 aa, Unknown
  Obtained from environmental sample
  DOMAIN (1)...(191): Nitroreductase family
  misc_feature (1)..(216): Xaa is any amino acid
MIMRKSIRAFTDEVVPADLVQSVVLEAGRAPSSKNTQPWKLILVKGQALENLRVDYMAAFNSGRAPAFEYKYSLDPLPEVYKKRAIDLGKAFLTHKGIGREDKEKRKEHDAENYRFFGAKQVFFLAVNKGEYGQGTFLDCGLFFQALITELYNNNLGCCPQYSAMAYPDLLHKHIPNSENLLFLLALPFGYAKADSLVNSFESKREPLDVFFKVVE

SEQ ID NO: 56899 - DNA, 450 bp, Unknown
  Obtained from environmental sample
  misc_feature (1)..(450): n is a, c, g, or t
atgtcttttgaaaagaaaatcttgtgcataggggcaggatatgtgggcgggcctactatggctatgatagccaaaaagtgcccgcaatatcaagtgaaaatagtggatataaacgcagcacgcatagatgcttggaatagcgataatttgcctgtttatgaacctgggttaaaagaaattgtggaaagcacgaggggcaaaaatctgttttttggaacggatatagatgagagcataaaagaagcagatataatttttgtgagcgttaatacccctaccaaaaacttttggaatttggagctggcaaagccagcgattttgcaataccttgaaaaaacagccagaaacattctagctgcaagcaatagcgaaaaaattgttgttgaaaaagcacacttccggtggcgcaccgcagaattcatggaacgaattttgaaacggcgccgataa

SEQ ID NO: 56900 - protein, 149 aa, Unknown
  Obtained from environmental sample
  SIGNAL (1)...(21)
  DOMAIN (5)...(149): UDP-glucose/GDP-mannose dehydrogenase family, NAD binding domain
  misc_feature (1)..(149): Xaa is any amino acid
MSFEKKILCIGAGYVGGPTMAMIAKKCPQYQVKIVDINAARIDAWNSDNLPVYEPGLKEIVESTRGKNLFFGTDIDESIKEADIIFVSVNTPTKNFWNLELAKPAILQYLEKTARNILAASNSEKIVVEKAHFRWRTAEFMERILKRRR

SEQ ID NO: 56901 - DNA, 606 bp, Unknown
  Obtained from environmental sample
  misc_feature (1)..(606): n is a, c, g, or t
atgaaagaatataacataatcgacacgtatcacaagtcgctattcatattaacaagcgctataatcttcctatccgtcggctgcgcccccaaaaaggacccgctcccggtcggcgaaaaggtcatcaccgctccccaccaagaattaaccaaagcctccatctacttctatcaaggcaacataaagcgttggtggttagacgccgactacatgagccggccgctctccgattccggcgacattaccgtagccccggtacgcattacggtctacgactcgctcggcaaaccctctacccacatcgtctccgattccggctcaagcgattccaagatggcggtcttcgacctctggggttccgtgaacataaagaacgaagagggaatgctcgtgaccggtgaacatctccggtggtacaaggacgcccggcgcatcacctccgacaccttcgtccaagtggaaaccaagaagggcgacattttacgagggaaaggtctggaagcgcgagacgacttctcgcgcttctctttcaacgcggaggtgcaggggctcttccccgacttcaaacgcagaatggaagagggcgatgaagacttcctccgataa

SEQ ID NO: 56902 - protein, 201 aa, Unknown
  Obtained from environmental sample
  misc_feature (1)..(201): Xaa is any amino acid
MKEYNIIDTYHKSLFILTSAIIFLSVGCAPKKDPLPVGEKVITAPHQELTKASIYFYQGNIKRWWLDADYMSRPLSDSGDITVAPVRITVYDSLGKPSTHIVSDSGSSDSKMAVFDLWGSVNIKNEEGMLVTGEHLRWYKDARRITSDTFVQVETKKGDILRGKGLEARDDFSRFSFNAEVQGLFPDFKRRMEEGDEDFLR

SEQ ID NO: 56903 - DNA, 510 bp, Unknown
  Obtained from environmental sample
  misc_feature (1)..(510): n is a, c, g, or t
atgctattgcacctattcgcccgccgcggcntaaactgcttcgccatcgggcgggcgttcaaaaacccggacgtagacgagaccgtgcgaatgatgagaagcggccccggcatagagtatatagacagatcggaaagcacccgcaaaatcgtgcggctgctgcaacacggaaaagtcatgggagtattaatcgaccaagacacccacgtagagggcgtattcgccgacttcctgggacaccccgccttcacgccgagcagcgccgtccgcttcgctatgaaactcggaatcccaatgttcgtatcggtcacggcaagactgtcgggagataaacaccacgtctatgtcagcaaagaaataatacccgtggataccggagaccccaaagtggacttggtaaccaacatacaaaagattaacgacattatcagcgaatacatccgcaaacatcccgaacaatgggtctggatgcacgagaggtggaagactaaacccacacagagcgattga

SEQ ID NO: 56904 - protein, 169 aa, Unknown
  Obtained from environmental sample
  misc_feature (1)..(169): Xaa is any amino acid
MLLHLFARRGXNCFAIGRAFKNPDVDETVRMMRSGPGIEYIDRSESTRKIVRLLQHGKVMGVLIDQDTHVEGVFADFLGHPAFTPSSAVRFAMKLGIPMFVSVTARLSGDKHHVYVSKEIIPVDTGDPKVDLVTNIQKINDIISEYIRKHPEQWVWMHERWKTKPTQSD

SEQ ID NO: 56905 - DNA, 744 bp, Unknown
  Obtained from environmental sample
  misc_feature (1)..(744): n is a, c, g, or t
atgcgcccgcttagaaaatttattcctagaagcatccggcaccgcatcttagggtggatggcgaaggccggctttgccatcggacgggcgctgccccgcccgataggtttggcgctcttttcattttttgggtgggcatgttactacatattgggcacggataggcggttgacagtccacaatctgaattttgtcttcggaaacgagtggagcaagaagaagatccacgccgtcgcgcgagcggtgtttatatcgcaagggaaaaatctcttcgacgcggtttatttgggagccaccaaagacaacgtctttgacgatatagtttctcacgacagcctctacggggtagccgaagcctgcggacgcggcaaaaggcatagtcgccatcaccgcgcacttaggctgcttcgaaatgctattgcacctattcgcccgccgcggcntaaactgcttcgccatcgggcgggcgttcaaaaacccggacgtagacgagaccgtgcgaatgatgagaagcggccccggcatagagtatatagacagatcggaaagcacccgcaaaatcgtgcggctgctgcaacacggaaaagtcatgggagtattaatcgaccaagacacccacgtagagggcgtattcgccgacttcctgggacaccccgccttcacgccgagcagcgccgtccgcttcgctatgaaactcggaatcccaatgttcgtatcggtcacggcaagactgtcgggagataa

SEQ ID NO: 56906 - protein, 247 aa, Unknown
  Obtained from environmental sample
  misc_feature (1)..(247): Xaa is any amino acid
MRPLRKFIPRSIRHRILGWMAKAGFAIGRALPRPIGLALFSFFGWACYYILGTDRRLTVHNLNFVFGNEWSKKKIHAVARAVFISQGKNLFDAVYLGATKDNVFDDIVSHDSLYGVAEACGRGKRHSRHHRALRLLRNAIAPIRPPRXKLLRHRAGVQKPGRRRDRANDEKRPRHRVYRQIGKHPQNRAAAATRKSHGSINRPRHPRRGRIRRLPGTPRLHAEQRRPLRYETRNPNVRIGHGKTVGR

SEQ ID NO: 56907 - DNA, 393 bp, Unknown
  Obtained from environmental sample
  misc_feature (1)..(393): n is a, c, g, or t
atgggaacggcgctgacctacggcgacatagaggtccgccgcgccaaacgcgaggggctggaggtggagacggagggcgagcttaccgtcgctctcgaagtcaccatcacgccggagctaaagagggagtgcgttgcgcgcgagttcgtcaaccgcgtgcagaataggcgcaaagagataggcctgaacgtcgccgaccggatcgtcattcgatactcgtcccccaaagaaatcgaaaacgcgctcgccgatttccgcggttacgtatgcgccgaaacgctggccgtcaatatcgaaagcgccccagcggcagcgatcaacaacgccgagagcgttgaggtcgaggggatgaatgtaactctcggcgtcgaaaaaacggacataggaggttaa

SEQ ID NO: 56908 - protein, 130 aa, Unknown
  Obtained from environmental sample
  misc_feature (1)..(130): Xaa is any amino acid
MGTALTYGDIEVRRAKREGLEVETEGELTVALEVTITPELKRECVAREFVNRVQNRRKEIGLNVADRIVIRYSSPKEIENALADFRGYVCAETLAVNIESAPAAAINNAESVEVEGMNVTLGVEKTDIGG

SEQ ID NO: 56909 - DNA, 300 bp, Unknown
  Obtained from environmental sample
  misc_feature (1)..(300): n is a, c, g, or t
atgactgtatcgctgtatatccatattcctttttgttcgcaaaaatgtgattactgcgatttttattccgtcccggttacgcctaattcaagcgcgcagcttctgatggattcgtatattgaggccgtatcaggcgacattgcggatcagatcaatttattcaatgtcgataacataccaaccgtctatatgggcggcggaacgccttccgcgcttggcgcggagcgcatagcgcgtttactgtcctcaattaatgcgctgccacaaaaatgggcgcggcccctgttgaattcaccgtag

SEQ ID NO: 56910 - protein, 99 aa, Unknown
  Obtained from environmental sample
  misc_feature (1)..(99): Xaa is any amino acid
MTVSLYIHIPFCSQKCDYCDFYSVPVTPNSSAQLLMDSYIEAVSGDIADQINLFNVDNIPTVYMGGGTPSALGAERIARLLSSINALPQKWARPLLNSP

SEQ ID NO: 56911 - DNA, 735 bp, Unknown
  Obtained from environmental sample
  misc_feature (1)..(735): n is a, c, g, or t
atgtcaatgtttgacaaggcgttaaagtattcttacgccgaacaaaaaagagaacgccacaaactgctacgtgtcatcatgacattcctgttcctgttcctgctgtttaccgtaataaacattttcattgtttcggtttgggtactgaataatgacacaatggaacccgggatgcgcgcgggtgaccgccttattgtttattcgtctttcctgccttttattatttcaagaattgacaagaccggcgggtcgccgcctttcaaacgcggatccatagtattgattgacacaaggcgcggcgataaccggaattggcccgtaaaaacggccgacagttttgttcggtttgtcacggcgcagcaaaaacaaattctaaactcggacgagcatctgtatataaagcggatcatcgcgattcccggcgacgagatcagcatgaacaattttgttttcagggtaaagccggcgggcaatatgtatgtctttaccgaatttgagctttccgaacgaccctattacccgaacataccccaggtgccccctctttgggatgagacccttccgttctcagggtacatggacagtataacgctcggccccggcgagtatttcgtcgtttccgacgacagaggcaattcgggcgattcacgcacatgggggccggttaactttaaaaagctgttgggaaggcccatattccggttctggcccatccagagaatcggacggccttaa

SEQ ID NO: 56912 - protein, 244 aa, Unknown
  Obtained from environmental sample
  misc_feature (1)..(244): Xaa is any amino acid
MSMFDKALKYSYAEQKRERHKLLRVIMTFLFLFLLFTVINIFIVSVWVLNNDTMEPGMRAGDRLIVYSSFLPFIISRIDKTGGSPPFKRGSIVLIDTRRGDNRNWPVKTADSFVRFVTAQQKQILNSDEHLYIKRIIAIPGDEISMNNFVFRVKPAGNMYVFTEFELSERPYYPNIPQVPPLWDETLPFSGYMDSITLGPGEYFVVSDDRGNSGDSRTWGPVNFKKLLGRPIFRFWPIQRIGRP

SEQ ID NO: 56913 - DNA, 390 bp, Unknown
  Obtained from environmental sample
  misc_feature (1)..(390): n is a, c, g, or t
gtggcttgcccggngcggccccctggcaaaaaagtaatatggtatgagtaccatccgacgcgggccgcgtataacgcgaaagcgtttctggaagggtattcaggatatctgcaaactgacaggtatgacgcctatgacagcgcggtgaaagacatgcccggtattatccacgttgggtgcatggcccacgtcaggcgtcatttctttgaagccgagaagataggcgggcagggaaaaacggccggggaagctttggaatacatacggaaactgtaccgcattgagagggaattgcgggaagagaaaaacaattgcaagcaaaccgatgaagaatttttgataaaacggaaaaaacaggctgaaccggtactgaatgatttcaagacataa

SEQ ID NO: 56914 - protein, 129 aa, Unknown
  Obtained from environmental sample
  misc_feature (1)..(129): Xaa is any amino acid
MACPXRPPGKKVIWYEYHPTRAAYNAKAFLEGYSGYLQTDRYDAYDSAVKDMPGIIHVGCMAHVRRHFFEAEKIGGQGKTAGEALEYIRKLYRIERELREEKNNCKQTDEEFLIKRKKQAEPVLNDFKT

SEQ ID NO: 56915 - DNA, 435 bp, Unknown
  Obtained from environmental sample
  misc_feature (1)..(435): n is a, c, g, or t
atgcggatttttgttgaccgcatagtccggccaaaatacgcctgccgccggtgcgaaggggccgaagatgaaaacaagccgaccgtccgcatagcgccggcggaaccggcaatgattcctaaaagcatagcaagcccgagccttttgggcgccgtcttcacgcagaagtttgagatgtacatgccgtattacaggcaggagaaacaatttgaacaaataggggtggaaataagccgtcaggatatgagcaactggcagcagcaggcgtttgaagggctggaaccgttattcgccatactcaaaaagacagtaaaagacgaccccgtggtgcagatggatgagacggaggtacaagtaataggggaagaaaaccggagcgacattcagaaaagccgcatgtggcttgcccggngcggccccctggcaaaaaagtaa

SEQ ID NO: 56916 - protein, 144 aa, Unknown
  Obtained from environmental sample
  DOMAIN (1)...(141): Transposase IS66 family
  misc_feature (1)..(144): Xaa is any amino acid
MRIFVDRIVRPKYACRRCEGAEDENKPTVRIAPAEPAMIPKSIASPSLLGAVFTQKFEMYMPYYRQEKQFEQIGVEISRQDMSNWQQQAFEGLEPLFAILKKTVKDDPVVQMDETEVQVIGEENRSDIQKSRMWLARXGPLAKK

SEQ ID NO: 56917 - DNA, 348 bp, Unknown
  Obtained from environmental sample
  misc_feature (1)..(348): n is a, c, g, or t
atgactcttgattttaccaaagtacgtatatttatccgccccggtcacacggacttgcggaaggcggtaaacgggctgtctgtaatgatagagcaagaaatggccggggagccgttcagcgggaacgtgtacctgttttgcaaccgtgggcgcaggctgcttaaggcggtgtggtgggacaggaacgggttctggctggcgcaaaagaggctggaaaaggacaggttcccgtggccggaaacggaagaggaagcgagggagataagcgcggaagaactgtcaatgttgctggcggggatagattttttcaaggcgcacaaaacgctgtattacaaaaatgtttcgtaa

SEQ ID NO: 56918 - protein, 115 aa, Unknown
  Obtained from environmental sample
  DOMAIN (6)...(114): IS66 Orf2 like protein
  misc_feature (1)..(115): Xaa is any amino acid
MTLDFTKVRIFIRPGHTDLRKAVNGLSVMIEQEMAGEPFSGNVYLFCNRGRRLLKAVWWDRNGFWLAQKRLEKDRFPWPETEEEAREISAEELSMLLAGIDFFKAHKTLYYKNVS

SEQ ID NO: 56919 - DNA, 732 bp, Unknown
  Obtained from environmental sample
  misc_feature (1)..(732): n is a, c, g, or t
atggatattcacaatacgaacgaagatttggtatttgattctgtacagaccattttcgatgaaatcaaagaaagcggcaatccggaaaattactgtctgtgttatcagtgcagaatagatactgtttgttatactctcaaccgcatcgaaccgaattacatagtgtcaaaccgcggattttcgcgaatagatcatacgggcataaagagacagcaaatcgaagcggatataaacgcgctcattttcaaaggcttgcgttttgttcagcacaatctgcgtcccaccgcgaatcatgacggagaagtctcaaatccgcataaaatcgtccacccattatttgacatcccgactatcgcgggacgcatttttaacggcatcagttttgagcctattgtcggcgttgacatatcgttgtactacgagggcgaacctgtcaaaatgagaaacaacaactggcaaaacccgttcaagatggttccaagtacgccgggcgcgtttagtttctggcctgcgcccattgaagcggaagttccggatttaacaaaagaattcaaatttactttaaaagtacattccgatgattttgagccgttaaaccatttttttaccataacatcgacaagtaaatttcataatccgcaatcctacgctttaaatcgcacatttaaattgccggatttataccttttcccgccgggtgaggcggaatttaatgaagatcaaaagtcttga

SEQ ID NO: 56920 - protein, 243 aa, Unknown
  Obtained from environmental sample
  misc_feature (1)..(243): Xaa is any amino acid
MDIHNTNEDLVFDSVQTIFDEIKESGNPENYCLCYQCRIDTVCYTLNRIEPNYIVSNRGFSRIDHTGIKRQQIEADINALIFKGLRFVQHNLRPTANHDGEVSNPHKIVHPLFDIPTIAGRIFNGISFEPIVGVDISLYYEGEPVKMRNNNWQNPFKMVPSTPGAFSFWPAPIEAEVPDLTKEFKFTLKVHSDDFEPLNHFFTITSTSKFHNPQSYALNRTFKLPDLYLFPPGEAEFNEDQKS

SEQ ID NO: 56921 - DNA, 702 bp, Unknown
  Obtained from environmental sample
  misc_feature (1)..(702): n is a, c, g, or t
atgggacaaaaggttaatccaataggattgagggttgggatcaacagaacctggctttccaggtggtatgtggatcccaaagagtatgcgaatacccttcacgaagatcttaagctgcgcaagctcataatgggtatgcccgaaacaaagggagccgacattgcggatctggaaattatcaggcacccccagaggattacaattaccatacacacagcgcgcccgggggtaattatcggggtcaaaggcgcaaatatcgagaaaattggttcggaactccagaaatatgtcactaaaaaggttcagattaagataaaggaagtcaggaacgccgataacaacgcgcagattatagcccagaatgttgccagacagcttttggcgcgttcaagtttcaggcgggccatgaagcaggccattaccaacgcaataaaaaaaggtaacgcccagggagttaaaatccgtctttcaggcaggctgggtggagccgagatgtcacgtacggaagaagccaaagagggccgcattcccctgcataccctccgtgcggacatagattttggttttgccgaagcccacacaacctttggctccatcggggtaaaggtgtgggtgtacaacggcatgaaatacggtaaggaacaaaaggaagatgcgggcgcattgctccgcaaacggcggggaacggccatcttcccatag

SEQ ID NO: 56922 - protein, 233 aa, Unknown
  Obtained from environmental sample
  DOMAIN (65)...(119): KH domain
  misc_feature (1)..(233): Xaa is any amino acid
MGQKVNPIGLRVGINRTWLSRWYVDPKEYANTLHEDLKLRKLIMGMPETKGADIADLEIIRHPQRITITIHTARPGVIIGVKGANIEKIGSELQKYVTKKVQIKIKEVRNADNNAQIIAQNVARQLLARSSFRRAMKQAITNAIKKGNAQGVKIRLSGRLGGAEMSRTEEAKEGRIPLHTLRADIDFGFAEAHTTFGSIGVKVWVYNGMKYGKEQKEDAGALLRKRRGTAIFP

SEQ ID NO: 56923 - DNA, 1416 bp, Unknown
  Obtained from environmental sample
  misc_feature (1)..(1416): n is a, c, g, or t
ttgcgtgcctgcacgtcgactctggaggatcccacagataatagcggtgattgcgcctctgattgctctgacagggaaagtctgggaatgcaaattgtcatcctgcccactggcgcgggaaagtctttgtgtttccagctcccagcgatgctaatggaaggccctaccctggtcatctaccccatccttggactgatggcagatcaggagcgccgccttgctgagaaggaattttcgccagtcaccatcaggggcggccaaagcaaagaagagcgggatgagatttggagaaagctgcgcgctggagagagcaaattcattatcgccaatccggaagtgttgcttacacccgctgttttgtccagactaaaagaaatcggcattatccatatagtgattgacgaagcccactgtgtatgcgagtggggagaaagctttagaccctcatatcttgaaattcgtaaaataatagaagctgccgctactcccctggttaccgcttttaccgcgaccgccggtactgccgtcctggaaaaaattgaagagtacatttttggcggccctgtctgccgcgtcatcggaaaccccgatcgcaaaaatataagctacgcctccaaaggctgcatactgcgaaacctggcggtaagggaccttgttttgcagagccagaggccggcaatagtgttctgttcctcccgacagggaacggaaaaacttgccctctatcttagaatcgagacagctgagcgggcttctccctggtgcagggaaattcgcttttatcacgcaggcttgagcagggaggaaaagaaggaaatcgaggcctggtttttacacaacaaagaagcggtgctggtggcaacatgtgcttttggtttaggcatagataaagcagacatccgcaccgttatacaccgcgactgcccaccctcggtggaagcatacttgcaggaatccggaagggcaggccgtgacggcgatccttccaaagcgttcttgctgtgggggccggacgatgacagaagtttatcgagggcaaaaaccgaagcggataagaagcgactctcaagccttttgacctatgccagagacacagaaaaatgcagaagggaagcgcttttggatcttcttgattatgatggcgaaagagacagccccgcttcctcctgctgcgatgtttgtgacggcctgtcgaatacgcggcttagggaagaacacagcctgctggatttttttcgcagaaacaaaaggtgttactcgccatctgaggccgctaaagtctttgtccgctcggaaaacatccgctggagcgaggaagaggcaggtgaggcgattgattaccttattaaggtagggaagattggaaggatgaataatttggtgtgggggaataggctgacggtggttaagacataa

SEQ ID NO: 56924 - protein, 471 aa, Unknown
  Obtained from environmental sample
  DOMAIN (12)...(180): DEAD/DEAH box helicase
  misc_feature (1)..(471): Xaa is any amino acid
MRACTSTLEDPTDNSGDCASDCSDRESLGMQIVILPTGAGKSLCFQLPAMLMEGPTLVIYPILGLMADQERRLAEKEFSPVTIRGGQSKEERDEIWRKLRAGESKFIIANPEVLLTPAVLSRLKEIGIIHIVIDEAHCVCEWGESFRPSYLEIRKIIEAAATPLVTAFTATAGTAVLEKIEEYIFGGPVCRVIGNPDRKNISYASKGCILRNLAVRDLVLQSQRPAIVFCSSRQGTEKLALYLRIETAERASPWCREIRFYHAGLSREEKKEIEAWFLHNKEAVLVATCAFGLGIDKADIRTVIHRDCPPSVEAYLQESGRAGRDGDPSKAFLLWGPDDDRSLSRAKTEADKKRLSSLLTYARDTEKCRREALLDLLDYDGERDSPASSCCDVCDGLSNTRLREEHSLLDFFRRNKRCYSPSEAAKVFVRSENIRWSEEEAGEAIDYLIKVGKIGRMNNLVWGNRLTVVKT

SEQ ID NO: 56925 - DNA, 1428 bp, Unknown
  Obtained from environmental sample
  misc_feature (1)..(1428): n is a, c, g, or t
gtgccagcagctccagcagcagcagtgccagcagcaacagctcctaccgcaccagcagtagcaacgccagcagctccggcagcacatacagcaccagcagtagcagcgccagcagctccggcagcacatacagcaccagcagtagcagttccagcagcacctgccactccagcagtagcagtgccagcagtaacggctccagcagcagttcctgctccagcagcagtagttccggctactccagcactcgtagcaccggttgcaacagttccagcagcagaagctcaggttgctccaaaaaccgatagcacaattgttttaattattgaagaaccaaaaaagaaaaaaagaggtggccgcgctccaaaaaatgagtttgcggttgtggatgttcccgctaattttgaaattcaagccagaaaagttttccctgtaaccgatattaaagatggttggaacgatgataatctggacacttggtggggcagagcaaatctcatggttttaactgaatctgaaaatttcgttggaaaagtacatttgcgcatgtatccagggcgactttacgcaatacctgattctagtcagaacttcatcgcaggttcttcaaaagaccgctatggcaaggaagaagtcagagacgctttccagctttacgaggcttgggcttggcacagaggcgactatgtaaatatcaaaataggtcgctgggacaataccacccgttttggaagcaaaacctttggtggctatatagatgccaaaaaagacaggaacttcgacccagcaaggaacattagcttaagagaagctggttttatgagcacctatgcaccagagaacgccgtgcaatttggcttcaataatttctccgaaaatatctccttggatatagccttgatcagcggtgataaccacttgaacagaggcgatttacgcgtatattttgcctttaaagaccttgccggtttggaaaatgtggatataggccttggatatcgctccaatctgtttgacgagatttacaataaaagaggggatgttacccacactgtagattttggattccgtatgccgctagttaaagaagtcaacattttgaagagccttcacctatttggcgaagtagctttaattggcttgaacgaccaaattggcactctagaacgtgacgacggtggcgaaagccgaagtgaatgcaatcctgctttccccatactaggaggcttggatttcaccctttaccgtggtttggataaagttgtgcttgaatttgagtacgatggcaaacgcaaagaccaagttccaaaagagcacgtgaaaagtgtattgggccccgtatattttcaaaagaaactcaacgatcgcttaaatggtgacttaggtatccagagcgaaaacgactcaagagacatctcttatgcgtga

SEQ ID NO: 56926 - protein, 475 aa, Unknown
  Obtained from environmental sample
  SIGNAL (1)...(21)
  misc_feature (1)..(475): Xaa is any amino acid
MPAAPAAAVPAATAPTAPAVATPAAPAAHTAPAVAAPAAPAAHTAPAVAVPAAPATPAVAVPAVTAPAAVPAPAAVVPATPALVAPVATVPAAEAQVAPKTDSTIVLIIEEPKKKKRGGRAPKNEFAVVDVPANFEIQARKVFPVTDIKDGWNDDNLDTWWGRANLMVLTESENFVGKVHLRMYPGRLYAIPDSSQNFIAGSSKDRYGKEEVRDAFQLYEAWAWHRGDYVNIKIGRWDNTTRFGSKTFGGYIDAKKDRNFDPARNISLREAGFMSTYAPENAVQFGFNNFSENISLDIALISGDNHLNRGDLRVYFAFKDLAGLENVDIGLGYRSNLFDEIYNKRGDVTHTVDFGFRMPLVKEVNILKSLHLFGEVALIGLNDQIGTLERDDGGESRSECNPAFPILGGLDFTLYRGLDKVVLEFEYDGKRKDQVPKEHVKSVLGPVYFQKKLNDRLNGDLGIQSENDSRDISYA

SEQ ID NO: 56927 - DNA, 1110 bp, Unknown
  Obtained from environmental sample
  misc_feature (1)..(1110): n is a, c, g, or t
atgattttcaaaacatttttccggatgcttgacaacgacaggcaaagcaaatacctgattccggttattacgattgtactgagcatgatcacggcctcggtaattctgcttgttatggggaaaaacccggttctcgcgatagctgcctttctgcggggcagtggttttctgccaaaaccggcgtatgccaacggccagggcatgattaccgattttttgtctttcctcggcattctcgcccccatgctgctggccgctttgggtgtcagcctcgctttgcgtgccggacttttcaatatcggaaccgctgggcaaatgctggctgccggatttgtcgctacggtattcatcggttattcgggacttgacgcgtggctcgcgaagccccttgttatactcatcggaatggtctccggcggcctgataggggcggcgatcggttttctaaagtacaagttcaatatccatgaagtggtatcgtccattatgtttaattatattatcagttatataacgggatttttcattaataatttctatattgatccgataacgcgatcgtcgaaaatatgcggcgccgcgtcaaggcttaccgtaagcaatatcgttcccggctcgtcaatgaaccttaacctgccgattggtatttttatcgcccttgccgccgtatttctggtccgttttcttcttgaccgcaccgtagtgggatttgaaattaaggccgtgggcctgaacaaaaactgcgcccgttacgccggcatacgcgtcggttatataatcgtcctttccatgtttttctcaggcgttctggccgggcttgcgggggtatgtttttacctgggctactataataccataattcccaaagagctggcggggctgggctatgacgcaatagcggcgtcgcttctgggaaacataagcccgctgggctgtatcttttcatcaagcctgataacggtttttcagaacggcaatgtgtatatggggtccaccgtcggagtgccccgcgagatcgcctctgttattacggggatacttttgcttttcagcgcctgcggggagtatattcgtcatttggcaaggaagcggctggaaacatggaattga

SEQ ID NO: 56928 - protein, 369 aa, Unknown
  Obtained from environmental sample
  DOMAIN (71)...(352): Branched-chain amino acid transport system / permease component
  misc_feature (1)..(369): Xaa is any amino acid
MIFKTFFRMLDNDRQSKYLIPVITIVLSMITASVILLVMGKNPVLAIAAFLRGSGFLPKPAYANGQGMITDFLSFLGILAPMLLAALGVSLALRAGLFNIGTAGQMLAAGFVATVFIGYSGLDAWLAKPLVILIGMVSGGLIGAAIGFLKYKFNIHEVVSSIMFNYIISYITGFFINNFYIDPITRSSKICGAASRLTVSNIVPGSSMNLNLPIGIFIALAAVFLVRFLLDRTVVGFEIKAVGLNKNCARYAGIRVGYIIVLSMFFSGVLAGLAGVCFYLGYYNTIIPKELAGLGYDAIAASLLGNISPLGCIFSSSLITVFQNGNVYMGSTVGVPREIASVITGILLLFSACGEYIRHLARKRLETWN

SEQ ID NO: 56929 - DNA, 387 bp, Unknown
  Obtained from environmental sample
  misc_feature (1)..(387): n is a, c, g, or t
atgcgtggttacctgttggacactcacgccgccatttggttctttaatggttctaatacattgtctaaaacggcagacacaattatccgtgatttttccaaccacatatacataagcattgtgtcggtgtgggagcttgcaattaaaatgagtattggaaagctgaaatttgatgggaaaacgactggttttatcactcttgcccaaaaaaacgaaattaccattctccctattaagccctctcatcttgccgtttatgactcgctgcctttgattcaccgcgacccctttgaccgtctgcttatcgcaaccgccctcgacgagcaaatgtcactaatcagcgccgataagaacattgcccaatacgatgtccctttaatttggtaa

SEQ ID NO: 56930 - protein, 128 aa, Unknown
  Obtained from environmental sample
  DOMAIN (4)...(124): PIN domain
  misc_feature (1)..(128): Xaa is any amino acid
MRGYLLDTHAAIWFFNGSNTLSKTADTIIRDFSNHIYISIVSVWELAIKMSIGKLKFDGKTTGFITLAQKNEITILPIKPSHLAVYDSLPLIHRDPFDRLLIATALDEQMSLISADKNIAQYDVPLIW

SEQ ID NO: 56931 - DNA, 660 bp, Unknown
  Obtained from environmental sample
  misc_feature (1)..(660): n is a, c, g, or t
gtggcggatgccggcgaaacaaagaagaaagcgatgaggctgctcaggaaaagatcgacactggccttgatgctggccggagtttttctggcggcagcgctttcgttgggggcgggcatggcgcagcctgagaagggtggaacacgcagcggcgcggagaaggcgaggcaaagcccggccaatctgtgcgatgcgtattttgccggaggatgcttctggggcgttgcggagtatttttcaagaatccccggcgtatttgacgcaagcgccggctacgccaacggaacaacgcaaaatcccacatacgaacaggtctgttccggcacgaccggccatgctgaagccgtgcatatccgctatgacccgaatgcggtcagtctgaaaatcctggcggagcaatttttcaaaatcatcaatccgatcagcgtcaaccaacagggcaatgatgtgggcagccagtaccggaccggcatgtactttctgaacgatgcggacaaggcaactctcgccttggtcatggccggcgcgcaaaaaaactatgatcagcccctggctgtggagcttgtgccgctgcaaaattattatccggcggaagaatatcatcaggactatctgaaaaagaatcccggcggctactgccatatcctcggccgattctga

SEQ ID NO: 56932 - protein, 219 aa, Unknown
  Obtained from environmental sample
  DOMAIN (63)...(218): Peptide methionine sulfoxide reductase
  misc_feature (1)..(219): Xaa is any amino acid
MADAGETKKKAMRLLRKRSTLALMLAGVFLAAALSLGAGMAQPEKGGTRSGAEKARQSPANLCDAYFAGGCFWGVAEYFSRIPGVFDASAGYANGTTQNPTYEQVCSGTTGHAEAVHIRYDPNAVSLKILAEQFFKIINPISVNQQGNDVGSQYRTGMYFLNDADKATLALVMAGAQKNYDQPLAVELVPLQNYYPAEEYHQDYLKKNPGGYCHILGRF

SEQ ID NO: 56933 - DNA, 858 bp, Unknown
  Obtained from environmental sample
  misc_feature (1)..(858): n is a, c, g, or t
atgagtagatggatcccccgtggctgcacgaattcaatgccccgaaccggcgggctcgcctatgacgattcggtaatagtcgagtccattacccgctcgagcagcgtatccgctaccgaatggaaaggcacgggctataaccccgaagggccggccggcgttgaaggccaggctccccccgcctttaaggatatgtcaaacctctacggcatgatggagcagaaaaccgatgttaataatcaggagatcggcgaaaagaaaacacaggtagacagcagcccccagattgaccgcaaaacggtttcggttaacatagacggcaaatggaaaatgaaattcgacgagaagggaaaaccggtggtatcggctgataacacaatagaacgcgaatatacacctgttccggaaaaagaactccgcgacgccgcattgttgatacagggcgccatcggctataactcggccaaaggcgattcggtgacagtacggaatataccctttgaaagaaccaaagaattccaggaacaggacgccgcgtatttcaggcagaaacaacttaaaacaatgatgctggtattcattgtgggtttgacaattttgctgcttgccttcataatattcaaggcggttgcccgcgaaatagatcggcgcatacagcccgtcgagaaggatcgccagatgcgcgaacaggctttgcgcgagagccagatgatgagggccgagcacgtaggcatggacgtgtccatttccgtggaagaaaggacgcgattggagctgcaggagtccgttatgaacatggcaaaggaacacccggaagacgcggcgcagcttatccgtacctggcttttagaggagtag

SEQ ID NO: 56934 - protein, 285 aa, Unknown
  Obtained from environmental sample
  DOMAIN (19)...(167): Flagellar M-ring protein C-terminal
  misc_feature (1)..(285): Xaa is any amino acid
MSRWIPRGCTNSMPRTGGLAYDDSVIVESITRSSSVSATEWKGTGYNPEGPAGVEGQAPPAFKDMSNLYGMMEQKTDVNNQEIGEKKTQVDSSPQIDRKTVSVNIDGKWKMKFDEKGKPVVSADNTIEREYTPVPEKELRDAALLIQGAIGYNSAKGDSVTVRNIPFERTKEFQEQDAAYFRQKQLKTMMLVFIVGLTILLLAFIIFKAVAREIDRRIQPVEKDRQMREQALRESQMMRAEHVGMDVSISVEERTRLELQESVMNMAKEHPEDAAQLIRTWLLEE

SEQ ID NO: 56935 - DNA, 708 bp, Unknown
  Obtained from environmental sample
  misc_feature (1)..(708): n is a, c, g, or t
atggcaaaaacttcttcgtcatcaacttcggggacaagcacggcaaccggaaagaaaaaaggccaaaaggaatacaccggccggcaaaaagccgcgatcttcctcgttacaatcggctcggaaatatccgcggagatattcaagtatctgcgcgaagacgaaattgaaacccttacctttgaaattgcgaggcttgaaaccatagagcctgagcaaaaggacgccatcttgcaggagttccaggaactcatgatggcgaaccagtttatctcaaccggcggtattgacttcgccagggaacttcttgaaaaatccctgggcagccagaaggctatcgacataattaaccgattgacttcaagccttcaggtacggcctttcgattttattcgaaggacagaccctgcccacctcctcaactttatacagcaagagcatcctcaaaccatagccctgatccttgcgtaccttgagccgaacaaggcttcgattattctgcagaacctcccgcacgaggtacagagcgacgtggcgcgccgtatcgctaccatggacaggacaagcccggaagtcttgagggaggttgaaagggttcttgaaaagaaactttccaccctgtcaagcgaagattattcggcggcgggcggtgtcgagagcattgttgaaatcctcaatctggttgaccgcgcttcgaaaagcagattatga

SEQ ID NO: 56936 - protein, 235 aa, Unknown
  Obtained from environmental sample
  misc_feature (1)..(235): Xaa is any amino acid
MAKTSSSSTSGTSTATGKKKGQKEYTGRQKAAIFLVTIGSEISAEIFKYLREDEIETLTFEIARLETIEPEQKDAILQEFQELMMANQFISTGGIDFARELLEKSLGSQKAIDIINRLTSSLQVRPFDFIRRTDPAHLLNFIQQEHPQTIALILAYLEPNKASIILQNLPHEVQSDVARRIATMDRTSPEVLREVERVLEKKLSTLSSEDYSAAGGVESIVEILNLVDRASKSRL

SEQ ID NO: 56937 - DNA, 660 bp, Unknown
  Obtained from environmental sample
  misc_feature (1)..(660): n is a, c, g, or t
ttggccgtgacaatgctcgtaaagattgccaccagggcgaaggaagaaatgacttcgcctcccgtatctggaaaggtgtacatggcttcacaactgactgatgcatttgcgcgtaagttttactacttgcgcctgtcgattaccgatgtgtgtaactttcgttgcacctactgcctgccggatggctacaaaccgagcggcgtcaccaataaaggctttcttaccgtcgatgaaattcgccgggttacgcgcgccttcgccagactgggcaccgaaaaagtgcgcctgacaggaggagagccgtctttacgccgcgactttaccgatatcatcgccgctgtgcgggaaaacgacgctatccgccagattgcggtcacaaccaatggttaccgtctggaacgcgatgtggcgagctggcgcgatgcgggacttactggcattaacgtcagtgtcgacagtctggacgcccgccagtttcacgctattaccgggcaggataaattcaaccaggtcatggcagggattgatgctgcatttgaggccggttttgagaaggtcaaagtcaataccgtgctgatgcgtgatgttaatcataaagagctcgacacctttgtgaccgtgatccagcatggacgtgcaggcacgcagtctgtgttctaa

SEQ ID NO: 56938 - protein, 219 aa, Unknown
  Obtained from environmental sample
  DOMAIN (45)...(208): Radical SAM superfamily
  misc_feature (1)..(219): Xaa is any amino acid
MAVTMLVKIATRAKEEMTSPPVSGKVYMASQLTDAFARKFYYLRLSITDVCNFRCTYCLPDGYKPSGVTNKGFLTVDEIRRVTRAFARLGTEKVRLTGGEPSLRRDFTDIIAAVRENDAIRQIAVTTNGYRLERDVASWRDAGLTGINVSVDSLDARQFHAITGQDKFNQVMAGIDAAFEAGFEKVKVNTVLMRDVNHKELDTFVTVIQHGRAGTQSVF

SEQ ID NO: 56939 - DNA, 396 bp, Unknown
  Obtained from environmental sample
  misc_feature (1)..(396): n is a, c, g, or t
ttgaaccgcatcggcgttccctatacggcggcatattcggtaagccttacactgcgttacattcccgacatccaacgggattttgaggcgatttcacagtcccaacaggcgcggggccttgagctttcccgtaaggcgtcatggataaaacgtctcaagaggactgtccccctgctgctaccgttgatcttttcatctttggatcgtattgatgtgataagctgcgccatggaactacggggttttggcaaacacaaaaaacgaagctggtattcgggaaggccttttaaacgggctgacaaaattactctgattgcgggtattgtactttttgccgcaggtatatggtttactttccgcaacggaaaccggtttttcaatccctttttatattag

SEQ ID NO: 56940 - protein, 131 aa, Unknown
  Obtained from environmental sample
  misc_feature (1)..(131): Xaa is any amino acid
MNRIGVPYTAAYSVSLTLRYIPDIQRDFEAISQSQQARGLELSRKASWIKRLKRTVPLLLPLIFSSLDRIDVISCAMELRGFGKHKKRSWYSGRPFKRADKITLIAGIVLFAAGIWFTFRNGNRFFNPFLY

SEQ ID NO: 56941 - DNA, 738 bp, Unknown
  Obtained from environmental sample
  misc_feature (1)..(738): n is a, c, g, or t
atgataatatataacagtaactttaaatttgaatccataaatactatactctattttgtggctacactgtatattatcggcactccgataggtaatttaggcgatattagtttccgggctgtagaaatccttaaaacagcggatttagtggcctgtgaggatacgcggcgcacgttaaaactccttaatcatcttcagatcagggtaaaaatgctttcatgccggtcccaaaacgaggaatctgccgcaaaaaaggtaatcgccgcgcttgacgaggggctgactgtggcttatgccagcgacgccggcacccccgccctgagcgaccccggcgctgtactcgcaagcatggccgccgccgccgggcatgaggttatacccattcccggggcctccgcctttgccgcattgctcagcgtttccggccagcgggataaaaccgttgtttttgagggctttctttccccaaaacagggccggcggcgttcccggctgcgggaattgctcgcgatgaacgtgggaatcgtgctgtatgaatcgcccttcaggatattaaaacttctggaagatattgccgaaattgataatacacgctatatttgtataggaagggaaatgaccaaagttcatgaagagtatatccggggggctgtgggggaagtccttgcgattcttgggaccagaaaggagctgcttggcgaattttcagtttatattgctggaaatacgcaccaataa

SEQ ID NO: 56942 - protein, 245 aa, Unknown
  Obtained from environmental sample
  DOMAIN (22)...(222): Tetrapyrrole (Corrin/Porphyrin) Methylases
  misc_feature (1)..(245): Xaa is any amino acid
MIIYNSNFKFESINTILYFVATLYIIGTPIGNLGDISFRAVEILKTADLVACEDTRRTLKLLNHLQIRVKMLSCRSQNEESAAKKVIAALDEGLTVAYASDAGTPALSDPGAVLASMAAAAGHEVIPIPGASAFAALLSVSGQRDKTVVFEGFLSPKQGRRRSRLRELLAMNVGIVLYESPFRILKLLEDIAEIDNTRYICIGREMTKVHEEYIRGAVGEVLAILGTRKELLGEFSVYIAGNTHQ

SEQ ID NO: 56943 - DNA, 867 bp, Unknown
  Obtained from environmental sample
  misc_feature (1)..(867): n is a, c, g, or t
gtggcaaaaggggcggcattaaaatcaaaagggggcgcgcccccgtcgggaaacccgctaatagataatgtgataaatataagcgactaccgccggaaatgggcggcttatgaggtgctaaagtccgtaaggaagaagaattccgaagcagcgatgatcccggaacaaggcccattacataggacgccgtattcgcatttggccaactggatggaaagaaccgaaggtatgaggggcataggtatagccctgggctaccagggacacagcgacgattctgatgcgcatcccggcagtgttgaactgacccttaacaaggaaggcgtcctggaaattaaaaccggaatactcgatagcgatcgcggaatttgggtgcgtctggcctcgaaaattctggaaatagacaagaaaaaggtccggataagttataacgccgattccagagattccgggccctcgacaacctcccgcaatataacaatcctgaccaagctgatagaacaggcctgcaaactaatacacaagcggagggagaaagattccctgcccataacagtacgcaaaaccgcaagtccccggaaacccgatgttttggaagagcgcccgcccaaaggcgttttggacataaacagtttttcccggcttggatgggcttcggcagtcgtggaagtggaatttgaccccataggctatatgccgcgcatacgaggcgtctggatgtgcgtagacggcggcaaaatcctgtcggaggacaatgcccgcaaaaacctgaagatttcgattgtccaggccctgggctggtcttatcgggagcagatcaactatgttgacggggcgatccccgtcgcccagtttgcagaattttga

SEQ ID NO: 56944 - protein, 288 aa, Unknown
  Obtained from environmental sample
  misc_feature (1)..(288): Xaa is any amino acid
MAKGAALKSKGGAPPSGNPLIDNVINISDYRRKWAAYEVLKSVRKKNSEAAMIPEQGPLHRTPYSHLANWMERTEGMRGIGIALGYQGHSDDSDAHPGSVELTLNKEGVLEIKTGILDSDRGIWVRLASKILEIDKKKVRISYNADSRDSGPSTTSRNITILTKLIEQACKLIHKRREKDSLPITVRKTASPRKPDVLEERPPKGVLDINSFSRLGWASAVVEVEFDPIGYMPRIRGVWMCVDGGKILSEDNARKNLKISIVQALGWSYREQINYVDGAIPVAQFAEF

SEQ ID NO: 56945 - DNA, 735 bp, Unknown
  Obtained from environmental sample
  misc_feature (1)..(735): n is a, c, g, or t
atgattcccaaaagcatagcgggcgacagcgtactggtcatgatcatcacgcaaaagtttgaaatgcacctgccgtattacaggcaggagaagcaatttgaacagatagggctgacgataagccggcaggacatggcgaactggcagcagcaagtatatgaaaaattgaaaccgttattcattttattaaaagcgatgataaaaagctggtatgtgctgcggatggatgagactccggtgcaggtaatgagagaagaagggcgggaaaacgcgcagaccagttatatgtggctggctctcggcgggccgcccgacaaaacagtggcatggtacgaataccacccgacacacgccgaatataacgcgaaagcgtttctggaagggtattcaggttatttgcaaaccgatgggtatgatgcttatgacagcgctgttaaagacatgccgggtattgttcatgtgggctgtttcgctcactcgaggagacggttctttgaagcggccaagataaacaagaaaccgcagtccgccgaggaagggatgaaatatatacgcaggctctaccagcttgaagacgcgctgcgcggcaaatggaaagacgaccttgaaaaattccatgaagagagaaaaaaagaagcggccaccatattagacgagtttaaagcgtggctgttaaagcgcgtgaatgaagtgccgcccaagacgctgttaggtgaagcggtaaactatacgtga

SEQ ID NO: 56946 - protein, 244 aa, Unknown
  Obtained from environmental sample
  DOMAIN (1)...(150): Transposase IS66 family
  misc_feature (1)..(244): Xaa is any amino acid
MIPKSIAGDSVLVMIITQKFEMHLPYYRQEKQFEQIGLTISRQDMANWQQQVYEKLKPLFILLKAMIKSWYVLRMDETPVQVMREEGRENAQTSYMWLALGGPPDKTVAWYEYHPTHAEYNAKAFLEGYSGYLQTDGYDAYDSAVKDMPGIVHVGCFAHSRRRFFEAAKINKKPQSAEEGMKYIRRLYQLEDALRGKWKDDLEKFHEERKKEAATILDEFKAWLLKRVNEVPPKTLLGEAVNYT

SEQ ID NO: 56947 - DNA, 516 bp, Unknown
  Obtained from environmental sample
  misc_feature (1)..(516): n is a, c, g, or t
gtgtgcataccaatggcccagggggtgccgtctaaatacaacaaaataaggttttttgtatttaacaggcggcagcccttttgggttagccgcccttttttatttacaaatagtaaattagacatcgtagccaagttggtaaggcatgaggtttcagctaatgctgaatttgcaaatctcccaccgcgggttcaaatcctgtcgatgtctctgtgtcgttggcagagcggctatgcgcctgtttgtggggcaggtttacaagggttcgaatcccttacggcaccatccgcgaaggagaatatgaaaatgatagaaattaaaggaaagtataacacagcgaaggtctatacagacgctctggatgaaaaatcacaggagcagattcaactgctttgtgatcaggcttttgtggaaggaagcgcgctgcgattaatgcccgatgtccacgccggagccggttgtaccataggcactaccatgaccataagcgataaaatagttttgatgattatataa

SEQ ID NO: 56948 - protein, 171 aa, Unknown
  Obtained from environmental sample
  misc_feature (1)..(171): Xaa is any amino acid
MCIPMAQGVPSKYNKIRFFVFNRRQPFWVSRPFLFTNSKLDIVAKLVRHEVSANAEFANLPPRVQILSMSLCRWQSGYAPVCGAGLQGFESLTAPSAKENMKMIEIKGKYNTAKVYTDALDEKSQEQIQLLCDQAFVEGSALRLMPDVHAGAGCTIGTTMTISDKIVLMII

SEQ ID NO: 56949 - DNA, 708 bp, Unknown
  Obtained from environmental sample
  misc_feature (1)..(708): n is a, c, g, or t
ttgcagaagaaaaaagctctcttagcccagaaggcattgaaagagtggggcttggcgctcggtttaaccgataaagaacaggatttcttccgccttttggttcttttcacgcacgaaacaaacaacgcaaaaaaacaaaagctcttcagcgaaatgcgccaaattgcagcactctgcaaaaaccgcatcatagaggcaaatttatacgattattataaagaatggtaccattcagttatacgcgaattagctccaaatgtatcatccgaaatggaaatttcaaaattgctggttccaaaaatcccgctttcgcaggtcaaagcctcccttgcccttttgctcaaactcggcttgctggaaaaaaattcaaacgggaaatacaagcaaacaagcaagcatctcaccactggcgaaaacataagctcaatggcagtccgcaagcaccatgaaaatatgggaattttggctgtttcagccttagagaacatttcaaaacaagaaagggatatttccggcataactatgggtttgtcaaaagaaggttttgaagccataaaggcagaactagctaatttcaggcgcaaaataaaagaaattgccgcccagagcgaaaacgaagaagaatctgtatatagaataaatttgcaattatttccgttgtcaaaatctgcgcataaaacaaaggaggcaaaaaatgaaaaagtttaa

SEQ ID NO: 56950 - protein, 235 aa, Unknown
  Obtained from environmental sample
  misc_feature (1)..(235): Xaa is any amino acid
MQKKKALLAQKALKEWGLALGLTDKEQDFFRLLVLFTHETNNAKKQKLFSEMRQIAALCKNRIIEANLYDYYKEWYHSVIRELAPNVSSEMEISKLLVPKIPLSQVKASLALLLKLGLLEKNSNGKYKQTSKHLTTGENISSMAVRKHHENMGILAVSALENISKQERDISGITMGLSKEGFEAIKAELANFRRKIKEIAAQSENEEESVYRINLQLFPLSKSAHKTKEAKNEKV

SEQ ID NO: 56951 - DNA, 768 bp, Unknown
  Obtained from environmental sample
  misc_feature (1)..(768): n is a, c, g, or t
ttgcgtgcctgcacgccgactctagaggatcgcactcgaggcggaggcagctctacctacagtaaccagatgtcttttcctgtaagccagtatgcgtcccagaccagcgagtccaccatgctcaccggcgacctgaacatcgttgatgtcgaatggattatccagtaccgcgtcagcgatccaaaagcatggactttcagcgtgaacgagcgtatcgccacgatccgcgacgtgtcgcgttctgtcataaatatgctggtcggcgacagggctataatggacatcatgggggtggaacgcagcgccattgaagcggagggtatcgcgctcatgaatgagactttccggggttacaacctcggcatcgacgttatcgccgtaaagctccagattgtaaccccgccggccggagtgcagcaggcttttgaagacgtgaacaaggccatgcaggacagggagaggctgatcaacgagggacagcaggcttacaacgaggaaattcccaaaaccaggggcgaagccgagcggcttatccaggtggcgcaaggttatgcgacagaaagagtgaacagggcgcagggagatgtggcgcgttttaacgcggtatacaatgaataccgccgatccccggacgttacacgtcagcggctgtattatgaaatgattgaggaagtattcaaggacgagaagggcacggcgctcatcgaccgcagcctgagaaatttcctgccaatgatgaacctcaacagtgcgcaaggaggcagataa

SEQ ID NO: 56952 - protein, 255 aa, Unknown
  Obtained from environmental sample
  DOMAIN (1)...(162): SPFH domain / Band 7 family
  misc_feature (1)..(255): Xaa is any amino acid
MRACTPTLEDRTRGGGSSTYSNQMSFPVSQYASQTSESTMLTGDLNIVDVEWIIQYRVSDPKAWTFSVNERIATIRDVSRSVINMLVGDRAIMDIMGVERSAIEAEGIALMNETFRGYNLGIDVIAVKLQIVTPPAGVQQAFEDVNKAMQDRERLINEGQQAYNEEIPKTRGEAERLIQVAQGYATERVNRAQGDVARFNAVYNEYRRSPDVTRQRLYYEMIEEVFKDEKGTALIDRSLRNFLPMMNLNSAQGGR

SEQ ID NO: 56953 - DNA, 975 bp, Unknown
  Obtained from environmental sample
  misc_feature (1)..(975): n is a, c, g, or t
atgaaaaaaaccgtaaccacaattgttgtaatttttgttatctttcttggcattttagtggctggtcctttttacattattaacgagggcgaacaggcggcggttgtgcagttgggacagttgagagacgttaccaccgaggccggcctgtatctaaaagttccttttatcgatgaaatttaccgttacccaaagaagatcatggcttgggacggcgaggcgaggattgtgcccacggcggaaagacagtttatctttgtcgatgttatcgcccgctggcgtatttccgatcccaaaaaattctacgaggccattaacaccgtggatgcggcatattccaaacttgcggagattatcgactccgaggtgcgtaccgtggtggcggaaaactttctgcgggagtctgtgcgaaattcgaacatcattatggaacgttctttgagtaccgacgaccccgctctgggagaggatatcagggccgagatactaagcacggtacagcccggttcgggttatgagcctattacaaagggccgccgccgccttgcagaggaaatacttagccgttcgaggcgcatggttcccgaatacggcatagaacttatcgatgtggtaacgcggcagatacgttattccgacgagcttaccccgagcgtctacgcccgcatgatacgggaacggaaccagatagcccaggcctaccgttccgcaggcgaaggcagcaaggcggaatggcttggcaagatggacaatgaaaaacgctccattctttccgccgcttacgagcaggcggagacgatcaaaggaaaggccgacgcgacggcgacacggatttacgctgaggcgtacagccaggacagggacttttttaatttctggcgcggcgtggaatcctaccgtagcaccctgccgaagtttaacaaaacattgtctacggatatggaatatttccgttatctgtatactccaagatga

SEQ ID NO: 56954 - protein, 324 aa, Unknown
  Obtained from environmental sample
  SIGNAL (1)...(21)
  DOMAIN (23)...(240): SPFH domain / Band 7 family
  misc_feature (1)..(324): Xaa is any amino acid
MKKTVTTIVVIFVIFLGILVAGPFYIINEGEQAAVVQLGQLRDVTTEAGLYLKVPFIDEIYRYPKKIMAWDGEARIVPTAERQFIFVDVIARWRISDPKKFYEAINTVDAAYSKLAEIIDSEVRTVVAENFLRESVRNSNIIMERSLSTDDPALGEDIRAEILSTVQPGSGYEPITKGRRRLAEEILSRSRRMVPEYGIELIDVVTRQIRYSDELTPSVYARMIRERNQIAQAYRSAGEGSKAEWLGKMDNEKRSILSAAYEQAETIKGKADATATRIYAEAYSQDRDFFNFWRGVESYRSTLPKFNKTLSTDMEYFRYLYTPR

SEQ ID NO: 56955 - DNA, 684 bp, Unknown
  Obtained from environmental sample
  misc_feature (1)..(684): n is a, c, g, or t
gtgttcgatgtttattgcgaggatacctctggtgcaaggttcattgtagaggttcaggttgataagcaggaatatttcataaggcgcacattctattacctttgcatgattataagcaaccttgcgaagaaagggaaaaagtatgatttcaatattcccaaactctactccatcagcttcttggattttgaccttgactttgggaaaaattgcacggaagttgtgcagcacctgtccataaggaacgacaagcatcccgaagttagttacgatatgcttcaaatgacattcgtaattttgccgaggtttagcaagaccgagagcgagtgtaagactgttatggataaaattcttttcgcttttaagaatggtcataagctcaaaaaagcccccaagagttttaaggagaaggagcttagggatattttcagcatagcggaaatttctaattttacggagagtgagctttataagtatgaggctattatgagaaacgaatacgaccagagagcaatccttgcttatgccaagaaagagggcgaggttataggtgaaaccaggggcttgaaaaaaggcattttgcaaactgctaaaaatatgctcgcaaaaggattttccgttgccgatgttcttaaagcaacgaatctccctcgtgaacaggttagagcattgaagcgagcttag

SEQ ID NO: 56956 - protein, 227 aa, Unknown
  Obtained from environmental sample
  misc_feature (1)..(227): Xaa is any amino acid
MFDVYCEDTSGARFIVEVQVDKQEYFIRRTFYYLCMIISNLAKKGKKYDFNIPKLYSISFLDFDLDFGKNCTEVVQHLSIRNDKHPEVSYDMLQMTFVILPRFSKTESECKTVMDKILFAFKNGHKLKKAPKSFKEKELRDIFSIAEISNFTESELYKYEAIMRNEYDQRAILAYAKKEGEVIGETRGLKKGILQTAKNMLAKGFSVADVLKATNLPREQVRALKRA

SEQ ID NO: 56957 - DNA, 1017 bp, Unknown
  Obtained from environmental sample
  misc_feature (1)..(1017): n is a, c, g, or t
atggatataaaagaatataaatgtcccaactgcggcggggcggttaagttcgacagcggaatccaaaaaatgaaatgcccctactgcgacgctgaattcgagatcgcggcgcttgaagaatatcaaaaacaactgcaggttcccgaagaaagcataaactgggacggaaaagacaccgcctgggatgaaaacgaacttgaagaattgtcaacaggctcctgcccctcgtgcggggcggagctgttaggcgataaaaataccgcgtccatggtctgccccaactgcggcaattcgcagattgtgttaaggcggctgtcaggattattaaaaccggagtacataatcccgttcaaattggacaaaaaagttgcggtggaagctttaaaaaatttctacaaagataaaaaacttcttcccgatagcttcaaagatgataaccgcgtcaacagtatacagggtgtttatcttccattctggctttttgacgccaatgcccaagggcacgtttgttataagggcacaaaagtacatagatggagcgacgccagctacgattatacaaagactgattattattccattgtacgcgatggcagtttgcagtttaaaaaaattcccgtggacggttctgaaaaaatggacgatgactacatggacgctatagagcctttcgattatacccagatgacaggtttcgagaccgcatatctgtccggctatctgacggagaagtacgatgtggacgcggagaaaagcaaagaaagggctgtcaagagaataaagggatctgtgcacgcggaatttgcccgcactgttacagggttttcgtcgtttacaactgaaagttccacagtcagtgtagaagacggcaaagtgagttacagcctgttcccggtgtgggtactcaataccaagtataaaaatgaaaattatatgttcctgatgaacggacaatcgggacggctcctcggaaaactgccggtggatcccggcaagttcacgaaatatctgctttaa

SEQ ID NO: 56958 - protein, 338 aa, Unknown
  Obtained from environmental sample
  DOMAIN (74)...(97): Domain of unknown function (DUF1610)
  misc_feature (1)..(338): Xaa is any amino acid
MDIKEYKCPNCGGAVKFDSGIQKMKCPYCDAEFEIAALEEYQKQLQVPEESINWDGKDTAWDENELEELSTGSCPSCGAELLGDKNTASMVCPNCGNSQIVLRRLSGLLKPEYIIPFKLDKKVAVEALKNFYKDKKLLPDSFKDDNRVNSIQGVYLPFWLFDANAQGHVCYKGTKVHRWSDASYDYTKTDYYSIVRDGSLQFKKIPVDGSEKMDDDYMDAIEPFDYTQMTGFETAYLSGYLTEKYDVDAEKSKERAVKRIKGSVHAEFARTVTGFSSFTTESSTVSVEDGKVSYSLFPVWVLNTKYKNENYMFLMNGQSGRLLGKLPVDPGKFTKYLL

SEQ ID NO: 56959 - DNA, 531 bp, Unknown
  Obtained from environmental sample
  misc_feature (1)..(531): n is a, c, g, or t
ttggcggagcttcttaatgaggcgctcacagccaagtggagggaaggccggggcatagaaattgtcaacttcggaatcacctgcacggctacggaggaagacgaaacacggctcaagcagcttcagacggcggcggtaatgcgcgaccccacaatggccgccgcgtcgctggtgaacgcgcagagcgacgctatgcgtactgccgccgggaacactagcggcgcgatggcgggcttcatgggcatgggtatggcaaacatggcaggcggcatgaattcccagaacctgtttgcgatgggagcggcgcagcaagcaagcgcgcagcaggctgcggcgcagcaaactgcgcccgtggctcctgccggagccggcggctggacttgttcctgcggacacgcgggaaacgccggcaagttctgcgaggagtgcggaaagcccgctcctgccggagccggcggctggacttgttcctgcggacacgcgggaaacatcggcaagttctgcgaagagtgcggaaagcccaggccttaa

SEQ ID NO: 56960 - protein, 176 aa, Unknown
  Obtained from environmental sample
  misc_feature (1)..(176): Xaa is any amino acid
MAELLNEALTAKWREGRGIEIVNFGITCTATEEDETRLKQLQTAAVMRDPTMAAASLVNAQSDAMRTAAGNTSGAMAGFMGMGMANMAGGMNSQNLFAMGAAQQASAQQAAAQQTAPVAPAGAGGWTCSCGHAGNAGKFCEECGKPAPAGAGGWTCSCGHAGNIGKFCEECGKPRP

SEQ ID NO: 56961 - DNA, 546 bp, Unknown
  Obtained from environmental sample
  misc_feature (1)..(546): n is a, c, g, or t
ttggataaacgggcgttttttattcagggcgattctttgcttttacctgttaatactttggatactcaaattgacgcaggtcttttatttgaattgtcaaaatattttaagaataccgatatttttgatatccccgaattggacaacccttcaaatctcatttccgtagtatccgtccctgtaaccgccgttctgcccgaaaattggaaatctatccccgtccgcagtgttctctccatgttcagcgtatcgggcggcagaagcgccaatagtattgtccgagcctgccatatcgcccaatggagatggagttcccgtttctgcggaacttgcggggcgaagaacgaagatgtcccaatgcaggcgcagagaatatgccccaagtgcggacgggcagagtttccaagaatatgccccgccgtaatcgttcttattaccgacgataaaaacagaattctgctgcgcataacaaaagattcaaagccggggtttacagccatatttccggttttaatgaagcgggagaaacactggaagaaaccgtag

SEQ ID NO: 56962 - protein, 181 aa, Unknown
  Obtained from environmental sample
  misc_feature (1)..(181): Xaa is any amino acid
MDKRAFFIQGDSLLLPVNTLDTQIDAGLLFELSKYFKNTDIFDIPELDNPSNLISVVSVPVTAVLPENWKSIPVRSVLSMFSVSGGRSANSIVRACHIAQWRWSSRFCGTCGAKNEDVPMQAQRICPKCGRAEFPRICPAVIVLITDDKNRILLRITKDSKPGFTAIFPVLMKREKHWKKP

SEQ ID NO: 56963 - DNA, 669 bp, Unknown
  Obtained from environmental sample
  misc_feature (1)..(669): n is a, c, g, or t
gtgggcgcgctgatgatggttgacatggcgcacatagccggtctggtcgccaccggccaccacccaagccccgtgccgtacgccgattttgtgaccaccaccacgcacaagacactgcgcggcccgcgcggagggctggtgctgtgcaaagagaaatacgccaaggacctggacaaggccgtattccccggcgtccagggtgggcccctcatgcacgttatagccgccaaggccgtggccttgggcgaggcgctggagcccagtttcagggactaccaggaccaggtggtgcggaacgccgccgtcctggccaagtcgctggccgccaagggctggcgcatcgtgagcggcggcacggacaaccacctgatgctggttgacgtgttcgcaaacgggatgctgggcagcgaggcggagaaggccctggacaaggccggcataaccgttaacaagaacggcatccccttcgaccccaacccaccgctgaagcccagcggcatacgccttggcagcccggccgtgaccacccgcggtctgaaagaggccgacatggagcgcgtcgccgcctggatagacgaggccctgcggagcagggacaaagaagacgtgctgaagcggatatacggagaggtcgaggaactgacggcgaagcaccccataccagagtaa

SEQ ID NO: 56964 - protein, 222 aa, Unknown
  Obtained from environmental sample
  DOMAIN (1)...(191): Serine hydroxymethyltransferase
  misc_feature (1)..(222): Xaa is any amino acid
MGALMMVDMAHIAGLVATGHHPSPVPYADFVTTTTHKTLRGPRGGLVLCKEKYAKDLDKAVFPGVQGGPLMHVIAAKAVALGEALEPSFRDYQDQVVRNAAVLAKSLAAKGWRIVSGGTDNHLMLVDVFANGMLGSEAEKALDKAGITVNKNGIPFDPNPPLKPSGIRLGSPAVTTRGLKEADMERVAAWIDEALRSRDKEDVLKRIYGEVEELTAKHPIPE

SEQ ID NO: 56965 - DNA, 402 bp, Unknown
  Obtained from environmental sample
  misc_feature (1)..(402): n is a, c, g, or t
atgatgaatcttactgttacgccagataagccttatttgcgtacagaaccaagcaatgccgacatctccggcgtaataggtctatcaggcgatataagaggtgcagtagttatggcgtaccctctggatacagttctgaaaataagctccaggtttatgggcgaagaaataaaggaattgaacgcaagcagtcgctcgattgcatatggcgagctagccaacataatcacagggtttgcaaagaaagacttgcaatcattgcacttgtctatatacctgccaagtattgtgcgaggtcaaaaccacgtggttgatatgccaaaagacgcccccgttatgtgtatcccttttgaaagcgaaatgggtggctttataatggaaatcagcatggtggacaaataa

SEQ ID NO: 56966 - protein, 133 aa, Unknown
  Obtained from environmental sample
  misc_feature (1)..(133): Xaa is any amino acid
MMNLTVTPDKPYLRTEPSNADISGVIGLSGDIRGAVVMAYPLDTVLKISSRFMGEEIKELNASSRSIAYGELANIITGFAKKDLQSLHLSIYLPSIVRGQNHVVDMPKDAPVMCIPFESEMGGFIMEISMVDK

SEQ ID NO: 56967 - DNA, 699 bp, Unknown
  Obtained from environmental sample
  misc_feature (1)..(699): n is a, c, g, or t
atgaacattcttgtatgcgatgatatgaaagaagatgcggataggctcgctgccttgattgccctgtctggctttgaggctcaaacggcggttttcacctgccctaggcaagcccttgattattttctctctggcgcaaacatagatgtgtgttttttagatataataatgcctaaaatgaatggaataaagctggcggaaaaattgcgggacaataattttgcaaataatattgtttttctaaccacttccaacgattttgccagccaatcctatcaggttcaagcttttgactatttgctcaaacccttgactggcgaaaaagtgaacaatataatgagcaagctaaaaaaatcttgggaaaacgcggataaagctggattgtccgtagttacgcagggagctgcaaagtttgttctgtttcgcgatatttcccacgttgaagtaataagacatatcgtatatattaagctgctggataaatctataatcaagatgtatgttgcttttggcaaaatagaggagcagctactggcagacagcagatttgcaaagtgccaccgctcgtatatagtgaatataagcgaaataatgacaatgggaaataacgagctaactatgaaaaactgctctaaaattcctatttctaggagttattcacaagtcaaggataaaatagtcaaatggatgttcaaatga

SEQ ID NO: 56968 - protein, 232 aa, Unknown
  Obtained from environmental sample
  DOMAIN (134)...(231): LytTr DNA-binding domain
  misc_feature (1)..(232): Xaa is any amino acid
MNILVCDDMKEDADRLAALIALSGFEAQTAVFTCPRQALDYFLSGANIDVCFLDIIMPKMNGIKLAEKLRDNNFANNIVFLTTSNDFASQSYQVQAFDYLLKPLTGEKVNNIMSKLKKSWENADKAGLSVVTQGAAKFVLFRDISHVEVIRHIVYIKLLDKSIIKMYVAFGKIEEQLLADSRFAKCHRSYIVNISEIMTMGNNELTMKNCSKIPISRSYSQVKDKIVKWMFK

SEQ ID NO: 56969 - DNA, 651 bp, Unknown
  Obtained from environmental sample
  misc_feature (1)..(651): n is a, c, g, or t
atggggaaacgaaaagataaaaaagcgctcattttggacgctatggaaaagattattagcgatggtaatgcggagggttgttctgtagatgagatagccaaagtggctggcatcggcaaaggtagcgtttactattactataggtcaaagagggatattgagatggacctttatttcagaaccttcggtggttttgttgaaggttgccagaacataccggaaaccgaaatgaaggccttggaaaaactaaaagccttgttcaaaacctattacgaccaggctttgggactcagcttagacagttatttgcatctgccgcaaaatatggatatgcatcaaaaagtactcgccttgcttgtggaaagcataacgcctatactttcaaaaatcctgaaacaaggtgttgaggaaggtgctcttgattgcgatgcacccgacgagtttgcaaatatatttgtatgcgtgtttgcttttttgttcgatccgggcattttcactcttaacgtagatgaaactcttaacaagttgagtgcttttgcagaagtgatggaaagggctttgaaggcaaaaaaaggcagtctctcatttatgcgtgatagggattttttgctttcactgaaaaaatcttccatctggtttcagcttgactaa

SEQ ID NO: 56970 - protein, 216 aa, Unknown
  Obtained from environmental sample
  DOMAIN (11)...(57): Bacterial regulatory proteins, tetR family
  misc_feature (1)..(216): Xaa is any amino acid
MGKRKDKKALILDAMEKIISDGNAEGCSVDEIAKVAGIGKGSVYYYYRSKRDIEMDLYFRTFGGFVEGCQNIPETEMKALEKLKALFKTYYDQALGLSLDSYLHLPQNMDMHQKVLALLVESITPILSKILKQGVEEGALDCDAPDEFANIFVCVFAFLFDPGIFTLNVDETLNKLSAFAEVMERALKAKKGSLSFMRDRDFLLSLKKSSIWFQLD

SEQ ID NO: 56971 - DNA, 777 bp, Unknown
  Obtained from environmental sample
  misc_feature (1)..(777): n is a, c, g, or t
atgtcaacttatccggtaatttgcatagtgggacgccctaatgttggcaaatccagcttatttaaccgcattttagggcgtagagccgccgttgtgagcgataaggagggagtcaccagggaccgccattaccaagaggcagagtttcagggcgtgaattttacgctggtggatacaggcggctttatgaccgattttcaagtagatgttttggcagagtctgttagggaacaaatttttaccgcagtgaaagaggcagacttaattctctttatggtggatgtgagagttggaatcacaacattagaccagcaatttgcaaaactcattttgaaaacagaaaaacctgttattttggttgcaaacaaaagcgaagatgcaatagagcgtgcagaaggttgggcgtttttgcaacttggaatgggtgcgccaagaaccataagcgcattaacaggttatgcggttttgagtttattggaagaagttattttgttgcttcctaaaaaagaaaaaacaaaaaaggaattaaacccaatttcatttgcaattttgggcagaccgaatgtgggcaaaagcaccttgctcaacaaactactcggcgaagagcgagttgttgtctctgaaattcccggcacaacaagagattcaatagattgtgaatttaagtacaacggaattagtttcaaagtaacagataccgcacggcttcgcaaaaaagcacgtgtttgcaaaggcacaaagacgaggtggaaatattcagcaatatgcgaacaatag

SEQ ID NO: 56972 - protein, 258 aa, Unknown
  Obtained from environmental sample
  DOMAIN (2)...(170): Elongation factor Tu GTP binding domain
  misc_feature (1)..(258): Xaa is any amino acid
MSTYPVICIVGRPNVGKSSLFNRILGRRAAVVSDKEGVTRDRHYQEAEFQGVNFTLVDTGGFMTDFQVDVLAESVREQIFTAVKEADLILFMVDVRVGITTLDQQFAKLILKTEKPVILVANKSEDAIERAEGWAFLQLGMGAPRTISALTGYAVLSLLEEVILLLPKKEKTKKELNPISFAILGRPNVGKSTLLNKLLGEERVVVSEIPGTTRDSIDCEFKYNGISFKVTDTARLRKKARVCKGTKTRWKYSAICEQ

SEQ ID NO: 56973 - DNA, 675 bp, Unknown
  Obtained from environmental sample
  misc_feature (1)..(675): n is a, c, g, or t
ttgcaaaggcacaaagacgaggtggaaatattcagcaatatgcgaacaatagagagcattcgccgctcggatgttgttgtgctgctgctggatacaaccaggggttttgaaattcaggacttgcgcataataaccgaaattcgcaaagctggcaaaggattgattttggcgattaacaagtgggatattttggaaaacaaggattcaaaaagttttgatttgattgtaaaggaaatcagggaaaaagacccgctctttgaatgggtgcctgttatatccataagcgcgctggaaggcttgcgggtacataggttgcttcaggaaattcaaacggtttatgcgaactgcaagcgcgttataggtagggacagggttgcggaaacctttaaaaccgctatccaaaggaatccccaccactcccggggtgggcattctgtgccactcaaaagggcctgccaaatcttgactaaccccccagtgataaccgttgagactccctacccggacttagtggatgaggcttacaaaagatatttgctaaaaacattttttgaggagtttggcttaaaaggtgcccccctgaggctaaatttcgataaaatcctgcgtttgcggagtgatgaagacttggaaaattatgcaaatcccattttcagcatgaatattggcatttaa

SEQ ID NO: 56974 - protein, 224 aa, Unknown
  Obtained from environmental sample
  misc_feature (1)..(224): Xaa is any amino acid
MQRHKDEVEIFSNMRTIESIRRSDVVVLLLDTTRGFEIQDLRIITEIRKAGKGLILAINKWDILENKDSKSFDLIVKEIREKDPLFEWVPVISISALEGLRVHRLLQEIQTVYANCKRVIGRDRVAETFKTAIQRNPHHSRGGHSVPLKRACQILTNPPVITVETPYPDLVDEAYKRYLLKTFFEEFGLKGAPLRLNFDKILRLRSDEDLENYANPIFSMNIGI

SEQ ID NO: 56975 - DNA, 927 bp, Unknown
  Obtained from environmental sample
  misc_feature (1)..(927): n is a, c, g, or t
atggccgagaattttttgaaagcgttcgcccgcgattggttcgagaactggaagctggacagggtggagaaattttcaaggaaattattgatgcaactagaaaaggatgtgctcccctacatagggcgcatccccgtcgcgaagctgagagccccggacgtcctggcagtttgccgccgcgtagaggcccgtggcgcggtgactgccgcccataagataaacgtgtccgtcagcntgatcatgcggtacgccatcgccaccgggagagctgacagagacccctgccccgaccttcggggagcgctgaagccctccccgtcaaagccattcgccagcctgaccgaccctgagaaagtggccggcctgctgaaagcaatagacggctacagggggacccacgtagtccgctgcgcccttgccttcgcccccctagtgttcgtccggccaaacgagctcaggcatgccaaatgggaggacatagacctggagcgcagggagtgggtcttcgtgtactcaaagcaaaagataagctcccctgtcaagcgcaagctggtcgtgccgctgtctgatcaggcattggccatattgcgggacattcagccgctcactggcgaagggaaatacgtcttcccaggcctccggcacggccagcccctgagccagcccgccctcaacgccgccctccagacgctgggctatgacaccggcagcgaaatgacgctgcatggcttccgcgccatggcccgcaccatcctcgccgagaggcttcatttcgaccctcaatggattgaacggcagctttcgcacaagacctctgagaaccttggggagtcctacgaccgcacccaatttctggaacagcgaaaagcaatgatgcaggcttgggctgactatttggacaaactgaaaagaggggagatcaagtag

SEQ ID NO: 56976 - protein, 308 aa, Unknown
  Obtained from environmental sample
  DOMAIN (122)...(289): Phage integrase family
  misc_feature (1)..(308): Xaa is any amino acid
MAENFLKAFARDWFENWKLDRVEKFSRKLLMQLEKDVLPYIGRIPVAKLRAPDVLAVCRRVEARGAVTAAHKINVSVSXIMRYAIATGRADRDPCPDLRGALKPSPSKPFASLTDPEKVAGLLKAIDGYRGTHVVRCALAFAPLVFVRPNELRHAKWEDIDLERREWVFVYSKQKISSPVKRKLVVPLSDQALAILRDIQPLTGEGKYVFPGLRHGQPLSQPALNAALQTLGYDTGSEMTLHGFRAMARTILAERLHFDPQWIERQLSHKTSENLGESYDRTQFLEQRKAMMQAWADYLDKLKRGEIK

SEQ ID NO: 56977 - DNA, 906 bp, Unknown
  Obtained from environmental sample
  misc_feature (1)..(906): n is a, c, g, or t
atgtgccgatccgtccatgggncgccaatggatatgagattcataaaaataaagaggcgcaacatgcaatgtgttaaatgtaataccaataaccgcagttccgcaaagttttgtaaatattgcggtaccaagataaccagcccggaaactacagtcagtcttggtctttctctcggtttttctattgaacaacttgtagggcttgatgaaataaaaaaagatttatccgaattgcaggcaatccttgaagggatgaaacagagcaataaaggcacccgttacccttacgacacaatcataatcggtgcctccggtaccgcaaagacgctcatctctaatctcattgctgatctgttttttaaattcggcatgatcacaaaaggcaaaccggaaaaagcggacggcgcgagtctcaacggaatgtccaaaaaagatattgacaatcttttttcaaaagcaaaaggcgggatgttatttgttgacaatgcccaaaaacttctggattccgaaggcaaggcagtgccggctttttcccattttattgacgcgatggacgcaaacaaggacgaccctgtcgtgcttatggcgggccttcccgtcggcctgcgggaaatggtaaaaagcccagaatcggcaaacaagcaaatagtcaaccgttttgaaaagatttttattatccccgattacacgccggaccagtatgcaaaaatcacagagaacgaattgaaaaaacaaagctttacattcaattccgaattttcagaaaaactcctccagcggttccgctacctttacaaggaactcaagaagcccgacaacaacattaaatccgtaaacggctatcttgccattaaagaagctcaggcaataaaaaggctgttactacctgagaaaagcttccgataa

SEQ ID NO: 56978 - protein, 301 aa, Unknown
  Obtained from environmental sample
  misc_feature (1)..(301): Xaa is any amino acid
MCRSVHGXPMDMRFIKIKRRNMQCVKCNTNNRSSAKFCKYCGTKITSPETTVSLGLSLGFSIEQLVGLDEIKKDLSELQAILEGMKQSNKGTRYPYDTIIIGASGTAKTLISNLIADLFFKFGMITKGKPEKADGASLNGMSKKDIDNLFSKAKGGMLFVDNAQKLLDSEGKAVPAFSHFIDAMDANKDDPVVLMAGLPVGLREMVKSPESANKQIVNRFEKIFIIPDYTPDQYAKITENELKKQSFTFNSEFSEKLLQRFRYLYKELKKPDNNIKSVNGYLAIKEAQAIKRLLLPEKSFR

SEQ ID NO: 56979 - DNA, 894 bp, Unknown
  Obtained from environmental sample
  misc_feature (1)..(894): n is a, c, g, or t
atggccgagatcgacccttgccctgtgccccactgcaacgccgaagtgccggaagaagccttttattgcccgggttgcggccttcctataaaacagcgtgtctgtccaaaatgtggcgctcctacctctccaactgctgatatttgccagacttgcggggcatggcttttggagggtaaatgcaaattctgttatgccaacctttcttctgatgacgcgctgttctgccccgaatgcggcaagcccaaagacggtatcccctgtcctcattgcggcacattaagcatatttgatttttgttcaaaatgcggaaagccggtcaccgaagaagccattgcggagctaaaacacgctcaggaagaaatggcaagcaaaatatcgtctaccgcgccggaaacgtccgctgcacaagcagcgggaaagaaaacatttaattcaaatcaggatgccagacgctggtataacgcgcaggctgccgcgcagacagccggaatcgagacagaacttgcccaactggaagcgcttatcaacagtaagtcggaaccggaagaaccgaaacaaatagaagatgaagcgtcccctcccgcaagaaaatcccttttctcagacaggcaaatggagtctatcaggaaaacaggcgcggtggtggagcaaattacccggcagcgacttgaagcggaaaggatcgcggaagaaaaaagaaaagcggaagaagccgagagaaaacggaaagaagaggagcgccagagacaaataaaagaagcgcaggaacgtaaagaagcgcttgagagacaactccgcgcacgagcctggctctgcaatgcttatggcgttgtacatcccggcggcccctatgaatgtgccgatccgtccatgggncgccaatggatatga

SEQ ID NO: 56980 - protein, 297 aa, Unknown
  Obtained from environmental sample
  misc_feature (1)..(297): Xaa is any amino acid
MAEIDPCPVPHCNAEVPEEAFYCPGCGLPIKQRVCPKCGAPTSPTADICQTCGAWLLEGKCKFCYANLSSDDALFCPECGKPKDGIPCPHCGTLSIFDFCSKCGKPVTEEAIAELKHAQEEMASKISSTAPETSAAQAAGKKTFNSNQDARRWYNAQAAAQTAGIETELAQLEALINSKSEPEEPKQIEDEASPPARKSLFSDRQMESIRKTGAVVEQITRQRLEAERIAEEKRKAEEAERKRKEEERQRQIKEAQERKEALERQLRARAWLCNAYGVVHPGGPYECADPSMGRQWI

SEQ ID NO: 56981 - DNA, 459 bp, Unknown
  Obtained from environmental sample
  misc_feature (1)..(459): n is a, c, g, or t
atgaagatgaaattaacggcggcaatcattgccgcttttgtaataataatgggttgtgccggaggtcccaaggcttccaaagctgacgaacttgatctggcaattagggacacatcggactatctcaatgacaatatcccaaaagggaacaaaataataatattgaacatacaatccgactacgcttcgctatctgattatattattgatgaactgatagcgaatgcggtcaacgacaaaatatttaaagtggtagacagggcacaattggaacaaatccgcgctgagttaaattttcaatggtcaggcgaagtggacgacaaatccgcccttgaaatcggcaaattcctcggagcgcaaaccatcgtaacaggagcgataagccaactagccgaccgccaccgcatgagaatccgcgccctcaatgtaaaaaccgttcgaagtgcagggacagtataa

SEQ ID NO: 56982 - protein, 152 aa, Unknown
  Obtained from environmental sample
  SIGNAL (1)...(27)
  misc_feature (1)..(152): Xaa is any amino acid
MKMKLTAAIIAAFVIIMGCAGGPKASKADELDLAIRDTSDYLNDNIPKGNKIIILNIQSDYASLSDYIIDELIANAVNDKIFKVVDRAQLEQIRAELNFQWSGEVDDKSALEIGKFLGAQTIVTGAISQLADRHRMRIRALNVKTVRSAGTV

SEQ ID NO: 56983 - DNA, 1575 bp, Unknown
  Obtained from environmental sample
  misc_feature (1)..(1575): n is a, c, g, or t
atgataaaaaagaaattaaaatataccgtaaaatttgtttttagaagaagggtttttgtcatcatgtcccttctggcgcagattctcctgtttatttcccttgtagccggaaccggtatatatgtaaaattttcttactggattctttccgttctgagcattattgtcagtattaatataattaataagtatgaaaaagccggctttaaactgacatggatatttatatttttactgtttcctctttttgggggaatcctttatataatgttaaatatctggtcaaaccctagaaaaataagaaaatcactttttggaaacatcgcaaaaagccatgtagctttttatcttacgggaaaccgtcttaatgagcttattgacatttatcctgattttaaaacacaggcccattatttgcaggaatacgccggtttcccagtatacggaaatacaaggcaggaatattttccatccggcgaatctttttttaacagggtgcttgaagaccttgaaaaagcgcaagaatatattttcttggaattttttattttaaaagaagggcaaatgttcaattccatattgaatattctggaaagaaaagcggctgcgggtcttgatgtgcgcataatgtacgatgacatgggttgttttttcacactgccgcccgattttccaaaaacgctaaagcgaaaaggaattaaatgttttgtttttaaccgtttcaggccgattgtttcttcattgcagaataaccgcgaccaccgcaaaattatttcgattgacggcaaaatagcttttacgggcggacttaatttggcggacgagtacattaacgcggttgaacgcttcggccactggaaagacgccgcgataaaaattgaaggggacgccgcatggtctttaacgttaatctttttacaaatgtggaaccttggttttagggaaaaagatgattatgcgtctttttttccgtggaaagacaatattatcgagcatacggaaacgggagtgtctgaaggctttgaagcgtggggttatgtgcaaccgtatgccgacagcccgattgacaaagaaaacgttggggagcacgtatacattcaaataattaatcaggctaaaaagtacgtttacattaacaccccctacctgattgtggacgacaaccttctttccgcgttaattcttgcggcgaaaagcggcgttgacatccgcataatgactccccaccgctgggacaaacggattgtggcgattgcatcgcgctcgtattaccgaaggctgattcaggcgggagtcagagtttacgagtacacaagcgggtttaatcacggtaagacatttgtctgtgacgacatgatagcgacagtaggcacgacaaatctggacttcaggagcctttaccttcactttgaatgcggcgtgctaatttatgcaagcgaaacagtagccgcggtcaaacaagactttttaaacaccctgccctactcacaggaaataaccctaaaagaatgcgccgacaaaaaatttaaaagcattatttcagacattttacgcatattcgcgccattattataa

SEQ ID NO: 56984 - protein, 524 aa, Unknown
  Obtained from environmental sample
  SIGNAL (1)...(26)
  DOMAIN (438)...(465): Phospholipase D Active site motif
  misc_feature (1)..(524): Xaa is any amino acid
MIKKKLKYTVKFVFRRRVFVIMSLLAQILLFISLVAGTGIYVKFSYWILSVLSIIVSINIINKYEKAGFKLTWIFIFLLFPLFGGILYIMLNIWSNPRKIRKSLFGNIAKSHVAFYLTGNRLNELIDIYPDFKTQAHYLQEYAGFPVYGNTRQEYFPSGESFFNRVLEDLEKAQEYIFLEFFILKEGQMFNSILNILERKAAAGLDVRIMYDDMGCFFTLPPDFPKTLKRKGIKCFVFNRFRPIVSSLQNNRDHRKIISIDGKIAFTGGLNLADEYINAVERFGHWKDAAIKIEGDAAWSLTLIFLQMWNLGFREKDDYASFFPWKDNIIEHTETGVSEGFEAWGYVQPYADSPIDKENVGEHVYIQIINQAKKYVYINTPYLIVDDNLLSALILAAKSGVDIRIMTPHRWDKRIVAIASRSYYRRLIQAGVRVYEYTSGFNHGKTFVCDDMIATVGTTNLDFRSLYLHFECGVLIYASETVAAVKQDFLNTLPYSQEITLKECADKKFKSIISDILRIFAPLL

SEQ ID NO: 56985 - DNA, 750 bp, Unknown
  Obtained from environmental sample
  misc_feature (1)..(750): n is a, c, g, or t
atgatcgatgtcggcagtgccaagggaaccataagggccggggaaaaagaaatactccataacgtttttgagtttgacaataaaaccgccggagaggtaatgacccatcgccgcgatacggttctgctcaaacttgaagacagcgacgaagaatgggaaaaaacaatcctcgaaaaccgtcataacttttttcctgtgtgcggcaaaaaccaggacgacatagctggagttttggtattcagggattatctttgcctaagcgaccgccgccgcgaaaccgtcatggctcaggctgtcaggccagcccagtttgtccccatcacagtaagaacccacacgcttttcgcacggatgaaaaaaagccgaaaccattttgcggtggtcgtggatgaacacggcagcctcatgggaattgttaccatgaaagaccttttggaagaactggtaggcaaccttgacgatgacagcacaacccagccggaacatcccctcattgaaaaaacaggccccggagaatggactttaagcggcgcagtttctctggacaaagctgccagcgaactggaagtaactcttccggtggaacgctacgatactttcgctggttttgttttcagccttctgggacagatccccgaagacgggagtcaggcggtacttgaaacgcacggactaaaaattgaacttcgggagattcgcgaacacaggctggaaaaagccctggttaccaagattgaggatatcgcataa

SEQ ID NO: 56986 - protein, 249 aa, Unknown
  Obtained from environmental sample
  DOMAIN (166)...(246): Transporter associated domain
  misc_feature (1)..(249): Xaa is any amino acid
MIDVGSAKGTIRAGEKEILHNVFEFDNKTAGEVMTHRRDTVLLKLEDSDEEWEKTILENRHNFFPVCGKNQDDIAGVLVFRDYLCLSDRRRETVMAQAVRPAQFVPITVRTHTLFARMKKSRNHFAVVVDEHGSLMGIVTMKDLLEELVGNLDDDSTTQPEHPLIEKTGPGEWTLSGAVSLDKAASELEVTLPVERYDTFAGFVFSLLGQIPEDGSQAVLETHGLKIELREIREHRLEKALVTKIEDIA

SEQ ID NO: 56987 - DNA, 1116 bp, Unknown
  Obtained from environmental sample
  misc_feature (1)..(1116): n is a, c, g, or t
gtgactataatttttaggcacattacagccttaaaacttgatttaggatatatttatgatcaattcnagcgaaggtactttttattcatactggatacaaatgccgcttttaatatatttgatcttaaatggactttaaattttaaaaatgaatttcaatatcgtccggatttagaaagagttttttattacggaaatacaacaggtttatccgttaatctgcctgtaaaatccactacgctcttaattggccttaacgaatcgttttatgtaaatcttgaaaacgaagacaaatacaaacctttatacggagatacccaagaaggtttttttatctcaagcaatccgtatatagtatggggaatacctacaggcattgaaatcggaaatttaggagaactttactttactccgtatataagttttatttataatcttgaattttcaagatggccccttgatgacataaggaaatatcccgaagtatttttcggatattcagccggagttgataatataaactggataaataattttagaaaaggaacaggaagttttatatcaaacggttatgaatacagttttcgcaataaaaaatatgatttacgggcaatggacatcaggattgcctttacggcaataaatcattttatcattaaaaaagatctattcggtttttcgttccgttttaagtttcgccactggttttattcttatatttatgaagaagcgggcgatgtattgcgaggcattgatgatgacggacttttcgccaattccatgatttcgctaaaccttgattttcctttaaaagttttaaagttcagaccctctgaatggtataacgatgaaaaattaaaaattattgactttgaccttcatttggctccaatcattgacattgccttttttaatcatcctgaaaatcaaattataaacaagaaaaacatccttgttacaggcggcattgaagcgttgattttcccccgtaaattccgcgcttttaatatgcgcgcttcttttggatataatttttcagaagttatttttaaaaactacatacctgcctcattaagcaagtatgaaatatatatcggcactgaacttttttattag

SEQ ID NO: 56988 - protein, 371 aa, Unknown
  Obtained from environmental sample
  misc_feature (1)..(371): Xaa is any amino acid
MTIIFRHITALKLDLGYIYDQFXRRYFLFILDTNAAFNIFDLKWTLNFKNEFQYRPDLERVFYYGNTTGLSVNLPVKSTTLLIGLNESFYVNLENEDKYKPLYGDTQEGFFISSNPYIVWGIPTGIEIGNLGELYFTPYISFIYNLEFSRWPLDDIRKYPEVFFGYSAGVDNINWINNFRKGTGSFISNGYEYSFRNKKYDLRAMDIRIAFTAINHFIIKKDLFGFSFRFKFRHWFYSYIYEEAGDVLRGIDDDGLFANSMISLNLDFPLKVLKFRPSEWYNDEKLKIIDFDLHLAPIIDIAFFNHPENQIINKKNILVTGGIEALIFPRKFRAFNMRASFGYNFSEVIFKNYIPASLSKYEIYIGTELFY

SEQ ID NO: 56989 - DNA, 822 bp, Unknown
  Obtained from environmental sample
  misc_feature (1)..(822): n is a, c, g, or t
gtgatggaatttatcggagacggagtcgataaattaccaatagatttccgcaacggaattgacgtaatgacaaccgagaccgcctgctggtcttcaatttggaaaaccgacgacaatgtaaaaacatatcttaaagagcggggcaggggaggcgattacaaggagctaacgcccgccgccgtcgcctactatgacggatttatcaagattgatttatcaaaaatagagccgtgtatcgctctgcctttccatccaagcaacgtatacacaattaaagaactgcaaaaaaacgcaaaagatatttttgcgaaaattgaaaaagaaaataaagagacgggtcttaacctgaaccttggcgttaaataccatgacggcggaatatgggcggatcaggcgataattgccggttgttcaggcgggattttttccaacataatggcggcggcggatatactgaaaggacactcaacaggaaacggcaatttttccctgagtgtgtatcccgaaagccagcctacttatcttgagttggtaaaaaacggcactgttgaaatatttatgaaagcgggcgttcttgtgcgggaagcattttgcggaccgtgtttcggcgcgggagatacgcccgccaataacgagctttctatccgccatgttactcgcaatttccctaaccgtgaagggtcaaagcctaatgacggacagattgcctctgtcgcgcttatggacgctcgttcaatagccgcaactgcggttaacggcggaaaaataacctccgctgcggagttaaatgttaaatacgcgcagatacaagttttactttga

SEQ ID NO: 56990 - protein, 273 aa, Unknown
  Obtained from environmental sample
  misc_feature (1)..(273): Xaa is any amino acid
MMEFIGDGVDKLPIDFRNGIDVMTTETACWSSIWKTDDNVKTYLKERGRGGDYKELTPAAVAYYDGFIKIDLSKIEPCIALPFHPSNVYTIKELQKNAKDIFAKIEKENKETGLNLNLGVKYHDGGIWADQAIIAGCSGGIFSNIMAAADILKGHSTGNGNFSLSVYPESQPTYLELVKNGTVEIFMKAGVLVREAFCGPCFGAGDTPANNELSIRHVTRNFPNREGSKPNDGQIASVALMDARSIAATAVNGGKITSAAELNVKYAQIQVLL

SEQ ID NO: 56991 - DNA, 759 bp, Unknown
  Obtained from environmental sample
  misc_feature (1)..(759): n is a, c, g, or t
atgcccgaaactgaacttgtttttggtcccaatataaaagactggcctaaaataccggctcttcacatgcatttgcttgttaaaatcgtcagctttattactgattctgtaacaacaactgacgaactcattccgtccggtgaaacatcgtcgtaccgttcaaatccgctaaaacttgctgagtttacgttaagccgcaaagacccggattatgtgaaacgggcaaaagaagtacttacgcttgaagaacaaagaagcgcgggaaaaacagtcggtgaaacagatgcggtatttaaaaaagtacagagtatttcaggctgcgagggaatagaacaagccgctgtaggaataggaagcgcaatctttgcccgcaagcccggagacggctcagcgcgggagcaggcagcttcatgtcagcgcgtacttggcgcatcggcgaattttgcgcttgaatacgctacaaaacgataccgctctaatcttataaactggggggttttgcccttccttgttacggacgaaaagaaacttgccaacggggattatattttctttgcaaatattaaaaaggctgtgcttgaaaaagctgaaaaaataacaggttttgtaataggagaaaagattatggaaattcccgtaactttgggagagcttacggataccgagagacagatacttgttgacggctgcctgattaattattacgcagcagtaatgaaacaagcgcaagaaaccgttaaggacagtaaaaacacatga

SEQ ID NO: 56992 - protein, 252 aa, Unknown
  Obtained from environmental sample
  misc_feature (1)..(252): Xaa is any amino acid
MPETELVFGPNIKDWPKIPALHMHLLVKIVSFITDSVTTTDELIPSGETSSYRSNPLKLAEFTLSRKDPDYVKRAKEVLTLEEQRSAGKTVGETDAVFKKVQSISGCEGIEQAAVGIGSAIFARKPGDGSAREQAASCQRVLGASANFALEYATKRYRSNLINWGVLPFLVTDEKKLANGDYIFFANIKKAVLEKAEKITGFVIGEKIMEIPVTLGELTDTERQILVDGCLINYYAAVMKQAQETVKDSKNT

SEQ ID NO: 56993 - DNA, 1413 bp, Unknown
  Obtained from environmental sample
  misc_feature (1)..(1413): n is a, c, g, or t
atgacgagactcaagcttcagcgcctttctgcgggacattcttgtgagcctgccaagcgcaaaaaaaccatcgtctttttcgcggttttggttatcgcctnttcggtatacggactttcaaaactgattatcgacaacattatggttgaatacttcagaacggatacagacatttaccgctccgatgaatttatcaggcggcagttcggcggttcaaaagtggtaagcgtagtcgccaagacagacagttacgaaaaaactttaaggccggacaccctcgccgccatggatgggatttcagattatttgcaaaagaaagttccgggagtaggcaaggtaatgggttttaccgatttggtcaaacgtatcaatcaagtctttaatgcggaggaaagccccgacggtttgcgcgtaacaacgtcaaacgcttccggtggatttggcgatttcggcttcggcggcttcggttttggctttgacgattctcccccaactgcggctaaacaaagcgatagttccaaggaaaataaagacggtaaaaaaatatacacgcaaagcgagatgattgaactctttgaacgcgccggaagccgtttccgcggcatgaacgccaacgagcttatctgggaattaaagaggcaggtaaattacgaaggcgcttcttattacgagattcccattaacccaaaacgttacggcaaggaaacaccggaagaattacagcggctaatatcaaattatctggttctcttatccggtaatatcagcagttacgcaaatgatccgctggaaccgacagccgttaagtcgacagtgcagcttcgtacgcttggaatgaaagacagttatgaaattttccgtgagatagaacaatacattgcggcaaactttccgccggacgttacagttacaatcggcggcactacaatggtagaaaactcgttaaacgacctcgtagttcagtcgcagattatttcgatagtattttccgttatatgcgtctttataattcttgccgtttcaaataaatccctgattgcgggattaatcggaatgactcctctttcaatttcaatactgctcaatttcgcgattatgggctttgcgggaataaaactcaatctcggcacgtcaatggtcggcgcggtttcagtctgtaccggaattgactatacaattcactttattgaatcttacaaacatgaatatcatgcgaacaacgggcaagacggcttcctgcagcatgtgtttctggtttccggcaaggcaataataattaacgcagtttcagtcggagccggttttgcggtactgcttttgtccaaatttgtcatgctcagcgattttggaataagggtcccctttacaatgttatcaagcgccctttacattagggggcttcccgcattatag

SEQ ID NO: 56994 - protein, 470 aa, Unknown
  Obtained from environmental sample
  misc_feature (1)..(470): Xaa is any amino acid
MTRLKLQRLSAGHSCEPAKRKKTIVFFAVLVIAXSVYGLSKLIIDNIMVEYFRTDTDIYRSDEFIRRQFGGSKVVSVVAKTDSYEKTLRPDTLAAMDGISDYLQKKVPGVGKVMGFTDLVKRINQVFNAEESPDGLRVTTSNASGGFGDFGFGGFGFGFDDSPPTAAKQSDSSKENKDGKKIYTQSEMIELFERAGSRFRGMNANELIWELKRQVNYEGASYYEIPINPKRYGKETPEELQRLISNYLVLLSGNISSYANDPLEPTAVKSTVQLRTLGMKDSYEIFREIEQYIAANFPPDVTVTIGGTTMVENSLNDLVVQSQIISIVFSVICVFIILAVSNKSLIAGLIGMTPLSISILLNFAIMGFAGIKLNLGTSMVGAVSVCTGIDYTIHFIESYKHEYHANNGQDGFLQHVFLVSGKAIIINAVSVGAGFAVLLLSKFVMLSDFGIRVPFTMLSSALYIRGLPAL

SEQ ID NO: 56995 - DNA, 1044 bp, Unknown
  Obtained from environmental sample
  misc_feature (1)..(1044): n is a, c, g, or t
atgaaagaattgatatctaagttggaaacttttcaaattcttgagcgagaagagtttaaaaaagttttgcaatgcgatgatgattatctttttgaacgtgccagaaacgtagctcaaaaagtttatggcaaaaatgtttttatgcgcggacttattgaatttacctcttattgtaaaaacaactgctattattgcggactcagagctggaaacaaagaggcagagagatacaggctttcaaaggagcaaattttggaatgttgcaaaactggttatccactcggctttcgcacttttgtattgcaaggcggagaagatgctcattacacagacgagattttagttgatattgtaagcgaaataaaagcggcatacctagattgcgcagttacgctttcaattggagagcgcaattatgagagctatgaacgattgttcaaagctggtgcagataggtatttgctacgccacgaaaccgcaaacgatgaacattacaaaaccttgcacccggatgcaatgtcgtgggcaaacagaaaaaaatgtttgcacgatttaaaaaaaattggttaccaagtgggttgcggttttatggttggctcgccaaaccaaacattggaatatattgtggatgatttgttattcatcaaagaattgcaacctcagatggtgggcataggaccttttatcccccactccaacacgccaatgggagacaaaaatgccggcgatgtacgcctcactctgaacatcctggcagtacttcgccttatgcagccaaatttgcttattcccgccacaacagcactcggaacgcttaatgctcgtggaagagaacaagggattctcgctggagcaaatgttattatgccaaatctctcccctgtggaagtgcgcaaaaaatatatgctctacgacaataaaatttgcaccggagaagaagccgccgaatgtgtgaattgcatgcgaaaccgcattaagcaaattggctatgaaattgcggtttctagaggggattactccacagtgacatacaccaatgtttga

SEQ ID NO: 56996 - protein, 347 aa, Unknown
  Obtained from environmental sample
  DOMAIN (52)...(215): Radical SAM superfamily
  misc_feature (1)..(347): Xaa is any amino acid
MKELISKLETFQILEREEFKKVLQCDDDYLFERARNVAQKVYGKNVFMRGLIEFTSYCKNNCYYCGLRAGNKEAERYRLSKEQILECCKTGYPLGFRTFVLQGGEDAHYTDEILVDIVSEIKAAYLDCAVTLSIGERNYESYERLFKAGADRYLLRHETANDEHYKTLHPDAMSWANRKKCLHDLKKIGYQVGCGFMVGSPNQTLEYIVDDLLFIKELQPQMVGIGPFIPHSNTPMGDKNAGDVRLTLNILAVLRLMQPNLLIPATTALGTLNARGREQGILAGANVIMPNLSPVEVRKKYMLYDNKICTGEEAAECVNCMRNRIKQIGYEIAVSRGDYSTVTYTNV

SEQ ID NO: 56997 - DNA, 477 bp, Unknown
  Obtained from environmental sample
  misc_feature (1)..(477): n is a, c, g, or t
atgtcgggcataataaacatattctcccaagacagatcttcaccgctaatcacttttgtagaagaaggtgtttctatctcaaagtgttttatagacggaaaagaaaccgtatttgcagactacatagcgcaaaacaagatagatacaaaacttcctttagttggggattatgctggcaatggcgttaatatttcttttaggtctattgaaaacggagttgtgaacttatacgcacctgtgtttaaaaacattaaatacagaattgcaaagagcattgaaaattacgaaaatgaattcaatagcaaactctctcctttcaaagggaaaaatactgtgttttcttgtaattgcatattgaatttcctatatggcaatcttgaaggcaaacacttggatacattttttggtccaatcacttttggagaaatagcctatcaattggtgaatcaaacattggtgtatgtcactgtggagtaa

SEQ ID NO: 56998 - protein, 158 aa, Unknown
  Obtained from environmental sample
  misc_feature (1)..(158): Xaa is any amino acid
MSGIINIFSQDRSSPLITFVEEGVSISKCFIDGKETVFADYIAQNKIDTKLPLVGDYAGNGVNISFRSIENGVVNLYAPVFKNIKYRIAKSIENYENEFNSKLSPFKGKNTVFSCNCILNFLYGNLEGKHLDTFFGPITFGEIAYQLVNQTLVYVTVE

SEQ ID NO: 56999 - DNA, 576 bp, Unknown
  Obtained from environmental sample
  misc_feature (1)..(576): n is a, c, g, or t
atgactgagcgattgatcaaagccgtagtcgttgacgatgaggacttggctagggccgtcgtcatagagcatctggctagccacaaagacattgaattggcggcgcagtgcagcaacggcttcgaggcggtcaaggccgtcaacgaattgaaacctgggattttattcttggacatccaaatgccaaagctggacggcttcgaggtgttggaactgctggacacaatgcccgtggtcatttttgtcaccgcgtacgaccagcacgcgcttaaggcttttgaagtccacgcggttgactacctactgaaaccattcagccacgagcgcttcgatgaagccatcgagcgggcaaaggcgcggctgagccaggggcgggctgacaagggctctggccgccgatctggtgaacacggcaaagggcgactggccactggatcggatagcggtcaaggacggccccaaaattaccttggttccccttgccgacctagactacatacaggcgcaggacgactacgtgcttctcaagacggccgaaaaggggcacctcaagcagcagaccatcagcagccttga

SEQ ID NO: 57000 - protein, 191 aa, Unknown
  Obtained from environmental sample
  DOMAIN (6)...(115): Response regulator receiver domain
  misc_feature (1)..(191): Xaa is any amino acid
MTERLIKAVVVDDEDLARAVVIEHLASHKDIELAAQCSNGFEAVKAVNELKPGILFLDIQMPKLDGFEVLELLDTMPVVIFVTAYDQHALKAFEVHAVDYLLKPFSHERFDEAIERAKARLSQGRADKGSGRRSGEHGKGRLATGSDSGQGRPQNYLGSPCRPRLHTGAGRLRASQDGRKGAPQAADHQQP

SEQ ID NO: 57001 - DNA, 357 bp, Unknown
  Obtained from environmental sample
  misc_feature (1)..(357): n is a, c, g, or t
gtgaacacggcaaagggcgactggccactggatcggatagcggtcaaggacggccccaaaattaccttggttccccttgccgacctagactacatacaggcgcaggacgactacgtgcttctcaagacggccgaaaaggggcacctcaagcagcagaccatcagcagccttgagcagcgcttggatccggggcacttcctgcgcatccacaggtcgttcatcatccaacttgaccgcctgacccgccttgagcagacggagacggatagctgggtggcggtcttgcagaacggggcgaggctgccggtcagcaagtccggctacgcgaggctgaaggaagtgatggggaagggctga

SEQ ID NO: 57002 - protein, 118 aa, Unknown
  Obtained from environmental sample
  DOMAIN (19)...(116): LytTr DNA-binding domain
  misc_feature (1)..(118): Xaa is any amino acid
MNTAKGDWPLDRIAVKDGPKITLVPLADLDYIQAQDDYVLLKTAEKGHLKQQTISSLEQRLDPGHFLRIHRSFIIQLDRLTRLEQTETDSWVAVLQNGARLPVSKSGYARLKEVMGKG

SEQ ID NO: 57003 - DNA, 435 bp, Unknown
  Obtained from environmental sample
  misc_feature (1)..(435): n is a, c, g, or t
atgaactcttattttgattcttcgctgttgctcgcgatattgtttgacgaaaaacgttttgacgatgcttggaatgcctggaattccagcgaagcgagagttagttccatcattctcaaaatagaaacgaatatttctttgcagcgatactataaaactaatgcacattactttgatgacacttggcttaacaaaaaagaaaaacttctcaatgatttgctgaatgatgttttttataagcctatagaagagccattcggaaattctattgctaaaaacaaaaaacttgcaggttgcaaaagccttgatgccattcatattgccaccgctctttattttagggaaacttctagggaacaaaacattattttctgctcctttgacaaaaatatgctcaaaatcgcaaaagaatttgggtttgaaacattctggtaa

SEQ ID NO: 57004 - protein, 144 aa, Unknown
  Obtained from environmental sample
  misc_feature (1)..(144): Xaa is any amino acid
MNSYFDSSLLLAILFDEKRFDDAWNAWNSSEARVSSIILKIETNISLQRYYKTNAHYFDDTWLNKKEKLLNDLLNDVFYKPIEEPFGNSIAKNKKLAGCKSLDAIHIATALYFRETSREQNIIFCSFDKNMLKIAKEFGFETFW

SEQ ID NO: 57005 - DNA, 321 bp, Unknown
  Obtained from environmental sample
  misc_feature (1)..(321): n is a, c, g, or t
ttggttgccgccgctttggttttggatttgctctcaaggcacaatataaaagtttccagttggattaaaagccatcctgcttatgcaatgctcaaaaagaaatttgaaataaagaatcctgtgtctgaggctatggaaaaggcagaaaaagcctttgcaggctggaaagcagacaagcgagacggcttgtggcttggcaaggaaaaaagctttgtgcatttgagagcctccaacacagaacctgtgattaggataatagccgaagcccctacagcaagtgaagctgaaatgctgtgcaggaaaatagaggagttattgtag

SEQ ID NO: 57006 - protein, 106 aa, Unknown
  Obtained from environmental sample
  DOMAIN (36)...(104): Phosphoglucomutase/phosphomannomutase, C-terminal domain
  misc_feature (1)..(106): Xaa is any amino acid
MVAAALVLDLLSRHNIKVSSWIKSHPAYAMLKKKFEIKNPVSEAMEKAEKAFAGWKADKRDGLWLGKEKSFVHLRASNTEPVIRIIAEAPTASEAEMLCRKIEELL

SEQ ID NO: 57007 - DNA, 864 bp, Unknown
  Obtained from environmental sample
  misc_feature (1)..(864): n is a, c, g, or t
atgaggactcaacccttatggagactgcttgcctcagacaacggccccattgtcattggtttgttgcaatcgcatctctatgagaacgagcgaagcttgcccgcgtcaatcctgcatgagcggattggacgcgaactggaagcgctcagagcgcagggagaagacttgcctcaaaccgcccaagcctatatcgccgggtggctggcggaaggttatctcgaaaggcgtttccccgcaggagccacagaagaagaatacgagctttccaccgctactgtcgaagcgatccgcttcctgtccagcctggagcagccccactcggccgccacggaaagccgtctggccatggttatacaggcgctggtaaagcttgccgaggataccgatacggacaaagttcggaggattgagcggctaaaggctgagcaggcgcgtatagaaaaagaaattgaagctattcaaagcggccgtatgcgggtaatcccccacccctcagcgctggaacaggcgcgggaaattatttcgctggtggatgagctgaccggagattttcgccgcgttcgggatcagttcgaccaactgaatcgggaactgagagaacagctcatggacaacgaaggcagccgcggagaggtactggactccgtgttcgcgggcatagatcagatttccgaaagcgatgccggtaaaacattcacggccttttggcgtttgctgaccgatcctgagcagtcggcggtacttgaacaagcgctggaaaatgttatgtcccgcgagtttgtcgatcagctggaattaaaggacaggcgctttctaagacgtatgacaggcaatctgcttgaacaagngcgggatagttcataa

SEQ ID NO: 57008 - protein, 287 aa, Unknown
  Obtained from environmental sample
  misc_feature (1)..(287): Xaa is any amino acid
MRTQPLWRLLASDNGPIVIGLLQSHLYENERSLPASILHERIGRELEALRAQGEDLPQTAQAYIAGWLAEGYLERRFPAGATEEEYELSTATVEAIRFLSSLEQPHSAATESRLAMVIQALVKLAEDTDTDKVRRIERLKAEQARIEKEIEAIQSGRMRVIPHPSALEQAREIISLVDELTGDFRRVRDQFDQLNRELREQLMDNEGSRGEVLDSVFAGIDQISESDAGKTFTAFWRLLTDPEQSAVLEQALENVMSREFVDQLELKDRRFLRRMTGNLLEQXRDSS

SEQ ID NO: 57009 - DNA, 942 bp, Unknown
  Obtained from environmental sample
  misc_feature (1)..(942): n is a, c, g, or t
gtgcttgattcggcggacaatgcgtactacgccgtactggaggctatggctacattggaagcggaggagtcctcgctgcaaacggcgcttacaagcctttctattgccgaggtacgacaggcaagcgggatgatcaaccagggagattacctcaaggcaatggcggacaaacagtcgcgggaaaactcccgtaatcaggcgagacgaaaccttacccttagcatgatgaaactcaaggctattaccggattgagcgatcttccgggggtgcagcaaatcgatttttcagggtatgaggatcttatttcgcgtcttggaaacatttccgacaaggaagcggattcactgtatggcgaattatggaaaaccattgtttcttcaaatccttcgcttactaaatccgctcttgccaatcaaaaggcagagagcaaccttagtatggctcaacgcgattatttgccaagtctgagcgcttcattatcggcaggccttaattattcactaaaaaacggaatggaactatcgggaggaaagctatcgataaatttaagcatcccggttgaatattggaaaatagcaaacaacgttgaacaaaagaaaaatgcccgtgattcagcggctttggattacattggcgcggaaatcaacctggggaccgagctgcaaagcactctgataaacgtgttaacttacgccggctcggttatacactccggcctttccctcgcgtatgccgaaaggcattctgattatgttatggaacgctacaagctttcgcaaagttccatcagcgatcttaacgaagcttcgaccctgctcataaacagccgcaacaccctcatcaaagcccgttacgggtttcttcaaagcctctcaaaacttcgttcccttggggcattctcggaagaggacaaattaattcaaattttgatgggaaattaa

SEQ ID NO: 57010 - protein, 313 aa, Unknown
  Obtained from environmental sample
  DOMAIN (117)...(298): Outer membrane efflux protein
  misc_feature (1)..(313): Xaa is any amino acid
MLDSADNAYYAVLEAMATLEAEESSLQTALTSLSIAEVRQASGMINQGDYLKAMADKQSRENSRNQARRNLTLSMMKLKAITGLSDLPGVQQIDFSGYEDLISRLGNISDKEADSLYGELWKTIVSSNPSLTKSALANQKAESNLSMAQRDYLPSLSASLSAGLNYSLKNGMELSGGKLSINLSIPVEYWKIANNVEQKKNARDSAALDYIGAEINLGTELQSTLINVLTYAGSVIHSGLSLAYAERHSDYVMERYKLSQSSISDLNEASTLLINSRNTLIKARYGFLQSLSKLRSLGAFSEEDKLIQILMGN

SEQ ID NO: 57011 - DNA, 729 bp, Unknown
  Obtained from environmental sample
  misc_feature (1)..(729): n is a, c, g, or t
atgaaatactctcttcctcaattttctgactttttaaaagatgttcgcttggacatataccgtcaaaaatatgtttcaataaaaattgtagaaatggatttgccagaagaaatacaggctttaaaaaccatttatgaacagtattgggaaaacaaagatggacaaaaagaaccgccgacttttgatgagtattataaagtttaccttaaagatacaaatggaaaaagacaaaaatttagaacaaaatcaggttttgacaataattgctcttgttttgacagaggtttggaagcacgcatttacagaacttgggcttcgctcataacgcaaatacacgctggatatgtagcagaatctgtatttggcaaagattctatacaaatgtctcctgaacttgaccacaaaggtatagattttttagttacaaaaaatggaacccagctaaaaatacaagtaaaaaaatcttctcacagattggaatcgagaatagaaagaaaattagaaaaagatatacacattataaattattttgtcccccttgccagcgattttggaaatccatattacagagttggggaaaacaaaggcaaaataaagcaacaacttttagcatttgttgaatttgacccccaaaaatggagttttgcagagatacgacaatggttttatagtttttacgccgaaaagtttttgaaagttttttgtgaaaaaatttggttgaatttttga

SEQ ID NO: 57012 - protein, 242 aa, Unknown
  Obtained from environmental sample
  misc_feature (1)..(242): Xaa is any amino acid
MKYSLPQFSDFLKDVRLDIYRQKYVSIKIVEMDLPEEIQALKTIYEQYWENKDGQKEPPTFDEYYKVYLKDTNGKRQKFRTKSGFDNNCSCFDRGLEARIYRTWASLITQIHAGYVAESVFGKDSIQMSPELDHKGIDFLVTKNGTQLKIQVKKSSHRLESRIERKLEKDIHIINYFVPLASDFGNPYYRVGENKGKIKQQLLAFVEFDPQKWSFAEIRQWFYSFYAEKFLKVFCEKIWLNF

SEQ ID NO: 57013 - DNA, 1866 bp, Unknown
  Obtained from environmental sample
  misc_feature (1)..(1866): n is a, c, g, or t
ttgaaaaaacaaagctttacattcagccccgaattttcagaaaaactcctccagcgattccgctacttatacaaagagctaaagaagcccgacaacaacattaaatccgtaaacggctaccttgcccttaaagaagcccaggcaatagctggctgttactacctgagaaaagcttccgataaaataattctgcctgaggatattaaagggaatgtcgatgaaaagaaaagtttgcaggaaatcatggcggagcttgacgccatcatcggcatggccgcgctaaaaaaagaaatcaagagcctttacacgcagttgaatcagatcgccgaaatggaaaagaagggcatcaagacggacaagcccgcacagcattttgtcattaccggcaatcctggcacgggcaaaaccacggtggcaaggctccttggaagaatattcgaagggctgggcttgctggattccggccatgttgtcgaagtagacaggagcaagctggttgcgggctatgtgggccagaccgcgccccttaccaacaatgcctgcgattcggcgatgggaggtatactctttatcgatgaagtgtacacgctgaagcaaaacgacagcgacagtttcggccaggaatgtatcgacaccctgattaaacgaatggaagacgaccggngcaagttcatggtcatcgttgccggatacaaaagcccgatggaaaaattccttacggccaacgaaggtttaaaaagcaggtttaccaaatactttaaccttgaagattacagcccggaagaacttgcggcaatatttgaatctcttgccaaaaaacagcgctttatagtaccgccagagacaagggttaagattgccgctttcttcaaagacaggtgcgtgcggaaaaccaaagacttcgcgaacggaagggaagcgaggaatttattggacgaagcgaggaagaaccaggcggaacgcttgtctcaggcggatatcgcgggcatgtccggtgaagacacccttacatttctccaggaagacattcccggcacgactgccgataaaatggtttccattgacgaggcgctcaaagacctcaacatgctggtggggcttaagtcggttaaggatgcggtaacaaggataaccaactcattgcaggcccaaaaacttaccggcgaaacagaaacgcttgccaagcactttgtttttacgggcaaccccggcacgggaaaaacgactgtcgcgcggataatgggcgatgtgttcaaggccgtaggcatgcttcccaccaacaatttgatagaagcggacagggggaaactggtggcatcatatttgggtcaaactgccaagctggtggcgcagcaatgcgacaacgctatgggcggcattctctttgttgacgaagcatactcgctgaaacaggggccgcaggacagtttcgggcaggaagcggtggatacgcttcttaagcgaatggaagatgacagaggtaaatttgtggttatagccgccggttataccaatgagatggaagattttttggcgtctaacagcgggtttaaatcgcggttttcggattatatcaactttgatgactacaatacgtccgaaatgcgggaaatctttataggaatgtgcaaaaagagaaaaattgaatttgcccccggctttgacgaggcgctgcaaaaaaggctggataatttatatgccaaccggaacgcccagttcgcgaatgcccgcacggtaaggcaactatttgacaaaacaagggagaacgtatccggcagggtgcttgccatgcaaaaacccgaagaagaactaaagcgtgaaatattaatcatgcgcccggaagatttggatatgacagtatcctga

SEQ ID NO: 57014 - protein, 621 aa, Unknown
  Obtained from environmental sample
  DOMAIN (396)...(577): ATPase family associated with various cellular activities (AAA)
  misc_feature (1)..(621): Xaa is any amino acid
MKKQSFTFSPEFSEKLLQRFRYLYKELKKPDNNIKSVNGYLALKEAQAIAGCYYLRKASDKIILPEDIKGNVDEKKSLQEIMAELDAIIGMAALKKEIKSLYTQLNQIAEMEKKGIKTDKPAQHFVITGNPGTGKTTVARLLGRIFEGLGLLDSGHVVEVDRSKLVAGYVGQTAPLTNNACDSAMGGILFIDEVYTLKQNDSDSFGQECIDTLIKRMEDDRXKFMVIVAGYKSPMEKFLTANEGLKSRFTKYFNLEDYSPEELAAIFESLAKKQRFIVPPETRVKIAAFFKDRCVRKTKDFANGREARNLLDEARKNQAERLSQADIAGMSGEDTLTFLQEDIPGTTADKMVSIDEALKDLNMLVGLKSVKDAVTRITNSLQAQKLTGETETLAKHFVFTGNPGTGKTTVARIMGDVFKAVGMLPTNNLIEADRGKLVASYLGQTAKLVAQQCDNAMGGILFVDEAYSLKQGPQDSFGQEAVDTLLKRMEDDRGKFVVIAAGYTNEMEDFLASNSGFKSRFSDYINFDDYNTSEMREIFIGMCKKRKIEFAPGFDEALQKRLDNLYANRNAQFANARTVRQLFDKTRENVSGRVLAMQKPEEELKREILIMRPEDLDMTVS

SEQ ID NO: 57015 - DNA, 642 bp, Unknown
  Obtained from environmental sample
  misc_feature (1)..(642): n is a, c, g, or t
atgaaaatagaagttactgaaactagagcttgcatccaagtacatagctttcaactcggtcctgaatatacagcagacaagtcgaaattccgctcgcagattcaattgccttgcaaatatttgattttgaaaaaaagtctgaaccgcaccatgatttcaatgattgacacagaaagtgaaatttatagagcacagcaggacatgagcaaagtaatgggccgtccgatgtttggccttggcattcaatataaaaaggaaatggaaaaagggatgtttatggcaatggcaagcctaacactcccaatatggcgcgcaaaaacaaatgccaatttgctggaaagcgaattgcaagcagaagcttctcaaaaaatgcttatgaatgcgagaaacaatttagaagcggaacgagcgatggcaaagagcaatttgcaaaatttaaacaaaaaaataacgctttacaaacggcaaaaagaacttgctgagagtagtcaaaaaatagcaatgcaaaattttagtgcaggtaagggaatgttctcagatattttgcagataaacaaaaaattactagattatacaataatggaactggaaacggctacagagtacaataaagcggtagcattggcggaggttttgttttga

SEQ ID NO: 57016 - protein, 213 aa, Unknown
  Obtained from environmental sample
  misc_feature (1)..(213): Xaa is any amino acid
MKIEVTETRACIQVHSFQLGPEYTADKSKFRSQIQLPCKYLILKKSLNRTMISMIDTESEIYRAQQDMSKVMGRPMFGLGIQYKKEMEKGMFMAMASLTLPIWRAKTNANLLESELQAEASQKMLMNARNNLEAERAMAKSNLQNLNKKITLYKRQKELAESSQKIAMQNFSAGKGMFSDILQINKKLLDYTIMELETATEYNKAVALAEVLF

SEQ ID NO: 57017 - DNA, 1536 bp, Unknown
  Obtained from environmental sample
  misc_feature (1)..(1536): n is a, c, g, or t
ttgctgaaaacagtcggcactactggaaaacagctccgcagaatcgtgcgtatgcaggcgctcgttttgtccgctgttgggattccacttggattgggcctcggctattcaggcggtgttctcctgtcaccgtttttgctaagcttattgtccgttggcaatagcgcggcgcgaaccgcgaacccgctgatattcattttcgcggcggcgttcagtttgctgacggtgtttatcggctgccgcaagccggggcagaccgccgcgcgggtatcgccagttgaagcggttaaatacagcggcatctcggcgggctgcaacaggaaaacgaaaaaaacgcgaaaggttacgccgctgtctatggcctgggctaacgttactcgcgaaaagcgcaagctgtgcgtggttgtgctgtcgctgtcgctctcgttaattctgctcaacagcgctttttcggcgacgaagagttttgacatggacgcatatgtgtccggctctatcatcagcgatttcgccgtggcagattacaccgtattcagcgcggtcacatcgtataaaaacaccgaaggcgttacggatgaatttttacgtgaagccgtagcgcacggggcagagaaagtatcgaatatatactttcatccttcctctgaatcccgcagtgagcatgacatgccgatcatgcaaatttacggtattggaaaaacggaactggattatttttcggatattgactatgagaaacttcgttccggcaattatgccatagtatcaagggaagttataaattacgaaaatgccgaggtcgcgatcctcgaaatcggagacacactgacattaatagacgaaaagaatgacggcatcgcgtgtgattttgaggtcattggcttgacggacgcgtaccctaaccaactgtcagccaggtactacaatgtaaatagtttgcaggccattatcgccgccgaggtgtttttgggcttctacggcgaggttcagcccatgcaaacaaatataaatgtaagcgcggataacatttccgggtttgaatcctggctaagcagttacacaacaaatcaaaacccggatttgagctacatttcccgcgaaacgctcaaagtggaatttgccggattgcaaagaacttatcttgcgttgggcggcgcgatgtcgtttatcctcaccttaatcggcatcctgaatttcatcaacgcggttgtcgcttccataatcgcccgccgtcgcgagcttgcaatgctccagagcgtgggtatgacggggaaacagcttcgcggaacgctgttctacgagggcgtttactacaccgcgctgacagcggtttttacgctcactgcgggattgggaattggccggctgattgtgcagggcatagcggggcaggtgtggtttttcaggcagagtttcactgcaatgccgtcaatatactgcgcgattccgctatttgtcatttgcgcgcttgtgccgcttgtttgtcacaaacggctgactaaggagagcctggttgagcggttaagggttgagtaa

SEQ ID NO: 57018 - protein, 511 aa, Unknown
  Obtained from environmental sample
  DOMAIN (333)...(504): Predicted permease
  misc_feature (1)..(511): Xaa is any amino acid
MLKTVGTTGKQLRRIVRMQALVLSAVGIPLGLGLGYSGGVLLSPFLLSLLSVGNSAARTANPLIFIFAAAFSLLTVFIGCRKPGQTAARVSPVEAVKYSGISAGCNRKTKKTRKVTPLSMAWANVTREKRKLCVVVLSLSLSLILLNSAFSATKSFDMDAYVSGSIISDFAVADYTVFSAVTSYKNTEGVTDEFLREAVAHGAEKVSNIYFHPSSESRSEHDMPIMQIYGIGKTELDYFSDIDYEKLRSGNYAIVSREVINYENAEVAILEIGDTLTLIDEKNDGIACDFEVIGLTDAYPNQLSARYYNVNSLQAIIAAEVFLGFYGEVQPMQTNINVSADNISGFESWLSSYTTNQNPDLSYISRETLKVEFAGLQRTYLALGGAMSFILTLIGILNFINAVVASIIARRRELAMLQSVGMTGKQLRGTLFYEGVYYTALTAVFTLTAGLGIGRLIVQGIAGQVWFFRQSFTAMPSIYCAIPLFVICALVPLVCHKRLTKESLVERLRVE

SEQ ID NO: 57019 - DNA, 867 bp, Unknown
  Obtained from environmental sample
  misc_feature (1)..(867): n is a, c, g, or t
gtgtgggactgcataaaagaatgcgaaaggctattaaagcaccttaaggaagagatagaaaccctcgattatgagaaataccagaggaaggcgaagaagatttattttaaaataaacgttgagaaaaacgaagagaaacggataaaactgttcaaaaagcagcttgaaatgttcgcaaactgcataaaacaggcatcaaacgtggtaaaaaaaaagagcgaatacggagcaacggcaaaagcggaaagcataataactgcgatggagggactgataccggtaatggagaaagtattcaggatggccgaacgcagggagataatgaaagagaaagtacccgttgaggataagatattttcgatatacgagcggcatacggacataataatgaaagggcagagggaagcacagtttgggcataaagtaaaccttggcagcgggagaagcaatttaatattaacctgccagatagtggagggaaatccgaaagacagcgaattgtatggggggacgataaagaagcttaaaaaggattacggcaaaacgccgaaatcaagcgttgctgacggcgggtttgcaagcaaggcgaacatagaatattcacaggaggcaggaataataaatatagtattcaataagatacgtgggagcatgcaaaacatagcgaacagcaaatggattgaaaacaaactaaagcgctggaggagcggaatagaggcaataatatccaacttgaaacggggatttcaaatacgccggtgcacttggaaaggtcttgcacattatggacaaaaaatattttggagtgtcattggatataaccttcgcgtaatgaccagcgctatattgcaaacaatgactttatag

SEQ ID NO: 57020 - protein, 288 aa, Unknown
  Obtained from environmental sample
  DOMAIN (111)...(275): Transposase DDE domain
  misc_feature (1)..(288): Xaa is any amino acid
MWDCIKECERLLKHLKEEIETLDYEKYQRKAKKIYFKINVEKNEEKRIKLFKKQLEMFANCIKQASNVVKKKSEYGATAKAESIITAMEGLIPVMEKVFRMAERREIMKEKVPVEDKIFSIYERHTDIIMKGQREAQFGHKVNLGSGRSNLILTCQIVEGNPKDSELYGGTIKKLKKDYGKTPKSSVADGGFASKANIEYSQEAGIINIVFNKIRGSMQNIANSKWIENKLKRWRSGIEAIISNLKRGFQIRRCTWKGLAHYGQKIFWSVIGYNLRVMTSAILQTMTL

SEQ ID NO: 57021 - DNA, 720 bp, Unknown
  Obtained from environmental sample
  misc_feature (1)..(720): n is a, c, g, or t
atgcttttcatagacgtaaacacattctacaacccctatgccggaggcattagaacctaccaccgtgcaaaaatggactggtttaaaaatcatcccgaacacgaatacatattagttggccctgcagacaaaaccgaaaaagttcagttggagccaaatgttgtgtattggaagctaaagggaataaaagtgcaaaaaaatccaaaaggctacaggtttatgttcaacttgcgccctttgctcaattttttgaaagattacccaaatgcagttattgaaattggcgacccttggtggacatccattgttttcacaaggctcagaagatggaaaaagcttcccaatccgctaaacttttttcaccatacgcaccccttggtgtgctacataaaaccttgggcagaaaaaggtattttcagctttattaagaaaattgcatataacatattagataagaatttttacaagcaatttgagaattacgatgagctcatagtctcatctaaatttgcaagattattgctagaagaaaaaaaacttagcaatattgtggagtttccttttggtgcgccagatacgttttttaaggcgtataaagaaaaaacacgtatggaaaatgagcctcttcgccttatttatgcaggcagattgcaaaacgataaggatattttccttttgataaaaggacttcgcgctgcttttggaagacccgcaaattaa

SEQ ID NO: 57022 - protein, 239 aa, Unknown
  Obtained from environmental sample
  misc_feature (1)..(239): Xaa is any amino acid
MLFIDVNTFYNPYAGGIRTYHRAKMDWFKNHPEHEYILVGPADKTEKVQLEPNVVYWKLKGIKVQKNPKGYRFMFNLRPLLNFLKDYPNAVIEIGDPWWTSIVFTRLRRWKKLPNPLNFFHHTHPLVCYIKPWAEKGIFSFIKKIAYNILDKNFYKQFENYDELIVSSKFARLLLEEKKLSNIVEFPFGAPDTFFKAYKEKTRMENEPLRLIYAGRLQNDKDIFLLIKGLRAAFGRPAN

SEQ ID NO: 57023 - DNA, 987 bp, Unknown
  Obtained from environmental sample
  misc_feature (1)..(987): n is a, c, g, or t
gtgttcgggatgatttttaaaccagtccatttttgcacggtggtaggttctaatgcctccggcataggggttgtagaatgtgtttacgtctatgaaaagcataagtacggagaatatagtaaaataaaaggactgataagattagcccccgtaatcttatcaaaaactgataagattactatattgtgcttattgaactttctcctaactcttctctggcggtttggctatttgatagattctaaaacgcggcttgcacctagaaagaaaatatatttcaaaactccgctcataggcgttggaagtttgctcgcaggcggagcgggaaaaacaccttatgtggcttttttggcaaaagagttgaaagtgcgaggttttaaccttgctattttgtgcaaaaacacaggagatgaaaatttgtggtttgaaaaaaaaggttttgaggtttttaccggaaatcgttttgagctttgcaaaaaactagatggcaaatatgatgttttgattagcgatgatggcttggaagaccgcagacttagccacgcattttggatttgcttgagttgggacgaaagagcagaaaatttgtttgatattattccctgcggaaattgccgcagcctttggagagaccacccagaaattgcctgcataaaaaaatgcgcaatggaatgggaagatgacgcaaaaacagcagatgtagtttttagaatggaaagaccaaaaaattatttcggagaaattttaccagaaaattcagagataatagcccttgcaggcatagcacgttcccacagattttttgatggcttgcaaaaaaaatattctataacaaaaaaaataaaatgcaaagaccattcaaaaaatattcaaaaaatggcaatgcaagttttgaagcgaggtttgcctgtagttataactgaaaaagattccgttaagctaaatttacgcagcaagaatatatttgtggcggagttaaaaatttaa

SEQ ID NO: 57024 - protein, 328 aa, Unknown
  Obtained from environmental sample
  DOMAIN (57)...(327): Tetraacyldisaccharide-1-P 4'-kinase
  misc_feature (1)..(328): Xaa is any amino acid
MFGMIFKPVHFCTVVGSNASGIGVVECVYVYEKHKYGEYSKIKGLIRLAPVILSKTDKITILCLLNFLLTLLWRFGYLIDSKTRLAPRKKIYFKTPLIGVGSLLAGGAGKTPYVAFLAKELKVRGFNLAILCKNTGDENLWFEKKGFEVFTGNRFELCKKLDGKYDVLISDDGLEDRRLSHAFWICLSWDERAENLFDIIPCGNCRSLWRDHPEIACIKKCAMEWEDDAKTADVVFRMERPKNYFGEILPENSEIIALAGIARSHRFFDGLQKKYSITKKIKCKDHSKNIQKMAMQVLKRGLPVVITEKDSVKLNLRSKNIFVAELKI

SEQ ID NO: 57025 - DNA, 1221 bp, Unknown
  Obtained from environmental sample
  misc_feature (1)..(1221): n is a, c, g, or t
atgaaagacgttatcactcccaataaggaaaccctacgacaggaatttgaagccgttgccgacatcaggtctctgattgtcaaagatcttgaaggctatgtagaacaggcgctttcgtcattgccgtcctcccccactctcaagatacgcataaaagaattcgacggctattacaagaaatatctgcgcctgcttaaaacaggtattgacgagccgcatattaccgatcttctggggatcagggttatttgtccctttattgaagatattaccaaagcggaaacattacttaaggaacactttgatgttattgaaacagaacaaagagggcattatacctttaaggaatttggttacgaatcaatccatgtgctgatcaaaatacccgctggtattatccgcaagagggggcaggccggctgcgatgtggctgaaatacaaatacgaaccattttgcaggatgcctgggctgaagtaaaacatgaactggtttacaaagcggaattcagcccctttgatatgccgatgaaacgcaagctcgccgcggtcaacgcaagtctttcccttgccgatattattttccaggaaatccgcacttatcagaaacagcttaaccatcagttggaaaagcgccgggaaactttctatcagaagattgaagaatccaccgatgcgctgttattttcaggcattaccggtcagaaaattgatcaggagaaaaaggtttcacccctgcatatgggtaccagttccattgacgatctgctgctggacgcgttgtatgcccacaataaaaaccagtttgaagaggccattgccctatacagccagatacttgaactgaaaccggaaaactcttcggtttgttctctcatttacaaacaccggggaatggcaaattttgcccaatccaaataccatgacgcaatagaagattttacccacgcgcttgatctggataaatcctacaaaaccgcctattaccggggggttgtctattccgtgctgaaacagcaccccgaggccattgatgactttaccatgtcactgcaactaaacccgtttcaggccttttgtctgttcaggcgcggtcaggcatattaccatgtcggtgattatccccaggccctttccgactgcgaagcatctttggcaatggaacctgaaaacgaaacggtgcanaagttccgcgtcctgatccagagtaagctgaagatgtaa

SEQ ID NO: 57026 - protein, 406 aa, Unknown
  Obtained from environmental sample
  DOMAIN (49)...(168): Region found in RelA / SpoT proteins
  misc_feature (1)..(406): Xaa is any amino acid
MKDVITPNKETLRQEFEAVADIRSLIVKDLEGYVEQALSSLPSSPTLKIRIKEFDGYYKKYLRLLKTGIDEPHITDLLGIRVICPFIEDITKAETLLKEHFDVIETEQRGHYTFKEFGYESIHVLIKIPAGIIRKRGQAGCDVAEIQIRTILQDAWAEVKHELVYKAEFSPFDMPMKRKLAAVNASLSLADIIFQEIRTYQKQLNHQLEKRRETFYQKIEESTDALLFSGITGQKIDQEKKVSPLHMGTSSIDDLLLDALYAHNKNQFEEAIALYSQILELKPENSSVCSLIYKHRGMANFAQSKYHDAIEDFTHALDLDKSYKTAYYRGVVYSVLKQHPEAIDDFTMSLQLNPFQAFCLFRRGQAYYHVGDYPQALSDCEASLAMEPENETVXKFRVLIQSKLKM

SEQ ID NO: 57027 - DNA, 804 bp, Unknown
  Obtained from environmental sample
  misc_feature (1)..(804): n is a, c, g, or t
ttgatgagtattatttcatgtatcggaagcggcaacatgggtttcgctttaatgagcgccgccaaaggagcggatatttacattacggacgctgacagcgagaaagcaaaatccgcggcggcgtctttgggggcgaaagttttatcttccaatgttgaagccgttgaaaaaggagacattatttttctcgccgtaaagccgcaagtattacagcaagtgttagctgaaatcgctcctgccgcgaataaaaaacttgcttcctcaagcgcgcctgtttttgtctccatggcggcgggctggtcaatcgcgaaaatacagggagttctgggagcaaaaatccccgtagcgcgcattatgccgaatactcccgcgttaatcggcaaaggaatgatagctctatccgcctcgcctgaagtttccgcgcaaaacgtatcggaaattgaaaagctcctgagcggcgcgggtattatcgacaaagttgaagaacgtttcatggacgccgttacagggctttccggctcaggacccgcgtttgtatatttattcattgaagcgttggcggacggaggggtacgcgccggattgcctagggacaaagctctgcgctacgccgcccagacagcgttgggagccgcggcaatggttcaggaaacgggaaaacatccgggggagttgaaagacatggtaacctctccgggcggaaccacaatagcgggaatcgccgctcttgaagacggggcattccgcagtacggtgattaaagctgtggaagccgcttggaaaagatcgatagaattgggataa

SEQ ID NO: 57028 - protein, 267 aa, Unknown
  Obtained from environmental sample
  SIGNAL (1)...(21)
  DOMAIN (4)...(251): NADP oxidoreductase coenzyme F420-dependent
  misc_feature (1)..(267): Xaa is any amino acid
MMSIISCIGSGNMGFALMSAAKGADIYITDADSEKAKSAAASLGAKVLSSNVEAVEKGDIIFLAVKPQVLQQVLAEIAPAANKKLASSSAPVFVSMAAGWSIAKIQGVLGAKIPVARIMPNTPALIGKGMIALSASPEVSAQNVSEIEKLLSGAGIIDKVEERFMDAVTGLSGSGPAFVYLFIEALADGGVRAGLPRDKALRYAAQTALGAAAMVQETGKHPGELKDMVTSPGGTTIAGIAALEDGAFRSTVIKAVEAAWKRSIELG

SEQ ID NO: 57029 - DNA, 330 bp, Unknown
  Obtained from environmental sample
  misc_feature (1)..(330): n is a, c, g, or t
atgaggataacaacaaattcccaaaccgttgaagagccgaaaaaccccgatgaaagccaaattttccagctttacaaattattcgcggacgcttcagagcaaaccgctcttgccgatcgctaccgcgcggggggcatgggctggggagacgctaaggaagaactgtttcgcgcagtaaaccgctgtctttcccccatacgcgagcgttacgacgcaatcatggctgacattccgtcgctggataaaatcttggcgcagggagcggaaaaagcgcgtcccatcgccgccgctaccgttaagcgttttagaaaagcggcaggagtagattga

SEQ ID NO: 57030 - protein, 109 aa, Unknown
  Obtained from environmental sample
  misc_feature (1)..(109): Xaa is any amino acid
MRITTNSQTVEEPKNPDESQIFQLYKLFADASEQTALADRYRAGGMGWGDAKEELFRAVNRCLSPIRERYDAIMADIPSLDKILAQGAEKARPIAAATVKRFRKAAGVD

SEQ ID NO: 57031 - DNA, 960 bp, Unknown
  Obtained from environmental sample
  misc_feature (1)..(960): n is a, c, g, or t
gtgggttttacccngcttgactattacaacaagttcgaaaagagatgggagggtattgccttcgatgttctagacgaagtaacagaacttaccggactttctttcgaactcgtcaattccccggacgcgtcctgggccgaggtgtttcaaatattcaatgacggggcttctatatgtctcgatctgattgcttccccggaacggctcagccgttatttatggtcgaaatacatatacctgtcggaaaattatgcgctcgtgtccagatataattttccgaatatcggcatcagtgaaatacaatatgcgaaaatcggcctaatcaaaagtacagcctgggcgagtatgtttcagaactggtttcctgaagccgcaaatacaactatgtatgattcacaggacgaagctttccaagccatggaccgcggcgaagtagaccttgttatggccggtactaacgcccttttcgccttgacccactattatgaattttcaaattataaagcaaattatgtttttaacagtaccattgattatgttatcgcctacaacaaaagcgaacaggttcttttgtctgttattgacaaggcgcttgcgtatgtcgatttaaaaaccatttcgaaacgatgggaaagcaaaacttttgattaccagtcaaaagcaatgcgggaacagcgtccgtggctgatcggggcaatctgcctgtctttgggtgcacttatcctgattctccttttttatcggaaaaaccacctgatgaaaaagcagcttgaaatagtattgaacaatgttgaaagcggtattgtcataattgacattgaaacccgtgaaattatggacataaacccggttgttacccgtatgtatggcggcaacagagataaaatcgttggacaaagctgcaaaatacttttttgccagataaagactgtcctatactggattatcaccgatttatag

SEQ ID NO: 57032 - protein, 319 aa, Unknown
  Obtained from environmental sample
  DOMAIN (4)...(213): Bacterial extracellular solute-binding proteins, family 3
  misc_feature (1)..(319): Xaa is any amino acid
MGFTXLDYYNKFEKRWEGIAFDVLDEVTELTGLSFELVNSPDASWAEVFQIFNDGASICLDLIASPERLSRYLWSKYIYLSENYALVSRYNFPNIGISEIQYAKIGLIKSTAWASMFQNWFPEAANTTMYDSQDEAFQAMDRGEVDLVMAGTNALFALTHYYEFSNYKANYVFNSTIDYVIAYNKSEQVLLSVIDKALAYVDLKTISKRWESKTFDYQSKAMREQRPWLIGAICLSLGALILILLFYRKNHLMKKQLEIVLNNVESGIVIIDIETREIMDINPVVTRMYGGNRDKIVGQSCKILFCQIKTVLYWIITDL

SEQ ID NO: 57033 - DNA, 909 bp, Unknown
  Obtained from environmental sample
  misc_feature (1)..(909): n is a, c, g, or t
ttgaagcaacccttacagggaaaccccgcggccataggcagaaagcgcttggcggggcggacgaggcgcgtcttaatagcgttggtatgcagcccaaaacctgacgggacactcccgctggagcttgcggctgttggcggacaaatggagcgcgctggcgcataccgaaacaaaaacaatatcccgcgaaacggtcagaaggacattaaaaaaaacgaaattaaaccttggcaaagccaggaatggtgtatccctccggaaggggagccggagtttgtagcctcaatggaggatatactggatgtttacaccggaaaatatgatgaaaagtatcctttggtgtgtgcggatgaatgtccccgtcaatgnataggcgaagtacggacgcctattccagctgagcctggaaagtcgatccgtttcgatactgagtataagcgtaacgggacatgcgaaatattcatgtttgtagctccccttgaaggatggaggagggctgaggtaaccgagcaacgggcaaaaacagattgggcgcatcagataaaaaaattggttaccgttgattttccagatgcagagaaaattgttttagtacatgataatcttaacacccacactataggcgcactttacaaaacattcccgcctgaagaagccaggtggttacggaacaagcttgagatacatactacgccaaaacatgggagctggcttaacatgtctgaaatagaaattaatgtacttgtgaaccatggcctttcaaaacgagtttcctcgatacagcagatgagaaaagaagttgcggcatggaataaagcccgtaataaagctgcaagtaaaatcaactggaggtttaccacagaaaatgcacggattaaacttaatcggttgtatccactttttgaatag

SEQ ID NO: 57034 - protein, 302 aa, Unknown
  Obtained from environmental sample
  misc_feature (1)..(302): Xaa is any amino acid
MKQPLQGNPAAIGRKRLAGRTRRVLIALVCSPKPDGTLPLELAAVGGQMERAGAYRNKNNIPRNGQKDIKKNEIKPWQSQEWCIPPEGEPEFVASMEDILDVYTGKYDEKYPLVCADECPRQXIGEVRTPIPAEPGKSIRFDTEYKRNGTCEIFMFVAPLEGWRRAEVTEQRAKTDWAHQIKKLVTVDFPDAEKIVLVHDNLNTHTIGALYKTFPPEEARWLRNKLEIHTTPKHGSWLNMSEIEINVLVNHGLSKRVSSIQQMRKEVAAWNKARNKAASKINWRFTTENARIKLNRLYPLFE

SEQ ID NO: 57035 - DNA, 504 bp, Unknown
  Obtained from environmental sample
  misc_feature (1)..(504): n is a, c, g, or t
atggccaaactccctttttccgttttcaggcgagccggtcgccggttcttctacgtcgctttcaaaaacgaaaaaacaggcaaatacctccccgccatcagcacaaagcaggaaacggaatcgggggccgtttctactgccttccaatggctaaaggacggcattccccggcacggcgaagcggtccccctaaaaaaatatattgtgacgttaacagaagatgaaaagaaaacattgaaagagatgctcaacaaagggaaacatagtgcggaaaaacccaaacgggcgcaagcgcttttgcttgcggaggaaaattataccgatgaaatgatagccgataaagcagggatgagcaggagagggctggaacagcttaggcagcggtttgtagaagaaggttttgaagcaacccttacagggaaaccccgcggccataggcagaaagcgcttggcggggcggacgaggcgcgtcttaatagcgttggtatgcagcccaaaacctga

SEQ ID NO: 57036 - protein, 167 aa, Unknown
  Obtained from environmental sample
  misc_feature (1)..(167): Xaa is any amino acid
MAKLPFSVFRRAGRRFFYVAFKNEKTGKYLPAISTKQETESGAVSTAFQWLKDGIPRHGEAVPLKKYIVTLTEDEKKTLKEMLNKGKHSAEKPKRAQALLLAEENYTDEMIADKAGMSRRGLEQLRQRFVEEGFEATLTGKPRGHRQKALGGADEARLNSVGMQPKT

SEQ ID NO: 57037 - DNA, 318 bp, Unknown
  Obtained from environmental sample
  misc_feature (1)..(318): n is a, c, g, or t
atgccgcttatttttcccggccacaaatggcatcttgttgacaaaggggacattaaaagcagcggctttgtcgttgacacgcttatggcttcaatctggtgcttccttaccacggaaaattacagggacgcggtattggaagccgtcaacctcggggacgataccgacaccaccgcagcggtgaccggcggccttgccggagcgtattatggctttggaaatgacggaataccgccagaatggattaaagcattggcaaagcatgatactatttcggacattgcagaaggtgttttcgcttcgtccaaaaacccatag

SEQ ID NO: 57038 - protein, 105 aa, Unknown
  Obtained from environmental sample
  misc_feature (1)..(105): Xaa is any amino acid
MPLIFPGHKWHLVDKGDIKSSGFVVDTLMASIWCFLTTENYRDAVLEAVNLGDDTDTTAAVTGGLAGAYYGFGNDGIPPEWIKALAKHDTISDIAEGVFASSKNP

SEQ ID NO: 57039 - DNA, 918 bp, Unknown
  Obtained from environmental sample
  misc_feature (1)..(918): n is a, c, g, or t
ttgcggcaaatgagtgaacggcgtaaggctctggcggcgattatcgcctgtgttctgttttggggcttttcatttatttcgataaagataacagttgcggtttttcctcccatgtcccaggggcttctgcgtttcgcaatcgcccttgttttccttttttttatgaagcaaaaactcgcgccgggcgaaaggctgaaagcccgtgacatcccgctgcttttgggcgcgggccttttcggcgtcactttttactttttctgcgaaaacaacggcgtatccctggttaccgcgtcggaggcgtccatcgcgattggttcaatccccgtgctgaccatgatcgccgactcgctaagcaggaaatttgcgcgtaacaaaaacagcgccctgccgcggatcggcgtacgccaatggatcggggcttttatttccatagccggggtatggcttgtcgccggcgtttcatttgccctttcaggcagcgtcttgggttacatctacatggggggcgccgcccttttttgggtagggtattccctgctgacccgcccgctcttttcacgctgctccaggatatacattgtattttggcagtctgtggccggctttatcggtttcatccctttctcgatcctggaattaaacaaatggagccgtccggatctgcctgttattcttcatcttgttttccttggcctctgctgttccgcgttgggttactggtattacgcccgttcccttgaagtcctcgggctgtcggtctccgcgatttttatcaatctgataccgttggtaacagccattttcggttttatcgttatgggagaccgcctgacccttttgcaatggcttggggctgtttttgttattggcggggtgtatctttccatgtttcaaaaccaaataacaaataacaaatag

SEQ ID NO: 57040 - protein, 305 aa, Unknown
  Obtained from environmental sample
  SIGNAL (1)...(27)
  DOMAIN (19)...(152): Integral membrane protein DUF6
  misc_feature (1)..(305): Xaa is any amino acid
MRQMSERRKALAAIIACVLFWGFSFISIKITVAVFPPMSQGLLRFAIALVFLFFMKQKLAPGERLKARDIPLLLGAGLFGVTFYFFCENNGVSLVTASEASIAIGSIPVLTMIADSLSRKFARNKNSALPRIGVRQWIGAFISIAGVWLVAGVSFALSGSVLGYIYMGGAALFWVGYSLLTRPLFSRCSRIYIVFWQSVAGFIGFIPFSILELNKWSRPDLPVILHLVFLGLCCSALGYWYYARSLEVLGLSVSAIFINLIPLVTAIFGFIVMGDRLTLLQWLGAVFVIGGVYLSMFQNQITNNK

SEQ ID NO: 57041 - DNA, 1242 bp, Unknown
  Obtained from environmental sample
  misc_feature (1)..(1242): n is a, c, g, or t
atggaacacatggcggctattgccggtcatcctcaacgctgcgctccctgcatacacattgccggttccaagggcaaaggctcggttacgggaatgaccgcctcgattctggaagcggccggcctgcggacggcgcggtatatgtcgccgcacatcagcgattttcgcgagcggataagcctgggcaattcattttttgaggagcctgtgtattgcacatccggagatgaactgcgcgatctggccgaaaacaaaatacccgccgcgaatatcagcctctttgatcccgctgacaaggaaggcgaggctccgactttttttgagcttttaacgctgtattttttcctctgcgccaaacacggcaaaagtgacgcgatggttgtggaaacaggcatgggcggcagactggactgcaccaatattgtaaatcctgaggtttccgtcattacattgatagagcttgagcatacggcgattctcggcaagaccattccggcaatagccggtgaaaaggcgggcatcatcaaagcgggcaagcctgtcgttttggcaaagcagccggcggatgccctggaagtattcaggaagaaagcaactgaaaagaacagccccttattttactttcccgatattgcggaaataaataatttgaatataaataccaatggcacggatttttcactaaagttcaggggagacaatgatccgcgggagttttccattcccataccgggagcgattcaggctgaaaacgccgggcttgcgatactggcgctaaaaaattttaaaaaagatattaacaatgacgcgatacgccgggggttaagccggctgaagatacccgcgcgttttgaaaaaatatccgacaagcctgtcgtcatcattgacggcgcccatacgccggagagcgcctctctctgcgccgacaccttctgttcgctgtacggcgagggcggcattctgctgttcggctgcgccgccgacaaggactccgccgcaatggcaaagctgctgctgccccgtttttcgcaaatatttatcaccatgccggggacattcaggatcagcgacccggaaaaagtgtacagcgcgttctcttcaaacaaaacaacgcttgtaaaagacacagctgaagcgatacggcggaccctggaactcagccggaaaaaagatttgcccgttctctgcacggggtctttttatctggcgtcgatgattaagcagataataaataacaggtaa

SEQ ID NO: 57042 - protein, 413 aa, Unknown
  Obtained from environmental sample
  DOMAIN (280)...(361): Mur ligase family, glutamate ligase domain
  misc_feature (1)..(413): Xaa is any amino acid
MEHMAAIAGHPQRCAPCIHIAGSKGKGSVTGMTASILEAAGLRTARYMSPHISDFRERISLGNSFFEEPVYCTSGDELRDLAENKIPAANISLFDPADKEGEAPTFFELLTLYFFLCAKHGKSDAMVVETGMGGRLDCTNIVNPEVSVITLIELEHTAILGKTIPAIAGEKAGIIKAGKPVVLAKQPADALEVFRKKATEKNSPLFYFPDIAEINNLNINTNGTDFSLKFRGDNDPREFSIPIPGAIQAENAGLAILALKNFKKDINNDAIRRGLSRLKIPARFEKISDKPVVIIDGAHTPESASLCADTFCSLYGEGGILLFGCAADKDSAAMAKLLLPRFSQIFITMPGTFRISDPEKVYSAFSSNKTTLVKDTAEAIRRTLELSRKKDLPVLCTGSFYLASMIKQIINNR

SEQ ID NO: 57043 - DNA, 609 bp, Unknown
  Obtained from environmental sample
  misc_feature (1)..(609): n is a, c, g, or t
atgcggtgggcggtaaagcttctgcaggaaaactgcgacaatgtgccgctgtgcctggacaccgccaacaagaatgcaattgaggcgggcctgaaagcatataaccccgcaaaaggcaaacccattctcaactcggcggatgcgggcgacaggcttaccaatctggaccttgccgccgctaacggcgcgatctgcatcgccctctgcgctaagcagggcattccctcggataatgacgagcgcatggcctattgccaggaattgcttgaacatggcatgaacatgggtatggaaacagatgaccttttgttcgatcccctgtttctggtcataaagggaatgcaggacaaacaggcgcaggtgctggaatttatacgccagctaagggacatggggcttaaatccacgggcgggctttcaaacgtttccaacatgatgccgaaaaatatcaggccaatcatggactcaacgatggtggcgatggcgattaacaacggccttacctcggctattgtcaacccctgcgacaagcggcttatggaaacgattaagtcggcggacataatcatgaatcaaagcctctatgccgattcgtatctggaaatatag

SEQ ID NO: 57044 - protein, 202 aa, Unknown
  Obtained from environmental sample
  misc_feature (1)..(202): Xaa is any amino acid
MRWAVKLLQENCDNVPLCLDTANKNAIEAGLKAYNPAKGKPILNSADAGDRLTNLDLAAANGAICIALCAKQGIPSDNDERMAYCQELLEHGMNMGMETDDLLFDPLFLVIKGMQDKQAQVLEFIRQLRDMGLKSTGGLSNVSNMMPKNIRPIMDSTMVAMAINNGLTSAIVNPCDKRLMETIKSADIIMNQSLYADSYLEI

SEQ ID NO: 57045 - DNA, 1047 bp, Unknown
  Obtained from environmental sample
  misc_feature (1)..(1047): n is a, c, g, or t
ttgggtccgggcttttccgaggatgagagccgctcctaccagtcgctgataagcgcgctgcccgtgagctacagttctttcgcggtgcatcaccgtccggggcaccaagtgggggcgccggtcaacgtggatatctttccaaaggtcgacggggtgaagatcaactccacggccgtcaccgtcgcgggggcgaaggggcacatcgacgtctccacgtcgctgcagaacggggtgacgcaggtgaacgtgagggggacgatgggcatagaggagcagcccggttatgcttaccgccgcatgtggcagtcgtgggagtctttcgggggggcgttcagggcgcagtgcgcggacaacgggatcaaggtcgcggggaagacaatgcggcagagggtgcccgacactctggcggccaaggcgccgttctacctatacggcggcgatccgctcacggagtttgtaaagcacatgttcaagtggtcgagcaacttcatagcggagatgcttttcaagacgatgggcgcggagaagctgggtgatcccgggacttggcccaagggcgcggcggcggtcgccgcgtggtgggagtttagggggctgcccggcaagccgcagataataaacggttccggcatgggcggggagcggtcgtcgctgccgcagggcaccgtcgtagacgattcgttgggcccgatacccaaaaacgacaaccgtgtgagtacagcgcagatcgtcgagctgctggcctacgtatctaagcagaagaactattacccggactacgtggcttccctatcctcggccggcgtggacggcacgctgcgctcgcgtttccaacggtcgaagctcaaggggcttatcagggcgaaaacgggcacgctcaactcggtgaaagtcagcacgttggcggggtatatgtttctggagggcaagacctacgcgttcgcggtgttttgcaaaaatgtagggccgaatcagtacgacaactggataatgcaggagcaaatattggaggcggtggccaggaacacggagtggagcggcaattag

SEQ ID NO: 57046 - protein, 348 aa, Unknown
  Obtained from environmental sample
  DOMAIN (1)...(320): D-Ala-D-Ala carboxypeptidase 3 (S13) family
  misc_feature (1)..(348): Xaa is any amino acid
MGPGFSEDESRSYQSLISALPVSYSSFAVHHRPGHQVGAPVNVDIFPKVDGVKINSTAVTVAGAKGHIDVSTSLQNGVTQVNVRGTMGIEEQPGYAYRRMWQSWESFGGAFRAQCADNGIKVAGKTMRQRVPDTLAAKAPFYLYGGDPLTEFVKHMFKWSSNFIAEMLFKTMGAEKLGDPGTWPKGAAAVAAWWEFRGLPGKPQIINGSGMGGERSSLPQGTVVDDSLGPIPKNDNRVSTAQIVELLAYVSKQKNYYPDYVASLSSAGVDGTLRSRFQRSKLKGLIRAKTGTLNSVKVSTLAGYMFLEGKTYAFAVFCKNVGPNQYDNWIMQEQILEAVARNTEWSGN

SEQ ID NO: 57047 - DNA, 336 bp, Unknown
  Obtained from environmental sample
  misc_feature (1)..(336): n is a, c, g, or t
atggataaaatcgttgtggacaatgtggagttggccctagcccaccctatagcaacctccgtggagtggatagggcagaccgagccgctacggcagctgctcgcctgctggatcaccgttgacaaacgcgacctgccgctcacgccccgtatcatcggctaccccggaatcggcaagaccacgctagccatagccgccgctcgggcgcgcggacaagacgtttatataatgcagtgcaccgcggacacgcgcccggaagacctcttggtcacgccggtgctctccgaancaggcaaaatctcctaccacgcctcgccgcttctacggccgccgtaa

SEQ ID NO: 57048 - protein, 111 aa, Unknown
  Obtained from environmental sample
  misc_feature (1)..(111): Xaa is any amino acid
MDKIVVDNVELALAHPIATSVEWIGQTEPLRQLLACWITVDKRDLPLTPRIIGYPGIGKTTLAIAAARARGQDVYIMQCTADTRPEDLLVTPVLSEXGKISYHASPLLRPP

SEQ ID NO: 57049 - DNA, 621 bp, Unknown
  Obtained from environmental sample
  misc_feature (1)..(621): n is a, c, g, or t
atgtattttcagaaaaaaaagtttgttgtgattaatttaaaaaaagtatatattaataggatatttatggaaacaattgaaaatcaaaatttgcaaaagttatctttccgcgttggcggaatgtactgcaaaaactgtcagaatataattgaaaaagaattaaaaaaaacggcaggcgttcagaaagcgtctgtaaattaccgttcagggcgcgcggctgttacctttgacgccgaggtaattggttttaataaaattcgagaggtaattgaaagcctgggttatcaggcattggaagaaaacggcaaaaatcaagctttgcaaagcaagacgatcccgcaaatcgccggtactctggtaattatcctcgcgctttttatgctgatgcgtacgttcacaacaagcaatcttgccgcggctttcccgcttgcccgtgaaggcatgagttacgcaatgctaattgttatcggtcttcttacaagcgtccactgtgccgccatgtgcggggggattaacctttcgcaaacattaaagacaagtgaagagggaaatgaacaaataacaaacaggaaaaaagatgtttattcttgttcttccgggcatctcacaactcggcgataa

SEQ ID NO: 57050 - protein, 206 aa, Unknown
  Obtained from environmental sample
  DOMAIN (35)...(99): Heavy-metal-associated domain
  misc_feature (1)..(206): Xaa is any amino acid
MYFQKKKFVVINLKKVYINRIFMETIENQNLQKLSFRVGGMYCKNCQNIIEKELKKTAGVQKASVNYRSGRAAVTFDAEVIGFNKIREVIESLGYQALEENGKNQALQSKTIPQIAGTLVIILALFMLMRTFTTSNLAAAFPLAREGMSYAMLIVIGLLTSVHCAAMCGGINLSQTLKTSEEGNEQITNRKKDVYSCSSGHLTTRR

SEQ ID NO: 57051 - DNA, 1989 bp, Unknown
  Obtained from environmental sample
  misc_feature (1)..(1989): n is a, c, g, or t
gtggaaaatgctccatactaccgtcgggtacgaactggaacaggcaatggagcttcaaaagctaaattggaaacatcggttaacagcgaaatcgccattgccattaaaatgacgacttcccccttgatacagcgccacttcctaaaccccagtgacggcgaactgaaaagaattgcctttgatgaaatagacggataccgccggacattcaagagccaatcggttttctggtgcagtgatgttgacaaagaattttactttgccgtagataatcattatccccttaataccgaagatcccgctaactattggtacaaaatgaccctgtaccaaactgaaaaatataatttcaacatcaacttcaatgcggaaataaataagacattgctgtttatcaatgcgccggtttttgacgcacaacataagcctatcggtcttgtgggaacgggtattgaccttacggaatttgttaatagtatttatcagaattataaaggtactgcggctttatacctctttaacgaattaggggaaataaccggcagtcgtgacgttaaccttgttaaagataaaacaaagcttgataaagctcttggcgaaaccggctcggaaattattaaaaaagcggcttcaaaagaatctcaatttttcaatgtagatgaaggtgtggcggctttggttagcgtaactacccttaactggtatattgtcgctattcagccccttgaaataaaagacgccctgaaaggcaacatgacaatcctcttcctgttgatgatggcggtcatcgccgttattttagttatttcatttatatttctcagcagtacgcttaaacctcttcataacatggtactgacgctggaccaaatagcggaggagggggatttgacacggcgggttgaatttaaacacatggacgaaataggcgttcttgcgcatgactttgactttatgatggataggataaaaaaccttgtaggggtaataaaatataaaattaacgcgctcaccaatacggggcatgagctttcctcaaatatggcaaaaacttccaaggctattgacaatatttcagagcattttaagggtatgaagagcatgacggtcaagcaggacaaaagcgcctctgaagcgcatggagcgtcaaaagatattcaaaataatattataagtttaaataccttgatagaaagcctcgccaagaacattaatacctcgtcttccgcagttgaagaaatgacagttcacattaattcggtaacccaaaccttgattgaaaacagtaaaaatgtcgttaatttgacggaagcgtccgagaacggcaaaaacggccttcaagcggttgcggagaagataaaggatattgcgcatgattccgaggggcttttgcaaataaactctgctatagataatatcgccgcccagactaaccttctttcaatgaatgcggcaattgaagctgcgcacgccggagaattagggaaagggtttgccgttattgccgatgaaatcagcaagctggcggataattcaagagcgcagtctaaaacaatcagcgtagttttaaaaaaaattaagtcaatgattgacacgatcacgaaatcaacaggcgcggttctggatcgtattaatgagattcaacaggaagtgcaggttgtgtctgagcaggaaacacaaatacgcaatacaatggtagagcacggaaaaggcagtcaggaaattctggaagcggtaacgcagttaaataacgcaacagatctggtgcaaaaaacatccgaagaagtgaccagtgagagcagggatatattgaatcaaagcaatgagttaaagcagataacaaccgatgccgccgtaaacatggacgatatgaccgtcagtatagaagaaatcgcctgtacaatttccagagtacaggaaatatcggacgagaataaagggaatattgactctgtcagcgcggaaatcgggcggttcaaagttgaatag

SEQ ID NO: 57052 - protein, 662 aa, Unknown
  Obtained from environmental sample
  DOMAIN (397)...(620): Methyl-accepting chemotaxis protein (MCP) signaling domain
  misc_feature (1)..(662): Xaa is any amino acid
MENAPYYRRVRTGTGNGASKAKLETSVNSEIAIAIKMTTSPLIQRHFLNPSDGELKRIAFDEIDGYRRTFKSQSVFWCSDVDKEFYFAVDNHYPLNTEDPANYWYKMTLYQTEKYNFNINFNAEINKTLLFINAPVFDAQHKPIGLVGTGIDLTEFVNSIYQNYKGTAALYLFNELGEITGSRDVNLVKDKTKLDKALGETGSEIIKKAASKESQFFNVDEGVAALVSVTTLNWYIVAIQPLEIKDALKGNMTILFLLMMAVIAVILVISFIFLSSTLKPLHNMVLTLDQIAEEGDLTRRVEFKHMDEIGVLAHDFDFMMDRIKNLVGVIKYKINALTNTGHELSSNMAKTSKAIDNISEHFKGMKSMTVKQDKSASEAHGASKDIQNNIISLNTLIESLAKNINTSSSAVEEMTVHINSVTQTLIENSKNVVNLTEASENGKNGLQAVAEKIKDIAHDSEGLLQINSAIDNIAAQTNLLSMNAAIEAAHAGELGKGFAVIADEISKLADNSRAQSKTISVVLKKIKSMIDTITKSTGAVLDRINEIQQEVQVVSEQETQIRNTMVEHGKGSQEILEAVTQLNNATDLVQKTSEEVTSESRDILNQSNELKQITTDAAVNMDDMTVSIEEIACTISRVQEISDENKGNIDSVSAEIGRFKVE

SEQ ID NO: 57053 - DNA, 594 bp, Unknown
  Obtained from environmental sample
  misc_feature (1)..(594): n is a, c, g, or t
atgccaaacctaaaacacgaaacgcacgaaaattggtacagagatgtcccaaaaatgaaatgcctaatactcggcagttttccgccgaacaagataagatgggattatcccttttattacccaaactccacgaaccgcttttggagcatattagctaaaatagcgaaaaaaccgttggtacataataaaggcgaaaaagcagttgaagaaagatatgagataatgcgacttttaaatgtgggtattcaaaatataggtttggagattgaaaggaaagataatagcgcagacgatagtaaaatcaaaataaaaaaattccaagatattctctcaataataaaaaagcacaaagagcttgaaaaaatcttattgccgggatattcagctccgagtagcacaacaagagcttttttaaaatatttggactctgaaaatattctttatgagattaaagacattaaagcgaatgcggagttttctataaatgtttttgacagaaaaattaagtgcgttattttgaattcaacctcaagagcagcggctggcattgcggaagaggaattgctaaagcaatttaagaggcatttagtttga

SEQ ID NO: 57054 - protein, 197 aa, Unknown
  Obtained from environmental sample
  misc_feature (1)..(197): Xaa is any amino acid
MPNLKHETHENWYRDVPKMKCLILGSFPPNKIRWDYPFYYPNSTNRFWSILAKIAKKPLVHNKGEKAVEERYEIMRLLNVGIQNIGLEIERKDNSADDSKIKIKKFQDILSIIKKHKELEKILLPGYSAPSSTTRAFLKYLDSENILYEIKDIKANAEFSINVFDRKIKCVILNSTSRAAAGIAEEELLKQFKRHLV

SEQ ID NO: 57055 - DNA, 1443 bp, Unknown
  Obtained from environmental sample
  misc_feature (1)..(1443): n is a, c, g, or t
atggctgctcgctctcccgtttggcatttacccgaagatgttttggacataaaaagagcaacggaaaatctcaactcaaaacattttggcttggaaaaggtaaaggagagaattttagaatacatagctgttttgcaaattgcggaaaaactcaaaaacaaagaagttaaaagccctatcctatgtttggttgggccgccgggcgttggtaaaacaactcttgcaatgtctatagccaatgccatgaacagaaatttagctcgcatttcgcttggcggagtccatgacgatgcggaaatacgcggacatcgccgcacatatataggttcaatgccggggcgcatagtgcaagcccttcgcaaagccaagagcatgaacccgctgattttgctggacgaagttgataaaatgtcaagcgatttcaggggcgaccctgcaagcgcgattttggaggttctagacccggagataaacacggaattcaacgaccactttattgaagtgggcatagactttttcagagtatttttcgtagcaaccgcaaacaccccagacggcattccggcagccttgtacgaccgtatggaaatagtgcgcatacctggctatttgcattttgaaaagggacatattgcaaaggattttttaatcccaaaaattttaaagcagaattcgctcacagcaaagcaattcaaagtttcggattcagccataaatggaattctaagggaatacacgcgagaggcaggtgttagggaattggaaagaaagctggaaacaatggcgcgcaaacgggctatggaattggtttcaaagaaaaaattcactccgcaaattgtgcaaaagcaactatcgacatatctaggagttccagattttgcaggtccaaggcttatagacgaaaaacgcgcaggcataacaacaggactcgcgtggactcccgttggcggcgatgttctgcatatagaatgtattcttttgcccggcaaaggaaaattgcaacttacggggcacttgggcgatgttatgaaggaatccgctcaaatagctctttccctcgttagagaacgtgccagaaagtataaaatcccagaagacaaattccgcaaaagcgatgttcatttgcattttccagaaggcgcaaccccaaaagacggtccttctgcgggcatagcgataacaatagccatgctctctgcattcacaggtcacctaatttcgccctttatagctttcactggtgaagtgagccttattggtcgtcttatcgcaattggtggcttaaaagaaaaatctctagccgctttggattcaggtgtgaaaaaactctttttgcccaaagacaaccaaaagaatgtggaagacttgccagatttggttaagaatgggttggaaatcaatatgcacacgcatattgatgaggtgatagagcagttgttttag

SEQ ID NO: 57056 - protein, 480 aa, Unknown
  Obtained from environmental sample
  DOMAIN (61)...(197): ATPase family associated with various cellular activities (AAA)
  misc_feature (1)..(480): Xaa is any amino acid
MAARSPVWHLPEDVLDIKRATENLNSKHFGLEKVKERILEYIAVLQIAEKLKNKEVKSPILCLVGPPGVGKTTLAMSIANAMNRNLARISLGGVHDDAEIRGHRRTYIGSMPGRIVQALRKAKSMNPLILLDEVDKMSSDFRGDPASAILEVLDPEINTEFNDHFIEVGIDFFRVFFVATANTPDGIPAALYDRMEIVRIPGYLHFEKGHIAKDFLIPKILKQNSLTAKQFKVSDSAINGILREYTREAGVRELERKLETMARKRAMELVSKKKFTPQIVQKQLSTYLGVPDFAGPRLIDEKRAGITTGLAWTPVGGDVLHIECILLPGKGKLQLTGHLGDVMKESAQIALSLVRERARKYKIPEDKFRKSDVHLHFPEGATPKDGPSAGIAITIAMLSAFTGHLISPFIAFTGEVSLIGRLIAIGGLKEKSLAALDSGVKKLFLPKDNQKNVEDLPDLVKNGLEINMHTHIDEVIEQLF

SEQ ID NO: 57057 - DNA, 2274 bp, Unknown
  Obtained from environmental sample
  misc_feature (1)..(2274): n is a, c, g, or t
ttgatggccgaggggaagagatctcccatggatgatatacggaagataattgataacgatctggtgatggcccacaggacccgcggccttaaccctgaaaatccccatatccgcggaacagcccaaaacccggacacctatttccagggccgcgaaggagtaaatccctactactctagggtgccgggcatcgtgcaggcggagatggacaagttagccaagatcaccgggcggcagtatcacatattcgattaccacggcgcgaaagacgcggataaagtgatcgtgattatgggttccggcgcggaaacctgcgaggaaaccgttgattaccttaactcaaagggagaaaaactcggcctggtgaaagtacacctgtaccgcccctttgacgtaagcctctttgtaaaggccctgccctccacggtaaaagccatcgccgttcttgaccgcaccaaagacccgggcgcgattggcgagcccttatacgaagacgtccgcaccgcgatcgccgaggcgcaggcggcgggccagttctccgccaacccggttgtgctgggcgggcgctacgggcttggttccaaggaattcacccccacaatggtcaaggcggtatttgacaacttgtccggcaagaaaatcgccaacttcatcgtcggcgttaatgacgacgtgcagcacaagagcctggattacgatccgaattttgtactggaagaagagggcgtgaacgaagccctgttctacggacttggagcggacgggcacggtcggagcgaacaagaactcaatcaagatcatcagcgaggcgaaacccgaactcaacgcgcaggcgtacttctcctacgactcgaaaagtcaaacggcttcaccgtttcgcacctccgcttcggcaaaggccgtatcagaaggccctaccttatcaactccgcggacttcctcgcctgccacaaattttcctacatggaaacgtacgatatgctcaaaagcgttaagacaggcggaaccttcctcctcaacagtccgttcaaggccgccgatgtatggaagaatatccccgtagaggcccagaagcagatcatagacaaaaagctgaagttctacgttattgatgccgccgacatcgcgtttaagaccggcatgggcaaccgtatcaacacggtcatgcaggccgcctatttcaagatttccggcattctggccgaagccgacgcggtaaaacgcatgaaagaacacatcgaacactcctacggcaagaagggaaaagacgtagttgaaaagaactataaaaccgttgacgcgtcattgaacgccgttgaagaggtaaagtacccctccaataccgaaggggacatccacatgaagaagccctttgccaccgcgaaggacaactggatcagggatgttctgggaaccatgtcgatacaggaaggcgatactctggctgtcagcaaaattccggaagacggaacctttcccacggcgaccacccagtacgaaaaacgctctgtcgcggagcgcgttccaatatggaatcaggaagtttgtatacagtgcggtaactgtacggttgtatgcccccatgcctgtatgcgctttaaaaaccttaccgatgatcaggccgcaaaagcgccggcgggcttcaaaaccgcggcgataaaacccaagccggtggacggacagaaagcggcgctggttatcgcctgtgaagactgctacagctgcggcgtctgcttcatatatgtcccatgtcaaataaaggccaggaaaaacccgcgctgtcatggaaacattattccgatgatcacgaattccatgcggaacaggtcaaggtctgggagtacttcctttcattgcccgaaacgcctgccggtgagcttaaaaacgcgaaagcgttcgcctacaagcgtcccctgtttgaattctccggcgcctgcggcggctgcggtgagacaccctacatcaaacttatgtcgcagcttgtcggtgaccgcgcgctcatcggtaacgccacaggctgtacctcgatatacggcggaaacctccccaccaccccctacgcacagagagcggacggacgcgggccggtgtgggcaaacagcctctttgaggacgcggcggaattcgccatgggcttcaggcttaccagcgacaagctggctgtccacgcccgcgaaattgccgaaaaggcaaaaagcgaaggcattgccgcaagtgtcatcgacaaaatactttccaatgatcaagccgatgaagcgaagatcgacgaaatga

SEQ ID NO: 57058 - protein, 757 aa, Unknown
  Obtained from environmental sample
  DOMAIN (509)...(532): 4Fe-4S binding domain
  misc_feature (1)..(757): Xaa is any amino acid
MMAEGKRSPMDDIRKIIDNDLVMAHRTRGLNPENPHIRGTAQNPDTYFQGREGVNPYYSRVPGIVQAEMDKLAKITGRQYHIFDYHGAKDADKVIVIMGSGAETCEETVDYLNSKGEKLGLVKVHLYRPFDVSLFVKALPSTVKAIAVLDRTKDPGAIGEPLYEDVRTAIAEAQAAGQFSANPVVLGGRYGLGSKEFTPTMVKAVFDNLSGKKIANFIVGVNDDVQHKSLDYDPNFVLEEEGVNEALFYGLGADGHGRSEQELNQDHQRGETRTQRAGVLLLRLEKSNGFTVSHLRFGKGRIRRPYLINSADFLACHKFSYMETYDMLKSVKTGGTFLLNSPFKAADVWKNIPVEAQKQIIDKKLKFYVIDAADIAFKTGMGNRINTVMQAAYFKISGILAEADAVKRMKEHIEHSYGKKGKDVVEKNYKTVDASLNAVEEVKYPSNTEGDIHMKKPFATAKDNWIRDVLGTMSIQEGDTLAVSKIPEDGTFPTATTQYEKRSVAERVPIWNQEVCIQCGNCTVVCPHACMRFKNLTDDQAAKAPAGFKTAAIKPKPVDGQKAALVIACEDCYSCGVCFIYVPCQIKARKNPRCHGNIIPMITNSMRNRSRSGSTSFHCPKRLPVSLKTRKRSPTSVPCLNSPAPAAAAVRHPTSNLCRSLSVTARSSVTPQAVPRYTAETSPPPPTHRERTDAGRCGQTASLRTRRNSPWASGLPATSWLSTPAKLPKRQKAKALPQVSSTKYFPMIKPMKRRSTK

SEQ ID NO: 57059 - DNA, 1248 bp, Unknown
  Obtained from environmental sample
  misc_feature (1)..(1248): n is a, c, g, or t
atgtcaaataaaggccaggaaaaacccgcgctgtcatggaaacattattccgatgatcacgaattccatgcggaacaggtcaaggtctgggagtacttcctttcattgcccgaaacgcctgccggtgagcttaaaaacgcgaaagcgttcgcctacaagcgtcccctgtttgaattctccggcgcctgcggcggctgcggtgagacaccctacatcaaacttatgtcgcagcttgtcggtgaccgcgcgctcatcggtaacgccacaggctgtacctcgatatacggcggaaacctccccaccaccccctacgcacagagagcggacggacgcgggccggtgtgggcaaacagcctctttgaggacgcggcggaattcgccatgggcttcaggcttaccagcgacaagctggctgtccacgcccgcgaaattgccgaaaaggcaaaaagcgaaggcattgccgcaagtgtcatcgacaaaatactttccaatgatcaagccgatgaagcgaagatcgacgaaatgaggaaaagcatcgacgaactcaaagccgcgattaaaaacgactcaaaacccacagccaaactgctgctctctcttgccgatttctttgtaaaaagatcggtatggggtttcggcggcgacggatgggcttacgacatcggcttcggcggtcttgatcacgtgcttgcctccggcaagaacgtaaaccttctgtgtctggacaccgaggtctactccaacaccggcggccagatgtcaaaggcaaccccgataggcgctatcgccaagtttgccaacgccggaaaggaaatgaccaagaaagacctgggcgcgatagccatgagctacggctatgtgtatgtcgccaagatttcactgggcgcggatatgaaccagacgatcaaagccttccgcgaagcggagtcctataacggcccctcgcttatcatcgcctactcgcattgtatcaaccacggtatcgacatgagcaaaggacttgagcacggcaaggcggtagtcaccagcggcctgtggcccctgttccgctacgaccccaggctcaaagatcagggcaagaaccccttccagcttgactccaaggaaccctccaccagcattgaagattatatgtacagcgaagtccgcttcaagagcctcaaacaggccgaccccgcgcgcgccgacgcattgctctcgaaagcgaaagcccatgcggaaagggttggaaagagtacaagtatttag

SEQ ID NO: 57060 - protein, 415 aa, Unknown
  Obtained from environmental sample
  DOMAIN (185)...(319): Thiamine pyrophosphate enzyme, C-terminal TPP binding domain
  misc_feature (1)..(415): Xaa is any amino acid
MSNKGQEKPALSWKHYSDDHEFHAEQVKVWEYFLSLPETPAGELKNAKAFAYKRPLFEFSGACGGCGETPYIKLMSQLVGDRALIGNATGCTSIYGGNLPTTPYAQRADGRGPVWANSLFEDAAEFAMGFRLTSDKLAVHAREIAEKAKSEGIAASVIDKILSNDQADEAKIDEMRKSIDELKAAIKNDSKPTAKLLLSLADFFVKRSVWGFGGDGWAYDIGFGGLDHVLASGKNVNLLCLDTEVYSNTGGQMSKATPIGAIAKFANAGKEMTKKDLGAIAMSYGYVYVAKISLGADMNQTIKAFREAESYNGPSLIIAYSHCINHGIDMSKGLEHGKAVVTSGLWPLFRYDPRLKDQGKNPFQLDSKEPSTSIEDYMYSEVRFKSLKQADPARADALLSKAKAHAERVGKSTSI

SEQ ID NO: 57061 - DNA, 1008 bp, Unknown
  Obtained from environmental sample
  misc_feature (1)..(1008): n is a, c, g, or t
ttggccgagagagcgaggagggcgtggggatcgaggtcgtggacagctcgcggagtcatcgccggttgcgaggccgacgtagggcgggacgggcggctcgacctcttccttgaggccggagagtacaaaatcttcacggaagggccgcgcaaggcggagggcaacgtccgcttggaagttaccaagtttgcgccgtttgactctaccggcgagggcggaagggcgggcggcaagaataagttcgggtatttggcgccgtttgggcaagtgtccacgcggctggtcgacaaggaggctcgcggatggtggatattcgttccccgcgacacgattgtctacatagaggcgatggggcggcacctaagcaacctcgcgatatttcgggagcgccttatcacccagaccgacgccaacgactttgtgaacaacagcgtttcaggaaaaccgctctacggggcgcgcatcgtcagcaggcttacccgcggaaagtatttaatcatggcctacggcggcaacagagacaaatataccgtcgccgacagcgcgtcgccgctgtatatgcagtggatggtacgttccgtggaaccggggaaaccgattaccggaaagataggcgcaagcggggtgaaccgcttcgccgccggctcgtcgcagaacatatcgtatttggtcgtggaaagcccgaagatgcaaaaactcggcctagaggaacgcgccgtaacggaatcggacggatcggtgcggacgcgggtgttagatacggatacgctctacagaaagccgcaaagcggctgctgccaagcgatggtgattgatgtaagcgaacgcaatctgtggacggtggtctcgataagcggggcgccgggctccgagtttaagatacgccgacgaacccacagggcaggtacagccgcgactacaaccggatgcggacggaacgtatcaactctccgcgctctacacaaccacgatgaacgacaacgtgggcatgtcgggcgcttttattga

SEQ ID NO: 57062 - protein, 335 aa, Unknown
  Obtained from environmental sample
  misc_feature (1)..(335): Xaa is any amino acid
MAERARRAWGSRSWTARGVIAGCEADVGRDGRLDLFLEAGEYKIFTEGPRKAEGNVRLEVTKFAPFDSTGEGGRAGGKNKFGYLAPFGQVSTRLVDKEARGWWIFVPRDTIVYIEAMGRHLSNLAIFRERLITQTDANDFVNNSVSGKPLYGARIVSRLTRGKYLIMAYGGNRDKYTVADSASPLYMQWMVRSVEPGKPITGKIGASGVNRFAAGSSQNISYLVVESPKMQKLGLEERAVTESDGSVRTRVLDTDTLYRKPQSGCCQAMVIDVSERNLWTVVSISGAPGSEFKIRRRTHRAGTAATTTGCGRNVSTLRALHNHDERQRGHVGRFY

SEQ ID NO: 57063 - DNA, 1704 bp, Unknown
  Obtained from environmental sample
  misc_feature (1)..(1704): n is a, c, g, or t
atggcgggtacaagcgcagacaagagggcgttgccgataggcaaatcttttttcgaccgcgtaattgaggacggcgcgtactacgtcgataaaacgctgtttgtccgagaccttatagacagagacagcgcagtcaccctctgcacccgccctcgccggttcggcaagacgctgaaccagactatgctcaagtgcttctttgaggacactgcgcaaataggcggccgggatacgcggtcgctgtttcgcggacttaagatagaggaagccggagagcggtacatggagtatcaggggaaatatccggtgatatttttgagcttcaaggaaacgggaaaagaaacttttgccgggaccggcggagcgtttaaggagattatatcggaggaatttatccggcacaattacgtcacgggaaaaatcggcgacgccgcaagcttgaaaaagtttgaaaaattctcttccggcgacggtgatatttcatcgtacgaaagctcgctcaaatttctaagcaaatgtttggagaattatcacggtagaagaacggtgattttgatcgacgagtacgatgttcccatgcaaagggcttgggcttgcaattattacaaagagatgattgacttcatccgcccgttcctcggcggcgcgctcaaaaataacccgcacctgcaattagccgtaatgaccggatgcctgcgaatttccaaggagagtatattcaccgggctcaaccatttggaagttatttcggtacttaataaatattactccgaatatttcggtttcactcaggacgagatggacgccatgttacggtactatgggatggaggacaaaacacagattgtaagggagtggtacaacggttatgtgtttggcgatacggaaatatataatccatggagcagtttgaacgttgtgcaatcttggattgtaaaaagaaatgagttcccgaaaccctattgggtaaataccagcggcaatgacatcgttcgcgatatgatagacaagatgaacgccgaaacaaggagcgggctcgaaaccctgatggccggcggaacggtttctgcgatagtccgcgacggcgtaacatataatgaaatatataaagacgccgacaatctctggaatttcctgttcttcaccggctatttgaagaaggtcggcgagtcggttgacagcataggaagaataatcttagagatgaagattccaaacaaagagttgcatattatttttgaggagaaaataaaggaatggtttaacgatagcgtaaaaaagaaagaccttagcgtgttctttaacgccattctcagcggcgacgccgagacttttcaactggagttgtccaaacttctcgccggtagcataagcttcatggacagcgccgagaatttttaccatgggtttatggtcggtgtcttatccggaatggaaggttacgatgtcaagtccaacagagagagcggtcacggccgtagcgatttagtcctatacagtgccaacggcgtggacaacaaagcggtaatattcgagttcaagatcgccaaagattttcgcgaaatgccggaaatgtgcgaagaagccctgaaacaaatagaagaaaataattacgccgcctattgggacaaagagggctatgacgacattgtcaagtacgggatatgtttttacaagaagagatgcaaggtgctgaaagattag

SEQ ID NO: 57064 - protein, 567 aa, Unknown
  Obtained from environmental sample
  DOMAIN (5)...(567): Protein of unknown function (DUF1703)
  misc_feature (1)..(567): Xaa is any amino acid
MAGTSADKRALPIGKSFFDRVIEDGAYYVDKTLFVRDLIDRDSAVTLCTRPRRFGKTLNQTMLKCFFEDTAQIGGRDTRSLFRGLKIEEAGERYMEYQGKYPVIFLSFKETGKETFAGTGGAFKEIISEEFIRHNYVTGKIGDAASLKKFEKFSSGDGDISSYESSLKFLSKCLENYHGRRTVILIDEYDVPMQRAWACNYYKEMIDFIRPFLGGALKNNPHLQLAVMTGCLRISKESIFTGLNHLEVISVLNKYYSEYFGFTQDEMDAMLRYYGMEDKTQIVREWYNGYVFGDTEIYNPWSSLNVVQSWIVKRNEFPKPYWVNTSGNDIVRDMIDKMNAETRSGLETLMAGGTVSAIVRDGVTYNEIYKDADNLWNFLFFTGYLKKVGESVDSIGRIILEMKIPNKELHIIFEEKIKEWFNDSVKKKDLSVFFNAILSGDAETFQLELSKLLAGSISFMDSAENFYHGFMVGVLSGMEGYDVKSNRESGHGRSDLVLYSANGVDNKAVIFEFKIAKDFREMPEMCEEALKQIEENNYAAYWDKEGYDDIVKYGICFYKKRCKVLKD

SEQ ID NO: 57065 - DNA, 852 bp, Unknown
  Obtained from environmental sample
  misc_feature (1)..(852): n is a, c, g, or t
atggctgaccgcacgttaatttcgtttgattatgcggtgaagtacctactgcgcgaacaagaaggctatgtgatacttagcggtttcctgaccgaactcatgggcaggaagatcgaagttatcggtcttctccccgacgaaaccaacaaatccgatcccgacgaaaagactaaccgcgttgacctgaaagcgcagatagacggcggcgaattcgccgtatttgaaatacagttccatcaagaatatgactttttcggcagggtactatacggcgtcagccatgcaataacagaccaagtccgcagtggaaaactgtacaatgtaaggaaagtctactcaataaatatcgcgtattacaacctgaccgcaaaacgcgagtacctattttttggaaaattcagcgggtttcaaggcgtccactttaaggaggaggcgatccggttcgcccaaacggccacccaagagtcgaaagagctccttgatattcatcccgaatactatttgatcttgccgaatatgttcgacgagacattgcgcgggaagttcgacgaatggatatacatcctaaagaactctaccgtccgcgacgatttcaccgccgccggtataaaagaggccgcggaaaagctaaacgagctgaccctgccgccggacaaacttgcggcgtatcataggtacatggaaaacattagaagcataaacagccaagcgatagcggcgagaatagagggcagagacgaaggcataagggggattgtcttgaatatgcacaaattaggctacagcattgcagatattgcaaaggccgccgtactctcggaacaagaaatcaatgatattttgaatcaatga

SEQ ID NO: 57066 - protein, 283 aa, Unknown
  Obtained from environmental sample
  misc_feature (1)..(283): Xaa is any amino acid
MADRTLISFDYAVKYLLREQEGYVILSGFLTELMGRKIEVIGLLPDETNKSDPDEKTNRVDLKAQIDGGEFAVFEIQFHQEYDFFGRVLYGVSHAITDQVRSGKLYNVRKVYSINIAYYNLTAKREYLFFGKFSGFQGVHFKEEAIRFAQTATQESKELLDIHPEYYLILPNMFDETLRGKFDEWIYILKNSTVRDDFTAAGIKEAAEKLNELTLPPDKLAAYHRYMENIRSINSQAIAARIEGRDEGIRGIVLNMHKLGYSIADIAKAAVLSEQEINDILNQ

SEQ ID NO: 57067 - DNA, 474 bp, Unknown
  Obtained from environmental sample
  misc_feature (1)..(474): n is a, c, g, or t
atgcctaaaaaacccgccatcgacacctccaaactcaaccaaatagacgcctacacttaccccgaacacgaccgcgccaacattccccctattggcatggcacaatacgacacagtagccagccccgaagctaaatatgaatatgacccccacatagacccgtccctgcaatgggcaggaaaaaaagaaggaacaacttttgaagtaccgacatcttcaatccatatacacgaaagcataaaaccccataaaataatccgctccgttcagacaattggagacgattatgccgatgaacaaggctggttattcgaatcagacgcggaaagagcaaaacgccgaaatgactctattgagttttaccaacataaaaacaaatggacaaaccgcctcatagccggagacagcctcgtcataatgaattccatgctgaaaaagaaggaatggcaggacaggtgcaaatggtctacatag

SEQ ID NO: 57068 - protein, 157 aa, Unknown
  Obtained from environmental sample
  misc_feature (1)..(157): Xaa is any amino acid
MPKKPAIDTSKLNQIDAYTYPEHDRANIPPIGMAQYDTVASPEAKYEYDPHIDPSLQWAGKKEGTTFEVPTSSIHIHESIKPHKIIRSVQTIGDDYADEQGWLFESDAERAKRRNDSIEFYQHKNKWTNRLIAGDSLVIMNSMLKKKEWQDRCKWST

SEQ ID NO: 57069 - DNA, 804 bp, Unknown
  Obtained from environmental sample
  misc_feature (1)..(804): n is a, c, g, or t
atggcgagattgattctgagagatatagtatcagatggcggaacaattctcgttaattttattgatttaacacaaaacgaaaaagttgcacatctagaatttataatagattcttcggatagccgtgttgctgaatggtcatccaattttaaatctccagcaatatatattcccccggaagatatgctttcacattcaaaaggatttcttgctcttgttaatgagcgaaaaatgccatttgaccagacacagattgatatactttcaaaagcctcgatacctgaaactaacaaaattactccaaatgcggaaaaagttattgacaggattaagactattatcggcggaaatgtggtttatgagaacgatacattttttataataaaagagagcggagaaaaagtatctttttcatttgaggcaagcggtttccgtaaatttggtttgttattgaagctgttacgcaatgggctgctggagaatggtacgattttgttttgggatgaacctgaaaatagtctaaaccctgaattattacctgatttggttaatatactgcttgaacttcaaaaaaacggcattcaaatatttgtcgctacacacagttacgcattggcccgatggtttgagttgaatatgacaaatgaaaatacacttaagtatttcaatatgcaaaaaaaagaaaatggtattgaatataataccgctgacacatactcaaaattaaaacaaagtgttcttgaagatgccggtgagaaattgtttaacgctgttgtgaaaaacggaatgggggtaaatgggtaa

SEQ ID NO: 57070 - protein, 267 aa, Unknown
  Obtained from environmental sample
  misc_feature (1)..(267): Xaa is any amino acid
MARLILRDIVSDGGTILVNFIDLTQNEKVAHLEFIIDSSDSRVAEWSSNFKSPAIYIPPEDMLSHSKGFLALVNERKMPFDQTQIDILSKASIPETNKITPNAEKVIDRIKTIIGGNVVYENDTFFIIKESGEKVSFSFEASGFRKFGLLLKLLRNGLLENGTILFWDEPENSLNPELLPDLVNILLELQKNGIQIFVATHSYALARWFELNMTNENTLKYFNMQKKENGIEYNTADTYSKLKQSVLEDAGEKLFNAVVKNGMGVNG

SEQ ID NO: 57071 - DNA, 816 bp, Unknown
  Obtained from environmental sample
  misc_feature (1)..(816): n is a, c, g, or t
atgttaggtgtttttgactccggttttggcggtttaaccattctcaaagatttggcaaaggctttgcctaattacgattttgtttatttgggagataacgccagagcaccttacgggaatcgcagttttgatagcatataccgctattcgcttcaggcggtgagttatttgttttccattggctgcccccttgttatttttgcttgcaacacggcatctgcaaaagctttgcgcacaattcagcaaaaagacttgcaaaaaatagcccctgctaatagggttcttggcataatccgtcccttggcagaagaaataggcaaattcacaaaaaccaaatgcgctggtattttaggcacagaagggacagtaacctcaaagagctatttgttggaaatagcaaaattctggccggatttgcacatagagcaagaggcttgcccaatgcttgttcctcttgtggaaaacgccctgctggaacaccctgccacagaggtatttgtcagggaatatactcaaaaaattttggcaaaaaattcccaaatagacaccctagtccttgggtgcacccactaccccctactccaggggatttttttgaaaattctgccaaaaaatataaaaattatctcgcaaggcagcattatagcccaaaaaacgcttgaatacctagcaaatcactcagaaatagatgctagaatcagcaaaaacggcaaaattcgctttttgaccaccgattccccagaattttttgaaaaaggtgcaaaagtattctggaacacccaaataaaagcggaaagcattttactatattcttaa

SEQ ID NO: 57072 - protein, 271 aa, Unknown
  Obtained from environmental sample
  DOMAIN (1)...(224): Asp/Glu/Hydantoin racemase
  misc_feature (1)..(271): Xaa is any amino acid
MLGVFDSGFGGLTILKDLAKALPNYDFVYLGDNARAPYGNRSFDSIYRYSLQAVSYLFSIGCPLVIFACNTASAKALRTIQQKDLQKIAPANRVLGIIRPLAEEIGKFTKTKCAGILGTEGTVTSKSYLLEIAKFWPDLHIEQEACPMLVPLVENALLEHPATEVFVREYTQKILAKNSQIDTLVLGCTHYPLLQGIFLKILPKNIKIISQGSIIAQKTLEYLANHSEIDARISKNGKIRFLTTDSPEFFEKGAKVFWNTQIKAESILLYS

SEQ ID NO: 57073 - DNA, 1779 bp, Unknown
  Obtained from environmental sample
  misc_feature (1)..(1779): n is a, c, g, or t
gtggaagttatgcgaggttgcacccaaggttgccgtttttgccaagccggatattggtatagaccaaccagagaattagatgcagacgatgttttagacattgccaaagaagggctaaaagccaccggagaccgccaacttgggcttttatcgctttccaccgcagactattcccctgttgaaaaaatgcttgactcctttattgaagacccatttttcaaaaacatagatgtatctttgccctcgcttagggttagcagttttggcagtagccttgcgaacaaggtttatgaactcaaaggcgggcgcagtgcaacgcttgcacccgaaagcggctctgagcggctccgaaaattcataaacaaaaccataacaaatgcagatattgaagccgcaactcaaagtgcgtttcaaaatgggttcaacaaaataaaactatatataatggttggctttcccaccgaaacagaagaagacatacaagacttggtaaaactaacggaacgccttttggaaatagggcttgcttgcaacaaaaaatgccaaataaatttgagcgttggaatttttatccccaaagcctggactcccttgcaatgggcaccattcgtgaaaaaggaaaaagcaatagcacacataaaaattttaagagacaaattttataagcacaaaaacgtgaaagtttcgtggaattcttgggaaacagcgcatttagaagcaatatacagccgaggcggtcaaaacctagcccccttgatttacgaagcatacaaaagaggcttagtttttgaaagcgacagcaatcatttaaacccaagcgaatgggaaaaaatcagaaacgctctaaactacagcgatgcttggctttttgaggaaataaaccaagaagaaaatttgccttgggacataatagatgcgggcataagcaaaaaatttttgcaaagagaatgggaaaaagcgcacaacccaaatgcggaacccgtgccaaattgcaaatggggcaaatgcggggcctgcggaatcccgggcaacggcaaagacaccattttggggaaaattcccacaggggcagccacagggggctgccccgacagtgtacgggcaacccccgtggaagggcagccacagggggctgcccctacgggggttgcctccgcgggaattttcccatataaaatcattttccgcaaaaccaaaagcagccgttttttgccgcatcaaaacacattatcatttttcgaaagggcatttgtgaaacttgatattccaataaaattcagcgaagggttcagccccaaaccacgcatagcaaacacaggagcattgccgctgggactggaatctctttgtgaaattatttccattgaacttttagagaaattggatttggagaataaaaaagcagagcttgtgaaaaacataaatgaaatttttccgcaaggcttggagattgtctcaatagaacctttgcaaataaaactttcagcgcaagttcccaaatccacggattactgcatggcaggcgaatatccgagcggtcttgtgcaaaaaaaagaaaaaaataagttacctgaggttttaaatcacagggggcaaagcataaatttaaatgagcatattatttcaattaccgaagcagaaaatgctctgcacatcacggttaaatgcaacgagcaaggtaccacagcaagtcctttcactatttacagcggtcttttgaacataagcgaacaagaggccagagccttgaacatagtaaagataaacgttggatattaa

SEQ ID NO: 57074 - protein, 592 aa, Unknown
  Obtained from environmental sample
  DOMAIN (1)...(167): Radical SAM superfamily
  misc_feature (1)..(592): Xaa is any amino acid
MEVMRGCTQGCRFCQAGYWYRPTRELDADDVLDIAKEGLKATGDRQLGLLSLSTADYSPVEKMLDSFIEDPFFKNIDVSLPSLRVSSFGSSLANKVYELKGGRSATLAPESGSERLRKFINKTITNADIEAATQSAFQNGFNKIKLYIMVGFPTETEEDIQDLVKLTERLLEIGLACNKKCQINLSVGIFIPKAWTPLQWAPFVKKEKAIAHIKILRDKFYKHKNVKVSWNSWETAHLEAIYSRGGQNLAPLIYEAYKRGLVFESDSNHLNPSEWEKIRNALNYSDAWLFEEINQEENLPWDIIDAGISKKFLQREWEKAHNPNAEPVPNCKWGKCGACGIPGNGKDTILGKIPTGAATGGCPDSVRATPVEGQPQGAAPTGVASAGIFPYKIIFRKTKSSRFLPHQNTLSFFERAFVKLDIPIKFSEGFSPKPRIANTGALPLGLESLCEIISIELLEKLDLENKKAELVKNINEIFPQGLEIVSIEPLQIKLSAQVPKSTDYCMAGEYPSGLVQKKEKNKLPEVLNHRGQSINLNEHIISITEAENALHITVKCNEQGTTASPFTIYSGLLNISEQEARALNIVKINVGY

SEQ ID NO: 57075 - DNA, 912 bp, Unknown
  Obtained from environmental sample
  misc_feature (1)..(912): n is a, c, g, or t
atgggcgacgtaaaagaaacgcaggatcatataacatctattgatctggcttcggcagttgagggaatagacataatagtagacgcccattctcattcttattttgaaattccaaaaagagtagataacacatggatagtgtccgcaaatgaaatgggaaaatatatgggttttggaaggctcaccatacgtaacggaaaacttactgattttgggtgggtgtcgatagccgcaagaccggatgtcgatatggagacaatgcttaaaccttatatcgaaaaagccggagccttcttaaagcaagaaataggagaagcctccgatacatttgtctttggaaatcgtctaacgcggtatcaggaaacggcaattggcaatatgattaccgacgcaaatgtctggtacttacgaaatgtaagcaaacaacaagttgatttcgcgtttcataacggcggaaatatacgcgcggaacttaaaaaaggaccgataacgcaggaaaatattttaacggttcttccctttgaaaattatctttttgtagcttcaatgacaggttcacagattattaaactgtttgactttatcgcgacaattccgcagggaaacggcggattcccgcagttctcaagcgacgtgcgttatacaattgataaaacttcaatgggcggagtaattaaggatttaactatcggtggcaagcctgttgatcctaaccgcgtgtaccgtttttgcacaaacgattatattttgggcggcggagacggttatacgccgatgttagacgcaacagataaattaaatacttcgatattactttcgtatgttgtaacggaatatattaaagcgaataaaacaataaaacccgtaacagacggaagattgataattttaggcggagtaaagattcagtaa

SEQ ID NO: 57076 - protein, 303 aa, Unknown
  Obtained from environmental sample
  DOMAIN (102)...(261): 5'-nucleotidase, C-terminal domain
  misc_feature (1)..(303): Xaa is any amino acid
MGDVKETQDHITSIDLASAVEGIDIIVDAHSHSYFEIPKRVDNTWIVSANEMGKYMGFGRLTIRNGKLTDFGWVSIAARPDVDMETMLKPYIEKAGAFLKQEIGEASDTFVFGNRLTRYQETAIGNMITDANVWYLRNVSKQQVDFAFHNGGNIRAELKKGPITQENILTVLPFENYLFVASMTGSQIIKLFDFIATIPQGNGGFPQFSSDVRYTIDKTSMGGVIKDLTIGGKPVDPNRVYRFCTNDYILGGGDGYTPMLDATDKLNTSILLSYVVTEYIKANKTIKPVTDGRLIILGGVKIQ

SEQ ID NO: 57077 - DNA, 687 bp, Unknown
  Obtained from environmental sample
  misc_feature (1)..(687): n is a, c, g, or t
atggtaactgttatttcgttgggcgggtcaattgtcgcgccgaaagaggctgatctggaatttttgaaaaattttacaagcgttattcgatcatttatagaagcggattccaacaggcgttttatttttgttgtgggcggtggggggcctgcgcggatatggcagaacgcttatcgagaaatttcagcgggcggcgtaaaagacgaagaagcggactggatagggattatggctacaagattaaacgcgcaattaataaaagcgattatgggcgagtggtgtgcgcaggaagtggttactaacccacgcgaggttgaccccctgacggggcatgtgcttgtagccgccggctggaaaccggggttttctacggattacgatgcggtactgttagctgaacgttttggcgccaaaatgctgataaacctttcaaatatagaaaaagtttacacggcggatccaaagaccgacccaaatgcacgtccaatcgataaaataacttgggctgattttagagctatggtcggcgatgaatgggttcccgggaaaaatgttccgtttgatccggttgccagccgccatgcggagaaaatcggcttaaaagttatttgcgctgccggtaaaaatcttgacaacttaagaaagattcttagcgacgaagaatttaccggcactacaatttactga

SEQ ID NO: 57078 - protein, 228 aa, Unknown
  Obtained from environmental sample
  DOMAIN (1)...(206): Amino acid kinase family
  misc_feature (1)..(228): Xaa is any amino acid
MVTVISLGGSIVAPKEADLEFLKNFTSVIRSFIEADSNRRFIFVVGGGGPARIWQNAYREISAGGVKDEEADWIGIMATRLNAQLIKAIMGEWCAQEVVTNPREVDPLTGHVLVAAGWKPGFSTDYDAVLLAERFGAKMLINLSNIEKVYTADPKTDPNARPIDKITWADFRAMVGDEWVPGKNVPFDPVASRHAEKIGLKVICAAGKNLDNLRKILSDEEFTGTTIY

SEQ ID NO: 57079 - DNA, 459 bp, Unknown
  Obtained from environmental sample
  misc_feature (1)..(459): n is a, c, g, or t
gtggttgatcgcctcaatggtctggggcatgaccccgtcatccgctgctacaaccagcaccacgatgtcagttacctgagcgccccgcgccctcatgcgcgtaaacgcttcgtggcccggcgtgtcaaggaaggtgattctgccgtgcggggtttctaccatgtacgcgccgatgtgctgggttatcccgccaaactcgcccgacactacgtccgctttccggatcgcgtccagcagtttggttttgccgtggtcaacatgtcccataacggtcacaaccggcggcctgggcagcatgtccgcgccttcgtccgttccggtgtctatgatggtctcgtcatacaggctgatgatttttacatcggcgccgaattcggcggccagtatcgtcgcggtatcggcgtctatctgctggttaatggtaaccatcatgccaagtttcatcagcttctggattaa

SEQ ID NO: 57080 - protein, 152 aa, Unknown
  Obtained from environmental sample
  misc_feature (1)..(152): Xaa is any amino acid
MVDRLNGLGHDPVIRCYNQHHDVSYLSAPRPHARKRFVARRVKEGDSAVRGFYHVRADVLGYPAKLARHYVRFPDRVQQFGFAVVNMSHNGHNRRPGQHVRAFVRSGVYDGLVIQADDFYIGAEFGGQYRRGIGVYLLVNGNHHAKFHQLLD

SEQ ID NO: 57081 - DNA, 882 bp, Unknown
  Obtained from environmental sample
  misc_feature (1)..(882): n is a, c, g, or t
ttggcccgggaaagtacgcgcgatcttcatgaccgcggcgataaactcaagcacgcgtctccatccatgcccgttgaaattcttggctttgagggaatccccaacgccggcgatcccttgcaggcggttgaagacgagaaaatagcccgcgagtattcgtccaaacgccaggaactgaaacgcttcgaggacgccaagaacttcaagcaggtgacggccgagaccctgcgagacaggataagcgacggcaccatacaggaattaaaagttattatcaaggctgacgttcaaggttcggctgaggcgctcaagagcagccttgaaaaactttccacaaaagaaatccgattgcatgtcatacaggccctgcccggcccgattaacgaaggcgatgtcgatctggcgattgcgtccaaggccatcatcataggctttaatgtgcggccccttcccaaagctaaggttttggcggagcaggaaaaagtcgatatacgcaaatacaacatcatatacaaggcggttgaggaaattcatcaggcgatggagggcatgctcaaacccgataccaaagaggaagttatcgcttcggtagaggtgaggaataccttcaaggtgccaaagattggaaccatcgctggctgctttgtgcaaagcggcatagtcaagcgcagcgccagcgtcaatgtaatccgcgcggagatagtgatccactcgggcaaaatcgcatcgctcaggcgcttcaaggacgacgcccgcgaagtggcggccggttacgagtgcggtatagggctggaaggctttgacgacatacaggtcggcgatcaatttgaagtgatcgagattgtagaagtcgcgaggaagttgagcccaaatagggagtag

SEQ ID NO: 57082 - protein, 293 aa, Unknown
  Obtained from environmental sample
  DOMAIN (209)...(277): Elongation factor Tu domain 2
  misc_feature (1)..(293): Xaa is any amino acid
MARESTRDLHDRGDKLKHASPSMPVEILGFEGIPNAGDPLQAVEDEKIAREYSSKRQELKRFEDAKNFKQVTAETLRDRISDGTIQELKVIIKADVQGSAEALKSSLEKLSTKEIRLHVIQALPGPINEGDVDLAIASKAIIIGFNVRPLPKAKVLAEQEKVDIRKYNIIYKAVEEIHQAMEGMLKPDTKEEVIASVEVRNTFKVPKIGTIAGCFVQSGIVKRSASVNVIRAEIVIHSGKIASLRRFKDDAREVAAGYECGIGLEGFDDIQVGDQFEVIEIVEVARKLSPNRE

SEQ ID NO: 57083 - DNA, 564 bp, Unknown
  Obtained from environmental sample
  misc_feature (1)..(564): n is a, c, g, or t
ttgatcgccgacctgtatgtcgtcaaagccttccagccctataccgcactcgtaaccggccgccacttcgcgggcgtcgtccttgaagcgcctgagcgatgcgattttgcccgagtggatcactatctccgcgcggattacattgacgctggcgctgcgcttgactatgccgctttgcacaaagcagccagcgatggttccaatctttggcaccttgaaggtattcctcacctctaccgaagcgataacttcctctttggtatcgggtttgagcatgccctccatcgcctgatgaatttcctcaaccgccttgtatatgatgttgtatttgcgtatatcgactttttcctgctccgccaaaaccttagctttgggaaggggccgcacattaaagcctatgatgatggccttggacgcaatcgccagatcgacatcgccttcgttaatcgggccgggcagggcctgtatgacatgcaatcggatttcttttgtggaaagtttttcaaggctgctcttgagcgcctcagccgaaccttgaacgtcagccttgataataacttttaa

SEQ ID NO: 57084 - protein, 187 aa, Unknown
  Obtained from environmental sample
  misc_feature (1)..(187): Xaa is any amino acid
MIADLYVVKAFQPYTALVTGRHFAGVVLEAPERCDFARVDHYLRADYIDAGAALDYAALHKAASDGSNLWHLEGIPHLYRSDNFLFGIGFEHALHRLMNFLNRLVYDVVFAYIDFFLLRQNLSFGKGPHIKAYDDGLGRNRQIDIAFVNRAGQGLYDMQSDFFCGKFFKAALERLSRTLNVSLDNNF

SEQ ID NO: 57085 - DNA, 1431 bp, Unknown
  Obtained from environmental sample
  misc_feature (1)..(1431): n is a, c, g, or t
atgcagctccaggagatagtgaaaagggaagtaaaagcttacggaagcctggtcattaacgccggcggcggcggctttatgggtatcggcggcagcgggggcggcaactccggttccctcagaataagccttccgaaattcgaggacaggattgaaaccgccgatgacatcaaggccatactgaggccgcattttaacgaattcccgggggtgtcctttagccttggcggtggttttagcatgtccatgatgggcggcaaccctgtggatataatactccgtaccgacaatctggttaaaggcaaggcactggcggaacgaatagcggctctgctgaaagagcgcattgatgatatcacagagccgtctgtcgatcttagcgacggccttccccagatcgaaataagaattgaccgggaaaagatgtacgccctggggcttaacacctacaccgtgggcaacgagatcaaggccgcggtggacggtgttaccgccaccaggtacaaaagcggcggcaaggattacgacgttttattgatactcgcggaagccgaccgtagtacccgtccggcgctggaccacattttcatcaacagccagatggcggggcgcgttcccctttccagttttgtgcagtacgcggaaggcacgggcccgatgaccataaaccgcgagaaccagagccggatcattcacgtaacggcgggagcgaaagccggaacaagggtgaacaccctccagagcagaatagaggcccttatgactgcggaagttccggttgaggacgacgtgatcatcgagtacggcggcgacaacgcggaaatggttaagatgatgacccgcttcgccctcatctgcgtcgtggcgattctgttggtattcggcgtcatggcgagcctttttgaatccttccgggatcctttcatcatcatctttacgattcccctttcgttcataggcattgtggccatctacctgatgacaggcgacactttcaatattcttaccgccgtggggcttctcgtgcttgtcggcgttattgtaaacaacgggatcgtgcttgttgactacacgaacctgcttcgcaagcgcggctattcccttcacgacgcctgcgtggaagccgccggaaaccggctccgcccgatactgatgaccaccctcactaccattctggggcttttacctatggcgtttttccccggtgaaggttcggagcttgtggcgcccatcggaaagaccgttctaggcggcctctcttttggaacattaatgaccctgttcctgatgcccacggtttatttcatcatgaacaagcgttccgacgagcgggcggcaaaggccgaagccagacgcgagcggattgccgcaggcttaaggcgaaaggatgttaaggcggaaacaaaggaggccaatagtggtacggcttga

SEQ ID NO: 57086 - protein, 476 aa, Unknown
  Obtained from environmental sample
  DOMAIN (260)...(440): Protein export membrane protein
  misc_feature (1)..(476): Xaa is any amino acid
MQLQEIVKREVKAYGSLVINAGGGGFMGIGGSGGGNSGSLRISLPKFEDRIETADDIKAILRPHFNEFPGVSFSLGGGFSMSMMGGNPVDIILRTDNLVKGKALAERIAALLKERIDDITEPSVDLSDGLPQIEIRIDREKMYALGLNTYTVGNEIKAAVDGVTATRYKSGGKDYDVLLILAEADRSTRPALDHIFINSQMAGRVPLSSFVQYAEGTGPMTINRENQSRIIHVTAGAKAGTRVNTLQSRIEALMTAEVPVEDDVIIEYGGDNAEMVKMMTRFALICVVAILLVFGVMASLFESFRDPFIIIFTIPLSFIGIVAIYLMTGDTFNILTAVGLLVLVGVIVNNGIVLVDYTNLLRKRGYSLHDACVEAAGNRLRPILMTTLTTILGLLPMAFFPGEGSELVAPIGKTVLGGLSFGTLMTLFLMPTVYFIMNKRSDERAAKAEARRERIAAGLRRKDVKAETKEANSGTA

SEQ ID NO: 57087 - DNA, 1521 bp, Unknown
  Obtained from environmental sample
  misc_feature (1)..(1521): n is a, c, g, or t
ttgagcgacacccgatctgatattttgcaagatctggatttacgttttatacgatgcaataaaacatttgaaaactattttaatgtccgtgaagcggacataatcgggaaagggaatattgacggtctgggactgactgcgaaaacagcggagaaatacaaagaacgggatctcaaagttatcaacgaaggccggatggttgtgtttgaggaatatataccttccgccgacggatccatacagctttttgaaacttccacagttcccatgacgcaaaacggacagacagtcggagtgctggccatatcgcataacataacagagcgtaaagaaatggaagagcaggcgcttagcgccagccgcgcgaaatcggcgttccttgccaacatgagtcatgagatacgcacgcccataaacgccgttatcggcatgaccacgataggaaagtccgccgccaatgccgaacgcaaagattactgctttaccaaaattgaggaagcttcttcgcacctgttgggcgtaattaacgacattctggatatgtccaagattgaagccaacaagtttgagctttcgccggtagaatttaattttgaaaagatgattcagtcggcggtcaatgtcgtcaacttccgtgtggacgaaaaaaagcagaacctaaccgtgcgaattgacagggaaatccccgcaaatctcattacagacgatcagcggctggtacaggtcattaccaacattctgggcaacgcgatcaaattcacgccggaaaaaggttccgtcagccttgacgcgcggttcgtgggagaagaaaacggcgtgtgtaccattgaggttttgataagcgacacgggcatcggcatcagccgggaacagcaggagcgtctgttcaattctttccaacaagcggagatcaccacttcgcgacgcttcggcggaaccggcctgggcctttccatttccaaaaacattatcgaaatgatgggcggtaaaatcagcgtaaaatcctgtccgggaaaaggctccgttttttattttacaatacaggcgaaaaatggcgtcccggtaaaccatccaatagagaaccttccgggggcagaacaaacggcgaaagaaaaaaaacaggagcttgacgccctcttcgccgggcggcgcgtgcttttggtcgaagatatggaaataaaccgagagatagtgctggcgctgcttgagccaacgcagttggagatagactgcgccgaaaacggggtggaggctgtgcgcaagttcagtgaaaattccgagaaatacgaattaattttcatggacatacagatgccagaaatggacggttatgacgcgacaaagcgtatccgaagccttgatgtaccaaaagcaaaaaccattccgataatcgcgatgacagctaacgtgtttcgtgaggatattgaaaaatgtatatcggccggcatgaacagccatataggcaagccattgaattttgatgaagtcctggataagctaaatagctatctgctcaaataa

SEQ ID NO: 57088 - protein, 506 aa, Unknown
  Obtained from environmental sample
  DOMAIN (2)...(111): PAS fold
  misc_feature (1)..(506): Xaa is any amino acid
MSDTRSDILQDLDLRFIRCNKTFENYFNVREADIIGKGNIDGLGLTAKTAEKYKERDLKVINEGRMVVFEEYIPSADGSIQLFETSTVPMTQNGQTVGVLAISHNITERKEMEEQALSASRAKSAFLANMSHEIRTPINAVIGMTTIGKSAANAERKDYCFTKIEEASSHLLGVINDILDMSKIEANKFELSPVEFNFEKMIQSAVNVVNFRVDEKKQNLTVRIDREIPANLITDDQRLVQVITNILGNAIKFTPEKGSVSLDARFVGEENGVCTIEVLISDTGIGISREQQERLFNSFQQAEITTSRRFGGTGLGLSISKNIIEMMGGKISVKSCPGKGSVFYFTIQAKNGVPVNHPIENLPGAEQTAKEKKQELDALFAGRRVLLVEDMEINREIVLALLEPTQLEIDCAENGVEAVRKFSENSEKYELIFMDIQMPEMDGYDATKRIRSLDVPKAKTIPIIAMTANVFREDIEKCISAGMNSHIGKPLNFDEVLDKLNSYLLK

SEQ ID NO: 57089 - DNA, 1026 bp, Unknown
  Obtained from environmental sample
  misc_feature (1)..(1026): n is a, c, g, or t
ttgaaattcagcgagttcgagtcgctggccgacaaaacgctcttcgtctccgcgacgcccggcgactacgagttggagaagagcggcggcgtcatagtggagcaggtaatccgcccaacgcacctggtcgacccgcccatagaactgcggcccgcagccaatcaggttgacgacctcatcgaccaactgcgcacaacggcggaacgcggcgaacgggcgctcgtcactacgctaacgaagaaaatggccgaagatctgaccgagtacctcggttccatcggtctgcgagtgcgctatctgcactccgagatcgacacgctggagcgtacggaaatactgaagagcctccgtgtgggtgattttgacgcgttgatcggcatcaatcttctcagggagggcctggacctgccggaggtggcgcttgtggcgatactagacgccgacaaggagggttttttgcgttccacacgctcaatcgtacagatcgccggtcgcgcggcacgcaatattaacgggcggatcaccctttacgccgatacaatcaccgactccattaagagggcgatagaggagagcgagcgaagacgcaacaaacaattagcctacaacaaggaacacggcatcaccccgcgcagcgcggaaaggcggatcgacgctatgacctccccgtacgggacatcgtcaaccatagacaccgaccttgacgacgccgacatcgcccagaccgccgaaccgcgcgccggatacgggaaaggcggcaaaggcaagcggtcgaccaagcaaagaaaggacgccaagcaacgcgggcgcggcaacaaaatatcatcaacaaataccgaaaataaccgattattagatatagaagccgagatgattgaggccgccaaaaacttagatttcgagagggccgcgacgctacgcgacaagatggccgctatgatacaaacaacggaacgcccaacgtgggtatctccggttgaacggctgcgcgacacgataataacgaagagcgagaggaaaaaatga

SEQ ID NO: 57090 - protein, 341 aa, Unknown
  Obtained from environmental sample
  DOMAIN (281)...(316): UvrB/uvrC motif
  misc_feature (1)..(341): Xaa is any amino acid
MKFSEFESLADKTLFVSATPGDYELEKSGGVIVEQVIRPTHLVDPPIELRPAANQVDDLIDQLRTTAERGERALVTTLTKKMAEDLTEYLGSIGLRVRYLHSEIDTLERTEILKSLRVGDFDALIGINLLREGLDLPEVALVAILDADKEGFLRSTRSIVQIAGRAARNINGRITLYADTITDSIKRAIEESERRRNKQLAYNKEHGITPRSAERRIDAMTSPYGTSSTIDTDLDDADIAQTAEPRAGYGKGGKGKRSTKQRKDAKQRGRGNKISSTNTENNRLLDIEAEMIEAAKNLDFERAATLRDKMAAMIQTTERPTWVSPVERLRDTIITKSERKK

SEQ ID NO: 57091 - DNA, 900 bp, Unknown
  Obtained from environmental sample
  misc_feature (1)..(900): n is a, c, g, or t
atgacgagagaagaagcgctggcagagatcaagagtttccgcagcttggaaaacgtcatattcgctatgcgtataatagcgaagatcggcacggtcgcggatatcttcacgctcatgcccatagccacgaataacctttccaacgcgtcaataaggaaactcgccacggacgcgatctgttccatcatcaaagagagcctgatcaccagattcaacgaactgacaccggatatgcgccaaaagttggccaaaatactgcaaacgctcgaccccaagatcatcaacgacctcagcaaagacctcttctcgaatgacaccgagcggcgcctctccgcgttgcagatgatgggcatcctgagacgccatccaagagtaaaagatatagtcgccaagctgctgcaagacaaagacaccaaaatcagggcgaccgccatagccctgctcggcaaaatgatgggcccgaacgaccatcacctgatcattatgctcttaggcgacgacgacaagcgcgtgagggcaaacactgtggaggcgctggagagcatgggaaatccggaggtgatccccatcctcaccccataccgcaaagatccaaacaaccgcataaggggaaacgttttgaaggccctctacaacctcggccaaaccgacattgaggaagacctgttagatatgctgacatcgaccgaaccgttgcaaaaggcctcggcactgtgggtcgtaacgcagacaaaatacggcgaaggcaacaacaaaaaggtggtcgatgccgccggagcctgtttgctttgcgacaacaagatggtacacagaaacgcggaagcggcgctgacggcgctcgggacgccgaggtgcacggggtacattaattacttgggcaggattttcatatttccgtag

SEQ ID NO: 57092 - protein, 299 aa, Unknown
  Obtained from environmental sample
  misc_feature (1)..(299): Xaa is any amino acid
MTREEALAEIKSFRSLENVIFAMRIIAKIGTVADIFTLMPIATNNLSNASIRKLATDAICSIIKESLITRFNELTPDMRQKLAKILQTLDPKIINDLSKDLFSNDTERRLSALQMMGILRRHPRVKDIVAKLLQDKDTKIRATAIALLGKMMGPNDHHLIIMLLGDDDKRVRANTVEALESMGNPEVIPILTPYRKDPNNRIRGNVLKALYNLGQTDIEEDLLDMLTSTEPLQKASALWVVTQTKYGEGNNKKVVDAAGACLLCDNKMVHRNAEAALTALGTPRCTGYINYLGRIFIFP

SEQ ID NO: 57093 - DNA, 561 bp, Unknown
  Obtained from environmental sample
  misc_feature (1)..(561): n is a, c, g, or t
ttgagcaatcgcttcttgatatttgagtgcagcaaaatgggctgggaaaaaacaggcgaaaccagctttgaaaaaatagttccgtctgtgcctgccacaacgcggaaaatcaccgaggcgcttttgccgctcattgagggctgcgaagtgttggcgggtggcccgttggtgggtattccattttcggtatttgaccgagctgggcttcatatttttgaaataggcaaaataggtggcgaaacctttgacggcataatggaagagatatgcaacgcagatgccgccgttgccgcaaaggaggcgattatcagggaagcaaagccagttgaaacatccacgcccggagtttattttttggatttgatagctttgcaaaaagaatgcccggaggttaccagcaaaaaagcgatgatggactttttgcaaaacacgccctttatggaactccacctagtttgcaaacatatcccaccgtggatagaaaacagcggtgcgtacaagataaaaattacgagcgacaaagctgggacggttcaggcgattatcactaaggggtgttga

SEQ ID NO: 57094 - protein, 186 aa, Unknown
  Obtained from environmental sample
  misc_feature (1)..(186): Xaa is any amino acid
MSNRFLIFECSKMGWEKTGETSFEKIVPSVPATTRKITEALLPLIEGCEVLAGGPLVGIPFSVFDRAGLHIFEIGKIGGETFDGIMEEICNADAAVAAKEAIIREAKPVETSTPGVYFLDLIALQKECPEVTSKKAMMDFLQNTPFMELHLVCKHIPPWIENSGAYKIKITSDKAGTVQAIITKGC

SEQ ID NO: 57095 - DNA, 1182 bp, Unknown
  Obtained from environmental sample
  misc_feature (1)..(1182): n is a, c, g, or t
atgaatatctcacctgaaaaagttattgcttatttccagcccattctttcggcagattcaaaaacggtatattcttacgaaattctagggcggtatatagattatgatggctccgtacgctccttaggtccgttttttaacgatataaacactacaaacgaagaagcgttgcaagtggataggcttgtaagacgatatgccttgaaaaaatatgctgaagaaaaacgcagtgagtatttatttatcaacataaggctcgcttggcttatgccattcacagacaggccggatttaatgctaaccttgcaatgggcagaggaatttggcatagcccttgaaaaattggttatagaaatacgggaagaagattttaatgcaagtgatgcgtacattcacgctatacttcattataaaggtgttggctgccgcatagcacttgatgattatggaaaaaacgcaagcaatattgagcggctggcagagataaaaccagacatcataaaaatagatatggactatatccataacagcgaaaaatcttaccattaccgcgaatatctgcgctccattgcagattttgctgagtctgttggaatagaagttctgtacgaaggtatagaaacgcgagaacaacttgatatttgcatggctttaaagggcagattctaccaaggatttttaattgcccgccctcaagcctcaatgaacgatgcagttatagacaaagctgttttttctgaatcaattgaaaaattatatacggttctgcaagataaaatagttcaaacagaagctctacgtaagtccttagatgctcaagttgagcatttcttggcagaaaaccattttgattccgagaaaaaaaattacgacgaatatcttacaaaactcggccagaggctgcaaaatgtacggcttgtttatttatgcgacagccgcggtaaccagcttacctccaacatcgtacatccaacctatgccacaccatacaataacgagcacaaaaacaaaaattgggtttggcgcgggtatttttacgaggctttgaaatctattgccattggtgaaaaaagtcacctatcggattcctatcacgatttttcaaccaaagacaaagttcgtacttattcatactcaataagcaacgacttttttttattcatcgatatcaacaccccttag

SEQ ID NO: 57096 - protein, 393 aa, Unknown
  Obtained from environmental sample
  DOMAIN (1)...(231): EAL domain
  misc_feature (1)..(393): Xaa is any amino acid
MNISPEKVIAYFQPILSADSKTVYSYEILGRYIDYDGSVRSLGPFFNDINTTNEEALQVDRLVRRYALKKYAEEKRSEYLFINIRLAWLMPFTDRPDLMLTLQWAEEFGIALEKLVIEIREEDFNASDAYIHAILHYKGVGCRIALDDYGKNASNIERLAEIKPDIIKIDMDYIHNSEKSYHYREYLRSIADFAESVGIEVLYEGIETREQLDICMALKGRFYQGFLIARPQASMNDAVIDKAVFSESIEKLYTVLQDKIVQTEALRKSLDAQVEHFLAENHFDSEKKNYDEYLTKLGQRLQNVRLVYLCDSRGNQLTSNIVHPTYATPYNNEHKNKNWVWRGYFYEALKSIAIGEKSHLSDSYHDFSTKDKVRTYSYSISNDFFLFIDINTP

SEQ ID NO: 57097 - DNA, 438 bp, Unknown
  Obtained from environmental sample
  misc_feature (1)..(438): n is a, c, g, or t
atggaatgtacacattgtggcagtacgggtttcaagaagaatggcgtgcacaaaggcgtacaaaggtatcaatgcagcagttgcaagcaattcttcagcgataaagttaggaaattttcttaccacgacaaatgccgagccttggatctctatttgaataacatcggcgttaggaaaatcgctaagtttatgaaatgttcatcgtcaatgatagtccgctggataagggatgccgcacagaaccttaaattgcagttgtcgcatacatctgaatgccagaacgaaatatacactgatataaaaaaacgcctgccgggttgctgcatagattgtttattctctgcgaagcggcaaggttattgcgtttgcgactggcgaaagaatggagccgtgcaaaagatatacaggaaagtcaaggagcttatcagatacatatag

SEQ ID NO: 57098 - protein, 145 aa, Unknown
  Obtained from environmental sample
  DOMAIN (1)...(79): Insertion element protein
  misc_feature (1)..(145): Xaa is any amino acid
MECTHCGSTGFKKNGVHKGVQRYQCSSCKQFFSDKVRKFSYHDKCRALDLYLNNIGVRKIAKFMKCSSSMIVRWIRDAAQNLKLQLSHTSECQNEIYTDIKKRLPGCCIDCLFSAKRQGYCVCDWRKNGAVQKIYRKVKELIRYI

SEQ ID NO: 57099 - DNA, 510 bp, Unknown
  Obtained from environmental sample
  misc_feature (1)..(510): n is a, c, g, or t
atgagacctttcaattcactcgtagccttgcccatttcggttttgctctttgcaaacacaatggcattggcacaagttgctcctgctagcgcagaggcggctccagaacctgctcctgttgcggagccagtagttgccccaccagcacaagttgttgtgacagaacccgctccggttgcagccaaaccggaaccagaagcgaaaccggtagctaaagccgcccctatgaaaatttctctatatggattcttccagctcaacacaataattgaaggcggtgcaaatggcaacagagcctggtcaatttggcttcccaaaaagtctgaggatggcgaaagtcgtatagcactcaatgcgaatcaaacgagaattggcatcaatgtgtctggggaaccaaaagaaggcagcccagaagtccttggaagatttgaaattgatttttcgagtgacaacaaccgcaacaacaacggagttggcagtcttcgcataaggcaggctttggtcaggtaa

SEQ ID NO: 57100 - protein, 169 aa, Unknown
  Obtained from environmental sample
  SIGNAL (1)...(24)
  misc_feature (1)..(169): Xaa is any amino acid
MRPFNSLVALPISVLLFANTMALAQVAPASAEAAPEPAPVAEPVVAPPAQVVVTEPAPVAAKPEPEAKPVAKAAPMKISLYGFFQLNTIIEGGANGNRAWSIWLPKKSEDGESRIALNANQTRIGINVSGEPKEGSPEVLGRFEIDFSSDNNRNNNGVGSLRIRQALVR

SEQ ID NO: 57101 - DNA, 1719 bp, Unknown
  Obtained from environmental sample
  misc_feature (1)..(1719): n is a, c, g, or t
ttgggagcggccgagttaggcgcaatgctttatggggaacttttgcggcacgacccttccgatccggcgtgggcggacagggatcgttttgtcctttcggcggggcatggctctatgttactctattcccttttgcatcttgccggttataaggatatgacgatggatgatatcaaatctttccgtcagatcggttcccgcgccgcaggccaccccgagtacggtatggcagccggcattgaggcgaccagcggacctcttggacagggtttcgcgatggcggttggtatggccgtggcggaaaccatgctcgccgcccgcttcaacaccgcagatcataaaatcgttgaccattacacctacgccctctgcggggacggctgtctgatggaaggcgtctcgtcggaggccagttctttcgcgggccaccacggcctgggaaagctcatcgcgttttacgattcaaacaagatcaccattgacggcagcacggatcttgcctttaccgaagatgtcgccaaacgctatgaggcttacggctggcaggtgctgcagggttcaatgtacaattttgaggaaatcgccaaacttaccgcacaggctaaagcggaaacaaaaaaaccgagcatgatcatacttggctcgatcattggaaagggcgcgcccaacaagcaaaacacggcggatatacacggagtcccgctgggcgcacaagaagtaaaggcggcgcgcgctaatttgggaatccccggcgatttttatattgctccggaagcgcaagtcttctttagcgcgaagcggcaggaatggaaaaaggcccgcgcaagctggcagtccctgtttgacgcgtggtcaaaggaaaaccccgagaagcgcaaggagtgggacaagttctattctcttgccgttgccgccccggcctcccttccctcattcaacatcggcgataaaattgccacacgcgccgcgggcaataaaacattaggcgctttcgcactggcaaacgccaatcttgtcggcggttccgcagacctcaagggccccaacgccgtgggccttcccgccgcggccggaacatggacacgcgataaccttacgggccagtacatacactttggcatccgcgaattcgcaatggcggcaatttgcaacggcatttctctgcacggcggactgcggccctactgctcgactttcatggttttttcggattatctgcgcccggctttgcgcctttccgcgctgatgaagcagccggtgatatacgttcttacccatgattcgatcctcgtaggcgaagacggtcccacccaccagccgattgagcacatcgcaagcatgagggccatgcccggccttctggttctccgccccggcgacgccgaggaatgcgccgaagcatgggcaatggcaatggaatataaaaaaggcccggttgttctcgccttatcccggcagaatatcacggtgttccccaaagccgatcccgactggcggaacacgatgcgcgtgggcgcttacattgccaaacaggttgaaggctctgatcccgagattgtaatcatcgccacaggctcggaagtaaacacggccctggatgccgcggcaaaggcggctgacaaaaagatccgcgtggtctcgatgatcggcaaggagcttttcgagtcccagcccgcggctatccgcgacgccatgatccccccagcgcgagggttatag

SEQ ID NO: 57102 - protein, 572 aa, Unknown
  Obtained from environmental sample
  DOMAIN (73)...(213): Thiamine pyrophosphate enzyme, C-terminal TPP binding domain
  misc_feature (1)..(572): Xaa is any amino acid
MGAAELGAMLYGELLRHDPSDPAWADRDRFVLSAGHGSMLLYSLLHLAGYKDMTMDDIKSFRQIGSRAAGHPEYGMAAGIEATSGPLGQGFAMAVGMAVAETMLAARFNTADHKIVDHYTYALCGDGCLMEGVSSEASSFAGHHGLGKLIAFYDSNKITIDGSTDLAFTEDVAKRYEAYGWQVLQGSMYNFEEIAKLTAQAKAETKKPSMIILGSIIGKGAPNKQNTADIHGVPLGAQEVKAARANLGIPGDFYIAPEAQVFFSAKRQEWKKARASWQSLFDAWSKENPEKRKEWDKFYSLAVAAPASLPSFNIGDKIATRAAGNKTLGAFALANANLVGGSADLKGPNAVGLPAAAGTWTRDNLTGQYIHFGIREFAMAAICNGISLHGGLRPYCSTFMVFSDYLRPALRLSALMKQPVIYVLTHDSILVGEDGPTHQPIEHIASMRAMPGLLVLRPGDAEECAEAWAMAMEYKKGPVVLALSRQNITVFPKADPDWRNTMRVGAYIAKQVEGSDPEIVIIATGSEVNTALDAAAKAADKKIRVVSMIGKELFESQPAAIRDAMIPPARGL

SEQ ID NO: 57103 - DNA, 627 bp, Unknown
  Obtained from environmental sample
  misc_feature (1)..(627): n is a, c, g, or t
atggtaatgtgcgcaagccccggaattttagcgggagacaaatacgacatgcggtttgatttagcggacaacacaaaaacaattatcagcgaacaatcgtaccggaaactttacaacacaggcgataatttttcacagcaaaacacgcaaatacatgcgggagaaaacgccgcgctgtactatgttccgtatccggttatccccttcgcgggaagccgtttccgttcgcggacggatatttttttacgctcttcctcaaaattgatcttcggcgaaatttttacctgcggcagagacggcatgggagaacgattcgctttcagcgaatattcatctcgaacaaccgtgtatgttgatgacaaaccggtgtttctggacaacagccgcttgcttggcagcagtgcaatcaaagactgcgaagcggatttttcgggaaccggtttttttgaaggatactcttgtcagggtattttgttttttttcggctttgataacatttccctgactgagagcgaaggaatagaaactgccgtttccaaatcttcggttggttttacaatacgcgcgttaggcaggagcgcgaacaatctgtaccgcttatttaacagattcagtaattatttgtga

SEQ ID NO: 57104 - protein, 208 aa, Unknown
  Obtained from environmental sample
  DOMAIN (1)...(201): UreD urease accessory protein
  misc_feature (1)..(208): Xaa is any amino acid
MVMCASPGILAGDKYDMRFDLADNTKTIISEQSYRKLYNTGDNFSQQNTQIHAGENAALYYVPYPVIPFAGSRFRSRTDIFLRSSSKLIFGEIFTCGRDGMGERFAFSEYSSRTTVYVDDKPVFLDNSRLLGSSAIKDCEADFSGTGFFEGYSCQGILFFFGFDNISLTESEGIETAVSKSSVGFTIRALGRSANNLYRLFNRFSNYL

SEQ ID NO: 57105 - DNA, 1077 bp, Unknown
  Obtained from environmental sample
  misc_feature (1)..(1077): n is a, c, g, or t
ttgcgcccagaaaaagcttcgccggaagacaaggcaagggcttattttgatgcgcggcaaagggtagttgaaacatcaaaaaaatatgaaggagtcccatatcgttacggcggaatgaccgttaaagggcttgattgctcgggtttcctttgtcttgtttttaaggacgcgttaaacgtatcattgccaagatcggcatccgggctttattcatgggcggaaaagacagctcttgaaaaagctcaagcaggcgactttttattttttaaaaccgataaatccggcagtgtaactcatgtcggtctgtatctgggagaccgccgttttattcattcggcttcttcgggttcaaggacaggggtaatttattccagccttgatgaaaaatactgggctaatgcttatgtcggagcgggaagcgcttttcctgaaacaacatcaaatattaaagttgataataattcgatggcggaaatttttggcgcaggcgggatgggggacaaaggcggcgccgatagaaacacaaacataagtaaaggcgtaaacaaaacgacttctcctaaacagggaagcaaagacgatcggcttttggcgggagtcgcatttgcgccaatctggaacggatttataatggacggttatttatttcgcggttttacttctcagttaggcattaacgcggatgtttatacgcttggattacggataattttcggagttgaattaagaccggaatatgacggaggtctcggcgtatttcgcttacccttaacattttcctttggaccggatgaaaagataaggttatttgccggtcctgtgttaagtattggcgacgcttctatttcgataaacggcaaccagcgctattactacggcgggacaagctggtttggcgccgcgggagtaaactattcgccctttgtttttaaaacctcaaccggagggatctatccttactttgagcttgcgtggcagtcatattacagcaatagcaccgagattaatattcccgcggacttatccgcaagccttcgtttttcaaccggaatcagatggctgataagaatcttataa

SEQ ID NO: 57106 - protein, 358 aa, Unknown
  Obtained from environmental sample
  DOMAIN (31)...(140): NlpC/P60 family
  misc_feature (1)..(358): Xaa is any amino acid
MRPEKASPEDKARAYFDARQRVVETSKKYEGVPYRYGGMTVKGLDCSGFLCLVFKDALNVSLPRSASGLYSWAEKTALEKAQAGDFLFFKTDKSGSVTHVGLYLGDRRFIHSASSGSRTGVIYSSLDEKYWANAYVGAGSAFPETTSNIKVDNNSMAEIFGAGGMGDKGGADRNTNISKGVNKTTSPKQGSKDDRLLAGVAFAPIWNGFIMDGYLFRGFTSQLGINADVYTLGLRIIFGVELRPEYDGGLGVFRLPLTFSFGPDEKIRLFAGPVLSIGDASISINGNQRYYYGGTSWFGAAGVNYSPFVFKTSTGGIYPYFELAWQSYYSNSTEINIPADLSASLRFSTGIRWLIRIL

SEQ ID NO: 57107 - DNA, 1272 bp, Unknown
  Obtained from environmental sample
  misc_feature (1)..(1272): n is a, c, g, or t
atgcagtatgaaatcctgaggtcttcaattcttaacaaggggatcagggtagacggcaggaaaaccgaggaaataagggatattacctgtgaaatcggcatcctaaagagaacccacggctccgccctctttacaaggggcgagacccaggcgctggtggtgacaaccctggggacggtttttgacgagcagatttacgacgacatagaaggcgacaagcgggaacatttcattcttcattataactttcccccttactcggtgggcgaagtcgggcgcatgggcacaggccgccgcgaaataggacacggaaacctggcgcgccgctccctggaagccatgataccgccgaaagaagtctttccttacacgatacgggttgtttcagaaataatggaatcaaacggctcgtcttccatggcttcggtttgcggcggaaccctttcaatgctccacgccggggtgcccatgaaaaagccggtggcgggcattgccatggggcttataaccgaaagcaacgcgccgggcgcgcgttacgccatcctctcggacattctgggagaggaagaccaccttggggacatggactttaaagttgccggtactgaagacggaatcaccggtttccagatggacataaaaatcgcgggcgttaattctgaaataatgcggaacgcacttgaccaggctaaacgcggacgcctgcatattctttccaggatgaacggcaccatcagcaagcctgtggacgagataagcgagtacgctccaaagatattaacgctgcgaattgacattgacaaaatcggcgcgctgataggccccggcgggaaaaacatcaaagcgctctgcgagcagttcagcgtaaagatcaacaccgaggacgacgggacggttaccatcttcgggaaaagcaccaaggatgccacggacgctaaggccgcggtacttggcattgttctggatccagagctgggaaaaacatatgacggcgttgtaaagcgcatcatggatttcggcgcttttgtggaaattcttcccggcaaggaaggtcttgtacatatcagcaaactttccagacagcggatcgcgcaggttacggacgtgttaaaagaaggccagcagattcccgtcaaactgattgaaattgacaaacagggcaggttaaacctttcctatatagacgcaatagatccgaacggttcttccgattcttcgtccgacaaaggcgggggaagagacgagcgtccccggaataataaccgccgctag

SEQ ID NO: 57108 - protein, 423 aa, Unknown
  Obtained from environmental sample
  DOMAIN (259)...(316): KH domain
  misc_feature (1)..(423): Xaa is any amino acid
MQYEILRSSILNKGIRVDGRKTEEIRDITCEIGILKRTHGSALFTRGETQALVVTTLGTVFDEQIYDDIEGDKREHFILHYNFPPYSVGEVGRMGTGRREIGHGNLARRSLEAMIPPKEVFPYTIRVVSEIMESNGSSSMASVCGGTLSMLHAGVPMKKPVAGIAMGLITESNAPGARYAILSDILGEEDHLGDMDFKVAGTEDGITGFQMDIKIAGVNSEIMRNALDQAKRGRLHILSRMNGTISKPVDEISEYAPKILTLRIDIDKIGALIGPGGKNIKALCEQFSVKINTEDDGTVTIFGKSTKDATDAKAAVLGIVLDPELGKTYDGVVKRIMDFGAFVEILPGKEGLVHISKLSRQRIAQVTDVLKEGQQIPVKLIEIDKQGRLNLSYIDAIDPNGSSDSSSDKGGGRDERPRNNNRR

SEQ ID NO: 57109 - DNA, 621 bp, Unknown
  Obtained from environmental sample
  misc_feature (1)..(621): n is a, c, g, or t
ttgtcaatttcaatcagtttgacgggaatctgctggccttcttttaacacgtccgtaacctgcgcgatccgctgtctggaaagtttgctgatatgtacaagaccttccttgccgggaagaatttccacaaaagcgccgaaatccatgatgcgctttacaacgccgtcatatgtttttcccagctctggatccagaacaatgccaagtaccgcggccttagcgtccgtggcatccttggtgcttttcccgaagatggtaaccgtcccgtcgtcctcggtgttgatctttacgctgaactgctcgcagagcgctttgatgtttttcccgccggggcctatcagcgcgccgattttgtcaatgtcaattcgcagcgttaatatctttggagcgtactcgcttatctcgtccacaggcttgctgatggtgccgttcatcctggaaagaatatgcaggcgtccgcgtttagcctggtcaagtgcgttccgcattatttcagaattaacgcccgcgatttttatgtccatctggaaaccggtgattccgtcttcagtaccggcaactttaaagtccatgtccccaaggtggtcttcctctcccagaatgtccgagaggatggcgtaa

SEQ ID NO: 57110 - protein, 206 aa, Unknown
  Obtained from environmental sample
  misc_feature (1)..(206): Xaa is any amino acid
MSISISLTGICWPSFNTSVTCAIRCLESLLICTRPSLPGRISTKAPKSMMRFTTPSYVFPSSGSRTMPSTAALASVASLVLFPKMVTVPSSSVLIFTLNCSQSALMFFPPGPISAPILSMSIRSVNIFGAYSLISSTGLLMVPFILERICRRPRLAWSSAFRIISELTPAIFMSIWKPVIPSSVPATLKSMSPRWSSSPRMSERMA

SEQ ID NO: 57111 - DNA, 450 bp, Unknown
  Obtained from environmental sample
  misc_feature (1)..(450): n is a, c, g, or t
atgggggagcagccgcggataaaagtggttaaagctcacgctcgcattgagcttccggcctatgaaagcaaaggcagcgccggtatggatttgcgcgcttttcttgaggcggatgttacaattccgcctcttggcagggtgaaaatccccacagggttaaggcttgaaattcccgaaggctttgaagcgcaagtgcgcccccgttccggtttggcgataaattccgggcttacagtccttaattcgccgggtactattgattcggattaccgcggggaactggaaataatactgattaatcttggcgccgataatgtggttataaaggacggacaacggatcgcgcagcttgtaattgctcctgtttccggagcgcttcttacagaggcgcaaacgcttgccgaaaccgaaagggcgtgcggcgggttcggttctacaggcgttaattga

SEQ ID NO: 57112 - protein, 149 aa, Unknown
  Obtained from environmental sample
  DOMAIN (14)...(147): dUTPase
  misc_feature (1)..(149): Xaa is any amino acid
MGEQPRIKVVKAHARIELPAYESKGSAGMDLRAFLEADVTIPPLGRVKIPTGLRLEIPEGFEAQVRPRSGLAINSGLTVLNSPGTIDSDYRGELEIILINLGADNVVIKDGQRIAQLVIAPVSGALLTEAQTLAETERACGGFGSTGVN

SEQ ID NO: 57113 - DNA, 909 bp, Unknown
  Obtained from environmental sample
  misc_feature (1)..(909): n is a, c, g, or t
ttgacgcgcagccgcgcaagcggatctagcggagcacaaatggttaaatggtataattcaattatttcactcttcttcgacaagcgcgttatggcaatggaaagcaagaggggactttccgccactctttttaagtatatattatcagaagcgcttttttctttttttattggttttctttttttcttctttattttttttgtaaaccagatacttcttatggcgaaagaagtccttaccaaacatgtgcctttcggacaggtcgctcttttaatacttttttcactgccaacggttatcgccatgtccgcgccgttcgcgtcgcttgtcggcacattaatgaccgtaggacggcttacctctgataacgaaattcttgttatgttgtcatccggcctttcttacaaaaatatttttcttcccgccataacggtaggaattataatttcgatactctcgtttattacaaatgatattctgcttccggcgggcaccgttcaatttaataaattatggcggcgaattcttttctccactcccgcgctggaactggaagccaattcggtaaaaaggttcagggataccgtaattgtaacgggcgacgttacggacaacaccattaaaaacgtaatgattcttgacaagacttccgacggtgagcggagggtaataatggcaagccaggcggaattaaaagacagcggcaacgaaggcttaagcctggaattggaaaacgcctttgtccagtcgtcaaaagaaattgccagagaagattatgactatgcctccgcaagttctttgcaatactggatatcgaacgaggatattattcaggccgttatgagcgtaagcccaagggagatgagttcaagggatgtacgtaaagcggtaataccaaaaaacttttga

SEQ ID NO: 57114 - protein, 302 aa, Unknown
  Obtained from environmental sample
  DOMAIN (45)...(301): Predicted permease YjgP/YjgQ family
  misc_feature (1)..(302): Xaa is any amino acid
MTRSRASGSSGAQMVKWYNSIISLFFDKRVMAMESKRGLSATLFKYILSEALFSFFIGFLFFFFIFFVNQILLMAKEVLTKHVPFGQVALLILFSLPTVIAMSAPFASLVGTLMTVGRLTSDNEILVMLSSGLSYKNIFLPAITVGIIISILSFITNDILLPAGTVQFNKLWRRILFSTPALELEANSVKRFRDTVIVTGDVTDNTIKNVMILDKTSDGERRVIMASQAELKDSGNEGLSLELENAFVQSSKEIAREDYDYASASSLQYWISNEDIIQAVMSVSPREMSSRDVRKAVIPKNF

SEQ ID NO: 57115 - DNA, 759 bp, Unknown
  Obtained from environmental sample
  misc_feature (1)..(759): n is a, c, g, or t
gtgttccacatagccgccagggcgctcgctgccagctcgcttaatattttcggcgaccaccaggacgtgatggcgtgccggcagaccggctgggctatgctatcatccaatagcgtgcaggaagtaattgatttggcggtaatcgcccattcctccaccctgcgcgccagggttcctttccttcacttttttgacggcttcaggacaagccacgagcttcagaaagttgatgaagtttccttcgatgtgatgcgtcaaatgatagacgatgatctggtggttgcacaccgcaaatggggtttaacccctgaaaaaccccaaatcaggggaacggcgcagaatcccgacacttacttccagggcagggaaggggtcagcccctactacctgaaggtaccggggattgttcaggaggaaatggacaaatacgcgaagcttacaggccgtgcataccaaatttatgagtactttggcgcgaaagacgcggaaaaagtcgttgtgatcatgggttctggtgcggatacctgccatgaaattgttgaatacctgaatggaaagggcgaaaaggtcggtgttttgaaagtaaggcttttccggcccttcgatgttgagcattttgtaaaggccctgcccgcttctgttaagtcaatcgcggtattggacaggaccaaagaccccggcgccctcggcgagccgctttacgaagacgtgcgcgccgccattgccatagccagagcttccgggcaaattctccgctga

SEQ ID NO: 57116 - protein, 252 aa, Unknown
  Obtained from environmental sample
  DOMAIN (2)...(141): Pyruvate flavodoxin/ferredoxin oxidoreductase, thiamine diP-binding domain
  misc_feature (1)..(252): Xaa is any amino acid
MFHIAARALAASSLNIFGDHQDVMACRQTGWAMLSSNSVQEVIDLAVIAHSSTLRARVPFLHFFDGFRTSHELQKVDEVSFDVMRQMIDDDLVVAHRKWGLTPEKPQIRGTAQNPDTYFQGREGVSPYYLKVPGIVQEEMDKYAKLTGRAYQIYEYFGAKDAEKVVVIMGSGADTCHEIVEYLNGKGEKVGVLKVRLFRPFDVEHFVKALPASVKSIAVLDRTKDPGALGEPLYEDVRAAIAIARASGQILR

SEQ ID NO: 57117 - DNA, 486 bp, Unknown
  Obtained from environmental sample
  misc_feature (1)..(486): n is a, c, g, or t
atgagtgataaatctaatggaatgcgcgatggaatgtccaatggattgaactatgccccgaaaggaaaacctaatcccgtagttaaaaagggagaatttgtcttttcggcaatcgcccttgatcacgggcatatttacggacaatgcaacggtttgatagaagcgggcggaacgctgaaaagcgtttacgatcccgatccaaaaaaggttgacagattctgcgagacatatcccggcgtaaagcgcgcggcaagcgaagacgagattctcggcgataaggaagtcttgcttgttgcgggagcggcagttacgtctgaacgctgcgcgctgggtttgcgcgtaatgtccgccggaaaggattattttacggacaaagccccgcttacaactctggaacagctccaggcggcaaaggcaaaagcaaaagagaccggcaaaaaatacatggtttattacagcgagcgcctcggccgatctgatcattga

SEQ ID NO: 57118 - protein, 161 aa, Unknown
  Obtained from environmental sample
  DOMAIN (28)...(152): Oxidoreductase family, NAD-binding Rossmann fold
  misc_feature (1)..(161): Xaa is any amino acid
MSDKSNGMRDGMSNGLNYAPKGKPNPVVKKGEFVFSAIALDHGHIYGQCNGLIEAGGTLKSVYDPDPKKVDRFCETYPGVKRAASEDEILGDKEVLLVAGAAVTSERCALGLRVMSAGKDYFTDKAPLTTLEQLQAAKAKAKETGKKYMVYYSERLGRSDH

SEQ ID NO: 57119 - DNA, 1161 bp, Unknown
  Obtained from environmental sample
  misc_feature (1)..(1161): n is a, c, g, or t
atgatttcagtggcagttatcggaacaggaggcatcgctcattcgcacataaaagggtatcttgcttttccccagcgatgcaagatcacccatcttgtggatatttttccggaaaaagcggagaaaaaaaacgccgactacaatttgggagcgaaggttagcgtgtcgcataaggatattctgaattgcgaagacattgatcttgtaagtatttgctcccctcctttccgccatacggaaattgccgttgattttcttgacgcgggaaaaaatgtgcttgtggaaaagcctatggcatcgtcccttgaagaatgcgacgcgatgattgcggcggcgcaaaaaagcggtaaaatgctttcggtaatcgcgcaaaaccgtttcaccgatccaatttccggcttaaaaaaagttttggattccgaactgatcggaaaaatcgttcacgctcaaattgaatccctttggtggcgcggccattcctactatgatctgtggtggaggggtacatgggaaaaagaaggcggcggctgtacattaaaccatgccgtacaccatattgacatgctgtgctggatgctcgggctgccaaagaaagtcagctccgttatcagcaatgcgtcccatgacaacgccgaagtggaggacatctcagtcgcaattttacagtacgacagcgggctttgctcaaaaggagcgctggcgcagataactagctccgttatccaccacggcgaagagcagcagcttgtttttcagggagagaaagcccgtgtttcggcgccgtggaaagtttcagccaatttcgcgcagcccaacggttttcctgttttcggtcaacaagatgaagaattaatttcaaaactgaatagcttttatgaatcgctgccaaaatacgcccataccttgcatacggggcaagttgacgatgtattaaccgcgcttgaaaccgggagcaaaccgatgattgacggtgaagacggcagacgtacaatagaacttatctccgctatttacaaagccggtacggaacagcgcgcggtagaactaccgattaaaaagggcgatcccttttacacggttaaaggtattatgggaaaagtgccgcatttctacgaaaagaccgtctctgtaaacgatcagggcggacaaatttcattttaa

SEQ ID NO: 57120 - protein, 386 aa, Unknown
  Obtained from environmental sample
  DOMAIN (135)...(251): Oxidoreductase family, C-terminal alpha/beta domain
  misc_feature (1)..(386): Xaa is any amino acid
MISVAVIGTGGIAHSHIKGYLAFPQRCKITHLVDIFPEKAEKKNADYNLGAKVSVSHKDILNCEDIDLVSICSPPFRHTEIAVDFLDAGKNVLVEKPMASSLEECDAMIAAAQKSGKMLSVIAQNRFTDPISGLKKVLDSELIGKIVHAQIESLWWRGHSYYDLWWRGTWEKEGGGCTLNHAVHHIDMLCWMLGLPKKVSSVISNASHDNAEVEDISVAILQYDSGLCSKGALAQITSSVIHHGEEQQLVFQGEKARVSAPWKVSANFAQPNGFPVFGQQDEELISKLNSFYESLPKYAHTLHTGQVDDVLTALETGSKPMIDGEDGRRTIELISAIYKAGTEQRAVELPIKKGDPFYTVKGIMGKVPHFYEKTVSVNDQGGQISF

SEQ ID NO: 57121 - DNA, 489 bp, Unknown
  Obtained from environmental sample
  misc_feature (1)..(489): n is a, c, g, or t
atggaaaaaaccaagattttcatttttgacgcctgcggcaggggagacagccttgtcatctccaccacgcttgaatccctgctaaaaaaagagacggccagagaaaagctaaaggattccatggcgctgcgcaaatttgccctggacactgccagaaaccttaacatggcaaaggtactccttgccccgacgcccttttcggacgacgccggatttttccgcgccggactaatcgcccagaccgttaccatgctcccgtccagagagtgtattcagctcgtcgcggatctccgcaaaaacccggaatttgccgatgcgcttatcaacgccgaaacgaggcaggccaaccgtttaatctccatccccgacacctggcgcggcctcaactctccaatcgacagccacctgcgcctgacgccggaaaatttccgcacagtggtaaggcttgccgaagcgctatgccagtgggtaaagaaaactgtaaagtga

SEQ ID NO: 57122 - protein, 162 aa, Unknown
  Obtained from environmental sample
  misc_feature (1)..(162): Xaa is any amino acid
MEKTKIFIFDACGRGDSLVISTTLESLLKKETAREKLKDSMALRKFALDTARNLNMAKVLLAPTPFSDDAGFFRAGLIAQTVTMLPSRECIQLVADLRKNPEFADALINAETRQANRLISIPDTWRGLNSPIDSHLRLTPENFRTVVRLAEALCQWVKKTVK

SEQ ID NO: 57123 - DNA, 1860 bp, Unknown
  Obtained from environmental sample
  misc_feature (1)..(1860): n is a, c, g, or t
gtgggaggagatctggaaacgcttaccgcaacggttgcgccgactaacgcgacaaacaaagccgtaacttggaaaacgagcaatgccgccattgccactgtttcaaacggaacagttaccgccgttgccgtaggtacggcaacaattaccgttactaccgcagacagaggcataaccgatacttgcgccgtttccgtaatcttcattgacccaaataaaacgcccataacaaccgcagaaattcacattaccgctccggtatatggcgctgttccggcaacggcgataaacggagaagaggaacattttaccgcaggtgtactaacttggtcgcccaacgataaccctttcaaccccggcacggaatacaccgcctcggtaactctgacggcaaaagacggctatacttttacaactttgactgttgcaaaagtcaacgggcaaaccaccgcaatatcagacataaccggtggaacagtaacgctttcatataaatttccggcaacgggtacaaaaaaagttacagcgataacgatcaaatcaccgccaagcaattttacctacacccacggcgacacgcttgatctgacgggtctggtggtaacgctgacctacgatgatttatctacggaagatgtcgccgccgccaatttcacggctaaaggcataaccgcgaatccttcggacggtgataaattggcgcgttcaacggataacgacaagtctattatagtttcttacggcgatttaaaaagaacccccggtaatttgatcgtcaacgcaaaaaatgtctcgacgcttactattgacgcaacagcgcaaacctataccggcagtgaaattaagccgacagttaccgtaaaagacggagcggaaactttgacgcttacaaccgattatacagtgtcatacagtaacaacatcaacgcgggaaccgctgcggtaaccgtaaccggtacaggtaattataccggaaataaaaccgcaaactttacgattaacaaagccaacccaatggtaacaacatggcctacagcggcatctatagattacgaatcagcattgtccgcttccgcattgagcggaggagtaagcacacaaacaggaactttcgcgtggacaacacccacaacaattccaacagttatcaacaacggatacagcgtaacattcacgccaactgacacggcaaattataacatcgtaacaaatacaataagcattactgttcggcttgttgaaatggtatctataacaggcggaacttttacaatgggcagtccaacgggtgaaccgagcagacagagtaatgaaacgcaacattcggtaacgctgccaggcttttcaataggcaagtatgaggtaacgcaggaacagtgggaagcggtgatgggaagtaatcccagctattttagttccgatccgcaagcaggtgaaattcaaagtaaacgtcctgtggaaaatgtaaactggtatgacgctatagtgttctgcaataaattgagcattgcggaaggcttaaacccggtgtacagcattggcggtaaaacaaatcctgcggaatggggagccatacctaccagctttaatacgacatgggaggtagtaatggacaagaataaaaacggctaccgcttgccgactgaagcggaatgggagtatgcgtgccgagcaggaacaacaacggcgtataacacgggagcaactgttagcgacaatacggggtggtgtaatagcaatagcggaagaaagacacatcaggtgggattaaagtcagccaatggttgggattgtatgatatgcacgggaatgtatgtgaatggtgctgggactggtatgactcagatattattcgagtag

SEQ ID NO: 57124 - protein, 619 aa, Unknown
  Obtained from environmental sample
  DOMAIN (4)...(64): Bacterial Ig-like domain (group 2)
  misc_feature (1)..(619): Xaa is any amino acid
MGGDLETLTATVAPTNATNKAVTWKTSNAAIATVSNGTVTAVAVGTATITVTTADRGITDTCAVSVIFIDPNKTPITTAEIHITAPVYGAVPATAINGEEEHFTAGVLTWSPNDNPFNPGTEYTASVTLTAKDGYTFTTLTVAKVNGQTTAISDITGGTVTLSYKFPATGTKKVTAITIKSPPSNFTYTHGDTLDLTGLVVTLTYDDLSTEDVAAANFTAKGITANPSDGDKLARSTDNDKSIIVSYGDLKRTPGNLIVNAKNVSTLTIDATAQTYTGSEIKPTVTVKDGAETLTLTTDYTVSYSNNINAGTAAVTVTGTGNYTGNKTANFTINKANPMVTTWPTAASIDYESALSASALSGGVSTQTGTFAWTTPTTIPTVINNGYSVTFTPTDTANYNIVTNTISITVRLVEMVSITGGTFTMGSPTGEPSRQSNETQHSVTLPGFSIGKYEVTQEQWEAVMGSNPSYFSSDPQAGEIQSKRPVENVNWYDAIVFCNKLSIAEGLNPVYSIGGKTNPAEWGAIPTSFNTTWEVVMDKNKNGYRLPTEAEWEYACRAGTTTAYNTGATVSDNTGWCNSNSGRKTHQVGLKSANGWDCMICTGMYVNGAGTGMTQILFE

SEQ ID NO: 57125 - DNA, 894 bp, Unknown
  Obtained from environmental sample
  misc_feature (1)..(894): n is a, c, g, or t
ttgggcgcgtcctttgggactaccggtgtggaacgcggagggagttggactactgaagctgaaaccctacgctccgcacgccgaagcaacattaacccgaactacaggggctacagtgttggcttccgagtggtgcgttccagcgcggaaaatcctcttttatcaatagacatggtttcgatacccgcaggaacatttacgatgggtagtcccacaagcgaacctggtcgaaatagcgatgaaacacaacattcggtaacgctgagtagttttaaaatgagcaaatatcaggtaacgcaggagcagtatcaggcggtaatgggaagtaatcccagcaattttagctctaacccgcaagcaggcgaaactcaaggcaaacgaccagtggaaacggtaagttggtatgacgcattggtattctgcaacaagttgagcataaaggaaggattaactccggcgtacagcattagcggtaaaaccgatcctgcagcttgggggacagtaccaacaagcagtgacgctacatgggatgctgttgtaatagttgccggttctaccggttatcgtttgccgaccgaggcgcagtgggaatacgcttgccgcgcaggtactacaacagcatacaacacaggagatacgattagcgatgatacagggtggtataatgaaaacagcgaagacaagtcacatgagatagggttaaagtctaaaaatgcgtggggtttgtatgacatgcatgggaacgtgtgggaatggtgctgggatcggtatggtaattattcgagcaatgcgcaaaccgacccaatgggcgcgtcctcgggggcttaccgcgtggagcgcggcgggagctggcataattcagccgagaattgcgtccgctctcggccattctga

SEQ ID NO: 57126 - protein, 297 aa, Unknown
  Obtained from environmental sample
  DOMAIN (54)...(293): Domain of unknown function (DUF323)
  misc_feature (1)..(297): Xaa is any amino acid
MGASFGTTGVERGGSWTTEAETLRSARRSNINPNYRGYSVGFRVVRSSAENPLLSIDMVSIPAGTFTMGSPTSEPGRNSDETQHSVTLSSFKMSKYQVTQEQYQAVMGSNPSNFSSNPQAGETQGKRPVETVSWYDALVFCNKLSIKEGLTPAYSISGKTDPAAWGTVPTSSDATWDAVVIVAGSTGYRLPTEAQWEYACRAGTTTAYNTGDTISDDTGWYNENSEDKSHEIGLKSKNAWGLYDMHGNVWEWCWDRYGNYSSNAQTDPMGASSGAYRVERGGSWHNSAENCVRSRPF

SEQ ID NO: 57127 - DNA, 777 bp, Unknown
  Obtained from environmental sample
  misc_feature (1)..(777): n is a, c, g, or t
atggagaaaaaagacctaacagcagcagacgtctgggcaatgttcgccgagactagactcataatgcaggaaacagaccgccaaatgcgggaaaacgaacgctttataaaagaaacgtttgcagaaaccgaccgcaaaattgccgagggtcaccgccttttagacgagaaacttgccgagggtcaccgccttttagacgagaaacttgccgagggtcaccgctttttagacgagaaacttgccgagaaccaccgcattctcgccgaaaatcttgcagaaaacgaccgcaatcttaccgagaaattcgaagcacttggtattaaagtcaatgacttaaaatcaaatgtaattggcattagcgatagcaatggcgaatttgcggaagagtatttttacagttccttgaaaaagaaaatggaatttgcaggagtgcattttgacgacataagcaaagacttcaagctattgaaaaaaatgccaaacggcgaaaggctacaagaccagtttgacattgtaatgataaacgacaacgcagtcgccttaatagaaataaaatacaccgctagggaaaattacccaacaacaatggtaaaacaaaaagtccccaattttagggctttattccccgactacgcangttacaagatatatctaggtctaggtgctctgtctatcagcgaggaagttgcaacggaagctaagaaactcggcataggattacttaggcaagtaggcgaaaccgttgagtatgagaccaaatgggtgagagcgtattag

SEQ ID NO: 57128 - protein, 258 aa, Unknown
  Obtained from environmental sample
  misc_feature (1)..(258): Xaa is any amino acid
MEKKDLTAADVWAMFAETRLIMQETDRQMRENERFIKETFAETDRKIAEGHRLLDEKLAEGHRLLDEKLAEGHRFLDEKLAENHRILAENLAENDRNLTEKFEALGIKVNDLKSNVIGISDSNGEFAEEYFYSSLKKKMEFAGVHFDDISKDFKLLKKMPNGERLQDQFDIVMINDNAVALIEIKYTARENYPTTMVKQKVPNFRALFPDYAXYKIYLGLGALSISEEVATEAKKLGIGLLRQVGETVEYETKWVRAY

SEQ ID NO: 57129 - DNA, 1428 bp, Unknown
  Obtained from environmental sample
  misc_feature (1)..(1428): n is a, c, g, or t
atggactcgcttaaaattgaaccctacaaatacggttttgtaacagacgtagaaacagaagcgtttgagaaagggctttcggaagatgtgatacgccgtgcgagtgctattcgcaaagagccggagtttttgctgaaattccgtttgaagagttatgaaaaattgcaaagcatggaaccgcctgtttggggggaattaaaattttcgccgataaatttgcaggacatagtttattacagtgcaccgaaaaataaaaaagaacacgcaaatatagaagatgttgaccctgagcttttggaaacatttgagaaactgggcattccgctggacgagcagaaaagactggctaatgttgcggtggatgccgtgtttgatagtgtttctatttatacaagccacaagaaaaaacttttggaattcgggattattttttgcagttttggcgaagcggttaaagaatatcccgaactcatagaggagtatttaggctccgttgtcccgcccggcgataattactactccgcattgaatagcgcggtttttagcgatggcagttttgtgtatatcccagaaggaataaaatgcccgatggatttatccacatatttcagaatcaacaacaaagaagcggggcaatttgagcgaacccttataatagcggacaaaaattcacaggtcagttatttggaaggttgcacagcaccggaattttccagcaaccaattgcacagcgcggttgttgaactcgtggctctggacaacgcaaaaataaaatacagcaccgtgcaaaactggtacgcaggcgataagcaaagcggcgtgggcggtgtatataattttgtcaccaaaagagcgctttgcaaaggcaaaaacagccacgtgagttggacgcaagttgaggctggcagcgcgataacttggaaatatccgagctgcattctgctcggcgatggctctgctggcgaattttattcggttgccctgacaaacggaaaaatgcaagccgacacaggcacaaaaatgctccacataggcaaggacacaaaaagcaccataatcagcaaaggcatttcggcagaccaaagctcaaacgcttacaggggcttggttgaaataagggcaaatgcagagaacgccgcaaattacacccaatgcgatagtatgctcgttggcagcgaatgtgcggcacacacattcccaactgttatagttcaaaacaaaagcgcaaaagccgaacacgaagcgagcacaagccgcataagcgaagatatgttgtttttcttggagcaacgcggaatatcaaaagaagatgcaataggcttggtggttggcggtttcagcagggatgtgttcaaggaattgccgggcgaattcgccagcgaagcgagagcgttattatcgctcaagctagagcatagcatagggtga

SEQ ID NO: 57130 - protein, 475 aa, Unknown
  Obtained from environmental sample
  DOMAIN (205)...(446): Uncharacterized protein family (UPF0051)
  misc_feature (1)..(475): Xaa is any amino acid
MDSLKIEPYKYGFVTDVETEAFEKGLSEDVIRRASAIRKEPEFLLKFRLKSYEKLQSMEPPVWGELKFSPINLQDIVYYSAPKNKKEHANIEDVDPELLETFEKLGIPLDEQKRLANVAVDAVFDSVSIYTSHKKKLLEFGIIFCSFGEAVKEYPELIEEYLGSVVPPGDNYYSALNSAVFSDGSFVYIPEGIKCPMDLSTYFRINNKEAGQFERTLIIADKNSQVSYLEGCTAPEFSSNQLHSAVVELVALDNAKIKYSTVQNWYAGDKQSGVGGVYNFVTKRALCKGKNSHVSWTQVEAGSAITWKYPSCILLGDGSAGEFYSVALTNGKMQADTGTKMLHIGKDTKSTIISKGISADQSSNAYRGLVEIRANAENAANYTQCDSMLVGSECAAHTFPTVIVQNKSAKAEHEASTSRISEDMLFFLEQRGISKEDAIGLVVGGFSRDVFKELPGEFASEARALLSLKLEHSIG

SEQ ID NO: 57131 - DNA, 1716 bp, Unknown
  Obtained from environmental sample
  misc_feature (1)..(1716): n is a, c, g, or t
atgtttggttacgcaaaattattgcgtaaggggccgccacagatagcgcagatggcggctgacaaactgaaaaaaaacataattgaagaaaattccgccgccaaagttcaggcccaggggccgtatttgaatgtaagccttgaccgcgcttatgaagcaaagactgttctttcgcaggtttttagttccgaaaaagacaatgagcattttgttttttcaggtccgcaagccttggccgggaaaaaaatcatggtggagttttcaagccccaataccaacaaaccactgcacctgggacacctgcgcaacgacgtgctcggcgaaagtgtgtccaggatattaaaagcgtgcggggcggaggtgcgcaaggtctgtattatcaacgacaggggcgttcatatatgtaaatccatgcttgcatataaagaacacgggcagggaaaaactccacagtcagaaggtgtaaaaagcgaccgttttgtcggcgattggtacgtttgtttcagcaaagcgttaaaagaggaagtggacgtacttgtaggcaagggcgttaaaaaagaagatgcggaagcccgggcgccgttaatgaaaaaggcgcaggagttgcttcgtaaatgggaagcgggggacggagaaacacttgagctttggaaaaagatgaataattgggcgatagagggaatgaaaaaaacttatgagcgtacgggagtttcttttgacaaatactattttgaaagcgaaacctatatgcttggaaaggatgaagttctaaaaggccttgaaaagggaatatttttccgtcaggaagacggctctgtcgcggttgatttaagcggtgaaaatttggataaaaagattttattgcgaagcgacgggacttctatttacattacgcaggatttcgggacggcgattaacaggcacaaggactggccctttgacagaatgatctatgttgtaggttccgaacagcagtaccattttaaggtgctttttatacttcttgataaattagggtttgaatgggcgaaaaatctgtaccatctttcatacggaatggtaaaccttcccgaaggaaaaatgaaaagccgggagggaacagtagttgacgccgatgacttaatcgacagcttgcgtgatatggcgttagcggaaatacgcgggaaagaaagggaaggggaggtaggcgatcctgaaactgttgccgaaaaaatcgcaattgctgccctgcattattttcttttacagccaagcccggtaaaagacatgttatttgatcctaaagagtcgctttcatttaccggcaatacgggaccttatttgcaatacatgggggcgcgtatttcctcgatgttaagaaaaagcggggaggaaacagataacaatgaacaggtaacaggtaacagagaacaaagagaagaattacatagatgtttttctttgcttgtttctgatcctgagtgggaattgattaaaattcttgcggcttatcaggacgcggttaaggaggcggcggaaagtttaaatccgtcttgtattaccgcttatctttacgagttgtctaaagcgttcagccgcttttatcacgattgtcctattcttaacgctgacgatacttctctttccaaggctaggcttgaattaagccgcgccgtgatgatggcgttaaaatcggcgtttcatcttgtgtgcatacngtttcttgatgttatgtga

SEQ ID NO: 57132 - protein, 571 aa, Unknown
  Obtained from environmental sample
  DOMAIN (441)...(571): DALR anticodon binding domain
  misc_feature (1)..(571): Xaa is any amino acid
MFGYAKLLRKGPPQIAQMAADKLKKNIIEENSAAKVQAQGPYLNVSLDRAYEAKTVLSQVFSSEKDNEHFVFSGPQALAGKKIMVEFSSPNTNKPLHLGHLRNDVLGESVSRILKACGAEVRKVCIINDRGVHICKSMLAYKEHGQGKTPQSEGVKSDRFVGDWYVCFSKALKEEVDVLVGKGVKKEDAEARAPLMKKAQELLRKWEAGDGETLELWKKMNNWAIEGMKKTYERTGVSFDKYYFESETYMLGKDEVLKGLEKGIFFRQEDGSVAVDLSGENLDKKILLRSDGTSIYITQDFGTAINRHKDWPFDRMIYVVGSEQQYHFKVLFILLDKLGFEWAKNLYHLSYGMVNLPEGKMKSREGTVVDADDLIDSLRDMALAEIRGKEREGEVGDPETVAEKIAIAALHYFLLQPSPVKDMLFDPKESLSFTGNTGPYLQYMGARISSMLRKSGEETDNNEQVTGNREQREELHRCFSLLVSDPEWELIKILAAYQDAVKEAAESLNPSCITAYLYELSKAFSRFYHDCPILNADDTSLSKARLELSRAVMMALKSAFHLVCIXFLDVM

SEQ ID NO: 57133 - DNA, 714 bp, Unknown
  Obtained from environmental sample
  misc_feature (1)..(714): n is a, c, g, or t
ttgcgcggggcggccggcggaagcgtttttacggcggaaaagcaaacatccggcaggggcagaagcggcaggacgtggatatcaaggcagggcgggcttttttttacgatactggaacgcccgcgcctcgcgattgcggactattccctgctctcccttgtcgcgcaaatcgccgtcgcacgcgtggtttcttccgtttgcgggaaaaaggcgtttctccgctggcccaacgatatttacgttaacaggcgtaaaattgcgggcgtaacgacggaaatttcaggggaaggcgatttaatttcatggctttcatgcggcatcggcgttaacattaacaaccccgtcccttccgtcaaagcggcaagctgttcggaaattaccgggcatcctctttcccgtaaattaacgcttgtttccatattggaagaaatagaaaacgtaaaaaaaacttattcttccgccgccgcctattcgcagggcaaccgcaaacttgccgcagaatggaactcgctttccgactgcgtaggcgcgaaagcggttgtttttgaaccggaagaaaaaacggaaaattttgccgttgaaaagacaggaaaaattcttgcgcgcggcgtattttccggcattgatcccgcgggccggtgcatcttaaaaaccgagaaaggcacattgtattttaatcagggaactgtgtcccttgcgttcttgaacaaataa

SEQ ID NO: 57134 - protein, 237 aa, Unknown
  Obtained from environmental sample
  DOMAIN (3)...(82): Biotin/lipoate A/B protein ligase family
  misc_feature (1)..(237): Xaa is any amino acid
MRGAAGGSVFTAEKQTSGRGRSGRTWISRQGGLFFTILERPRLAIADYSLLSLVAQIAVARVVSSVCGKKAFLRWPNDIYVNRRKIAGVTTEISGEGDLISWLSCGIGVNINNPVPSVKAASCSEITGHPLSRKLTLVSILEEIENVKKTYSSAAAYSQGNRKLAAEWNSLSDCVGAKAVVFEPEEKTENFAVEKTGKILARGVFSGIDPAGRCILKTEKGTLYFNQGTVSLAFLNK

SEQ ID NO: 57135 - DNA, 303 bp, Unknown
  Obtained from environmental sample
  misc_feature (1)..(303): n is a, c, g, or t
ttggttatgggttgtatgagaaaatgttatacgatcccaaaaccggaaagctcctcaacggtaacctggcttgactacaaattgccgacaatgatggatcacccgcggcttgaagttgagtttatcgaaaaccacgagccgaccaacccttacggaacaaaggcccttggcgaaccgccgaccgtgccgggagcttcggctattcgtaatgccgtacttcacgcaacgggcattgggatcaataccattccgcttacgccccatgtgctttttgcggaattcaaaaaagcgggactgatataa

SEQ ID NO: 57136 - protein, 100 aa, Unknown
  Obtained from environmental sample
  misc_feature (1)..(100): Xaa is any amino acid
MVMGCMRKCYTIPKPESSSTVTWLDYKLPTMMDHPRLEVEFIENHEPTNPYGTKALGEPPTVPGASAIRNAVLHATGIGINTIPLTPHVLFAEFKKAGLI

SEQ ID NO: 57137 - DNA, 552 bp, Unknown
  Obtained from environmental sample
  misc_feature (1)..(552): n is a, c, g, or t
atgtatgatgtagaagaaatatacgaggcggaaagccctgctcacgcggttgagttactgcaacggcatccggacgcgaaaattatcgcgggggggagcgatgtgttaattgaaattcgcgaaggccggcttgcggggcgtaccttgatgagtattcaaaaacttgattgtttgcgggggataaaacttgagccggacggcgctatacgcattggcgcgctgaccagcttttcccatgtagcccaagaccccgttatacataaaaatgttcctgtgcttggggaagcggtactgactatcggcgggccgcagcttcgcaacatcggcactataggcgggaatgtctgcaacggggttacgtccgctgacagcgcctcaacactgctggcctatgatgtggtgatggaataccttggtcccaatggtctgcggctggttcccatttctgaacattataaaggcgcaggaaaacagccctggcacatgacgaaatcttgcaggctattattattccaaaagaaagttatgaaaattgttttggcaattatataa

SEQ ID NO: 57138 - protein, 183 aa, Unknown
  Obtained from environmental sample
  DOMAIN (3)...(162): FAD binding domain in molybdopterin dehydrogenase
  misc_feature (1)..(183): Xaa is any amino acid
MYDVEEIYEAESPAHAVELLQRHPDAKIIAGGSDVLIEIREGRLAGRTLMSIQKLDCLRGIKLEPDGAIRIGALTSFSHVAQDPVIHKNVPVLGEAVLTIGGPQLRNIGTIGGNVCNGVTSADSASTLLAYDVVMEYLGPNGLRLVPISEHYKGAGKQPWHMTKSCRLLLFQKKVMKIVLAII

SEQ ID NO: 57139 - DNA, 387 bp, Unknown
  Obtained from environmental sample
  misc_feature (1)..(387): n is a, c, g, or t
ttgcaggctattattattccaaaagaaagttatgaaaattgttttggcaattatataaaatacgcaatgagggaagccctggacatagcgaccctgggatgttctgcaaatgtcaggctttcaaaagatcgaaaaaccattgacagagcccgcctggcatacggcgtcgcggggcctgtccccatgcgcgtaccaggcgcggaaaaaacggcggccggaaaaccggcaaacgccgaaaccgccgccgccattgccaaattggtgttaaacgacattaatccccgctcaagctggcgggccagcaaagaatttagattgcatctggcggaagagcttgcgaaacgggcgattaccaaatcgcttgaacgcgcgggggtatcgttatga

SEQ ID NO: 57140 - protein, 128 aa, Unknown
  Obtained from environmental sample
  DOMAIN (17)...(125): CO dehydrogenase flavoprotein C-terminal domain
  misc_feature (1)..(128): Xaa is any amino acid
MQAIIIPKESYENCFGNYIKYAMREALDIATLGCSANVRLSKDRKTIDRARLAYGVAGPVPMRVPGAEKTAAGKPANAETAAAIAKLVLNDINPRSSWRASKEFRLHLAEELAKRAITKSLERAGVSL

SEQ ID NO: 57141 - DNA, 480 bp, Unknown
  Obtained from environmental sample
  misc_feature (1)..(480): n is a, c, g, or t
atgagaaaacagcttgtgcgttgtacaattaacggcaaggcaacggaaaccatgattgacatacgcgcatcgctgaccgatatgctgcgcaatgaatatcgcctaaccagcgtaaagaaaggctgtgaagtaggcgaatgcggggcctgcaatgtgatcatcaacggggaatgttttaattcatgcatttacctcgctatctgggcggacggcaaggaaattatcaccaccgaagggcttttaagcgcggacggggaactcaccgcaatccagcaggcgttcattgacgaaggcgcggtgcagtgcggcttttgcacgccgggcttcctgatgagcgctacggaaatcatacgctcggggaaaacctacagcgacgcggaactgcggaaactgctgtccgggcatctttgccgctgcacgggctatgagaacatattccgcgcggtaaggaaacttgctggtcaaaaatcgaaaagctaa

SEQ ID NO: 57142 - protein, 159 aa, Unknown
  Obtained from environmental sample
  DOMAIN (76)...(151): [2Fe-2S] binding domain
  misc_feature (1)..(159): Xaa is any amino acid
MRKQLVRCTINGKATETMIDIRASLTDMLRNEYRLTSVKKGCEVGECGACNVIINGECFNSCIYLAIWADGKEIITTEGLLSADGELTAIQQAFIDEGAVQCGFCTPGFLMSATEIIRSGKTYSDAELRKLLSGHLCRCTGYENIFRAVRKLAGQKSKS

SEQ ID NO: 57143 - DNA, 1299 bp, Unknown
  Obtained from environmental sample
  misc_feature (1)..(1299): n is a, c, g, or t
atgaagatatattcatttccaaggggagggtttctctatgaagatcccacttcccccataaaatcatcagccgcgaatgcttttctgccggcgctttccgttatctcgcttgggaataaggcaaagcctgtttatcctgttgtgagtatcggagaaactgtccgcgaaggcatgctgattgggagagcgtccggcgcaggtacggcaaatgtgcacgccactgttcccggcagaattattaaaaaagtttcgtggaaagacagaaataatatcaataatgacgcccttgtaattaaaatggaaggcgcgtttgaaaaattgggcagaaaagaagacgttttaatatggaacagtttaaattgttatgatttacaaaaaataatttccgattacggaattgtcgaaatggaaaatgacgagaaaccgcttgccgatataatttccgcctcaaggaaactagacaaactaacgctggttatccgttgtgtttttgacgacccctggcttgccgctgattacgctctttgccaggacagattaaacgccgtaattgaaggcgcggctattgtggcaaaagcctgccttaaagtaacgcagcttgttttttgccgtttcacatcacgaacaggaacttgggcagcagctnttagccgccgcaggttcctggagcttccgtcgtcgcttgttctgacaggctcacgttatccgcaaaggaacactagagaacttaaacttgcgcttcgcacttatgaaagaaaagaaaacgtcgatttaggagagcttttaatacttggtccttccgttctcgccgccgtttccgatgcggtagcgcataaaagacctattttagacagatatgtcgccgtaggcggttcggctgtttacaaaccgcagataatgaaaataagaatcggaacaagaataggcgatgttatcgaacaatgcggcggttttattgaagcgccggaaaaaattttaaccggttctcctctttccggcaaggaagtaaggtatcttgacgagcctgtggggaaatcatgttacgccatagtggcgatggcaaaatcgcaaacatcagctcactcgcagtggaattgtatcaactgcggcgagtgcagagtagtttgtcctatgggacttgatcctcaaagcatatataagagtcttaaattgcgggagattgaaagtcccgaacataaaggatgtcatgggtgcggatgctgtaaggtattttgtccttccgctctgccgttacttgaaactattttagaaagcaacaaggagatcgaaagtgcctga

SEQ ID NO: 57144 - protein, 432 aa, Unknown
  Obtained from environmental sample
  misc_feature (1)..(432): Xaa is any amino acid
MKIYSFPRGGFLYEDPTSPIKSSAANAFLPALSVISLGNKAKPVYPVVSIGETVREGMLIGRASGAGTANVHATVPGRIIKKVSWKDRNNINNDALVIKMEGAFEKLGRKEDVLIWNSLNCYDLQKIISDYGIVEMENDEKPLADIISASRKLDKLTLVIRCVFDDPWLAADYALCQDRLNAVIEGAAIVAKACLKVTQLVFCRFTSRTGTWAAAXSRRRFLELPSSLVLTGSRYPQRNTRELKLALRTYERKENVDLGELLILGPSVLAAVSDAVAHKRPILDRYVAVGGSAVYKPQIMKIRIGTRIGDVIEQCGGFIEAPEKILTGSPLSGKEVRYLDEPVGKSCYAIVAMAKSQTSAHSQWNCINCGECRVVCPMGLDPQSIYKSLKLREIESPEHKGCHGCGCCKVFCPSALPLLETILESNKEIESA

SEQ ID NO: 57145 - DNA, 489 bp, Unknown
  Obtained from environmental sample
  misc_feature (1)..(489): n is a, c, g, or t
ttggatcatattaaaatgacagcggcagaacatataaaggctttattagcgaataaaatatttctatcaactgtttgcagtttgtgtatagctcaagttttaaagctggttttttatttatttactagtaaaagcagaaaaaaattggagatgatagagactataatttggcgtacgggcggaatgccctccagccattctgcggctgtatgcgctcttgccacatcggcggggatttacgagggtatagaatcaaacttttttgttttttgtcttgtctttgctatggtagttcttcgcgattccatgggagtaagaaggactgcgggtttacaggcaaaggcgttaaataatcttggaaaacaatcctctaaatttacaggtttggaatttcgttcggtaaaagaaattcacggacatactccgttggaagtattggtagggtcctgcttgggcattgcgatcacattttgtttttggctgttttag

SEQ ID NO: 57146 - protein, 162 aa, Unknown
  Obtained from environmental sample
  DOMAIN (13)...(162): Divergent PAP2 family
  misc_feature (1)..(162): Xaa is any amino acid
MDHIKMTAAEHIKALLANKIFLSTVCSLCIAQVLKLVFYLFTSKSRKKLEMIETIIWRTGGMPSSHSAAVCALATSAGIYEGIESNFFVFCLVFAMVVLRDSMGVRRTAGLQAKALNNLGKQSSKFTGLEFRSVKEIHGHTPLEVLVGSCLGIAITFCFWLF

SEQ ID NO: 57147 - DNA, 342 bp, Unknown
  Obtained from environmental sample
  misc_feature (1)..(342): n is a, c, g, or t
gtgtttgaaaaagccagttatgttgatgtttcaggcgtttccaagggcaaaggttttcagggcgttgttaaacgatacggtttcggcggcgggcgcaaaacccacggatcaaagttccaccgcgagccgggttcaaccgggcagagtacatatccggggaagacttttaaaaaccagaaattacccggacgcatgggccgtgaaaagactacaaccttaagccttaaaattgtaaaaatagacagcgaaaaacagcttcttatggtaaaaggcgccgttcccggcattaacaaagggctggttcttgtaagagcggctgtaaagaaggggcggaagaaatga

SEQ ID NO: 57148 - protein, 113 aa, Unknown
  Obtained from environmental sample
  DOMAIN (2)...(104): Ribosomal protein L3
  misc_feature (1)..(113): Xaa is any amino acid
MFEKASYVDVSGVSKGKGFQGVVKRYGFGGGRKTHGSKFHREPGSTGQSTYPGKTFKNQKLPGRMGREKTTTLSLKIVKIDSEKQLLMVKGAVPGINKGLVLVRAAVKKGRKK

SEQ ID NO: 57149 - DNA, 639 bp, Unknown
  Obtained from environmental sample
  misc_feature (1)..(639): n is a, c, g, or t
atgaactgtaaagtgttttcaaaagaaggcaaagagcttcgcagtatagttcttgacgacgctgttttcggccttcccgtaaatgacgatttaatctggtatgcgataaataacgaacttgccaacaagaggcagggtaacgcctgcacaaaagaccgcggcgaaatcaatggctcaaacgcgaagccttacaaacaaaaaggcacaggccgcgcgcgaagaggcgacaaaaaatcgccggtgctggtaggcggcggaactatgtttggacctaagcccagggatttttcctatgccatgccgaagaaagcaaaaaggcaggcgcttaaaacaattctcagcttaaaagcgcaaagcgacacattaacaatagtcgaagacttttccatagaatcgggaaagacaaaggatcttgtaaaacttcttgataatttccagccgggcgtacgtacggttttggttcttaaagacgacgatccaaaaattaaaagagcagccgcgaatattccgtgggttaaatatctttcttacaacagattggaagcgcatgagttgttttacggacgccaggtattaatgctggaaactgccgcgaaaaatcttaatgatttttacagtgaaaaggaggcagttaaatga

SEQ ID NO: 57150 - protein, 212 aa, Unknown
  Obtained from environmental sample
  DOMAIN (15)...(204): Ribosomal protein L4/L1 family
  misc_feature (1)..(212): Xaa is any amino acid
MNCKVFSKEGKELRSIVLDDAVFGLPVNDDLIWYAINNELANKRQGNACTKDRGEINGSNAKPYKQKGTGRARRGDKKSPVLVGGGTMFGPKPRDFSYAMPKKAKRQALKTILSLKAQSDTLTIVEDFSIESGKTKDLVKLLDNFQPGVRTVLVLKDDDPKIKRAAANIPWVKYLSYNRLEAHELFYGRQVLMLETAAKNLNDFYSEKEAVK

SEQ ID NO: 57151 - DNA, 831 bp, Unknown
  Obtained from environmental sample
  misc_feature (1)..(831): n is a, c, g, or t
atgggtattaagaaatataaaccaataacgccgggaatgaggcaatggacaagcttggataactcagaccttaccaaaggcgcgaaacctgaaaaaaccctcacaagcggaagaaaagaaagagccggacgcgattcattcggacgcatcagcgtgcgccacaaaggcggtggacacaaacgcaaataccgcgacattgattttaaaagagataaaatcggtattccgggaaaagtcgccacgcttgaatacgatccaaaccgcagcgcgaacatcgctcttatcaattacaaagacggcgagaagcgctacattatcgcccccaaagaacttaaaatgggcgcggtaattttaagcggtcccgacgccccgattgaaccgggcaacgctctcccgctggaaaatattcctttaggatttaatgtttacaatattgaattaacgctcggcaaaggcggacaactggctcgttcagccggaacaagcgcccttatcgccgcgaaagaaggcgattacgtcacaataaagttaccgtcaggcgaaatgagaatggtctttaaaaaatgttatgcgacaatcgggaacgtaggcaacgaagaccacatgaacataacttttggaaaagctggccgcaaacgctggctgggagtgcgccccacggtgcgcgggatggtaatgaaccctgtggatcacccgcacggcggaggcgaaggaaagaacaagggtattcaccctgttactccttggggacagccgacaaagggatacaagacccgcaagaaacacaaaccttcatcaaggtttattgtaagcagaggaaagaagaaataa

SEQ ID NO: 57152 - protein, 276 aa, Unknown
  Obtained from environmental sample
  DOMAIN (43)...(119): Ribosomal Proteins L2, RNA binding domain
  misc_feature (1)..(276): Xaa is any amino acid
MGIKKYKPITPGMRQWTSLDNSDLTKGAKPEKTLTSGRKERAGRDSFGRISVRHKGGGHKRKYRDIDFKRDKIGIPGKVATLEYDPNRSANIALINYKDGEKRYIIAPKELKMGAVILSGPDAPIEPGNALPLENIPLGFNVYNIELTLGKGGQLARSAGTSALIAAKEGDYVTIKLPSGEMRMVFKKCYATIGNVGNEDHMNITFGKAGRKRWLGVRPTVRGMVMNPVDHPHGGGEGKNKGIHPVTPWGQPTKGYKTRKKHKPSSRFIVSRGKKK

SEQ ID NO: 57153 - DNA, 405 bp, Unknown
  Obtained from environmental sample
  misc_feature (1)..(405): n is a, c, g, or t
atgaaagaaactaatacaggttacagggcagtaagtaaattcctcatcggttcgccctttaagatcaggccggttgcagaccttgtgcgccgccgtccgtatccagaagcggtttcaatactggagaatatgcccaacaaaggtgcacggcttatcggcaagacggtaaaatccgccgcttccaacgctctttcaactaacaaaaaacttgaagaggatatgctttatgtacgcgaaatatacattgacgaaggtccccgtcttaaaagaatctggtttcgtggcaggggacgcgcggatatgcagttaaagcgaatgtgccatataactgtagtagtagacgagacggcgggcgctgtagcggcgtctggcactaaagtaccttccaaaaaggcggctaaataa

SEQ ID NO: 57154 - protein, 134 aa, Unknown
  Obtained from environmental sample
  DOMAIN (10)...(115): Ribosomal protein L22p/L17e
  misc_feature (1)..(134): Xaa is any amino acid
MKETNTGYRAVSKFLIGSPFKIRPVADLVRRRPYPEAVSILENMPNKGARLIGKTVKSAASNALSTNKKLEEDMLYVREIYIDEGPRLKRIWFRGRGRADMQLKRMCHITVVVDETAGAVAASGTKVPSKKAAK

SEQ ID NO: 57155 - DNA, 813 bp, Unknown
  Obtained from environmental sample
  misc_feature (1)..(813): n is a, c, g, or t
atgcaggcaaagagaattattccctgccttgatgttgacgacggcagagttgttaaaggagtaaagtttgaaggtatacaagacgcaggcgatcctgtggaacttgcccgccgttacaacgatgacggcgctgacgaacttacttttcttgacatcggcgcttcatacaagagtcgcgcgacattgcttgacgtagtaaacaaagtagccgccgaagtttttataccgctttgtgtcggcggtggtatccgtaccattgacgatatgcgagaagctatgaacgcaggagcggataaagtttctgtctgcaccgccgccctgaaacgccccgaactgttacgtgaaatggcttatgcctacggcagtcaatgcgtagtgctttcgatagacgcaaagcgcgtgaacagcgctgacggtcaactgcgctggaacgcattttcccgcggcggcaggactgacacaggaattgacgcaattgaatgggcaattcgggcggttgaacttggagcaggagaaattcttctcaattccattgacgcggacggcacgggcgcaggctacgatcttgagcttacacgccgcatccttaatgcggttccggttcctgtaatcgcttcaggcggcgcaggcactcttgaacagattgcaaacgttctgctcaatactattaatcctgaaatgggtatggctcttcctgaacaagcgcccggcgcggacgccgcgttgcttgcgtctcttttgcacttcggaaaaaccacaataagagagataaagcaatttgctgaggcgaagggcgtttgtgttaggtggtaa

SEQ ID NO: 57156 - protein, 270 aa, Unknown
  Obtained from environmental sample
  DOMAIN (5)...(253): Histidine biosynthesis protein
  misc_feature (1)..(270): Xaa is any amino acid
MQAKRIIPCLDVDDGRVVKGVKFEGIQDAGDPVELARRYNDDGADELTFLDIGASYKSRATLLDVVNKVAAEVFIPLCVGGGIRTIDDMREAMNAGADKVSVCTAALKRPELLREMAYAYGSQCVVLSIDAKRVNSADGQLRWNAFSRGGRTDTGIDAIEWAIRAVELGAGEILLNSIDADGTGAGYDLELTRRILNAVPVPVIASGGAGTLEQIANVLLNTINPEMGMALPEQAPGADAALLASLLHFGKTTIREIKQFAEAKGVCVRW

SEQ ID NO: 57157 - DNA, 612 bp, Unknown
  Obtained from environmental sample
  misc_feature (1)..(612): n is a, c, g, or t
gtgataggcgtaattgactacggagcgggaaacctcggctctgttatgaacgccttaaaacggctttccgtccccgctcgttttgccgccgacccgcaagagctttcgctctcatcttcgccgtttgaaaaaataattttccccggagacggacatttcgctaccgcaatggcgtcgataaacaagtcgggttacgcgcaagcgataaaggaatggataaaagcggccaaaccctttttgggaatatgtatcggcttacagttgttatttgaaacttccgaggaggccccgaatgtgcagggtctttcggtaattccgggaacggttcggcgttttccggggcgtaaagttccgcagattggctggaatcaaactgccgccggaaaagggtcaaaaatcttccgcagtttaaatgataatagttttttctattatatacattcatactacgccgatccggcggacaatgcggtatgcgcagcgcaaaccgagtattatgtccgatactgctgcgctgtagagcgcggcgctttggcggcagtgcagtttcatccagaaaaatcaggctcaacggggcttgcgcttttgaaaaattggacggagggcgtataa

SEQ ID NO: 57158 - protein, 203 aa, Unknown
  Obtained from environmental sample
  DOMAIN (40)...(155): CobB/CobQ-like glutamine amidotransferase domain
  misc_feature (1)..(203): Xaa is any amino acid
MIGVIDYGAGNLGSVMNALKRLSVPARFAADPQELSLSSSPFEKIIFPGDGHFATAMASINKSGYAQAIKEWIKAAKPFLGICIGLQLLFETSEEAPNVQGLSVIPGTVRRFPGRKVPQIGWNQTAAGKGSKIFRSLNDNSFFYYIHSYYADPADNAVCAAQTEYYVRYCCAVERGALAAVQFHPEKSGSTGLALLKNWTEGV

SEQ ID NO: 57159 - DNA, 645 bp, Unknown
  Obtained from environmental sample
  misc_feature (1)..(645): n is a, c, g, or t
atgagcaggacggcggaaataggaagaaagacaaaagaaactgaaatattaattaaattaaatattgacggtaaaggggacgcaaagctggagtatcctgtcggatttatgtctcatatgcttaacacatttgcgcgtcacggtttgtttgacattgaagtaaccgctaaaggcgaccttgaagttgatcagcaccacattgttgaagatactggtattgtgctgggacaatgctttgcgaaggcgttaggcgacaagcgaggtattacccgcaatggaagctgtctgtttccgatggacgaaactcttgcccgcgccgccgtggatataagcggcagaccttttttgtattttgaaggacaactttcagactctccgttaatttcaacggaaggcggtaaagagtacaggtttcaaaccgatgtagttgaagatttttggcaaggtttcataaacgcggcaggctgtaatctgcatttagagattcttcgcggcagaagcgatcatcacaagatagaagccgtgttcaaatccgccgcccgcgcccttcgcgctgcctgtgaaattgacgaacgcgcaaaagatttaattccctcgaccaaaggctcattgccgggctttgactcacccggagcgcttgcgtga

SEQ ID NO: 57160 - protein, 214 aa, Unknown
  Obtained from environmental sample
  DOMAIN (34)...(184): Imidazoleglycerol-phosphate dehydratase
  misc_feature (1)..(214): Xaa is any amino acid
MSRTAEIGRKTKETEILIKLNIDGKGDAKLEYPVGFMSHMLNTFARHGLFDIEVTAKGDLEVDQHHIVEDTGIVLGQCFAKALGDKRGITRNGSCLFPMDETLARAAVDISGRPFLYFEGQLSDSPLISTEGGKEYRFQTDVVEDFWQGFINAAGCNLHLEILRGRSDHHKIEAVFKSAARALRAACEIDERAKDLIPSTKGSLPGFDSPGALA

SEQ ID NO: 57161 - DNA, 582 bp, Unknown
  Obtained from environmental sample
  misc_feature (1)..(582): n is a, c, g, or t
gtgcgtattatcgccgcggttcctcaggactatgacgaggcgaaactccgctcaaaaaaacttgtagttgccactgaatatgtaagtcttgcggaggcatggcttaaatcttccggttatcaataccagattctccgcacattcggcgcgacggaagtttttcctcccgatgacgccgacatgattattgacaacacttcttccgggcagacgctaaaagacaacggtcttaaaataatcgcgactttgcttgaatcatccacacgctttgtagcgtcgaaaacagcccttgccaacgctgaaaaaaagcggcgcattgaagagcttgatatgctttttcgcgccgttcttgacggacgtgatcgcgtaatgctggaaatgaatattcccaaggaacagtttgaatctttatcaagccttcccgctatgcgaagccccacggttgcgtctcttttcggggatgcgggttttgccgttaaaatcgccgttaaaaaacatgaagttcccgatattattccaaagctgaaaaaactcggcgcgcttgatattgttgagtatgatctgcgcaaagtggtccaataa

SEQ ID NO: 57162 - protein, 193 aa, Unknown
  Obtained from environmental sample
  DOMAIN (2)...(117): ATP phosphoribosyltransferase
  misc_feature (1)..(193): Xaa is any amino acid
MRIIAAVPQDYDEAKLRSKKLVVATEYVSLAEAWLKSSGYQYQILRTFGATEVFPPDDADMIIDNTSSGQTLKDNGLKIIATLLESSTRFVASKTALANAEKKRRIEELDMLFRAVLDGRDRVMLEMNIPKEQFESLSSLPAMRSPTVASLFGDAGFAVKIAVKKHEVPDIIPKLKKLGALDIVEYDLRKVVQ

SEQ ID NO: 57163 - DNA, 1170 bp, Unknown
  Obtained from environmental sample
  misc_feature (1)..(1170): n is a, c, g, or t
atgcgggggaagaccattaaactcggtaaccatatcgcgctcaacgataccgctaattgggagcgttgggcggacagcgctccggccaataaatggacgcctatcgggaacgagaactataaccaatattactcgggtacattcgacggcgcgggttttgcagtcagcggagtttacatcaacattgaaaccgacgatgaaaccatctacgctgggttattcgggcttgtcgacgggggggggacaataaagaatcttggagtcgtcgcctcgtatgtccaaggaggagaagacacctatctggtcggcgggttggtggggtacgtcagagacggggatattactaactgttacgcggcggtaaacgttgtcggcggaggcgctagcgttgtgggcgggttggtgggagagatctactgtagcatgattacaaacagttacgttacgggaagtgtcacaggggacagtctcgcaacagtaggcggttttgtcggaggctcaaatgaaggccgtgttaagaatagttacgcgatcgtaaacgttaccggtggtaaggcaggtgaggcacacgggtttgttggcgatggcagaggcatatcgtttaagagttgttattacagagacgatacggacaatccgtccatatacacctacaagggcgttcccaaaacaacggaagaaatgaaacagcaatccacatacgtaggctgggacttcgacgacgtttgggtgatgagcgaataccctattttacgggttcagcagatgtcgtcgccggtcgccgtatcatcctccgcccgcgcaatccccgccgctaatcccgccacggttgcggctgtagcgccggcgtccgcgttgaccgccgagtttgccgccggcccgaatcccgccggaaagtcgtcgggcggcgttaaattctattggagcggcgcggcgataaagggcgcgtctctctacgtttacgacgcgtcgggaagtttggtcaggaaggtgggcatcagcgataaatctagcgtcggcaagcggtcggtcggttcgtgggacttgcgcgacgcggcggggcgcgcggtgccggcggggtcgtacttggcgaggggcgcggttaagacgagagacggcaagaaagagcgggtgtcggcggtcgtgggcgtaatgtacaataaaccttaa

SEQ ID NO: 57164 - protein, 389 aa, Unknown
  Obtained from environmental sample
  DOMAIN (127)...(153): The GLUG motif
  misc_feature (1)..(389): Xaa is any amino acid
MRGKTIKLGNHIALNDTANWERWADSAPANKWTPIGNENYNQYYSGTFDGAGFAVSGVYINIETDDETIYAGLFGLVDGGGTIKNLGVVASYVQGGEDTYLVGGLVGYVRDGDITNCYAAVNVVGGGASVVGGLVGEIYCSMITNSYVTGSVTGDSLATVGGFVGGSNEGRVKNSYAIVNVTGGKAGEAHGFVGDGRGISFKSCYYRDDTDNPSIYTYKGVPKTTEEMKQQSTYVGWDFDDVWVMSEYPILRVQQMSSPVAVSSSARAIPAANPATVAAVAPASALTAEFAAGPNPAGKSSGGVKFYWSGAAIKGASLYVYDASGSLVRKVGISDKSSVGKRSVGSWDLRDAAGRAVPAGSYLARGAVKTRDGKKERVSAVVGVMYNKP

SEQ ID NO: 57165 - DNA, 1791 bp, Unknown
  Obtained from environmental sample
  misc_feature (1)..(1791): n is a, c, g, or t
atggacagattggccgagaccgaccaaacggcagggtttactattaaaaactccactacgtcggtatccgagagcggtcccgtgtccaaggcggggccgcagacggcgcggtggaattttcgcgggcgtacgcttgatctaaactccgcccctatggtaacttccgtgtccgtttacgccgttaacggcaagagggtttttaacggccggattccggcctcaagggtcgtcggcctccccgggatggctatgggaacttacctgcttgagttacgcggggagcatggggtgcttgaccgcgctcaaatcgtcttggcgaatcaagcggtcgcttcttttaccttcggctccgcgcctaagggcggtccgcgcttggccaagtcggcgcaaaccttagccgaatccgaacgactcatttttcgacacgacgactactatcccagagacagcgccatgacgggttccaataccaatatgcgcattgaactcaaaggggacgagaggagttttgttttcgaccagtcaaaggtgcacgaataccgttttacaataaacgcaaacgatttgaactatatgaatacttatggatatagggaagaatatatgccggctgaattaaattttgacggcggtaacggttccggacagatagggattcgttataaaggctcggattacacgcttccaagatgcttttttcctaatggcgacaccacccgaggcaatcccaataagacgtgcgccaaaatatcctataagttgaaatttacggagtatgataaagaaaagcggttttacggcatgaagaaaattaatttacacgcgttttccgcggatccgacaaagatgcacgaagtgctgtcttatgaactgtttagagatatgggaattcccgctccgcgaacatcttacgccaatgtatatatcaacaacaatcttatagggctttttttggcggtggaagaaattgacggcagatttaccaaatccagatggcccgattacggcgatggaaatctttacaaggaagtatggccgcgtaccaccgatgctaaatattatttagacggcctcaaaaccaatgatgagccggaagataatcctaacgtacaaagaatggtatcgtattacaatgcgattaactcttcaagcgagcagagctttgagaaaaatctctcttcatatatggattttgactacctcctgcgctacttggcggtggacgtagcgattaagaattgggatggtatgcggtcgtggtacattgaccaccttgacctgggacctattaaccacaactactactattacgaagaagaaacatctaatggaaaaatctggcttattccatgggatatggatcaagcattggtagagagagatacctactttgatgctggtggtgggttccctggtggtggtggattcccaggaggaggaggaggattcccaggaatcggtggagcgttgccacagtggaacgtgtctacgacggactgcggaggtcagcaggctggacagttccgttttatgccaccaaattgcgacaaactcattaaacttatggcaaaccggtggacccgttacgtgcaactaggcgacctatttttaaaagacctgttcgtaagtcagcgattgaacgacaaaataacaaaacatcaaaatttgattaataacgctgtgcaacaggatcctaatatcaatcagggtgaatggacaaatggtgttaatagccttaagaattatttaccaaataatatttcttcgttcaagagttatttacatccgtag

SEQ ID NO: 57166 - protein, 596 aa, Unknown
  Obtained from environmental sample
  misc_feature (1)..(596): Xaa is any amino acid
MDRLAETDQTAGFTIKNSTTSVSESGPVSKAGPQTARWNFRGRTLDLNSAPMVTSVSVYAVNGKRVFNGRIPASRVVGLPGMAMGTYLLELRGEHGVLDRAQIVLANQAVASFTFGSAPKGGPRLAKSAQTLAESERLIFRHDDYYPRDSAMTGSNTNMRIELKGDERSFVFDQSKVHEYRFTINANDLNYMNTYGYREEYMPAELNFDGGNGSGQIGIRYKGSDYTLPRCFFPNGDTTRGNPNKTCAKISYKLKFTEYDKEKRFYGMKKINLHAFSADPTKMHEVLSYELFRDMGIPAPRTSYANVYINNNLIGLFLAVEEIDGRFTKSRWPDYGDGNLYKEVWPRTTDAKYYLDGLKTNDEPEDNPNVQRMVSYYNAINSSSEQSFEKNLSSYMDFDYLLRYLAVDVAIKNWDGMRSWYIDHLDLGPINHNYYYYEEETSNGKIWLIPWDMDQALVERDTYFDAGGGFPGGGGFPGGGGGFPGIGGALPQWNVSTTDCGGQQAGQFRFMPPNCDKLIKLMANRWTRYVQLGDLFLKDLFVSQRLNDKITKHQNLINNAVQQDPNINQGEWTNGVNSLKNYLPNNISSFKSYLHP

SEQ ID NO: 57167 - DNA, 606 bp, Unknown
  Obtained from environmental sample
  misc_feature (1)..(606): n is a, c, g, or t
ttgcgggcggtcattcccaccaccaaccccacttccacggcgattttcaaggcgctaatttgcctgaaaacccgcaacgggattatcatctcgccgcacccccgcgccaaagcaagcacctgcgccgccgctaaaattgtgctggacgccgcggtcgccgcgggagcgcccgagggaatcataggctggatagacgagcccagccttgaaatgaccaacatggtgatgaaagaggcggacactattcttgccacaggcgggccgggcatggtcaagtccgcctactcctccggcaaacccgcaatcggcgtcggctcgggtaatgtgccggctatcatcgacgacagcacggatatactcctcgcggtcaactcaatcatacactcaaaaacttttgataacggaatgatatgcgcgtccgagcaatcggtcatcgctttgcaaagcgtttacgaaaaagtgaaagccgaattcaaacgccggggctgttacttccttacgcccggagaaaccgagaaggtgaggaaaacaattatcgtcaacggatcgctgaacgcgaaattgtcggacagaaggcggcgaaaatcgcggagcttgcgggcgtga

SEQ ID NO: 57168 - protein, 201 aa, Unknown
  Obtained from environmental sample
  misc_feature (1)..(201): Xaa is any amino acid
MRAVIPTTNPTSTAIFKALICLKTRNGIIISPHPRAKASTCAAAKIVLDAAVAAGAPEGIIGWIDEPSLEMTNMVMKEADTILATGGPGMVKSAYSSGKPAIGVGSGNVPAIIDDSTDILLAVNSIIHSKTFDNGMICASEQSVIALQSVYEKVKAEFKRRGCYFLTPGETEKVRKTIIVNGSLNAKLSDRRRRKSRSLRA

SEQ ID NO: 57169 - DNA, 1914 bp, Unknown
  Obtained from environmental sample
  misc_feature (1)..(1914): n is a, c, g, or t
atgcgcgtccgagcaatcggtcatcgctttgcaaagcgtttacgaaaaagtgaaagccgaattcaaacgccggggctgttacttccttacgcccggagaaaccgagaaggtgaggaaaacaattatcgtcaacggatcgctgaacgcgaaattgtcggacagaaggcggcgaaaatcgcggagcttgcgggcgtgaaagtggacgaggcgacaaaaatcctcatcggcgaagttgagagcgtggagctttcggaagaattcgcccacgaaaaactatcccccgtgctggcgatgtacaaggcgaaagattttgacgacgcactggacaaggccgaccatttagtaaaagacggcggctatggccacacagccagcgttttccttaatccgcatacgcagacaggggcggacaaactcgccgccttcagcgagcgcatgaagacttgccgcattgtgcttaataccccgtcggcgcacggcggtatcggcgacctgtacaacttccgcctgcggccttcgcttactctgggctgcggcagttggggcggcaattcggtttctgaaaacgtcggcgttaaacacctgttaaatataaaaacactggcggcaaggagggaaaatatgttgtggtttcgcgctcccgaaaaagtatatatcaaaaggggatgcctccctgtggctctggacgaacttaaaaccgttatggggaaaaaacgcgcgttcatcgtaaccgacacattcctgtacgaaaacggttacaccaaaacgataaccgaaaaactggacagcatgggcattgtccacgaaactttttttgatgttgcccccgacccgacacttgcctgtgcgaaaaagggcacggcgcagatgagcgccttcaagcccgatgtgatcatcgctctcggcggcggctcggcaatggatgcgggtaaaatcatgtgggtactctatgaacacccggaagttgattttgaggatatggcgatgcgtttcgccgatattcgtaaacgagtctacaccttccctaaaatgggagagaaggcttactttatcgcaatacccacctctgccggaacgggcagcgaggtaacgccctttgccgtcatcaccgatgaaaccaaaggcatgaaatatccgctcgcggattacgaactgatgcccgacatggcgattgttgacgtggacgtgcagatgaacgcgcccaagggacttaccagcgcgtcaggcattgacgcgatgactcacgcgctggaagcctacgcttcggtcatggccaccgacttcaccgacggtcttgcgatacaggccatcaagatgatttttgaatggctgcccaaggcttacaacgaaggcgcggcaaatcctgttgcgcgggaaaaaatggccaacgccgccaccattgcgggcatggcctttgccaacgcgttcctcggcgtatgccactcgatggcgcacaaactcggcgcgttccaccatctgccccacggcgtcgccaacgccctgatgatcagcgaagttatgcgctacaacgcctgcgaagttccgcccaagatgggtaccttcccgcaatacgatcaccccaagaccctttcccgttacgcggaaattgcggacgcgctggattttggcggctcaaatgatgaggaaaaacttgaaaccctgattgacgcagtggaatggttgaaagaacaggtaggaatcaagaagactatcaaggattacggtattgatgaaaaagattttcttgcccgtcttgacgagatgagcgaacaggcttttgatgatcaatgtaccggcgcgaatccccggtatcccctgattgcggaaataaaacagatgtatctcaacgcgtactacggcaagaatattcatctgggtggttccacggaaagaaggagcaggcgtaatgagtaa

SEQ ID NO: 57170 - protein, 637 aa, Unknown
  Obtained from environmental sample
  DOMAIN (214)...(610): Iron-containing alcohol dehydrogenase
  misc_feature (1)..(637): Xaa is any amino acid
MRVRAIGHRFAKRLRKSESRIQTPGLLLPYARRNREGEENNYRQRIAEREIVGQKAAKIAELAGVKVDEATKILIGEVESVELSEEFAHEKLSPVLAMYKAKDFDDALDKADHLVKDGGYGHTASVFLNPHTQTGADKLAAFSERMKTCRIVLNTPSAHGGIGDLYNFRLRPSLTLGCGSWGGNSVSENVGVKHLLNIKTLAARRENMLWFRAPEKVYIKRGCLPVALDELKTVMGKKRAFIVTDTFLYENGYTKTITEKLDSMGIVHETFFDVAPDPTLACAKKGTAQMSAFKPDVIIALGGGSAMDAGKIMWVLYEHPEVDFEDMAMRFADIRKRVYTFPKMGEKAYFIAIPTSAGTGSEVTPFAVITDETKGMKYPLADYELMPDMAIVDVDVQMNAPKGLTSASGIDAMTHALEAYASVMATDFTDGLAIQAIKMIFEWLPKAYNEGAANPVAREKMANAATIAGMAFANAFLGVCHSMAHKLGAFHHLPHGVANALMISEVMRYNACEVPPKMGTFPQYDHPKTLSRYAEIADALDFGGSNDEEKLETLIDAVEWLKEQVGIKKTIKDYGIDEKDFLARLDEMSEQAFDDQCTGANPRYPLIAEIKQMYLNAYYGKNIHLGGSTERRSRRNE

SEQ ID NO: 57171 - DNA, 789 bp, Unknown
  Obtained from environmental sample
  misc_feature (1)..(789): n is a, c, g, or t
gtggttccacggaaagaaggagcaggcgtaatgagtaattacaaactggaaaaaataatcgctgtgcggacggcgaagacaatctaccgggacggggataaagtgataaaagtaatgggcgaagaataccttgcgcctgacgtactctccgaagcgcttaaccttgctgtggtgggagagactgccctaaaggttccccgtctggtggaagtaacgaaaatcaacggcaagtgggcagtggtgtgggaatatgttgagggaaccactcttgacaaactaatggaaaaaaacaaggacaaagaacagcagtaccttgaacgctttgttgacattcaacttgatatgtaccgctacagtgcgacaaggcttcccttgcttaccgaaaaaatggagcgcaagataaaagcctccggtcttgacgcgacctcccgctatgaaattttaggaaggctggcaagtatgcccaaacacaccaaactctgccacggcgactttaatcccagcaacattgttatcaccgaaaaagacgaagcgtatataatcgactggtcacatgccgctcagggaaacgcctcggcggacgcggcgcaaacctacctgttgttctggcttgcgggtaatatcactttggcggataagtaccttgcgctttattgcaaaaaaaacgacacggcgaaacagtacgtggaaaagtggctttccattgtggcagcatcgcggcttcccaaggcaaggccggaagaaaaagaatttttactgcatggggtcaatgtagctgaataccaatga

SEQ ID NO: 57172 - protein, 262 aa, Unknown
  Obtained from environmental sample
  DOMAIN (15)...(228): Phosphotransferase enzyme family
  misc_feature (1)..(262): Xaa is any amino acid
MVPRKEGAGVMSNYKLEKIIAVRTAKTIYRDGDKVIKVMGEEYLAPDVLSEALNLAVVGETALKVPRLVEVTKINGKWAVVWEYVEGTTLDKLMEKNKDKEQQYLERFVDIQLDMYRYSATRLPLLTEKMERKIKASGLDATSRYEILGRLASMPKHTKLCHGDFNPSNIVITEKDEAYIIDWSHAAQGNASADAAQTYLLFWLAGNITLADKYLALYCKKNDTAKQYVEKWLSIVAASRLPKARPEEKEFLLHGVNVAEYQ

SEQ ID NO: 57173 - DNA, 858 bp, Unknown
  Obtained from environmental sample
  misc_feature (1)..(858): n is a, c, g, or t
atgaaacctgtacaacaacattttgatcttattaataaatctaatagtcattttaagaaaattctttctcgttctcttaaagaatatcctcctttttttcagtcaaaaaacactgtaatttttaatagagattgtttggaaatactatcttctattcctgaaaattcaatagatatgatttttgccgatccgccgtatatgttatcaaatggcggatttacatgccaaaatggaaaaatggttaatgtcaataaaggaaaatgggacaaaagtaatggttttgaagaagacacgatttttcacaatgaatggatttccgcttgccgccgcattttaaaacccgaaggtacaatctggatctctggcacataccacagtatttttcaatgcggttatcttttgcaaaaaaataattttcatattttaaatgacattacttggtttaaacctaatgcttcaccaaatttaagctgtcgtttttttacagcatcacacgaaacacttatatgggcacgtaaagataaaaaagcaaaacatacatttaattatgaagaaatgaaaaacggtttgtttcccgaggataaattaaaaaaggaaaatacacaaatgagatccgtttggtcaataggaactcccaaaagtagtgaaaaagaatatggaaaacatccaacccaaaaaccatttgagttattaaaacgtattgtacttgcatcaactaataaaaatgacattatacttgatccattttgcggtagcggaactacaggagttgcctgtatgtttttaaataatagatcatttattggaattgagattgaaaaaacatattgtgatttagcaagaaaaagattaatgtaa

SEQ ID NO: 57174 - protein, 285 aa, Unknown
  Obtained from environmental sample
  DOMAIN (57)...(282): DNA methylase
  misc_feature (1)..(285): Xaa is any amino acid
MKPVQQHFDLINKSNSHFKKILSRSLKEYPPFFQSKNTVIFNRDCLEILSSIPENSIDMIFADPPYMLSNGGFTCQNGKMVNVNKGKWDKSNGFEEDTIFHNEWISACRRILKPEGTIWISGTYHSIFQCGYLLQKNNFHILNDITWFKPNASPNLSCRFFTASHETLIWARKDKKAKHTFNYEEMKNGLFPEDKLKKENTQMRSVWSIGTPKSSEKEYGKHPTQKPFELLKRIVLASTNKNDIILDPFCGSGTTGVACMFLNNRSFIGIEIEKTYCDLARKRLM

SEQ ID NO: 57175 - DNA, 468 bp, Unknown
  Obtained from environmental sample
  misc_feature (1)..(468): n is a, c, g, or t
atggctgcaatagcatcccgcagaaagggccgcattctggcattccaggcgctgtactgctgggaagcaaatcagattttttctgacgagttaatggagttttcctggctggaaaaagagaagctggctgatcttgacgaaggcatcgccggtttctcccgtttgttaataatgggtacgattgaaaatattcaaccgattgacgaaatgatcaaatgtcatttgcagaattgggatatttcccggcttaaccgggtggatcttgccatactcaggatgagcgtatatacattgatgtatcaaagtgaaattgccccgtcaatagtgatagacgaagcgattggcatttcaaaagaattcggaaccgatgattcctatcgttttgtcaacggggttttggatagtatcaatcacacgcttctggcacaggcggaaaaaggagccgtcctttccaaaaatgcgttataa

SEQ ID NO: 57176 - protein, 155 aa, Unknown
  Obtained from environmental sample
  DOMAIN (8)...(140): NusB family
  misc_feature (1)..(155): Xaa is any amino acid
MAAIASRRKGRILAFQALYCWEANQIFSDELMEFSWLEKEKLADLDEGIAGFSRLLIMGTIENIQPIDEMIKCHLQNWDISRLNRVDLAILRMSVYTLMYQSEIAPSIVIDEAIGISKEFGTDDSYRFVNGVLDSINHTLLAQAEKGAVLSKNAL

SEQ ID NO: 57177 - DNA, 699 bp, Unknown
  Obtained from environmental sample
  misc_feature (1)..(699): n is a, c, g, or t
atgtataaatctatcaattttaatagtcatttgaaaaaaatactttctcgttctcttgaagaaatctcccctttttttcagtcacaaaatgctgttatttttaatggaaattgtttggaaatactatcttctattcctgataattcaatagatatgatttttgccgatccgccttatatgttatcaaatgacgggtttacatgtcaaaatggaaaaatggttaatgtcaataaagggaaatgggataaaagcagaggttttgaaagagacacagattttcacgataaatggatttccgcttgccgccgtattctaaagcccgaagggacaatctggatttcgggtacataccacagtatttatcaatgcgggtatcttctgcaaaaaaataattttcatattttaaatgatattacatggtttaaacctaatgcttcaccaaatttaagttgtcgtttttttacggcatcccatgaaacacttatatgggcgcgtaaagataaaaaagccaaacatatatttaattatgaagaaatgaagaatggcttttttccggaggataaattaaaaaaggaaaatacgcaaatgaggtctgtctggtcaataggtactcccaaaaacggagaaaaagaatatgggaagcatccgactcaaaaaccatttgatttattaaaacggtgttgtacttgcatcgactaa

SEQ ID NO: 57178 - protein, 232 aa, Unknown
  Obtained from environmental sample
  DOMAIN (50)...(232): DNA methylase
  misc_feature (1)..(232): Xaa is any amino acid
MYKSINFNSHLKKILSRSLEEISPFFQSQNAVIFNGNCLEILSSIPDNSIDMIFADPPYMLSNDGFTCQNGKMVNVNKGKWDKSRGFERDTDFHDKWISACRRILKPEGTIWISGTYHSIYQCGYLLQKNNFHILNDITWFKPNASPNLSCRFFTASHETLIWARKDKKAKHIFNYEEMKNGFFPEDKLKKENTQMRSVWSIGTPKNGEKEYGKHPTQKPFDLLKRCCTCID

SEQ ID NO: 57179 - DNA, 624 bp, Unknown
  Obtained from environmental sample
  misc_feature (1)..(624): n is a, c, g, or t
ttggcgctgataaagccgcccggggaacaaggtttcgacatcgctgtaggcgaaggccagtccatgggcataccgctctccttcggcggcccgtacctaggcttcatcggcgcaaaaaaaaatctggcgagaaagatgccgggaaggatcgtggcgcgaaccacggacacaagcggccgcgacggcttcgtgctgtcgctccaagcgcgcgagcaacacatcagacgcgaaaaggcgacgtccaacatctgctcaaacgaggcgctgtgcgcgctaagagcccacgcctacctgtctctgatcggaaaacgcggacttgtcgatgttgcgacgctatgccacaacaacgcgatccgcctacgcgagcgtataaaagagtcaatcccgtccataaagacatacggcgacgcgccgatattcaacgagttcgtgatcgatctgccgataaacgcggatgaatgcgtagaagcaatgctgaccaaaggcttcgccgccgggattccgatcggccgatactacgattacgacggggcggacaaggcgcttctcgtggcggcgacggagaagaggacgcggggggagattgacgcgtttgtcgacggtctgcgggaggcggtggggtaa

SEQ ID NO: 57180 - protein, 207 aa, Unknown
  Obtained from environmental sample
  DOMAIN (1)...(202): Glycine cleavage system P-protein
  misc_feature (1)..(207): Xaa is any amino acid
MALIKPPGEQGFDIAVGEGQSMGIPLSFGGPYLGFIGAKKNLARKMPGRIVARTTDTSGRDGFVLSLQAREQHIRREKATSNICSNEALCALRAHAYLSLIGKRGLVDVATLCHNNAIRLRERIKESIPSIKTYGDAPIFNEFVIDLPINADECVEAMLTKGFAAGIPIGRYYDYDGADKALLVAATEKRTRGEIDAFVDGLREAVG

SEQ ID NO: 57181 - DNA, 2025 bp, Unknown
  Obtained from environmental sample
  misc_feature (1)..(2025): n is a, c, g, or t
gtgattgtggatgaacctcagaatatggagaccgacattcgtaaaaaagctattaaaaatctaaatccgctttgcacgttgcgttattcggccacccataccaatctctacaatccggtatattcgctcaatccggtcaacgcttacgatttagggttggtcaagcaaattgaggttgattcggtagtgggtgtaaacgctaagaatgacgcttttataaaattggagagcgtccaacacagcggaaaaaacaaaatcacggccaaaattatcttggacgtgaatacacaaaaagaggtaaaacgcaaaagcgttacggctgatcttaaagataactacgatttgttcaaactctcaggcgagcgtgagatttatcgggatttgcttgttgacgaaatcaattttcaagaacagcgcatttctttatccaacgggctaatacttgaagcgggtgaaactcagggcgggttgaaggatgaagtacaaaaatatatgattcgctgtactgtggaagagcatttgaaaaaggaggcgagatacgccaaaaagggaataaaggttctttcgcttttctttatcgataaggtaaaaaattatcgtgattacgatgatactggaaacattatactcggaaaattcgcgcaatggtttgaggagatttataatgaggaaattcgcaaacccgtttacgcggccataaaacaatttgacgctaaagaggttcacggcggctatttttcgcaggacgttaagggaaagatgaaagataccaacggggagacgttgcttgataacgatacctacaaattaattatgagggagaaagagagtttgttggatataggaacgccgctacgctttatcttcagccactccgcgctacgcgaagggtgggacaatcccaacgtatttcaaatttgcacgctaaacgagaccaaatccgatctgaaaaagcgtcaggagataggccgcggtttgcgtctttgcgtggacagcgcgggtgagcggatttacgataaagacatcaaccgccttacggttatcgccaacgaatgttatgacgatttcgcaaacgctttgcagaaagagatcgaatccgactgcggcgtagttttcagcggacgaatcaagaacaagcgggagaggcaaaaaataaattaccgcaaaggttttgagcttgaccccaaatttttggagatttgggataaaatcaagtacaaaaccaaatacagcgtgacgtacaaaacggacgaactgatcgcccttgccggtaaagccgtcggggagatgcctaatgtaacgcgtccgagcgtgtacagcgagcgcgtcggcgtgaagattacggatgaaggcgtttccggcgagttgctgcgagcgaatacgacgcagctttacggggaagatcagcgaaacacgctgccggacgtcgtttcctacattcaaaacaaaaccgagctgacgcggcgaaccgtttttgacattatagctcagtcggggcgtataaaagatatcctcgttaatccgcagctatttatggattgtgccgtgagcgccgtcaaagagacgctttacggtttgatgatcgacggcattcgctatgaaaagataggcggcaagatttatgagatgaccttgtttgacgatgccgaccttgaagcatatttagacgaatttacgcacagggtgcagaacgccgataaaaccatttacgaaaactacatccctcttgattcttcggtcgaaagccggttcgcaatggattgcgagagcattgaaaacgtcgaattttacttcaaactgccggcttggtttaagatttccacgcctataggcaactacaatccggattgggcgatagttttcaaaggcattcggaaggtatactttgtcgccgaaacaaagggcgagggggagttgcgcggcggcgaagaactgaaaatcaagtgcgggaaagcgcattttagggagtttgagggcgtcgtttacgaacgcgtgtcaaaggtcagcgatatcgtctcgcaataa

SEQ ID NO: 57182 - protein, 674 aa, Unknown
  Obtained from environmental sample
  misc_feature (1)..(674): Xaa is any amino acid
MIVDEPQNMETDIRKKAIKNLNPLCTLRYSATHTNLYNPVYSLNPVNAYDLGLVKQIEVDSVVGVNAKNDAFIKLESVQHSGKNKITAKIILDVNTQKEVKRKSVTADLKDNYDLFKLSGEREIYRDLLVDEINFQEQRISLSNGLILEAGETQGGLKDEVQKYMIRCTVEEHLKKEARYAKKGIKVLSLFFIDKVKNYRDYDDTGNIILGKFAQWFEEIYNEEIRKPVYAAIKQFDAKEVHGGYFSQDVKGKMKDTNGETLLDNDTYKLIMREKESLLDIGTPLRFIFSHSALREGWDNPNVFQICTLNETKSDLKKRQEIGRGLRLCVDSAGERIYDKDINRLTVIANECYDDFANALQKEIESDCGVVFSGRIKNKRERQKINYRKGFELDPKFLEIWDKIKYKTKYSVTYKTDELIALAGKAVGEMPNVTRPSVYSERVGVKITDEGVSGELLRANTTQLYGEDQRNTLPDVVSYIQNKTELTRRTVFDIIAQSGRIKDILVNPQLFMDCAVSAVKETLYGLMIDGIRYEKIGGKIYEMTLFDDADLEAYLDEFTHRVQNADKTIYENYIPLDSSVESRFAMDCESIENVEFYFKLPAWFKISTPIGNYNPDWAIVFKGIRKVYFVAETKGEGELRGGEELKIKCGKAHFREFEGVVYERVSKVSDIVSQ

SEQ ID NO: 57183 - DNA, 1002 bp, Unknown
  Obtained from environmental sample
  misc_feature (1)..(1002): n is a, c, g, or t
gtgatcggttacggcgttcaggggccggcgcaggcgttgaaccttcgcgacaacgggttcaagaacgtgatcatcggtcagtccaagaagttcaagaaggactgggatcgggcggtcaaggacggctgggttccgggcaagacgctctttgaggtcgaggaagcggctcagcgcgggacgatcataaagctgctagtggccgacgcggcggcgaggataatctggccgaccataaagaagtacttgacaaaggggaaggcgctgtacttctcgcacggtttctccatcgtctacaaagagcagacgaaggtgatcccgcccagagacgtagacgtgatcatggtcgcccccaagggcagcggcacatcggtgcgccgcaacttcataaacggcgtcggtatcaactcgagctacgcggtcttccagaacgcgacccgccgcgccgaggagcgctgtctggccctgggcatcggcatcggaagcggctacctcttcccgaccactttcgagaaggaggtctacagcgacctgaccggcgagcgcggcgtgctgatgggcgcccttgccggcatcatggaagcccagtacgacgtcctgcgcaagaacggccacagcccgagcgaagccttcaacgaaacggtcgaggagcttacccagagcctcatccgccttgtcgacgaaaacggcatggactggatgtactccaactgctccgccacagcccagcgcggcgcgctcgactggaagcccaagttcaagaaggcgacgctgccggtcttcaaagagctgtacgaagccgtcaagagcggggccgaaacgaagcgcgtcatctccgcctgcggcaagccgaattacaaagagctgctcgacagggagcttgccgacatgggaaattccgagatgtggcaagccggaaaagccgtcagggcactgcgtcccaaagagaaagcccgcgaaatcacaaaggagaccaaggggatcgcggggcgcgggaagaattga

SEQ ID NO: 57184 - protein, 333 aa, Unknown
  Obtained from environmental sample
  DOMAIN (2)...(162): Acetohydroxy acid isomeroreductase, catalytic domain
  misc_feature (1)..(333): Xaa is any amino acid
MIGYGVQGPAQALNLRDNGFKNVIIGQSKKFKKDWDRAVKDGWVPGKTLFEVEEAAQRGTIIKLLVADAAARIIWPTIKKYLTKGKALYFSHGFSIVYKEQTKVIPPRDVDVIMVAPKGSGTSVRRNFINGVGINSSYAVFQNATRRAEERCLALGIGIGSGYLFPTTFEKEVYSDLTGERGVLMGALAGIMEAQYDVLRKNGHSPSEAFNETVEELTQSLIRLVDENGMDWMYSNCSATAQRGALDWKPKFKKATLPVFKELYEAVKSGAETKRVISACGKPNYKELLDRELADMGNSEMWQAGKAVRALRPKEKAREITKETKGIAGRGKN

SEQ ID NO: 57185 - DNA, 450 bp, Unknown
  Obtained from environmental sample
  misc_feature (1)..(450): n is a, c, g, or t
ttgccggcatcatggaagcccagtacgacgtcctgcgcaagaacggccacagcccgagcgaagccttcaacgaaacggtcgaggagcttacccagagcctcatccgccttgtcgacgaaaacggcatggactggatgtactccaactgctccgccacagcccagcgcggcgcgctcgactggaagcccaagttcaagaaggcgacgctgccggtcttcaaagagctgtacgaagccgtcaagagcggggccgaaacgaagcgcgtcatctccgcctgcggcaagccgaattacaaagagctgctcgacagggagcttgccgacatgggaaattccgagatgtggcaagccggaaaagccgtcagggcactgcgtcccaaagagaaagcccgcgaaatcacaaaggagaccaaggggatcgcggggcgcgggaagaattgatagtggttaa

SEQ ID NO: 57186 - protein, 149 aa, Unknown
  Obtained from environmental sample
  misc_feature (1)..(149): Xaa is any amino acid
MPASWKPSTTSCARTATARAKPSTKRSRSLPRASSALSTKTAWTGCTPTAPPQPSAARSTGSPSSRRRRCRSSKSCTKPSRAGPKRSASSPPAASRITKSCSTGSLPTWEIPRCGKPEKPSGHCVPKRKPAKSQRRPRGSRGAGRIDSG

SEQ ID NO: 57187 - DNA, 933 bp, Unknown
  Obtained from environmental sample
  misc_feature (1)..(933): n is a, c, g, or t
atgattgtcaatatggaaccgcatcgttatcgtactcataattgcggggagcttcgcgccgccaatgtcggcgagtttgttcggctcagcgggtggatcaacaatcgccgtgaccacggcggagtgctttttattgacttgcgcgaccactacggccttacgcaggtggtcgtctacccggaccgcgcctttcagaagacgatcgcgcacctcacgaaggagacggtcgtttgttttgacgggatcctctccaatcgctccgaagagaatataaatccaaagctgcctacgggcgaggtggagctcgccgccgacgcttttgaggtgctcagcgccgcggagcaggtgcccatccctgtcttccctgaggacccggcgccggaagaattgcggctcgagtaccgcttcatcgacttgcgccgcagccagatacacgcgaacatcctgctgcgctccaaggtgatcgcttttatgcgccgaaccatgacggaaatggggttcaacgagtaccagacacccatcctgaccagctcctctccggagggggcgcgggattttctcgtaccgtcccgcatccatccgggcaaattctacgctttgccgcaggcgccgcagcagttcaagcagctgctcatgatcgcggggttcgacaggtactttcagatcgctccgtgcttccgcgacgaggacgcccgggccgacaggtcgccgggcgagttctaccagcttgatatcgaaatgtcgtttgtcactcaggaggacgtgttcgccgtggtggagaagctcttagacgagctgttcggcgaattttcccgcaggagcttctacaagccgccgttccgccgcataccgtatagggaggctatgctcaagtacgggacggacaagccggatttgcgcattccgatagagatacagggacgtttcgcataa

SEQ ID NO: 57188 - protein, 310 aa, Unknown
  Obtained from environmental sample
  DOMAIN (27)...(110): OB-fold nucleic acid binding domain
  misc_feature (1)..(310): Xaa is any amino acid
MIVNMEPHRYRTHNCGELRAANVGEFVRLSGWINNRRDHGGVLFIDLRDHYGLTQVVVYPDRAFQKTIAHLTKETVVCFDGILSNRSEENINPKLPTGEVELAADAFEVLSAAEQVPIPVFPEDPAPEELRLEYRFIDLRRSQIHANILLRSKVIAFMRRTMTEMGFNEYQTPILTSSSPEGARDFLVPSRIHPGKFYALPQAPQQFKQLLMIAGFDRYFQIAPCFRDEDARADRSPGEFYQLDIEMSFVTQEDVFAVVEKLLDELFGEFSRRSFYKPPFRRIPYREAMLKYGTDKPDLRIPIEIQGRFA

SEQ ID NO: 57189 - DNA, 1761 bp, Unknown
  Obtained from environmental sample
  misc_feature (1)..(1761): n is a, c, g, or t
gtgtctttatacgccaataaacttatatctttttccatgcatacaatggaattcaatctggagcatcgtttaatcgccgaaagcaaaaggcttgccagtatggtcagcgccgaggaattggacaggtttcgttccatacaggatatgaaaaggcctgattataaggccctgcgccggcgtatgcttgatttttccatagaagccgatgtccgctacgcctattatatccgcccggtggattccggattgcagtatatcatagacaatgattttaatgagaaaacgcgcgtgggactggataccccgccctttgatccgcgctccgtgccctggatagtgtcctcgctggaaggtcaggctgtttgttccgttcttggcaattacaatcccggctgggaaggactgctctccggttatgcgcccatttttaataaagatggaaaggtaacagccgtcgcgggagtggacattgaggacaggcatatagtacgagcgtggcggctggtatccattcttacgatagtgcaattcatcaccgcggccgccatttttgtaatgggcattatctatcttatttatttataccgccaactggaaatagcgcgggaagccagttccgccaaaagtgatttcctcgcgaaaatgagccacgaaatacgcacgcccatgaacgccattaccggcatggcggagcttgccctgcgcgaggaaatgccgcagaccgtccatgatcatattcttaccatcaaacaggccgggaataatctcngtctcataattaacgatattctggacttctcaaaaattgaagcgggcaagatggaaataatccccatcaaatacctgctttcatctctgctcaacgatacagctaatattatccgtatgcggcttatggaaaagccgatacggttttttaccaatatagacgggaatatccccaacagcctgatcggcgatgaagtgcggctgcggcagattatccttaaccttctgtccaatgcggtaaagtattcggacaaggggcatatcggtttatccattatggagcagaagcgggaagccgggcaggtttggctcgggattattgtaaccgacaccggcaaggggattaagtctgaggatcaggcgagacttttcggagattttgttcaggttgataccaggaagaaccggagcattgagggaacaggcctgggtctggcgattacccggcggctgtgccatatcatgggcgggaatataaccgtggaaagcgagtatggcaaaggcagcgtctttaccgttgtcattccccaaggtgttgattcaccggaaccttttgccgtagtgaaggatgcggcgaacaagaaggtattggtctacgaaagcagagtcatttacgccaaatcggtgtgctggtctctggataatatgaaggttccctatactatggtaacgaaacaggatgattttgccgcggttctgtaccgggcggaatggttctatgtatnttccggctatggcctctatgaaaaaatcagaccgctcatggagcagcctgatgccgcttttttcggcggccgcaaaccgcctctggctctcatggtagaatggggaaccgagacctacatacccggcgcgcgttttgtgtccatacctgtgcagtcccagtcgattgccaatgttcttaacggcagggctgacagcaaaaattatattaaaacttccggcgataatccacttcactttccccagcgcgcggcttcttgtggtagatga

SEQ ID NO: 57190 - protein, 586 aa, Unknown
  Obtained from environmental sample
  DOMAIN (207)...(272): His Kinase A (phosphoacceptor) domain
  misc_feature (1)..(586): Xaa is any amino acid
MSLYANKLISFSMHTMEFNLEHRLIAESKRLASMVSAEELDRFRSIQDMKRPDYKALRRRMLDFSIEADVRYAYYIRPVDSGLQYIIDNDFNEKTRVGLDTPPFDPRSVPWIVSSLEGQAVCSVLGNYNPGWEGLLSGYAPIFNKDGKVTAVAGVDIEDRHIVRAWRLVSILTIVQFITAAAIFVMGIIYLIYLYRQLEIAREASSAKSDFLAKMSHEIRTPMNAITGMAELALREEMPQTVHDHILTIKQAGNNLXLIINDILDFSKIEAGKMEIIPIKYLLSSLLNDTANIIRMRLMEKPIRFFTNIDGNIPNSLIGDEVRLRQIILNLLSNAVKYSDKGHIGLSIMEQKREAGQVWLGIIVTDTGKGIKSEDQARLFGDFVQVDTRKNRSIEGTGLGLAITRRLCHIMGGNITVESEYGKGSVFTVVIPQGVDSPEPFAVVKDAANKKVLVYESRVIYAKSVCWSLDNMKVPYTMVTKQDDFAAVLYRAEWFYVXSGYGLYEKIRPLMEQPDAAFFGGRKPPLALMVEWGTETYIPGARFVSIPVQSQSIANVLNGRADSKNYIKTSGDNPLHFPQRAASCGR

SEQ ID NO: 57191 - DNA, 360 bp, Unknown
  Obtained from environmental sample
  misc_feature (1)..(360): n is a, c, g, or t
atgggaaaatcaaaggatttaaggaaaattctttctcaaaatataagaaatgcgcgaaaatcattacacattagtcaggcaaaactggcagaatccgctaatctttccgtttctcatatagttgatattgaatattgtaaaacttgggttagcgataaggccttgaacagtatagcaaaatcattgaatttagaggcctatgaactattaataccggaaaatgttcaaaataaagctgaaaatcatgctttacaacggatcgcgggaattatcaaaggaaaaaagacccttttaagacaaaaaaccggtgaaataattgatgagcttttactggagattattaaaaatttcaaagaataa

SEQ ID NO: 57192 - protein, 119 aa, Unknown
  Obtained from environmental sample
  DOMAIN (15)...(69): Helix-turn-helix
  misc_feature (1)..(119): Xaa is any amino acid
MGKSKDLRKILSQNIRNARKSLHISQAKLAESANLSVSHIVDIEYCKTWVSDKALNSIAKSLNLEAYELLIPENVQNKAENHALQRIAGIIKGKKTLLRQKTGEIIDELLLEIIKNFKE

SEQ ID NO: 57193 - DNA, 1491 bp, Unknown
  Obtained from environmental sample
  misc_feature (1)..(1491): n is a, c, g, or t
atggaagcgcttgcggcgataggttccgcgaattattttgacgataaaatccaggggcaggtaaacggttttgcctccaaacgctcgccgggatcaaccttaaaaccgtttatctacgcgcttgcgttagagcagggattgatacaccccgagaaaatgctcaaggatacgcccgtaggtttcagcgaatacacgccggataattttcgcggcgattttaagggcccggtgagcgcgtggtacgctcttgtagacagccggaatatccccgccgtacagcttgcgagggacattcacaaacccgatctttacgattttctgaaaatggccggcatttccggcttgaaagaaaaaggccattacggcctttcgatagtgctaggcagcgcggatttgacaatgctggaacttgcctccctctacgccgctctacccaacggcggagtaaaaaaagagctccgttttttatctgcaagggacaatttttacacaaacggcgtttctcaaaacatttcttctcaaatcgatgtttccggaaacgaagcttctctaagcaaagccttgaaaaaccccacgcaaggtgaaaaaattttaactcccgccgccgcggcgattacgctgagaatgttagaaagaaatcccgcccctgacgattttcgcgtaatgaaaaatcgctcagttcccatagcttacaaaaccggcacttcaatcggttttaaggacgcgtgggctattgctgtttttgaacgttatgtgctatgcgtatggcttggaaatttttccggcgagggaaacagcgcgtttatcggcaggctaagcgccgcccccctgggtttcagcataatagacgcgatactcgcggaaatccccgatgataaacttttcgcgcgccgtcccctgccgccggaagtaaaagccgtgcaagtatgcgcagtctccggcgacattccctccgacgactgcccccgattaattgatactctttttatccccggcgtttccccgatcaaccgctgccgcattcaccgaaagatttacatcgacacccgcaccggctaccgcacaaacgaaaccgaaggtaaatttattagaagcgaagtccgcgaattctggccttctgacataatggaaatttttgaagctgcgggattgcctcgtttttcaccgccgccctacccgcccgattcctcaagcggcgctccgtcaagtggtttcccgccttcgattatttctcctctcgctaacaccaactacattatccgcccgggacttccggcggacaaccgcagtaatcagatggttcttctcgcttccgcggatcaggacgcgagcgaattgttttggtttgccaacacgagttttttggggagagcgaaaccgaaggagcggtttgtttggtcgctggaggcgggggtgtgggatatttcggtggttgacaacttaggccgctcttcgggggttcgtgtgcgggtggaggcttcgggggagtga

SEQ ID NO: 57194 - protein, 496 aa, Unknown
  Obtained from environmental sample
  DOMAIN (5)...(283): Penicillin binding protein transpeptidase domain
  misc_feature (1)..(496): Xaa is any amino acid
MEALAAIGSANYFDDKIQGQVNGFASKRSPGSTLKPFIYALALEQGLIHPEKMLKDTPVGFSEYTPDNFRGDFKGPVSAWYALVDSRNIPAVQLARDIHKPDLYDFLKMAGISGLKEKGHYGLSIVLGSADLTMLELASLYAALPNGGVKKELRFLSARDNFYTNGVSQNISSQIDVSGNEASLSKALKNPTQGEKILTPAAAAITLRMLERNPAPDDFRVMKNRSVPIAYKTGTSIGFKDAWAIAVFERYVLCVWLGNFSGEGNSAFIGRLSAAPLGFSIIDAILAEIPDDKLFARRPLPPEVKAVQVCAVSGDIPSDDCPRLIDTLFIPGVSPINRCRIHRKIYIDTRTGYRTNETEGKFIRSEVREFWPSDIMEIFEAAGLPRFSPPPYPPDSSSGAPSSGFPPSIISPLANTNYIIRPGLPADNRSNQMVLLASADQDASELFWFANTSFLGRAKPKERFVWSLEAGVWDISVVDNLGRSSGVRVRVEASGE

SEQ ID NO: 57195 - DNA, 606 bp, Unknown
  Obtained from environmental sample
  misc_feature (1)..(606): n is a, c, g, or t
atgcgccgggcatcgacgccaagcagacttcctgcctctccgggatgcggggtgagaatatccccggcatgcaggctttcaagcgaaagcttcccttcggccgacagcgtgagcgcatcggcgtcaagcaccatcgggggtctgcgcggcagacgcaacagggctgagagaagtgttccggcttccgggctgcgtcccatgcccggccccacgatcagggcggacgccttggtcgccaacgacggcagctcgtccacggcgccctcgtcgagggcgtttttccaggatcggccccgtcccagcgggaaagacatgatctccggcatggcggcccgtatttccgcgcacaagcctccgggcgctgccacgctcaccagtccgcaacccgtgcgcaaggcggccgaagccgccagatgcgccgcgcccgtcagcccttccgaaccaccgatcacaatgacatgcccgaaagtacccttgtgcgccccggtcgccgcgcgaggcagcgcatgcgcgcacgaggcgtccagcaaacggtgggacggaggatgcgcatggacgacagccgcaggaatgcctatgcgccgtatataccaccgcccggtgtag

SEQ ID NO: 57196 - protein, 201 aa, Unknown
  Obtained from environmental sample
  misc_feature (1)..(201): Xaa is any amino acid
MRRASTPSRLPASPGCGVRISPACRLSSESFPSADSVSASASSTIGGLRGRRNRAERSVPASGLRPMPGPTIRADALVANDGSSSTAPSSRAFFQDRPRPSGKDMISGMAARISAHKPPGAATLTSPQPVRKAAEAARCAAPVSPSEPPITMTCPKVPLCAPVAARGSACAHEASSKRWDGGCAWTTAAGMPMRRIYHRPV

SEQ ID NO: 57197 - DNA, 612 bp, Unknown
  Obtained from environmental sample
  misc_feature (1)..(612): n is a, c, g, or t
gtgcgtcgggcaacgttaagcgtcccgctgcggcccaacgcggtcgacttttttgaagaacccaattcaggcggcaacatcgcggagcgtatcccctggatcagctgggacattgttcccaattcatccgatatggagataactctgtactttggcggcgcggggtgcagcctgcccggaaaggcccgtgtattcaaaccttccgacggctatgaggcgatccttccctttgtgtttgacgcggtttgcgggcctgggataaacgcctgtcccccgttgatagtgggtatcggcctggggcagaatgtggagaatgcggccctgctttcaaaaaaagcgtgcctgcggcttttgggcagtcgccatccccacccaaagggagagcggctggagcgccttattatggaagggcttaacggccttggcatgggcgctcaggggctgcggggcaatcaggcggtaatggcggtgcatattgaatcgtcgggcagacacattgccgccttttcctgcgcggttaatgtttcgtgttacacgcacaggcggggaatcatccgctttgactcatgtctttcctttgaattgcccttataccggggagcctcgctgtga

SEQ ID NO: 57198 - protein, 203 aa, Unknown
  Obtained from environmental sample
  DOMAIN (1)...(187): Fumarate hydratase (Fumerase)
  misc_feature (1)..(203): Xaa is any amino acid
MRRATLSVPLRPNAVDFFEEPNSGGNIAERIPWISWDIVPNSSDMEITLYFGGAGCSLPGKARVFKPSDGYEAILPFVFDAVCGPGINACPPLIVGIGLGQNVENAALLSKKACLRLLGSRHPHPKGERLERLIMEGLNGLGMGAQGLRGNQAVMAVHIESSGRHIAAFSCAVNVSCYTHRRGIIRFDSCLSFELPLYRGASL

SEQ ID NO: 57199 - DNA, 354 bp, Unknown
  Obtained from environmental sample
  misc_feature (1)..(354): n is a, c, g, or t
atggaaaaatgggcctcggactttatggaaaaaaccggagtcaggatgatgataggcaagggcggcatgggggaggggaccgcctgcggctgtcgcgaacacaccgctgttcactgcgtgtatccgggcggctgcgcggtactcggagcgggacaggtcgaaaaaattgaaaatgttttttggcccgaattgggaatgggcgaatgtctgtgggtgctgagggtccgcgacttcggccccctaatcgtaagcatcgacagccagggaaacaatttgttcaccgaaaacgccaagtattatgagtcacgtaaagaaactattatttccgccattaagttccccggccgccaataa

SEQ ID NO: 57200 - protein, 117 aa, Unknown
  Obtained from environmental sample
  misc_feature (1)..(117): Xaa is any amino acid
MEKWASDFMEKTGVRMMIGKGGMGEGTACGCREHTAVHCVYPGGCAVLGAGQVEKIENVFWPELGMGECLWVLRVRDFGPLIVSIDSQGNNLFTENAKYYESRKETIISAIKFPGRQ

SEQ ID NO: 57201 - DNA, 1059 bp, Unknown
  Obtained from environmental sample
  misc_feature (1)..(1059): n is a, c, g, or t
atgggtgaacacaacattgtttcttttggcggcgttggggacggcgtttttgataattcaaacgcctttcggacggcgctgaacaccataaaagaggcgggcggcggcatcctgcgggtaggggaggggatctggcgtaccgggccgttagaaatattctcgcgcacaacgctattgctggacgagggggcggtcatttcctttatccccgaaccggcgcgttatccgccggtatggacgcgctgggaagggtttgagtgctacgccatgcatccctgcgtttttgccgtcggacaggaagatataattatcagggggaaaggcataatagagggcaacgggcagtactggtggaataaaattcgtgaaaaaaatatcagcggacagcgacaaccccaatcacctgaagaattagccctttccgctttaaaccctggatacgaaaatcaaccgtccggcggcggtggcagaaaaaatcagttcctgcggcccccgctggtgcagttctacaattgctcaaaaatgcggctggaaggcattactctccgcaattccccgttttggacccttcatccggtgtattgtaccggcatagtcatttccgctctgtctatcatcaacccgccggacgcgccaaatacggacggaatggacatcgattcctgcgaagacgttttaatcgaaaactgccatatttcggtgggggatgacgctatagcgctgaagtccggatccggcgaagatgccgttcgcgccggaagaccaagccgccgcgtgaccgtgcgggactgtaaagtcgaaagcgggcacgggggaatcgttatcggaagcgaaaccgctggtggcattagtgaggtattggccgagaactgcctgttcaggggaacagaccgggggattaggataaaaacccgccgtgggcggggcggtacagtccaggatttggaattcagaaaactcaccatggaaaataacctctgcccccttgcgattaatatgtactaccgctgtggcgcgagccttgaggacggttatttcagcacggaagcccttccgtaa

SEQ ID NO: 57202 - protein, 352 aa, Unknown
  Obtained from environmental sample
  DOMAIN (87)...(352): Glycosyl hydrolases family 28
  misc_feature (1)..(352): Xaa is any amino acid
MGEHNIVSFGGVGDGVFDNSNAFRTALNTIKEAGGGILRVGEGIWRTGPLEIFSRTTLLLDEGAVISFIPEPARYPPVWTRWEGFECYAMHPCVFAVGQEDIIIRGKGIIEGNGQYWWNKIREKNISGQRQPQSPEELALSALNPGYENQPSGGGGRKNQFLRPPLVQFYNCSKMRLEGITLRNSPFWTLHPVYCTGIVISALSIINPPDAPNTDGMDIDSCEDVLIENCHISVGDDAIALKSGSGEDAVRAGRPSRRVTVRDCKVESGHGGIVIGSETAGGISEVLAENCLFRGTDRGIRIKTRRGRGGTVQDLEFRKLTMENNLCPLAINMYYRCGASLEDGYFSTEALP

SEQ ID NO: 57203 - DNA, 789 bp, Unknown
  Obtained from environmental sample
  misc_feature (1)..(789): n is a, c, g, or t
ttggattctggacccatgatgccagaaatggatggtatagaagccacgaagctcataagggaaatgggcggtgaaaattcgcgttatgcaaatttgccgattgtcgcacttaccgccaacgctgtctctggcacaagggaaatgtttctctcaaatggcttcaacgattttctctcaaaacccatagacatagttaagctggatgccattttgacgaaatggcttccaaaggaaaagcaagaaaaactggaggcaaagatagtcgacgccgatgctcccgaagctatagagatagaaattggcggcgttgatgtcaaaaaaggcatttctatgacaggcgggtcgcttaaaatctatatgcaaacccttgccgtattccataaagacgggattcagaaaatagccgaaatcaagaagagtttggaaacagacaactattctttatacacaacttatgtccacgcattgaaaagcgcaagtgcaagcataggggcactggatttatcagaaaccgcaaaaaccttggaagcagcgggcagaaaaggagattcagcatttattaaacagcaaaacgcccattttttaatggctttggaaattcttttaaataatataaacacggttctttcagcgaacaagaaaaatgaccaaaaagttcccgttgattttgaaatcctgaaaagcgaactcaataagctaaagacagcgattggcatttttgattccgatgctattgatgaggcagcgaactctctgccaaaattttacgcaagcggcagacataggtga

SEQ ID NO: 57204 - protein, 262 aa, Unknown
  Obtained from environmental sample
  DOMAIN (121)...(211): Hpt domain
  misc_feature (1)..(262): Xaa is any amino acid
MDSGPMMPEMDGIEATKLIREMGGENSRYANLPIVALTANAVSGTREMFLSNGFNDFLSKPIDIVKLDAILTKWLPKEKQEKLEAKIVDADAPEAIEIEIGGVDVKKGISMTGGSLKIYMQTLAVFHKDGIQKIAEIKKSLETDNYSLYTTYVHALKSASASIGALDLSETAKTLEAAGRKGDSAFIKQQNAHFLMALEILLNNINTVLSANKKNDQKVPVDFEILKSELNKLKTAIGIFDSDAIDEAANSLPKFYASGRHR

SEQ ID NO: 57205 - DNA, 639 bp, Unknown
  Obtained from environmental sample
  misc_feature (1)..(639): n is a, c, g, or t
atggctgaatcgcttcgcaagatagatttttttaaggatttagatgaagcgactctgaacaggtttgcagcaatagccaccgtacaaaattttcagcacggagaaaccataatactcgcgggcgatactcgcagagctatgttttttatatcaagggggcaagcgaaaatcttttccgattttaaaaattcgagaaacagcattttgagcttgcttgcagctggcgatttttttggcgagatacagctttttagcgaaagtgccaagagttatttttccataaaagccgaaggcgaatgttccgttgtgatttttaaggggaaggattttataaacgaaataacaaataccccaaaattgttaatagcttttttaagagcaacaacgcgaaagttagccaaaacttatatgcaaatagaatctctttctatgagcacaatcagaggcagaataaggtcttgcttaatgcaatttatagaggaagcgggtgggaaaaaccgccctacacagcagcaaatagcggcgatgtgcggcaccacaagagaaactgtgaatagggaattgtcttatctggtaaagaacggctacataaaactagatggcaaaaatttaattctgctgaaagatttgtccagttaa

SEQ ID NO: 57206 - protein, 212 aa, Unknown
  Obtained from environmental sample
  DOMAIN (169)...(197): Bacterial regulatory proteins, crp family
  misc_feature (1)..(212): Xaa is any amino acid
MAESLRKIDFFKDLDEATLNRFAAIATVQNFQHGETIILAGDTRRAMFFISRGQAKIFSDFKNSRNSILSLLAAGDFFGEIQLFSESAKSYFSIKAEGECSVVIFKGKDFINEITNTPKLLIAFLRATTRKLAKTYMQIESLSMSTIRGRIRSCLMQFIEEAGGKNRPTQQQIAAMCGTTRETVNRELSYLVKNGYIKLDGKNLILLKDLSS

SEQ ID NO: 57207 - DNA, 912 bp, Unknown
  Obtained from environmental sample
  misc_feature (1)..(912): n is a, c, g, or t
atggagtatctggaaaaattggttgaaccggggcaggtgttcccgctcactcacggaacggacgatacttttgacaacttggcgagccacgggatttccgtttattgcggttcgctgtgggttgcgggcttgcgcgctgcggcaaaaattgcagaaaccctcggagacagggaccgtgctaatcactggaataactgggctaatgatgcccaaagggttttccacgatgttttgtggaacgaaaaggatggctatttcctcttttacgcttccaaatcgcaaggtgtgaacgatgatgtttttgctgatgctcttttggcggatacatatttgcgcttgctgaatatggagcctattatggattcaaaaaaggcaaagcgaaccttgacaaaaatttacaacaccaactataaaaagaacagccctttgataggtgcagcgaatttggtgcataaagacggctcgcctttagatgaattcaattttcaggcgcacgatgtttggataggcattcaatacagccttgcaaccgcgatgtatatgcacgggatgaaaagggaagccgaggatttgttggaggcgtgtttccgcaatctttacaaagaggctcgcattccttttgccgcgccggagggctttaacgggagctgccgtttgcacgttggcggcaaggtgacaaaagcattgctcgccgatttaaaaaaagcaaaggctttgctagaagacaaccgcatatcaccgaacttgccgaggaatttgagcaagtttgaaaagcagtttaaaaacatttgcacaaagcacaagattaaagcctctgagcttttcgctttgctccacgccacagcattaaaatacacagcagggaaatactttagaccgggaatggtgttcgcggtagctaaggtgctatga

SEQ ID NO: 57208 - protein, 303 aa, Unknown
  Obtained from environmental sample
  DOMAIN (1)...(233): Protein of unknown function, DUF608
  misc_feature (1)..(303): Xaa is any amino acid
MEYLEKLVEPGQVFPLTHGTDDTFDNLASHGISVYCGSLWVAGLRAAAKIAETLGDRDRANHWNNWANDAQRVFHDVLWNEKDGYFLFYASKSQGVNDDVFADALLADTYLRLLNMEPIMDSKKAKRTLTKIYNTNYKKNSPLIGAANLVHKDGSPLDEFNFQAHDVWIGIQYSLATAMYMHGMKREAEDLLEACFRNLYKEARIPFAAPEGFNGSCRLHVGGKVTKALLADLKKAKALLEDNRISPNLPRNLSKFEKQFKNICTKHKIKASELFALLHATALKYTAGKYFRPGMVFAVAKVL

SEQ ID NO: 57209 - DNA, 765 bp, Unknown
  Obtained from environmental sample
  misc_feature (1)..(765): n is a, c, g, or t
atgatacaggtggtctccgagagaaagccgcagatcgtgctgtacggcgcgaccaccgaaggtcgggacctggcgccgcgcgtcgcctcccacctgaaagtgggattgaccgcggactgtaccgacctgcagatcggggatcataaacagcaggataccgaatataaaaatatcctttaccagatacgccccgcatttggcggcaacataatcgccacaatcgtgtcgcccgaaaagaaaccccagatggcgacggtccgcgagggcgttatgcgaatggcagcgcccaatacttcgcgcaaggccgaagtcgtgaatgtttccgcgaaactcaaccaggaagattttccgagcgagataattgaacgtgttatggaagaaaagaccgtcaaccttaaaggggcgcagattatagtgtcgggcggtatgggagtgggaagcaaagaaaatttcacccttatccgggaacttgcccagaccttcggggccgaagttggcgcttcccgcgccgcggttgatcagggctttatcggcaaggaacatcaggtggggcagacgggaaccacggtcaggccgaagttatacatagcctgcggcatttccggggctattcagcacagggcgggcatggacgcttcttcacgaatcattgcgattaacagcgatcccgaagcgccgatttttggcattgcccattacggaatagtgggggatttgaacgaggtcatccccctgatgatcaaagcatacaaggccagggtatag

SEQ ID NO: 57210 - protein, 254 aa, Unknown
  Obtained from environmental sample
  DOMAIN (129)...(214): Electron transfer flavoprotein FAD-binding domain
  misc_feature (1)..(254): Xaa is any amino acid
MIQVVSERKPQIVLYGATTEGRDLAPRVASHLKVGLTADCTDLQIGDHKQQDTEYKNILYQIRPAFGGNIIATIVSPEKKPQMATVREGVMRMAAPNTSRKAEVVNVSAKLNQEDFPSEIIERVMEEKTVNLKGAQIIVSGGMGVGSKENFTLIRELAQTFGAEVGASRAAVDQGFIGKEHQVGQTGTTVRPKLYIACGISGAIQHRAGMDASSRIIAINSDPEAPIFGIAHYGIVGDLNEVIPLMIKAYKARV

SEQ ID NO: 57211 - DNA, 1725 bp, Unknown
  Obtained from environmental sample
  misc_feature (1)..(1725): n is a, c, g, or t
atggaaaattttttaactgataacgaagatatattgttccaactggagcatcttgatctggatcgcatcattcatcttaaagaagaaaatttcagccaggcgaagcagtacccccacgccccaaaggatgttcaggacgcgaaagaatcgtaccgcatggttctgaacatcatcggcgagattgccggccagtggatggctcctaacgctccgtccgttgatgaagcgggcccgaccctcgccaacaaccaggtgacgcttcaccccgcgaccaaaaagacgctggacatgctggctaaagccgacatgatgggctttgtcattccgcgccagtacggcggccttaacatgcccaacacgatactcaccattgccgcggatattgcagcacgggcggacggctctttcctcaatttcggactccagcaggataacgcgggaacgattaacaaattcgcctcggaagatcaaaagacgcggtatctgccgaaactctgttcgggtgaatgggattcggcgatggttcttaccgaaccggacgcgggaagcgatcttcagtcggtgaacctcaaggccgtgcagggcgcggacggcaagtggtatctgaacggcgttaagcgttttatcaccaacggctgcggcactatcgggctggtgcttgcccgcagcgaggagaagggaaagggcgcgagggggctttctttcttcatttacaagcgcgatgagaaaatgataatcaggcggctggagcacaagctgggcattcacggttcgcccacctgtgagctgcaatttaacaacgcgcccgcggaactgctcggcgagagacagaggggccttaccaagtacaccctgtggctcatgaacaacgcgaggctcggagtggccgcgcagggtgtcggcattgccgaggccgcctaccgcgaggctgatctttacgcggcaaaacgcatacagttcggcgcgccgattcgggatctgcccgcggtcttcgagatgctcacggagatgagagtcgcggtcgaggccggacgcagtctgttatacgaaaccgcccgtttcgttgacctgaaggaagggctggaggagtattccgaaaaacaccccgaagaaaaaggtgaaataacggaagacaaaaagaaatacggaaaatacgcgggtttcttcaccccgcttgtaaaggcctacgccacggaaatggcgaacaaggtcgccaatgacgcgattcagattcacggcggcacgggttacatgaaggagtttaacgcggaacgccattatagagacgcgagaattacgaatatctacgaaggaaccactcagcttcagattgtggcggctatcgggccggtgacatcgggcattgcccagatggttatggacgaatacgacaaggtaacttacaaccacagccccgatctgcttgcgaaaatccgtgacgctcgcaaggacttcgaagaggccctggaatacgccaaggcttacgaaggccatgggcagtttctcacctaccattcccgcaggcttgtggaaatggccaccgacctatcnntgagttatctgctgatgagagacggcaaccacagcgagcgcaagcagaaagtagctgagattttcatagcgaagatgccttcgaggattaaagctaacagggattttataatgggcgataatggcacgctgctgaaaaactacgaagcggtgatcgggacgaatagcaaatag

SEQ ID NO: 57212 - protein, 574 aa, Unknown
  Obtained from environmental sample
  DOMAIN (173)...(224): Acyl-CoA dehydrogenase, middle domain
  misc_feature (1)..(574): Xaa is any amino acid
MENFLTDNEDILFQLEHLDLDRIIHLKEENFSQAKQYPHAPKDVQDAKESYRMVLNIIGEIAGQWMAPNAPSVDEAGPTLANNQVTLHPATKKTLDMLAKADMMGFVIPRQYGGLNMPNTILTIAADIAARADGSFLNFGLQQDNAGTINKFASEDQKTRYLPKLCSGEWDSAMVLTEPDAGSDLQSVNLKAVQGADGKWYLNGVKRFITNGCGTIGLVLARSEEKGKGARGLSFFIYKRDEKMIIRRLEHKLGIHGSPTCELQFNNAPAELLGERQRGLTKYTLWLMNNARLGVAAQGVGIAEAAYREADLYAAKRIQFGAPIRDLPAVFEMLTEMRVAVEAGRSLLYETARFVDLKEGLEEYSEKHPEEKGEITEDKKKYGKYAGFFTPLVKAYATEMANKVANDAIQIHGGTGYMKEFNAERHYRDARITNIYEGTTQLQIVAAIGPVTSGIAQMVMDEYDKVTYNHSPDLLAKIRDARKDFEEALEYAKAYEGHGQFLTYHSRRLVEMATDLSXSYLLMRDGNHSERKQKVAEIFIAKMPSRIKANRDFIMGDNGTLLKNYEAVIGTNSK

SEQ ID NO: 57213 - DNA, 780 bp, Unknown
  Obtained from environmental sample
  misc_feature (1)..(780): n is a, c, g, or t
ttgcagctcacaggtgggcgaaccgtgaatgcccagcttgtgctccagccgcctgattatcattttctcatcgcgcttgtaaatgaagaaagaaagccccctcgcgccctttcccttctcctcgctgcgggcaagcaccagcccgatagtgccgcagccgttggtgataaaacgcttaacgccgttcagataccacttgccgtccgcgccctgcacggccttgaggttcaccgactgaagatcgcttcccgcgtccggttcggtaagaaccatcgccgaatcccattcacccgaacagagtttcggcagataccgcgtcttttgatcttccgaggcgaatttgttaatcgttcccgcgttatcctgctggagtccgaaattgaggaaagagccgtccgcccgtgctgcaatatccgcggcaatggtgagtatcgtgttgggcatgttaaggccgccgtactggcgcggaatgacaaagcccatcatgtcggctttagccagcatgtccagcgtctttttggtcgcggggtgaagcgtcacctggttgttggcgagggtcgggcccgcttcatcaacggacggagcgttaggagccatccactggccggcaatctcgccgatgatgttcagaaccatgcggtacgattctttcgcgtcctgaacatcctttggggcgtgggggtactgcttcgcctggctgaaattttcttctttaagatgaatgatgcgatccagatcaagatgctccagttggaacaatatatcttcgttatcagttaa

SEQ ID NO: 57214 - protein, 259 aa, Unknown
  Obtained from environmental sample
  misc_feature (1)..(259): Xaa is any amino acid
MQLTGGRTVNAQLVLQPPDYHFLIALVNEERKPPRALSLLLAAGKHQPDSAAAVGDKTLNAVQIPLAVRALHGLEVHRLKIASRVRFGKNHRRIPFTRTEFRQIPRLLIFRGEFVNRSRVILLESEIEERAVRPCCNIRGNGEYRVGHVKAAVLARNDKAHHVGFSQHVQRLFGRGVKRHLVVGEGRARFINGRSVRSHPLAGNLADDVQNHAVRFFRVLNILWGVGVLLRLAEIFFFKMNDAIQIKMLQLEQYIFVIS

SEQ ID NO: 57215 - DNA, 846 bp, Unknown
  Obtained from environmental sample
  misc_feature (1)..(846): n is a, c, g, or t
gtgacgaacaaatgcggtggaacagcggaatataccgcaactcagttctgccaagctggcacagatgccgtgaaaccactctgcggaaccaaaacctataccgcaactcagttctgccatacggacaataccgttcaaaacaatttcggtgcttggactctgaaaaccccagcaacctgcgaagcgaaaggcgttgaggaaaggacaaacggcactctaacagaaacacgctctatcatacctcagcttgaatggagcggttggtcagtgacaaccgcggcgacctgcgatgcggcaggtgtggagacggcgaactgctccaacggtgcttccaaaacacgcccgataacccagctcacgtggggaaactggtcagtgacaaccgccgcgacctgcgatgcggcaggtgtggagacggcgaactgctccaacggtgcttccaaaacacgcccgataacccagctcacgtggggaaactggtcagtgacaaccgccgcgacctgcgatgcgaaaggcgaggaaacggctacttgctccaacggtgcttccaaaacacgcccgataacccagctcacgtggggaaactggtcagtgacaaccgccgcgacctgcgatgcggcaggtgtggagacggctacttgctccaacggtgcttccaaaacacgcccgataacccagctcacgtggggaaactggtcagtgacaaccccagcgaccccaatgacacttggggaagaaacaaggacttgccccaacagcacttcccaaaatcccccattgcttccaaaatgcaacggagttgaatacgacccccgtggcgacaaagaagttctgcgattcgcgtga

SEQ ID NO: 57216 - protein, 281 aa, Unknown
  Obtained from environmental sample
  misc_feature (1)..(281): Xaa is any amino acid
MTNKCGGTAEYTATQFCQAGTDAVKPLCGTKTYTATQFCHTDNTVQNNFGAWTLKTPATCEAKGVEERTNGTLTETRSIIPQLEWSGWSVTTAATCDAAGVETANCSNGASKTRPITQLTWGNWSVTTAATCDAAGVETANCSNGASKTRPITQLTWGNWSVTTAATCDAKGEETATCSNGASKTRPITQLTWGNWSVTTAATCDAAGVETATCSNGASKTRPITQLTWGNWSVTTPATPMTLGEETRTCPNSTSQNPPLLPKCNGVEYDPRGDKEVLRFA

SEQ ID NO: 57217 - DNA, 639 bp, Unknown
  Obtained from environmental sample
  misc_feature (1)..(639): n is a, c, g, or t
ttggggaagaaacaaggacttgccccaacagcacttcccaaaatcccccattgcttccaaaatgcaacggagttgaatacgacccccgtggcgacaaagaagttctgcgattcgcgtgataataagctatacaagttcgcagtaataggcacccagacttggatggctgagaatttgaatttcaatgcaagcggtagcaaatgtggcagtgttcttactgattcaggcacacttgatgatgccaacacatcaacttgcgatacctacggcaggctctacaactggtcaacagcaatgggcggcgtttgccctgctggttggcatttgccaagcgatgcggaatggaccgcactgacgacttttgtcggcactaatccaggaaccaagctgaaagcgaattctactctgtggagcacgaacacgggcacggacgaattcggtttttcggctctgcctggcggcatcggccttgccagtggcagtttcgacaatgtcggctactacggctactggtggtctgccacggagtacaatgcttccaacgcctactaccggggcattaactacgacatcgcaggtgtgcgcagaggcggctacgataagacggacttatattcagtgcgttgcgtccatgactag

SEQ ID NO: 57218 - protein, 212 aa, Unknown
  Obtained from environmental sample
  misc_feature (1)..(212): Xaa is any amino acid
MGKKQGLAPTALPKIPHCFQNATELNTTPVATKKFCDSRDNKLYKFAVIGTQTWMAENLNFNASGSKCGSVLTDSGTLDDANTSTCDTYGRLYNWSTAMGGVCPAGWHLPSDAEWTALTTFVGTNPGTKLKANSTLWSTNTGTDEFGFSALPGGIGLASGSFDNVGYYGYWWSATEYNASNAYYRGINYDIAGVRRGGYDKTDLYSVRCVHD

SEQ ID NO: 57219 - DNA, 426 bp, Unknown
  Obtained from environmental sample
  misc_feature (1)..(426): n is a, c, g, or t
atgatagataatgattatatatttttagatacaaatatattgatttatgcccattccagaaacgatgaacaaaagtttaaaatagtggaatctctattaggcgaaaaattgagagacagtaaaatttttgttagcgttcagattgtaaatgagttttactctgtaatgagcaaatataaaatgccacatttcagaataaaagagtgcgtaaaagatttgtctatttctgctaacataaaaagtatttcatttgatacagtaaaattaacgttttacataanagaaaaatatcattattcttggtgggattccttagttttggcttctgctttggaaaatgactgccaaatagtttatagcgaggatatgcaacataaacaaattattgaaaattcgcttaaaatcataaatccgtttttggagtaa

SEQ ID NO: 57220 - protein, 141 aa, Unknown
  Obtained from environmental sample
  DOMAIN (7)...(138): PIN domain
  misc_feature (1)..(141): Xaa is any amino acid
MIDNDYIFLDTNILIYAHSRNDEQKFKIVESLLGEKLRDSKIFVSVQIVNEFYSVMSKYKMPHFRIKECVKDLSISANIKSISFDTVKLTFYIXEKYHYSWWDSLVLASALENDCQIVYSEDMQHKQIIENSLKIINPFLE

SEQ ID NO: 57221 - DNA, 789 bp, Unknown
  Obtained from environmental sample
  misc_feature (1)..(789): n is a, c, g, or t
ttgaatattaaatcaataatttccagtctttttaccctcgtaaaatcaaaaaaagtacttggagaagcgtcccgccacgcaaaacgcgcgtacctcggaaagcgcatatctttttcccacgccgtttttacggttacggttatttttctctttctgccgttactggtgcttatagcctactcatttaacggctctacaagcatgaattggacggggttttccctgcgttggtacaaacgcctgcttgaatcgagggaactttggcgggctttcagaaacagcctgttaatcgccacaacgtccgcattctccgccaccgtcataggcacaatgggcgctatcggaataaactggtacaagttcaaaatgcgcggttacattcaggccatttccttcctgccgatgattctgcctgaaattataatcggcgtctccctttcaatttttttcgcagggatcggagttccccttgggctgtttacaatttttatcgcccacacgacatttaaccttccttttgtttttttgcttgtaatggcgcgccttgacgaatttgatttttcaataatagaggccgcccacgatcttggagctacggaaatggaaacgctctttaaggtaacgctccccgtttgtatgccgggcattatttccggttttttaaccgcgattactctttctctggaggattttgttattacattctttgtagcggggccaggctcctctacccttcctgtattcatttactcggcaattacgcgcaggggcggcgtaaccccgctataa

SEQ ID NO: 57222 - protein, 262 aa, Unknown
  Obtained from environmental sample
  DOMAIN (87)...(259): Binding-protein-dependent transport system inner membrane component
  misc_feature (1)..(262): Xaa is any amino acid
MNIKSIISSLFTLVKSKKVLGEASRHAKRAYLGKRISFSHAVFTVTVIFLFLPLLVLIAYSFNGSTSMNWTGFSLRWYKRLLESRELWRAFRNSLLIATTSAFSATVIGTMGAIGINWYKFKMRGYIQAISFLPMILPEIIIGVSLSIFFAGIGVPLGLFTIFIAHTTFNLPFVFLLVMARLDEFDFSIIEAAHDLGATEMETLFKVTLPVCMPGIISGFLTAITLSLEDFVITFFVAGPGSSTLPVFIYSAITRRGGVTPL

SEQ ID NO: 57223 - DNA, 978 bp, Unknown
  Obtained from environmental sample
  misc_feature (1)..(978): n is a, c, g, or t
atggagcgccgacgacggctatattgtcgaggtaaaaagttgaagccgcaggcggccgggcgacacggcgttcttgaacgacacggcgttcttgaacgacacggcgttcagcgaaattacggccctctttattcttctccgatggcaatctggttcagtctcttttttcttgctccgatagtgattattataatttacagtttcctgaaaaaagggttatacggcggcgttgaatgggaactgtcgatggacgcttaccgatacctaggggacaaggtatttatcaacataacgcttcgcacaattaccacttccgtaatcgcgacaataattacaattctaatagccctgccatgcggatactgcatagcaagaagcaaacatcaaacggtttttctggtgctcattatcattccgttctggacaaacttccttatcagggtctttgcgtggatgaacattttgggaagcaacggcttcctaaatgaattccttttgcacatgggattaatcaacgattatataaatttcctgtacaaccaaagaaccgtagtccttgtacttgtttatatgtatctgccctatgcgattttgccgctgttttccacaatagacaaatttgacttttccctgcttgaagcggcgcgcgatcttggcgcaaaccagcttgtttcaattatcaagatacttattcctaatatccgcagcggaatttttacggctatactgtttacgttcattccgattttcggcgcttacgccgtcccgcttctggtcggcggcatggattcctatatgcttgggaatattatcgccgaccagctttccaaatcgcgtaactggccgcgcgccgccgcgatttccatggtacttacctttgttaccacgcttggagtgcttataatgatgaacattcaaaagcgcgacgcttcaagaaatacagaagtaaaagccctgaaaaacgggggcgcggattga

SEQ ID NO: 57224 - protein, 325 aa, Unknown
  Obtained from environmental sample
  DOMAIN (98)...(312): Binding-protein-dependent transport system inner membrane component
  misc_feature (1)..(325): Xaa is any amino acid
MERRRRLYCRGKKLKPQAAGRHGVLERHGVLERHGVQRNYGPLYSSPMAIWFSLFFLAPIVIIIIYSFLKKGLYGGVEWELSMDAYRYLGDKVFINITLRTITTSVIATIITILIALPCGYCIARSKHQTVFLVLIIIPFWTNFLIRVFAWMNILGSNGFLNEFLLHMGLINDYINFLYNQRTVVLVLVYMYLPYAILPLFSTIDKFDFSLLEAARDLGANQLVSIIKILIPNIRSGIFTAILFTFIPIFGAYAVPLLVGGMDSYMLGNIIADQLSKSRNWPRAAAISMVLTFVTTLGVLIMMNIQKRDASRNTEVKALKNGGAD

SEQ ID NO: 57225 - DNA, 1128 bp, Unknown
  Obtained from environmental sample
  misc_feature (1)..(1128): n is a, c, g, or t
ttgaagggcagtgatgttgtcatcaaggatataagcaatttctttggtgattttagggctcttaataatgtgagtctggaaataaaaaaaggggagtttttctccttgcttgggccatccgggtgcggaaaaaccacccttctgcggataattgccggttttgaaaatcccgacaagggtgagcttaccctcgacgggaacgacgtgctttcactccctccgaacaggcgtcaaacaaatacggtatttcaaaattattcactctttcctcatcttacggtttttgaaaacgtcgctttttcgttaaggctgaaaagagcgtcatcttccgagataaagagcaaagttaacgaatacctgcatctggtacagcttgtggatcatgcccacaaaaaaccaaaccagctttcaggcggacaaaaacagcgcgtagcaatagcccgcgcgcttattaacgaaccgcgcgtattacttttagacgaacctctttccgcgcttgacgcgaaactgcgccagcacatgttaatcgaacttgatacaatccatgataaaattggcataacgtttatttatgtaacgcacgaccaacaggaagcgctttccgtatccgacaggcttgcggttatgaatcagggtgatattttacaaataggaacccctcaggaaatttacgaaagcccggcgtcggattttgtcgcgcgctttatcggcgagacaaatttgtttgacgcaaatgtaattaatgttgaaaagttaaacaaagagtgggatgaatttatggtggaacttgatattcctgaattgggccgtataaaagttaccaccgtagataatgtaaagccgggtcaaaaggtaagctttacaatacgccctgaaaaaatagtaataaatacggacaagcctacgacaaaacgcgaagacataaacctttttaacggaaccgtagacgaacctatctattcgggcttccagacaaaattttatgtaaagattcaggaaaaaacgcttatacgggttatcaaacaacacgctaattattcagacgacgggcccgccatacgctggaaggacaccgtttacctttcatggagcgccgacgacggctatattgtcgaggtaaaaagttga

SEQ ID NO: 57226 - protein, 375 aa, Unknown
  Obtained from environmental sample
  DOMAIN (287)...(371): TOBE domain
  misc_feature (1)..(375): Xaa is any amino acid
MKGSDVVIKDISNFFGDFRALNNVSLEIKKGEFFSLLGPSGCGKTTLLRIIAGFENPDKGELTLDGNDVLSLPPNRRQTNTVFQNYSLFPHLTVFENVAFSLRLKRASSSEIKSKVNEYLHLVQLVDHAHKKPNQLSGGQKQRVAIARALINEPRVLLLDEPLSALDAKLRQHMLIELDTIHDKIGITFIYVTHDQQEALSVSDRLAVMNQGDILQIGTPQEIYESPASDFVARFIGETNLFDANVINVEKLNKEWDEFMVELDIPELGRIKVTTVDNVKPGQKVSFTIRPEKIVINTDKPTTKREDINLFNGTVDEPIYSGFQTKFYVKIQEKTLIRVIKQHANYSDDGPAIRWKDTVYLSWSADDGYIVEVKS

SEQ ID NO: 57227 - DNA, 363 bp, Unknown
  Obtained from environmental sample
  misc_feature (1)..(363): n is a, c, g, or t
ttgttatggaggaaaaaaggtatgaaaaaactgttagcagtacttttggtactggtcgtggcgtcagcggcgtttgccggaggtggcagccagggttccggtggtggcggcgtgaccaagggcatgaatcgccaaatggtaatgggttattcccagattggcgcagaatccgaatggcggaatgcaaacactctgtcgattctggctgcggcaacagagtggaatgttgatctccgtttctccgatgccctccaaaagcaggaaaatcagatccaggcgatccgcacctttatcaggcagaaagtggacataattgcttgtacgaccggtagtgtcttccggtggccaaacgtacgtcaatag

SEQ ID NO: 57228 - protein, 120 aa, Unknown
  Obtained from environmental sample
  SIGNAL (1)...(26)
  misc_feature (1)..(120): Xaa is any amino acid
MLWRKKGMKKLLAVLLVLVVASAAFAGGGSQGSGGGGVTKGMNRQMVMGYSQIGAESEWRNANTLSILAAATEWNVDLRFSDALQKQENQIQAIRTFIRQKVDIIACTTGSVFRWPNVRQ

SEQ ID NO: 57229 - DNA, 1551 bp, Unknown
  Obtained from environmental sample
  misc_feature (1)..(1551): n is a, c, g, or t
ttggcagaccggcgagcttcagacggagagatggcactttccatgattcaggatatcaaacccgatattctgattactgatatacgaatgccgtttatggacggtctggccctttccaggatcgttaaaaagacccttccctggattaaaattgtcatattgtccggtcacgatgagtttgaatatgccagggaagccatttcggtcggagttgaagaatacttattgaagccggtttcttcccaggaaatgcagaaaacccttaacaaaatcgccaaacgcattgacagtgaaaaggaagagcttctcaatgttgaaaagctaaaagcccaagtccgttcttccacagacactttacgggacagatggcttttggattttgtaaacagcagaaccccggtggctcaagccattgaacagggaagggaattcggtatagatatgttggcgcgttcttacattgttcttgaagtgggaataatgagttcaagcgaaaaagacaggcagttaattcctgttaaggttatatttcaaaccatactggaaaaatacgccaactgcgtctggtttcaggaagacgaaaaccgttttgtgattattctgaaagaaatgccgaatagcgaggaaaaagcggcggagcctgtggaggaatcggcatatacaatagcccaggccctgaaatacgaagttgaacggaatacagtatgcaagttaatggttggcatagggtcgcttacggaaagaattggtgaagtaccaaaatctttttctatagcaaaaaaaatcgttgagcatggcattaatcatggcctttcactgatcgcggatatgagccttattccccaagatgaaaccggctttgatccttcgtccctgcttaacatcgacggcgatatgttccttaccaggctgaaatatgcatccaaaaaagatattgattcaattatgcaggaatatacaaaggctctgggtgaaaattatggcgaaaaccaaatgcttgttttttttatttttggcgagataattgttgcggcctcaaaaattgtagaagccctgggcggggatattaaaaagatcgcgccctatagccttaaacaggaagatatccagtacatagcaagctccagggaggtttttcttcagaaagtccatagtttgctttccgctgtaattgagtatcgtgatgcccatacctctggcaggtaccagtcggtcattgtaaaggcccgtgaatacattgacctgaatttttccagcgctgatatttccctgtattccacagccgcgcacgtaggtatcagccccaaccatttaagtaccgtttttgcccaggaaacgggggaaaattttatcgaatatcttacacgggtgcggattgataaggcaaaacagcttctgtctgatacttcaatgaagagtacggatattacttacgaaacaggtttcagtgaccctcattatttcagctatattttcaaaaaaaatacaggcctttcaccgagggaatttcggttgtaccaggatcgtaaaaaatcatacgataaatcataa

SEQ ID NO: 57230 - protein, 516 aa, Unknown
  Obtained from environmental sample
  DOMAIN (1)...(89): Response regulator receiver domain
  misc_feature (1)..(516): Xaa is any amino acid
MADRRASDGEMALSMIQDIKPDILITDIRMPFMDGLALSRIVKKTLPWIKIVILSGHDEFEYAREAISVGVEEYLLKPVSSQEMQKTLNKIAKRIDSEKEELLNVEKLKAQVRSSTDTLRDRWLLDFVNSRTPVAQAIEQGREFGIDMLARSYIVLEVGIMSSSEKDRQLIPVKVIFQTILEKYANCVWFQEDENRFVIILKEMPNSEEKAAEPVEESAYTIAQALKYEVERNTVCKLMVGIGSLTERIGEVPKSFSIAKKIVEHGINHGLSLIADMSLIPQDETGFDPSSLLNIDGDMFLTRLKYASKKDIDSIMQEYTKALGENYGENQMLVFFIFGEIIVAASKIVEALGGDIKKIAPYSLKQEDIQYIASSREVFLQKVHSLLSAVIEYRDAHTSGRYQSVIVKAREYIDLNFSSADISLYSTAAHVGISPNHLSTVFAQETGENFIEYLTRVRIDKAKQLLSDTSMKSTDITYETGFSDPHYFSYIFKKNTGLSPREFRLYQDRKKSYDKS

SEQ ID NO: 57231 - DNA, 429 bp, Unknown
  Obtained from environmental sample
  misc_feature (1)..(429): n is a, c, g, or t
ttggagaggaggattgatatgcgaggattagaacatctccaccctgccgtccgtgcgaaggcggaattgttggtatcgaaggccgctgtagccggtttgaaggttaaggtcacggatacgttgcggacgaaagcggagcaggacgcgattcccgccgcgaacacgaaggtcaagtaccctatgagtatgcactgttgggggttggctttcgacgtttgccgtgacgacggggcgggcgcgtacaacgaggcgggcggttggttcgaggcggtgggcaggcttggggagtccatcggactcacgtggggcggttcgtggacatcgttccgcgacttgccgcattttgaggatcggagcataggcggagacgcgaaggcgctggtcgcgaagtacgggacgccggacaaattcattgagggagggaagtaa

SEQ ID NO: 57232 - protein, 142 aa, Unknown
  Obtained from environmental sample
  DOMAIN (10)...(120): D-alanyl-D-alanine carboxypeptidase
  misc_feature (1)..(142): Xaa is any amino acid
MERRIDMRGLEHLHPAVRAKAELLVSKAAVAGLKVKVTDTLRTKAEQDAIPAANTKVKYPMSMHCWGLAFDVCRDDGAGAYNEAGGWFEAVGRLGESIGLTWGGSWTSFRDLPHFEDRSIGGDAKALVAKYGTPDKFIEGGK

SEQ ID NO: 57233 - DNA, 1107 bp, Unknown
  Obtained from environmental sample
  misc_feature (1)..(1107): n is a, c, g, or t
atgaaaatgcgtgatgaaattaatcgtatatttcgaacaacgagcccgagtccccggtccctgctccctttcttattgctcattgttcattgctcattgctcattggttgttatactatcaagcagggaacgaccatgctcggctacctcagccgcgcggtgccgcttgagtcgctgcttgagagtgaagccgatgcctcggaggcggaaaagaaccgccgttttgtggaacaggttcaggatatacgccgttacgcgcaagaagaactcgggcttaacctgggtaagaattatacacgctatgtaaaaatcgaccgcgattacctggcggcggtggtatcggcctgcgccgcggactcttttacgcggcatgagtggaaataccctgtcgtgggctcgctgccctacaaagggttttttaaggttgaggacgcgcgaaaggaacgggaaaaacttgaaaaaaaggggctcgatgtctggatacggggcgttgacgcgttcagcaccctgggctggttcagggatcccctgtattcctatatgcgggattatccccccaacaggctcgccgatctgatcatccatgaatcgcttcacgcgacggtgtttatcaaggggcagccgcagtttaacgaggagcttgccgaatttgtcggaagcgaaggcgcgagaatgtacacggagtcacgttatggcacggattccgcggaatacgcaaaaatgttcgccgatgaagaggataacaaacgttatgtgacatttttacagggattaatcagagaacttaatgaactgtatgaaagcgaaaaaagcgccggagaaaaatcaagcgaaaaagaaaaaattatcggcgcggcaaaagaacgctttgccgcagagtatgaaagcctcttttccggcgaaagctaccggggcttttcagaactgcccgtaaacaacgcctaccttgaattgtaccgcctgtattacacggaggattcatatatcgcaaacctgttcgccggatcgggtaaaaccctgccggaattcatcgccgcggcaaaatcacttcccaaaaaaggcaatggaagggaaatgttagcgcaggccctggggctgacgccttag

SEQ ID NO: 57234 - protein, 368 aa, Unknown
  Obtained from environmental sample
  misc_feature (1)..(368): Xaa is any amino acid
MKMRDEINRIFRTTSPSPRSLLPFLLLIVHCSLLIGCYTIKQGTTMLGYLSRAVPLESLLESEADASEAEKNRRFVEQVQDIRRYAQEELGLNLGKNYTRYVKIDRDYLAAVVSACAADSFTRHEWKYPVVGSLPYKGFFKVEDARKEREKLEKKGLDVWIRGVDAFSTLGWFRDPLYSYMRDYPPNRLADLIIHESLHATVFIKGQPQFNEELAEFVGSEGARMYTESRYGTDSAEYAKMFADEEDNKRYVTFLQGLIRELNELYESEKSAGEKSSEKEKIIGAAKERFAAEYESLFSGESYRGFSELPVNNAYLELYRLYYTEDSYIANLFAGSGKTLPEFIAAAKSLPKKGNGREMLAQALGLTP

SEQ ID NO: 57235 - DNA, 495 bp, Unknown
  Obtained from environmental sample
  misc_feature (1)..(495): n is a, c, g, or t
ttgagaggcttcgcaacttggcagaaaaaaccaattccattatgcacgttgacgttatgtgctgggctgcccggcgagggcatggagccttttggcaaaggctttgacgcgctctgggccgcgcgtgcgggctgccgcagcggtgttgagatacaactgggtatcttaaaattgatgcccggcgcgccggtctcgcggcatatagaatcttttggcgtgagctttaattcactgccgccctgcgaactcattgagagcgccgccattcctgcattcggactggaccggataaaaaatttcgcccggttttgggaactgatcgtcaaccgcgggcttttggacataggcccggccccggtatttgaccgttttatgacactctctgattctctcctggcacgctttggccgcaactggggcatagcgaaagatgaactgcaagaacaaataaagggactagggactggggatcagggactggagaatgagcaatga

SEQ ID NO: 57236 - protein, 164 aa, Unknown
  Obtained from environmental sample
  misc_feature (1)..(164): Xaa is any amino acid
MRGFATWQKKPIPLCTLTLCAGLPGEGMEPFGKGFDALWAARAGCRSGVEIQLGILKLMPGAPVSRHIESFGVSFNSLPPCELIESAAIPAFGLDRIKNFARFWELIVNRGLLDIGPAPVFDRFMTLSDSLLARFGRNWGIAKDELQEQIKGLGTGDQGLENEQ

SEQ ID NO: 57237 - DNA, 912 bp, Unknown
  Obtained from environmental sample
  misc_feature (1)..(912): n is a, c, g, or t
atgaaggacatccttcttgccgcaatcaacgccaagtggatacacccgtctcttgccctgcggcttcttaaagcgaatctcggccccctggaaaaccgctgcgacattatcgaatttgccctgcgccagccgttatgcgaaaagactgcccccattctcgccgcccggccgcggatactcggcctttcggtatcaatatggaaccaccttgcaacgctggaactgttaaagaaattgcgggaagtatggacggatgagtctgtccaacagcaaggccgtttccaacaacccgttatcatccttggcggacctgaagtgtcgtatctgtaccgggattcggaaatacttcaatttgcggattattgtatccgtggtgaaggagaaatttcctttcgggaattatgcgaaaaaattttaagtaatgaagatatttttataaataatgaatttcatacggttaatgttacggaaataaaaaacggctaccatttgtataccaatgaggatttaagcaggaaacttgtatatgtggaagcaagcaggggctgtccttttggctgtgaattctgccttagtgctgcgagcgccggagtgccggatgtgttcacaacaagggtgcgggaattccccctggaaccgtttttttttgaaatgaatgatttaatacacagaggcgcgaaaacatttaaattccttgacagaactttcaacctgaatattgaaagaagcataaaaattatggaattttttttatataatattagtgaacagattaaacaaaacataaaaccccttgttgtccactttgaaatggttccttcccgcttcccgcctgaaatgattgatacattagcccggttcccccgcgaacaccgtcaggttggaaatcagaatccagtcgctcaaccgtga

SEQ ID NO: 57238 - protein, 303 aa, Unknown
  Obtained from environmental sample
  misc_feature (1)..(303): Xaa is any amino acid
MKDILLAAINAKWIHPSLALRLLKANLGPLENRCDIIEFALRQPLCEKTAPILAARPRILGLSVSIWNHLATLELLKKLREVWTDESVQQQGRFQQPVIILGGPEVSYLYRDSEILQFADYCIRGEGEISFRELCEKILSNEDIFINNEFHTVNVTEIKNGYHLYTNEDLSRKLVYVEASRGCPFGCEFCLSAASAGVPDVFTTRVREFPLEPFFFEMNDLIHRGAKTFKFLDRTFNLNIERSIKIMEFFLYNISEQIKQNIKPLVVHFEMVPSRFPPEMIDTLARFPREHRQVGNQNPVAQP

SEQ ID NO: 57239 - DNA, 1806 bp, Unknown
  Obtained from environmental sample
  misc_feature (1)..(1806): n is a, c, g, or t
ttgatggccgaggtcgttcggattgagcccgccgcgaggaggatattgaataatttgatgcttcatcatgccgttaaagcgggattggacgcggcgattttcaatccgttgcacgtggacgatatcaatacctatgataaggacgctcgcgaattaggggagaatttgctcttcaatcgcggtgcggacagtttgcaaaagttcgtagaatactttgtcgcgttggaagcgtcgtcaaagtcattacaaaaaggtaaaactaatattggtactgataacgctaaagcgaatcaatcccccgaagagcgcctgcgctccgcgattatagacagggacaagcgcaatctgccggagttgatagacaagctgctttcgacccataaagcgcccgatattctgaataatatccttctaccggcgatgtccgaagtgggcgatttgatggctcgcggcgagatgattctgccctttgtcctgcaagcggcggaggcgatgaaagaggcggtctccatcctcgaaccgcatctgaaagagtccggcggcggcgcggtcaagggcaagatggtcattgccaccgtctacggcgacgttcacgacataggcaagaatcttgtggcgtcgatattgcgcaatcagggcttcgatattatcgacttaggcaagcaggtggcggttcagaccgttgttgacgcggtgaggcgcgaaaagccgaacatggtgggtctgtccgcgttgctcgttaccacgagcaagcagatgggggagtgcgtcaaggagttcgcccgtcttgggcttgacgtgccgattatcataggcggcgcggcggtcaacaaagatttcgcgtcacgcatatcaatacttgatgatggtaacaagtatgcccccggcgtatattacgcaaaggacgcgttcggcgtggtgaagatattcgattcgttgggcggcggtaagggtatcgatactaatgttactaatgatgtcaacaaaggtattaataccggtagtctcgataatcagtccaaaaaagacgctcccaagtcaacccgaaaagccataaagcacgactacataatggaacccccgttctacggtacaagcgagatactgacctttgattccgccgcgctgcttgccggaatagaccgcgagaaactcttcaagacccgcttcggcggcggcaaactcgacgcgtccgcctacgccgacgcgcggcggaacgagtttgaaccggcctttgagcgtctttccgccgacatcgtaaaaggctcgctcttagaggcgaggggtttctacggcttccttccggttatagcggacggcgagagggtcgtcatcctcgacccctccgactaccacaccgagcgtctgtcgttcctcttcccgcgtatggagcggagcggcgtttccatagccgactacatccgtccggagggcgacatagtctccccgcaggccgtgacgataggcggtaggttgggggagcgttgccgccggcttcttttggagcaggggcgctacagcgacggctactacctcaacggtatagcaaattacttggttgaggatctggcggacaagttgtcaacggagatacggcgcgcgctgggcctgccgcgcgggggcgggcggcggtacagtttcgggtatcccgggatgccctctcttgaggatcaggcgagtttgttggagtttttgggggccgaggagcgcctcggcattgtgcttacgccggggttccagatgcagccggaacactctacggttgcgatttttgtgcaccacccggaggcggaatatatatcttaa

SEQ ID NO: 57240 - protein, 601 aa, Unknown
  Obtained from environmental sample
  DOMAIN (478)...(601): Vitamin B12 dependent methionine synthase, activation domain
  misc_feature (1)..(601): Xaa is any amino acid
MMAEVVRIEPAARRILNNLMLHHAVKAGLDAAIFNPLHVDDINTYDKDARELGENLLFNRGADSLQKFVEYFVALEASSKSLQKGKTNIGTDNAKANQSPEERLRSAIIDRDKRNLPELIDKLLSTHKAPDILNNILLPAMSEVGDLMARGEMILPFVLQAAEAMKEAVSILEPHLKESGGGAVKGKMVIATVYGDVHDIGKNLVASILRNQGFDIIDLGKQVAVQTVVDAVRREKPNMVGLSALLVTTSKQMGECVKEFARLGLDVPIIIGGAAVNKDFASRISILDDGNKYAPGVYYAKDAFGVVKIFDSLGGGKGIDTNVTNDVNKGINTGSLDNQSKKDAPKSTRKAIKHDYIMEPPFYGTSEILTFDSAALLAGIDREKLFKTRFGGGKLDASAYADARRNEFEPAFERLSADIVKGSLLEARGFYGFLPVIADGERVVILDPSDYHTERLSFLFPRMERSGVSIADYIRPEGDIVSPQAVTIGGRLGERCRRLLLEQGRYSDGYYLNGIANYLVEDLADKLSTEIRRALGLPRGGGRRYSFGYPGMPSLEDQASLLEFLGAEERLGIVLTPGFQMQPEHSTVAIFVHHPEAEYIS

SEQ ID NO: 57241 - DNA, 723 bp, Unknown
  Obtained from environmental sample
  misc_feature (1)..(723): n is a, c, g, or t
atggacgtatacaaaaccctgcgggaagaagcttttgaagctaaccttgaaattcaaaagcagaaccttgctatttatacctggggtaacgcatccgcttttgatcctgaaaaggcggtttttgccattaagccatccggcgttccctacggcaagctcagccccgaatcaatggtgcttgttgatctggaaggcaaggtagttgaagggaagctgaaaccttcttccgacaccaagactcaccaggtgctgtacagggaattttcgcaacaaacgcctgaatccggaattaaaggcattacccacacccattcgccttacgcggttgcctgggcgcaggcaaagagatctgttcctatttttggcacaacacatgcggatcacagcacggaggaaatcccttgcacggattttataagcgagcaggcgctaaaaaacgactacgagtttgagacagggaacctaattgtggagcatttcaggagaaacaaactgaaccctgcctatgttacaatggtgcttgttgccggccacgggccatttacctggggtagcagcgcttcccagtcggtgtacaacggcgctgttctggaagaaatctgcaaaatggccctcttaaccctgagaatcgattcggacgcgaagccgctgccggactacattgtcagaaagcattgggaacgcaagcacgggccaggcgcgtattacgggcaatcattttag

SEQ ID NO: 57242 - protein, 240 aa, Unknown
  Obtained from environmental sample
  DOMAIN (9)...(225): Class II Aldolase and Adducin N-terminal domain
  misc_feature (1)..(240): Xaa is any amino acid
MDVYKTLREEAFEANLEIQKQNLAIYTWGNASAFDPEKAVFAIKPSGVPYGKLSPESMVLVDLEGKVVEGKLKPSSDTKTHQVLYREFSQQTPESGIKGITHTHSPYAVAWAQAKRSVPIFGTTHADHSTEEIPCTDFISEQALKNDYEFETGNLIVEHFRRNKLNPAYVTMVLVAGHGPFTWGSSASQSVYNGAVLEEICKMALLTLRIDSDAKPLPDYIVRKHWERKHGPGAYYGQSF

SEQ ID NO: 57243 - DNA, 1698 bp, Unknown
  Obtained from environmental sample
  misc_feature (1)..(1698): n is a, c, g, or t
ttgcccttcttgaggaccgccataccgaacgtcttttttgaagaggacagcattgaaatgatgcgctcggccatacttctgtgcgcgaacacggtcatacgcgccgatatggaacgtgaaatagtcaacgccaacgaatttaaccacgccatccttgacgcttcgcctttgggctttaccatttttgacgaaaacgcccgcgttattgactgcaatgattttattttgaaaacattcgggactacaagaaaatattatcttgagcatttttacgaattttcgcccgaataccagggcgacgggataaaatccgcggataaggcggccgagatggttatgagggcgctgcgcggcgaaagcctggtattggagtggacaaattgtaccgccaggggggaaattatcccttatgaagtaacgctggtgcgcgcgatgtataaaggcaaatacgcggcgctggcttatcaatatgatctgcgcaattccaagattatggaaagaaaactaaaagaagcgctgcataaggcgacggaggcaagcaaggcgaaaagcgaattcctctccaacatgagccacgaaatgcgcacgcccctgaacgcgataaccggcatgacgactatncgcaggaacgcggcggacatggaaacgcaagactacgccctcggcaaaatccaggatgcctcgacgcacctgttgggcgtgataaacgacgtgctcgatatgtcaaaaatcgaggccaatatgctggaactgtcgcccgttgagtttaactntgagaaattgctgcaaaaaacggtcgcggtggtcaatttccgcatggacgaaaagcggcaaaaactcgcggtgcatattgacagggaaattccccaaacgcttgtcgccgatgaccagcggctggcccaggtcgttgcaaatctattgagcaacgcggttaaattcacgccggaagaaggctccattacccttaacgcgagctttatgggggaagaaaaagacgtttgtaccgtgcaggtttccgtaaccgacacggggatcgggataagcaaggaacagcaaatgcgcctgttcagttcctttcagcaggccgagtccggcataacgcgcaaatacggcggtacgggactgggccttgccatttccaaaagcattgtggaaatgatgggcggcagaatatgggtacagtcagagcctgaaaaaggctcaactttttcctttaccattcaggcgcggcgcggtactgcaaaagaaattacaaatgatgacccggaaacagaagggcagacggccaaggatgtccatgaagatattatggtattttccggatgccggatattgctggcggaagatgtggaaataaaccgcgaaataataataaccctgcttgaaccaacgcagttggagatagactgcgcggaaaacggcatccaggccgtccgcatgttcagcgaagcgccgcaaaagtacgacatgatctttatggatgtgcagatgcctgaaatggacggctatgaagcgacacgccgtatcagggcgcttgattcgcctaaagcaaaaaccatcccgattgtcgccatgactgctaacgtgtttcgggaagacgttcaaaagtgcatcgaggaaggcatgaacagccatctcggaaaaccgctggatttcaatgaagttatggaaaaactgcgtacttatttgctaaaatga

SEQ ID NO: 57244 - protein, 565 aa, Unknown
  Obtained from environmental sample
  DOMAIN (182)...(247): His Kinase A (phosphoacceptor) domain
  misc_feature (1)..(565): Xaa is any amino acid
MPFLRTAIPNVFFEEDSIEMMRSAILLCANTVIRADMEREIVNANEFNHAILDASPLGFTIFDENARVIDCNDFILKTFGTTRKYYLEHFYEFSPEYQGDGIKSADKAAEMVMRALRGESLVLEWTNCTARGEIIPYEVTLVRAMYKGKYAALAYQYDLRNSKIMERKLKEALHKATEASKAKSEFLSNMSHEMRTPLNAITGMTTXRRNAADMETQDYALGKIQDASTHLLGVINDVLDMSKIEANMLELSPVEFNXEKLLQKTVAVVNFRMDEKRQKLAVHIDREIPQTLVADDQRLAQVVANLLSNAVKFTPEEGSITLNASFMGEEKDVCTVQVSVTDTGIGISKEQQMRLFSSFQQAESGITRKYGGTGLGLAISKSIVEMMGGRIWVQSEPEKGSTFSFTIQARRGTAKEITNDDPETEGQTAKDVHEDIMVFSGCRILLAEDVEINREIIITLLEPTQLEIDCAENGIQAVRMFSEAPQKYDMIFMDVQMPEMDGYEATRRIRALDSPKAKTIPIVAMTANVFREDVQKCIEEGMNSHLGKPLDFNEVMEKLRTYLLK

SEQ ID NO: 57245 - DNA, 435 bp, Unknown
  Obtained from environmental sample
  misc_feature (1)..(435): n is a, c, g, or t
atggaaataaaaatgatgaaagaaattgaagcaaataaagaggcttggggacaattggcaaaagcgcattatgagcattacaaaaaagaactacaggaaaacaggcataatttcagcgaaataatagaaaaagaactgggtaatattcttggaaaaacaataattcatcttcaatgcaatacaggtgcggatacggtcttgcttgcaaaaaagggggcaattgttacaggggtagatttagtaccggataatattttttatgcaaaaaagatgtcggaagagatgggcattaaaaatattaattttgtagaatctgacattatggaattaaaagaaaaacataatattaaatatgatatggtttttacaacagaaggagtactctgttggcttcccgatttaaataaatgggcagaaacaattgtgcattgctaa

SEQ ID NO: 57246 - protein, 144 aa, Unknown
  Obtained from environmental sample
  misc_feature (1)..(144): Xaa is any amino acid
MEIKMMKEIEANKEAWGQLAKAHYEHYKKELQENRHNFSEIIEKELGNILGKTIIHLQCNTGADTVLLAKKGAIVTGVDLVPDNIFYAKKMSEEMGIKNINFVESDIMELKEKHNIKYDMVFTTEGVLCWLPDLNKWAETIVHC

SEQ ID NO: 57247 - DNA, 699 bp, Unknown
  Obtained from environmental sample
  misc_feature (1)..(699): n is a, c, g, or t
ttggataaaatccgggaaaagcaatgcatgggcaaggtaaaaacaaacattccccgcgattcccgcaagggccttgcggaacgcgaggcggtattgcagatacggtatggcggctttgaaataaaacgcccgcagatcctcaataagaataaaaagttcagagacacgcaggaagcaaacataatatatgtcagggaagaacggcaggacaaagccatagagcctttggaatggtttttgatgacaaacgagccggtccggactgtcgaagaagcatacgaaaaagccttatggtatatgcagcggtggaagatagagcagttccactatgtgctgaaatccggctgtacggttgagaagctgcaggaacggagcatggaaaaaacaacgatgctggtcctgatgtattccataattgcttcggcaattatgaacataacttatgttgcacgaatacacccgctgcttccctgtacggtattttttgaggaagacgaatggaaggtactgtatcgcgccgcaaacaagacaaagaaagtgcctaaaaagccgtatacgattgctgaagcggtagcctacttaagctggctgggaggcccaaaacgggctcccagcgacggccctcctggcgtcaaaacaatttggatagggcttgataaatttaacaccttgcttgcatataaagaatggatgccttaa

SEQ ID NO: 57248 - protein, 232 aa, Unknown
  Obtained from environmental sample
  misc_feature (1)..(232): Xaa is any amino acid
MDKIREKQCMGKVKTNIPRDSRKGLAEREAVLQIRYGGFEIKRPQILNKNKKFRDTQEANIIYVREERQDKAIEPLEWFLMTNEPVRTVEEAYEKALWYMQRWKIEQFHYVLKSGCTVEKLQERSMEKTTMLVLMYSIIASAIMNITYVARIHPLLPCTVFFEEDEWKVLYRAANKTKKVPKKPYTIAEAVAYLSWLGGPKRAPSDGPPGVKTIWIGLDKFNTLLAYKEWMP

SEQ ID NO: 57249 - DNA, 546 bp, Unknown
  Obtained from environmental sample
  misc_feature (1)..(546): n is a, c, g, or t
gtgggtgtaatggcttatgcgccttatggcgcgggtggggttattatccgggtagaagcggatatacggcgggggattcccggtatcgacatcagcgggcttgccgaaggagcggttcgtgaggcgaaggaaagggtaagggcggcattcaggaattccgggtttacctttccgctggacaggattcttatcaacctggcgccggcggggctgcggaaagacggagccgcgctggatttgccgatcgcgctggcggtaatggcggcagcgggacttgtgccggagcctccgaacatccttgttatgggggaactggagctttccggaaatatacgcccggtacgcggcgttctggcggcaatcgccggcggacttgaagaaggcattaccgaattcatcgtaccggctgaaaacaaaggggaagccgctatactatacggagcgggcgaaaaccctgttatgcgattcaaagcggtgtcttccctgcatgaagcggtggacccgctttttatccgcgaagaaaccggtgctctctccgttccctaa

SEQ ID NO: 57250 - protein, 181 aa, Unknown
  Obtained from environmental sample
  misc_feature (1)..(181): Xaa is any amino acid
MGVMAYAPYGAGGVIIRVEADIRRGIPGIDISGLAEGAVREAKERVRAAFRNSGFTFPLDRILINLAPAGLRKDGAALDLPIALAVMAAAGLVPEPPNILVMGELELSGNIRPVRGVLAAIAGGLEEGITEFIVPAENKGEAAILYGAGENPVMRFKAVSSLHEAVDPLFIREETGALSVP

SEQ ID NO: 57251 - DNA, 447 bp, Unknown
  Obtained from environmental sample
  misc_feature (1)..(447): n is a, c, g, or t
ttgaatcgcataacagggttttcgcccgctccgtatagtatagcggcttcccctttgttttcagccggtacgatgaattcggtaatgccttcttcaagtccgccggcgattgccgccagaacgccgcgtaccgggcgtatatttccggaaagctccagttcccccataacaaggatgttcggaggctccggcacaagtcccgctgccgccattaccgccagcgcgatcggcaaatccagcgcggctccgtctttccgcagccccgccggcgccaggttgataagaatcctgtccagcggaaaggtaaacccggaattcctgaatgccgcccttaccctttccttcgcctcacgaaccgctccttcggcaagcccgctgatgtcgataccgggaatcccccgccgtatatccgcttctacccggataataaccccacccgcgccataa

SEQ ID NO: 57252 - protein, 148 aa, Unknown
  Obtained from environmental sample
  SIGNAL (1)...(21)
  misc_feature (1)..(148): Xaa is any amino acid
MNRITGFSPAPYSIAASPLFSAGTMNSVMPSSSPPAIAARTPRTGRIFPESSSSPITRMFGGSGTSPAAAITASAIGKSSAAPSFRSPAGARLIRILSSGKVNPEFLNAALTLSFASRTAPSASPLMSIPGIPRRISASTRIITPPAP

SEQ ID NO: 57253 - DNA, 996 bp, Unknown
  Obtained from environmental sample
  misc_feature (1)..(996): n is a, c, g, or t
ttggaaatagccgccgccggtggccacaacatgcttgtttttgggccgccgggcgcgggtaagaccatgctggcaatacggcttccttccatcatggctccgctgactcctgatgaagcggtcgaagtcacgcggctttacagtctggccgggccttataagacggggaccggactcattgaccgattgatcacccagccgccgttccgcgccccgcaccattcagccagcgccgaggggattcttggcgggggaagaactccccgccctggcgagataagccttgcccatttcggcgtgttgttcctcgatgaagctcctgaattcaggattaatgtgcttcaggccctgcgcgagccgctggaagaccgggtgataagtatttcccgcgctgaaggacccttgcgtcttccggcggaattccaaatgatactggcaaccaacgcctgcccctgcggaagactcgggataaggcataatgataatggaatggatgaataccatgaaatgcagacctgtctatgttcgcctgaagaaatttcccggtactggcgcaaattcggcggcgccctccttgaccgtatcgagattcgtgtcgctgttactcccacgggcgttgatgaaatctgcaaaccgggcggcggcgccaacagcgttggcgaagaacgaagcgcggacattgccatgcgggtaaaggccgctgttgaaatccagcaactgcgatataaaggcatggggatacgccgtaacgcgctgattcctgccggaaaaatagaaatattttgcggtatggatcaacaggcttggagcgcgtttcacaaggcccttgcacggcttgggctttcaggccgcgcctatcatggcattttacgggtagcgcggaccatagccgacctggagggcagagaaaccattggcacggaacatattctggaagcggtacagcaccgacgttacggagaagacccttatgagattgtaactctggggagttag

SEQ ID NO: 57254 - protein, 331 aa, Unknown
  Obtained from environmental sample
  DOMAIN (1)...(209): Magnesium chelatase, subunit ChlI
  misc_feature (1)..(331): Xaa is any amino acid
MEIAAAGGHNMLVFGPPGAGKTMLAIRLPSIMAPLTPDEAVEVTRLYSLAGPYKTGTGLIDRLITQPPFRAPHHSASAEGILGGGRTPRPGEISLAHFGVLFLDEAPEFRINVLQALREPLEDRVISISRAEGPLRLPAEFQMILATNACPCGRLGIRHNDNGMDEYHEMQTCLCSPEEISRYWRKFGGALLDRIEIRVAVTPTGVDEICKPGGGANSVGEERSADIAMRVKAAVEIQQLRYKGMGIRRNALIPAGKIEIFCGMDQQAWSAFHKALARLGLSGRAYHGILRVARTIADLEGRETIGTEHILEAVQHRRYGEDPYEIVTLGS

SEQ ID NO: 57255 - DNA, 729 bp, Unknown
  Obtained from environmental sample
  misc_feature (1)..(729): n is a, c, g, or t
atgaaacgccttgccaaagtgggctttgaaatgagctacacgtattttgcttggcgtgagcaaaaatgggaacttgaggagtatttcaaggaattgacaacaaagcccgtttgcgaatatatgcgtggaattttattccccacaactccagatattttcttggaatgttttaacgggcaaggacctacaattttcaaactcagatattttttggctgcaacactttctagcctaaccggaatgtacaatggctacgaactttgcgaaaacgaaaagaatcctgcaaaagaggagctttacaacagcgaaaaatatcagtacaaggttcacaattggagcagcccgattaatataaaagaatttttgcgcaaagtgaattttgctcgcaagcagcagagtgcgcttatggaatacgataatttgcgctttcattctgcggataattcaaacattatggtttacagcaaacgcgattggaaaaacggaaacaccgtgctttgcattgcgaatttagatgtgaaaaaaacgcaagactcttttgtatatttgaatttggcagagcttgggttatctgaggggcaaggctacaccattagagacttgctctctggtcaaagctatttatggcgcggttcaaaaaactatgtggaaataaatccagaaaaggaaccctgccatttgtttgttgtggaaaaccggcatagattaagggggagttttatatgctag

SEQ ID NO: 57256 - protein, 242 aa, Unknown
  Obtained from environmental sample
  misc_feature (1)..(242): Xaa is any amino acid
MKRLAKVGFEMSYTYFAWREQKWELEEYFKELTTKPVCEYMRGILFPTTPDIFLECFNGQGPTIFKLRYFLAATLSSLTGMYNGYELCENEKNPAKEELYNSEKYQYKVHNWSSPINIKEFLRKVNFARKQQSALMEYDNLRFHSADNSNIMVYSKRDWKNGNTVLCIANLDVKKTQDSFVYLNLAELGLSEGQGYTIRDLLSGQSYLWRGSKNYVEINPEKEPCHLFVVENRHRLRGSFIC

SEQ ID NO: 57257 - DNA, 1002 bp, Unknown
  Obtained from environmental sample
  misc_feature (1)..(1002): n is a, c, g, or t
atggtcagatcggccgagaacggcaaatatccggtgcatagggtacttggtgaatctctaaccgttcaagcagatattttcaggcatagtcacgaaagatacgatgccgcaatagaatataggcattcatcgcaaaaaaaatgggaaagagttccgatgaaacctggggacaacgatttgtgggaaggttcctttcaggttcaaaaactcggtatttaccaatataaaattatagcttggacaatttctccaccggatattcccacagaaagcggagtgtttgaagcaagggtggattccctttgcgcacggcaaggcacttggtacgaaatgtggcccaaaagtcagggcaaaaacccaaacaaatccgcaacttgggcagactgcataaaccgtttggattatatagtttctttgggcttcgataccgtttatctggtgccattccatcccgttggcgaaacaaaccgcaaaggcgcaaacaatgcccttaaagcaaaaccaggcgagcccggctgcccttacgccgttggcaactcgcgtgggggtcactttgcggttgacccagaacttggcacaatggatgaatttgagaattttgccgccgcctgcaaacaacgcggcttaaagatggcaatagacatagcattgaattgcagcccagaccatccttatgtgaaacaacatcccgaatggtttttccacgaagcagatggctcaatcaaattcgcagagaaccccccaaaaaaatacgaggatatttatccctttgactactacaacgaanattatcaggaattatggaaagagataaaaaaaataatcctcttctgggcagacaaaggctttgacattttccgcatagacaaccctcatacaaaacctttccctttttgggaatggctaattgggtcaataaagaagaacgcccagaactcgtgttttagcagaagccttcacacgccccaagataatgaaacgccttgccaaagtgggctttga

SEQ ID NO: 57258 - protein, 333 aa, Unknown
  Obtained from environmental sample
  misc_feature (1)..(333): Xaa is any amino acid
MVRSAENGKYPVHRVLGESLTVQADIFRHSHERYDAAIEYRHSSQKKWERVPMKPGDNDLWEGSFQVQKLGIYQYKIIAWTISPPDIPTESGVFEARVDSLCARQGTWYEMWPKSQGKNPNKSATWADCINRLDYIVSLGFDTVYLVPFHPVGETNRKGANNALKAKPGEPGCPYAVGNSRGGHFAVDPELGTMDEFENFAAACKQRGLKMAIDIALNCSPDHPYVKQHPEWFFHEADGSIKFAENPPKKYEDIYPFDYYNEXYQELWKEIKKIILFWADKGFDIFRIDNPHTKPFPFWEWLIGSIKKNAQNSCFSRSLHTPQDNETPCQSGL

SEQ ID NO: 57259 - DNA, 1179 bp, Unknown
  Obtained from environmental sample
  misc_feature (1)..(1179): n is a, c, g, or t
atgaaaaatacggataattcaacatacttttttacgtccgaatcggtcggagaagggcatccagataaactctgcgatcagatatctgacgcgattcttgacgcatgcttaaaagaagaccctgaaagccgggtgggttgtgagacgttcgcgtccgcatctcttgtgcttgtaggcggggaaattacgacaaatacatttgtcgatttccatcatctggtacgggaaatcgcaagggaaataggttacatcgacccgtctctcgggcttgattgcaattccatggctgtccttgacatgattcacaatcaatctcccgacatatcacagggcgtttctggcgcccgccttaaaaaatttaaaggacagcagggagccggggatcagggaatgatgttcggctatgcgtgcaatgaaacaaaagagcttatgcccatgccgataatgcttgcccacaaaatacttcttaacgcctcaaaactgcgtaaaaacaaaactattaaatggctgcgtccggactcaaaaagccaggtaacaatagaatacgaagggtttaaacctgtgcgcattgacacggttgttgtctctcatcaacatgatccggatgtttcctatagtgaaattgaaaaaactgttatagaaaagattattactcctgtacttgaacctactgggttgctcgataaaaaaacaaaatactttgtgaaccccacaggacggtttgtaatcggcggtccgttcggggattcggggcttacgggacgaaaaattatcgtagacacctacggcggcatgggtcgccacggcggcggcgctttttcgggcaaagacccaaccaaagttgaccgttccgcagcttatgccgctcgttacgtcgccaaaaacattgtcgccgccaaacttgccgaccgctgtgaaatccagcttgcctacgccattggagttcctttccctgtctcagtaatggtagatacattcgggactgcgaaggtcgaagaaaaacaaatagaaaaagctataggaaaagttttcgatttaagtccctcaggaattatcaagatgcttgatctgcgcaagccaatctatcttaaaaccgcttcttacggtcatttcggcagatcggaattttcatgggaaaagaccgataaagttgaggaactgaaaaaagcgattaactag

SEQ ID NO: 57260 - protein, 392 aa, Unknown
  Obtained from environmental sample
  DOMAIN (7)...(106): S-adenosylmethionine synthetase, N-terminal domain
  misc_feature (1)..(392): Xaa is any amino acid
MKNTDNSTYFFTSESVGEGHPDKLCDQISDAILDACLKEDPESRVGCETFASASLVLVGGEITTNTFVDFHHLVREIAREIGYIDPSLGLDCNSMAVLDMIHNQSPDISQGVSGARLKKFKGQQGAGDQGMMFGYACNETKELMPMPIMLAHKILLNASKLRKNKTIKWLRPDSKSQVTIEYEGFKPVRIDTVVVSHQHDPDVSYSEIEKTVIEKIITPVLEPTGLLDKKTKYFVNPTGRFVIGGPFGDSGLTGRKIIVDTYGGMGRHGGGAFSGKDPTKVDRSAAYAARYVAKNIVAAKLADRCEIQLAYAIGVPFPVSVMVDTFGTAKVEEKQIEKAIGKVFDLSPSGIIKMLDLRKPIYLKTASYGHFGRSEFSWEKTDKVEELKKAIN

SEQ ID NO: 57261 - DNA, 663 bp, Unknown
  Obtained from environmental sample
  misc_feature (1)..(663): n is a, c, g, or t
ttgttaacgggagggggaatgaacattgacactgaaaaggcaaggctcttttgtgtaaatttgtttcaagcttacgggttttccaaagacgaaagtgaaattataaccgatgttcttatccgcgccgatctttacggtattgaatctcacggtattcacaggctttcccgctaccatgaagaaataacatcggagcaggtggacgtaaaagcgaaaattgacattgtacacgaaacgggaatttccgcctgccttgaagcgaacaaagcaatgggtcagcttgcaagcgtgcacgcaatgaatttggcaatccagaaagcgcgtaacagcgggtgcggcatggtgacggttcgcaattccaaccattacggcatcgcaagttactacacggaaatggcgtcggatcaggatttaatgggcgtctgcatgacaaatacggaggcaatctgcgttcccactttcggctgtgaagcgatgacgggaacaaacgccatagccctcgctatgcccgccgagccttatcatttttcctatgacgcgtctacaaccgtcgtcccgcgcggaaaactcgaagtttacagaaaaaacggtcagcctctgcctgagcattgggcgcttgacgcgaacggacatccgtgtacggacgcggctgtcgtagtttga

SEQ ID NO: 57262 - protein, 220 aa, Unknown
  Obtained from environmental sample
  DOMAIN (7)...(220): Malate/L-lactate dehydrogenase
  misc_feature (1)..(220): Xaa is any amino acid
MLTGGGMNIDTEKARLFCVNLFQAYGFSKDESEIITDVLIRADLYGIESHGIHRLSRYHEEITSEQVDVKAKIDIVHETGISACLEANKAMGQLASVHAMNLAIQKARNSGCGMVTVRNSNHYGIASYYTEMASDQDLMGVCMTNTEAICVPTFGCEAMTGTNAIALAMPAEPYHFSYDASTTVVPRGKLEVYRKNGQPLPEHWALDANGHPCTDAAVVV

SEQ ID NO: 57263 - DNA, 1446 bp, Unknown
  Obtained from environmental sample
  misc_feature (1)..(1446): n is a, c, g, or t
ttgaaaaccaggcgggcaataaacggcgaggaatgtcttttttccctggcctttgaaaaaccggccacgcttgcggattacttttttgcttccgccggcaagagcgaagggaggaagggcgaagcccttgttgtctaccttgagcgggaacggcttgagaacgcgcaggaaagccttgaaagggaatacagcagtttatattccaaaacgcgcagggaacgggaaatcccgcttccaaaacgaatgcttctcaacttcaaggagctttcctcttccctttcccgcagtatttcctttgtctcgtttaagggaagcagggaagaaaacgtcttgcatattaacgccgcctgcgatccgcccaggagttttttcggaaacgtgaattatctaaaagaagaattcgcctcccttaaaaagcagggctgggatctggcggtggcagccgaatccgacgcacaggcggggcggatcgccgagcttttacgggatgaggacgtttccgtgggggcgctgccattctcgtcaggctttgccctgcctgagctcaagttcatgcttatccaggaaaacgagatctttggccgccgatgccgcccgcccaaatcccttaaaacagtgcggagcagccccatcgacacctttgtagaattaaaccccggcgactatgttgtccatataaattacggcatcgggcttttcaagggcatcgaaagaataaaagccctgggccacgaaagagactacataagcgtggagtacgccggggaagaaacggtctttgtgccaattgaacaggtaaacctggttcagcgctatatcggcaacgagggcagccctccccggctggacatactcggttccaaaagctgggagaaccgcaagggccgcgttaaaaaatccgtggaggacatagcggaaaaactccttgccctttattcaaagcgccgccagtcgcaaggtttcgcctttccaaaagactctgaatggcagaccatgttcgaagcggcctttccgtttgaggaaaccgaagaccagctccgctgcgtggaagaaatcaaagccgacatggaaagccctcaccccatggacaggctaatctgcggggatgtgggtttcgggaaaaccgaagtggctgtacgggcttgctttaaggcgataatgggcggcaagcaaatcgcgttcctcgcgccgacaacgatcctggcggaacagcattacgaaaatttccaggaaaggttcagccagttcccggtaaaaattgcgatgctctcgcgctttgtggacaaaaaaagcgtccgcaagatccttgaagaattaagaaacggggaaatcgatctattggtcggcacacacaggatcattcaaaaagacgttgctttaaaaatctgggccttttggttatacatgaagagcagcgtttcggcattaaagacagagagcgcctaa

SEQ ID NO: 57264 - protein, 481 aa, Unknown
  Obtained from environmental sample
  DOMAIN (342)...(481): DEAD/DEAH box helicase
  misc_feature (1)..(481): Xaa is any amino acid
MKTRRAINGEECLFSLAFEKPATLADYFFASAGKSEGRKGEALVVYLERERLENAQESLEREYSSLYSKTRREREIPLPKRMLLNFKELSSSLSRSISFVSFKGSREENVLHINAACDPPRSFFGNVNYLKEEFASLKKQGWDLAVAAESDAQAGRIAELLRDEDVSVGALPFSSGFALPELKFMLIQENEIFGRRCRPPKSLKTVRSSPIDTFVELNPGDYVVHINYGIGLFKGIERIKALGHERDYISVEYAGEETVFVPIEQVNLVQRYIGNEGSPPRLDILGSKSWENRKGRVKKSVEDIAEKLLALYSKRRQSQGFAFPKDSEWQTMFEAAFPFEETEDQLRCVEEIKADMESPHPMDRLICGDVGFGKTEVAVRACFKAIMGGKQIAFLAPTTILAEQHYENFQERFSQFPVKIAMLSRFVDKKSVRKILEELRNGEIDLLVGTHRIIQKDVALKIWAFWLYMKSSVSALKTESA

SEQ ID NO: 57265 - DNA, 588 bp, Unknown
  Obtained from environmental sample
  misc_feature (1)..(588): n is a, c, g, or t
ttgtactggggaggttttggaatgtctgatagtgatgatctggatcttgatggcggtgatgctcctgataccggcggcgctcctaaaaaaagaggcggcgggcttggcggtttgcttccgactattttaaagtttgtggctatcggcctgggcgcgttaatttttatagttactgtctgtattattaccgttaatatcctgaataagggcggtaaatcccagactgtaattgtcgatcccaatggtccgtatgtgggcaaaagaccggaatataattattacgatatgattggctccatgtcggtcaaaacaagggatttccccgttagttccacagtcagcgtagaaatgataatcggttacgatttgaacgacttaaacgcttccgcggaattagtcagccgcaggtatgaattgcgcgactttgtaaggcgttattttgccggaaaatacgcggcggagcttgttccagaaagagaagaagagttaaaagccgatatccgcgaaatgttaaacacacgatttttggacacggcaagggcgcgtatcatattgttcaataaattcgatgtaatggagaatttttaa

SEQ ID NO: 57266 - protein, 195 aa, Unknown
  Obtained from environmental sample
  DOMAIN (39)...(192): Flagellar basal body-associated protein FliL
  misc_feature (1)..(195): Xaa is any amino acid
MYWGGFGMSDSDDLDLDGGDAPDTGGAPKKRGGGLGGLLPTILKFVAIGLGALIFIVTVCIITVNILNKGGKSQTVIVDPNGPYVGKRPEYNYYDMIGSMSVKTRDFPVSSTVSVEMIIGYDLNDLNASAELVSRRYELRDFVRRYFAGKYAAELVPEREEELKADIREMLNTRFLDTARARIILFNKFDVMENF

SEQ ID NO: 57267 - DNA, 1029 bp, Unknown
  Obtained from environmental sample
  misc_feature (1)..(1029): n is a, c, g, or t
atgacagaagttctgtcccaggacgagatagaccagttattaaccgcaataaacgccggagataccgagcctgaagactttaggccggccgcggacagccggaaaatcaaaatatatgactttaaacgccccgataagttctctaaagaacagatacgtactgtttcgataatgcatgaaactttcgcccgcttaaccacgacaagcctttccgcccagcttcgcagtatggttcacgtccatgtcgcttcggtagatcagttaacttatgaagaatttatccgttctattcccaccccgacaaccttggctatcatcaatatggaccccctcaagggaaacgctattttagaaatagaccccgctattacattttccataatcgaccgtctttttggcggtacgggcgaaggcaccaaatcccagcatgaattgactgatatcgagcagtcggtaatggaagggattatcgtccgtattttagggaatatgcgcgaagcgtggactacggttatcgacctgcgcccccgccttgggcagattgacaccaatccacagtttgcgcaaattgtgcctcctacggaaatggtcgttcttgtaacgcttgaaacaaaggtaggcgacgtggaaggcatgatgaacttctgtattccctaccttacaatagagccgataatcggcaaattatccgcccaattctggtattcttcggtacgccgtaacgccacaacggaaaacctcaatgttctaaaggataaactcgcaacggtcgatattaatgtaacagccgaaattggaaagataaacgtgcctgtcagagacgttctttccttacagattggggatgtaatcaggctttataatacacgtattggcgatccctattctcttaatattggcacaaggaaaaagtttctgtgccgtcccggcattatcgggaagaaaatcgctgttcagataacgcagaagatagacgagcttgtgcatgaggaatttgaagagctcgcgtctgaaggagaggaattatga

SEQ ID NO: 57268 - protein, 342 aa, Unknown
  Obtained from environmental sample
  DOMAIN (250)...(327): Surface presentation of antigens (SPOA) protein
  misc_feature (1)..(342): Xaa is any amino acid
MTEVLSQDEIDQLLTAINAGDTEPEDFRPAADSRKIKIYDFKRPDKFSKEQIRTVSIMHETFARLTTTSLSAQLRSMVHVHVASVDQLTYEEFIRSIPTPTTLAIINMDPLKGNAILEIDPAITFSIIDRLFGGTGEGTKSQHELTDIEQSVMEGIIVRILGNMREAWTTVIDLRPRLGQIDTNPQFAQIVPPTEMVVLVTLETKVGDVEGMMNFCIPYLTIEPIIGKLSAQFWYSSVRRNATTENLNVLKDKLATVDINVTAEIGKINVPVRDVLSLQIGDVIRLYNTRIGDPYSLNIGTRKKFLCRPGIIGKKIAVQITQKIDELVHEEFEELASEGEEL

SEQ ID NO: 57269 - DNA, 504 bp, Unknown
  Obtained from environmental sample
  misc_feature (1)..(504): n is a, c, g, or t
atgagcgatggcgcactttcgcaggatgagatagacgcattattggccggtgtagattcatcgtccggtggcggtcatggcggtcacggcgcacacgccgcgacaatggcgcctccagccgcctcagcctcggcttttgacgttgactcgcttgaaaagtttttttcttcaactacgggcgctctttcatccaatcttgcggctcttaccggcactacggtaacccttgtcggtcctgaagtccaggccacaacgcgtgacaatatgttaaccctgcttcccggtatggttaccgttgtaaataccaattttacatcgggtttccccggcgagcattgtttcattttttctgaggaatcagccaaggctatagcaagccttatgactaaagagagcgacattcaacttgatgaaatggcgatgtccgttatcggagaagttgtttctcaatcgctgggactcaaatcaccgctcttaccgataaaaccggaaataaatcaatag

SEQ ID NO: 57270 - protein, 167 aa, Unknown
  Obtained from environmental sample
  misc_feature (1)..(167): Xaa is any amino acid
MSDGALSQDEIDALLAGVDSSSGGGHGGHGAHAATMAPPAASASAFDVDSLEKFFSSTTGALSSNLAALTGTTVTLVGPEVQATTRDNMLTLLPGMVTVVNTNFTSGFPGEHCFIFSEESAKAIASLMTKESDIQLDEMAMSVIGEVVSQSLGLKSPLLPIKPEINQ

SEQ ID NO: 57271 - DNA, 558 bp, Unknown
  Obtained from environmental sample
  misc_feature (1)..(558): n is a, c, g, or t
atgacttacggtctggacatgggtgacgggctttcccaccaaatatgggaagttttaggcccggctccggccgccgatatttcaagcggtttaagcggcaaggctcaatctgcggcgccggcggcgggattgggtggaatgaatatgggtggaatgaatatggggggcatgggaatgcaaggaatgggtatggggggaatgggacagggtatgtcgcctaacgtcggatctgctaatgtgcagcctgtacagttccccaatttgatgcagccgcgtcttgggcctcacgaagcgggcaatatcggtcttatcatggacgtgtccatggagatgaccgtagaacttggacgcacgcgcaaactgataaaagagattttaggcatgggcgaaggcacgattatcgagcttgacaagctcgcgggcgagcccgtggatattcttgtcaaccataaacttatcgccaagggcgaagttgtggtcattgatgaaaacttcggcgtgcgcgtaacggaaattgtgtctccgatggaacgcattaacgatatgggatacaattag

SEQ ID NO: 57272 - protein, 185 aa, Unknown
  Obtained from environmental sample
  DOMAIN (100)...(176): Surface presentation of antigens (SPOA) protein
  misc_feature (1)..(185): Xaa is any amino acid
MTYGLDMGDGLSHQIWEVLGPAPAADISSGLSGKAQSAAPAAGLGGMNMGGMNMGGMGMQGMGMGGMGQGMSPNVGSANVQPVQFPNLMQPRLGPHEAGNIGLIMDVSMEMTVELGRTRKLIKEILGMGEGTIIELDKLAGEPVDILVNHKLIAKGEVVVIDENFGVRVTEIVSPMERINDMGYN

SEQ ID NO: 57273 - DNA, 2076 bp, Unknown
  Obtained from environmental sample
  misc_feature (1)..(2076): n is a, c, g, or t
atggcaataaccccccttactccggttatacggattgatgaagaaaagtgtattaactgttacgcctgtatagtaatatgtccggttaaatactgcatgaacggttcagagaaaaaactgcaggtaaatcatgacatgtgtatcggctgcggaaactgcattaacgcctgcacccacaaggcaagaacgctcatagacgacaccgaccgtttcatggaagacctgaaacaaaaaaagaaaataatcgccgtagccgcccccgccgtcgcttcgttttttccagatcaatttctcaacttaaacggatacctgaaatcacttggcgttgaagccttttttgacgtgagccttggagcggaactgaccgtcataacatatcttgaccacatcaaagaaaaaaatccccgaacggtaatcgcccagccctgccccgcgattgtaacttatatcgaaattcatcaccctgaattattgccctttctagctccggcggacagccctatcctgcatacaattaaattggtaaaaaaattttatcccaaatataaagaccacaagatagcggtaatttctccctgtatcgccaaacggcgtgagtatgacgaaaccggtctgggtgattacaacataaccatgattgcgttaaaaaattattttaagtcaaaaaatatagatttaacttctttttcaaaagttgaatataacggtccggttgccgagcgtgcagtcggattttcaagtcccggcggtttgcttgacacggcggaacgttttgtaccgggaatacggagaaacacagaaaaaatcgaaggagtgcacagcatatacgcatacttgatagaaacatcgggagctttaaatgatcctgatgaagaattacctctgttaatcgactgcttgaattgcgaaaaaggctgtaacggcggccccggtacgggcaacagccacttgtcgataaataaactaaaaaaaccaatccgtaaacgaagcgcagaacttgaacaacaaattgcacccaaacaaaaaaaagaacagtacgaaaaatatcacaaactgctgaataaatactggaaaccaggattatatgatcgcaattaccgtaacctttcagaaaactacgacaagaaaacacctaacgaagatgaattgaacgctatctaccgtaagatgaaaaagttttcaaaagaagatatatacgattgcggagcttgcggatataaaaggtgcagaagaatggcaatggcaattttcaacggtgttaataaacctgaaaattgcgctcattatacccttgcagtactcgcagaaaaaaccagtaccgaagaattaaaccgtaagcttcaggaacacattagccaagcgtcaatacttattaatggaataagtaaattagtgcaagatttaaacgctattatcagttcacaggctgaggcagtagatcattcagcggcggaaactgaagaaataatcacatcaattaaagacacttcggaagtatcacataaacaaaaagattctatacaaggattaatagaagttgccgcacagggcaaagaatccatgcaaaaaacaattaattcaataaacgaaatttcacaatcagttgaaggcataagttcggcaattcaaataatcgcttcaatagcggcaaatacaaacctgctttcaatgaatgcggcgattgaagccgcccatgccggagatgccggaaagggttttgcggtagtcgccggagaaatacgccatctttctgaaagtaccagagaaaattcagataatatttccattacactaaaaaatatcgtcaatggaataacaattacttcaaaacagtcaggtgaaaccgacagccgaataattcaaatgtcaaaagagataaacggatttgcacaaacaatgtcgtcttttattaacacctttaatgaattatcagcgaaaagcgccgatattaccgactctcttgaaagtcttaaagagcaaagctcggcagttaaaacaagttatgcgcaaatgattgaaatgacgcagaaacttaccacagcaatgaaagaattatccgacctgtcaaaaggataa

SEQ ID NO: 57274 - protein, 691 aa, Unknown
  Obtained from environmental sample
  DOMAIN (399)...(429): Putative Fe-S cluster
  misc_feature (1)..(691): Xaa is any amino acid
MAITPLTPVIRIDEEKCINCYACIVICPVKYCMNGSEKKLQVNHDMCIGCGNCINACTHKARTLIDDTDRFMEDLKQKKKIIAVAAPAVASFFPDQFLNLNGYLKSLGVEAFFDVSLGAELTVITYLDHIKEKNPRTVIAQPCPAIVTYIEIHHPELLPFLAPADSPILHTIKLVKKFYPKYKDHKIAVISPCIAKRREYDETGLGDYNITMIALKNYFKSKNIDLTSFSKVEYNGPVAERAVGFSSPGGLLDTAERFVPGIRRNTEKIEGVHSIYAYLIETSGALNDPDEELPLLIDCLNCEKGCNGGPGTGNSHLSINKLKKPIRKRSAELEQQIAPKQKKEQYEKYHKLLNKYWKPGLYDRNYRNLSENYDKKTPNEDELNAIYRKMKKFSKEDIYDCGACGYKRCRRMAMAIFNGVNKPENCAHYTLAVLAEKTSTEELNRKLQEHISQASILINGISKLVQDLNAIISSQAEAVDHSAAETEEIITSIKDTSEVSHKQKDSIQGLIEVAAQGKESMQKTINSINEISQSVEGISSAIQIIASIAANTNLLSMNAAIEAAHAGDAGKGFAVVAGEIRHLSESTRENSDNISITLKNIVNGITITSKQSGETDSRIIQMSKEINGFAQTMSSFINTFNELSAKSADITDSLESLKEQSSAVKTSYAQMIEMTQKLTTAMKELSDLSKG

SEQ ID NO: 57275 - DNA, 669 bp, Unknown
  Obtained from environmental sample
  misc_feature (1)..(669): n is a, c, g, or t
ttgccaaggttatatcccggctgcaccagaaacagtccatttccagcctgctggacaacagggagatcatcagccgcctggttggcggggccaaagaacagcaaacgcagcacgaattgcctttccagtcggacgaaaacgaatgatgaaatgaaggtgtataatcttcccgtaaattgcgaggcgattctctttgacatagattccacgctctacacaaatcccgaatacgcccgctcccaaatagatctccccattgaaaaactcgcccgtatgcggggaatttcctttaagcagatgaacgatgaaatgaaccaatacagggataactgggcaaaaacgcataacgggcaggggatcagccacgggaatactttcaaagccttcggcgtcagcatcggcgaaagcgtgaaatggcgggaagaactctgcgtacctgagcaatacctgtcaaaggacacgcggcttcgttcaacactggaacggcttgctgaacgctttgccctgtccgtggtcaccaacaacccggtttccatcgcggaaagaacccttcgcgcgctcggcgtggaggacatgttccgcgcccttatcggccttgacacttgcggcgtctccaaaccccacaaggagcccttaacgcgggccgcggcccttgcggcgcgcccttga

SEQ ID NO: 57276 - protein, 222 aa, Unknown
  Obtained from environmental sample
  misc_feature (1)..(222): Xaa is any amino acid
MPRLYPGCTRNSPFPACWTTGRSSAAWLAGPKNSKRSTNCLSSRTKTNDEMKVYNLPVNCEAILFDIDSTLYTNPEYARSQIDLPIEKLARMRGISFKQMNDEMNQYRDNWAKTHNGQGISHGNTFKAFGVSIGESVKWREELCVPEQYLSKDTRLRSTLERLAERFALSVVTNNPVSIAERTLRALGVEDMFRALIGLDTCGVSKPHKEPLTRAAALAARP

SEQ ID NO: 57277 - DNA, 1278 bp, Unknown
  Obtained from environmental sample
  misc_feature (1)..(1278): n is a, c, g, or t
gtgaagtattccaaccttgagaatctggccgttattgcctgccccggcggagagatcttcgcggatgaagttattgcccacctgaaaaagttataccgtcacaagaacgagcgcttcgcccaggatcttgcaaaacgctataatttaagccccgcaaaagtaaacgaacagatcaactttatcagcgagatagccggtttcgaggccggagcgcatgtcggaagccgccgcgttccaaagataaaacttcaggtaaaattttcctgctttccaaacggggaaatcaagtctgaaatacaggagtcaatacggggcaaggatgtctatattttccaggatgttgaaaaccatcaccccgtgcgtttttcgggttataaagagggaataaaactgtcgattaacgaccacctgctgacgctctttgtcactattgacgcggcgcagcgggcgggtgccgggcatataacgctggtgatccccaactacccctatgccaggcagcacaaggcaaaaggcagggaaggacttgccgccagccgcatagggaaaatgtttgagggtcttggggtcggcactattatctcccttgacatccactcccgcgatattatcaattcctttaacagaatgaggctggaaaatctgcacgcaagctaccagataatcagaacgctgtgttccatggacggtatcctcaatgacgattttgtcgtggtttcccccgacaccggggcggttgacaggaataaattcttcgcgtcggcgcttaagaagccgctcgccctgctgtacaaggaacgggattattcaaagtttatcgccaacgcgttagagagcaatatctcccaaatgcggctcctcggcaatgtgatggacaagacggtttttatggccgacgatctgctcggcaccggcgcgaccctgattaagggcatgaagctgctcaaggagaacggcgcccgcaaggtaatctgctccataagcctgcccctgttttcaggcgacgcggtgtcctactttgacgacgcgtataaagaaggcctgttctacaggcttatcggaacaaacgcggtttaccatgaagaagtgcttaagcgcgaatggtacatcaatgtgaatatatccggtctttttgccaaggttatatcccggctgcaccagaaacagtccatttccagcctgctggacaacagggagatcatcagccgcctggttggcggggccaaagaacagcaaacgcagcacgaattgcctttccagtcggacgaaaacgaatga

SEQ ID NO: 57278 - protein, 425 aa, Unknown
  Obtained from environmental sample
  DOMAIN (207)...(350): Phosphoribosyl transferase domain
  misc_feature (1)..(425): Xaa is any amino acid
MKYSNLENLAVIACPGGEIFADEVIAHLKKLYRHKNERFAQDLAKRYNLSPAKVNEQINFISEIAGFEAGAHVGSRRVPKIKLQVKFSCFPNGEIKSEIQESIRGKDVYIFQDVENHHPVRFSGYKEGIKLSINDHLLTLFVTIDAAQRAGAGHITLVIPNYPYARQHKAKGREGLAASRIGKMFEGLGVGTIISLDIHSRDIINSFNRMRLENLHASYQIIRTLCSMDGILNDDFVVVSPDTGAVDRNKFFASALKKPLALLYKERDYSKFIANALESNISQMRLLGNVMDKTVFMADDLLGTGATLIKGMKLLKENGARKVICSISLPLFSGDAVSYFDDAYKEGLFYRLIGTNAVYHEEVLKREWYINVNISGLFAKVISRLHQKQSISSLLDNREIISRLVGGAKEQQTQHELPFQSDENE

SEQ ID NO: 57279 - DNA, 684 bp, Unknown
  Obtained from environmental sample
  misc_feature (1)..(684): n is a, c, g, or t
atgatcggcgagggggtttcangaaaatccccaagctgcgcccatgtcatctatgactattatggcggcaaggaaaaactggggcagttcgaggagatgataagatacgtagacaagatggactcggccaatctcacggtagatgaaattatgcatccggaaggatgggtgttgctcggttttatcaccgatccccgcacggggcttggcaggattcgtaattttacaataagcaacctggatctgatgaaaaaactgtcaaaggctacttttgacaaacccattgatgaaatcctcgcgatgcccgacgttaaagaacgtatagacacctattttgaacagcataacctctttattgaaatggcaaaaaaacacgcgaaggtcgaaggaaacgccattgtttgtgatatgcgggatattgatacaatatacgcaggcaaccgttttctgatttatacgctcttcccccaacagaacattttagtttgggtagtggacgggaaaaagaaggtcaacacggtaattaccgtaggctatagcattataaacaaaaccgccacggtcgatgtgggcagtttaatgttgaaatacggcggcggcggacacaagcaggtaggcacctgccaggtggcttatgaaaacaccgataaaattctcagtgaaatcatcgccgcggtaaagtag

SEQ ID NO: 57280 - protein, 227 aa, Unknown
  Obtained from environmental sample
  misc_feature (1)..(227): Xaa is any amino acid
MIGEGVSXKSPSCAHVIYDYYGGKEKLGQFEEMIRYVDKMDSANLTVDEIMHPEGWVLLGFITDPRTGLGRIRNFTISNLDLMKKLSKATFDKPIDEILAMPDVKERIDTYFEQHNLFIEMAKKHAKVEGNAIVCDMRDIDTIYAGNRFLIYTLFPQQNILVWVVDGKKKVNTVITVGYSIINKTATVDVGSLMLKYGGGGHKQVGTCQVAYENTDKILSEIIAAVK

SEQ ID NO: 57281 - DNA, 1047 bp, Unknown
  Obtained from environmental sample
  misc_feature (1)..(1047): n is a, c, g, or t
atggcaaattacgggaatctgaccagggtcctggaagagcaaataagaaactggaacagcaaagccgttaccgagtccacgggatttgtggtgcaggcgggatacggagttgtaacaatacacgggatttccagggcaatttacggggagcttttggaatttgcctccggcgcagtcggcattgcccttaaccttgaagaggacggcgtgggatgcgtattgctttcgggggaagacggggtaaaggacggggaagaagttaatggcacaggccgtgtggtgtccgtgccgtcaggcgagtcccttataggcagggtgttaaacccgctgggcaaacccatagacggcaaagggccaatccagccggaagaatggctgtccgttgaggcccctgccgcgccggtaatagaacgcggcagtgtggatacgccaatgcagaccggcatcctttcggtagactcgatgatccccatcgggcgcggtcagagggagcttatcataggcgacaggcagaccggcaagacagccctcgccatcgacgccattgtcaaccagaagggcaaagacatgtattgcgtttactgcgcaattggtcaaaagtcgtcttcggttgccgcgataataaaaaacctggaaaaagcggaggccatggcttatacctttgtggtgcttgcttcggcatcggattcggcggcccttcaatacctggccccttattcggcggtggcaatggccgagcactttatgcacaaaggcaaagacgtactcgtcgtttacgatgacctttcaaagcacgcggtgggcttaccggacaataagcctccttttgcgaaggccgccgggcagggaagcttttcccggcgacgtgttctacctgcactcccggctcttggaacgggcggcaaagctgtcggaagcgcgagggggcggttccattacagccttgccaatcgtcgaaacccaggccggggatatttcgtcctatattccaaccaatgtaatttccataaccgatggccagatttttttggacacggagctttttaa

SEQ ID NO: 57282 - protein, 348 aa, Unknown
  Obtained from environmental sample
  DOMAIN (23)...(91): ATP synthase alpha/beta family, beta-barrel domain
  misc_feature (1)..(348): Xaa is any amino acid
MANYGNLTRVLEEQIRNWNSKAVTESTGFVVQAGYGVVTIHGISRAIYGELLEFASGAVGIALNLEEDGVGCVLLSGEDGVKDGEEVNGTGRVVSVPSGESLIGRVLNPLGKPIDGKGPIQPEEWLSVEAPAAPVIERGSVDTPMQTGILSVDSMIPIGRGQRELIIGDRQTGKTALAIDAIVNQKGKDMYCVYCAIGQKSSSVAAIIKNLEKAEAMAYTFVVLASASDSAALQYLAPYSAVAMAEHFMHKGKDVLVVYDDLSKHAVGLPDNKPPFAKAAGQGSFSRRRVLPALPALGTGGKAVGSARGRFHYSLANRRNPGRGYFVLYSNQCNFHNRWPDFFGHGAF

SEQ ID NO: 57283 - DNA, 432 bp, Unknown
  Obtained from environmental sample
  misc_feature (1)..(432): n is a, c, g, or t
gtgcataaagtgctcggccattgccaccgccgaataaggggccaggtattgaagggccgccgaatccgatgccgaagcaagcaccacaaaggtataagccatggcctccgctttttccaggttttttattatcgcggcaaccgaagacgacttttgaccaattgcgcagtaaacgcaatacatgtctttgcccttctggttgacaatggcgtcgatggcgagggctgtcttgccggtctgcctgtcgcctatgataagctccctctgaccgcgcccgatggggatcatcgagtctaccgaaaggatgccggtctgcattggcgtatccacactgccgcgttctattaccggcgcggcaggggcctcaacggacagccattcttccggctggattggccctttgccgtctatgggtttgcccagcgggtttaa

SEQ ID NO: 57284 - protein, 143 aa, Unknown
  Obtained from environmental sample
  misc_feature (1)..(143): Xaa is any amino acid
MHKVLGHCHRRIRGQVLKGRRIRCRSKHHKGISHGLRFFQVFYYRGNRRRLLTNCAVNAIHVFALLVDNGVDGEGCLAGLPVAYDKLPLTAPDGDHRVYRKDAGLHWRIHTAAFYYRRGRGLNGQPFFRLDWPFAVYGFAQRV

SEQ ID NO: 57285 - DNA, 846 bp, Unknown
  Obtained from environmental sample
  misc_feature (1)..(846): n is a, c, g, or t
ttgtggtgcttgcttcggcatcggattcggcggcccttcaatacctggccccttattcggcggtggcaatggccgagcactttatgcacaaaggcaaagacgtactcgtcgtttacgatgacctttcaaagcacgcggtgggcttaccggacaataagcctccttttgcgaaggccgccgggcagggaagcttttcccggcgacgtgttctacctgcactcccggctcttggaacgggcggcaaagctgtcggaagcgcgagggggcggttccattacagccttgccaatcgtcgaaacccaggccggggatatttcgtcctatattccaaccaatgtaatttccataaccgatggccagatttttttggacacggagctttttaattcaggctttcgccccgctattgatgtaggactttctgtcagccgtgttggaggctccgcacagttcaaggcaattcgaaaaattgccggacggctcaggctggatctggcgcaataccgcgaaatggcggcctttgcccaattcggaagcgatctggacaaggcaacccagacgaaactggcccagggagaacggctaatggaagtgctcaagcaggcccagttcaatccttacagcacagccgagcaatacgtcattcttttcactgccgtgaacggacacctgatggatgtagaaacaaaaaatatctctacattcatcaagggctttttggatcatctggcgataaacaacgagaccattttaacaaacctgaacaattcaggcgaatcaaatgtcgatacagatcaaatcataatcgaagctcttgaaagctataaacaaatgaaccaggggtaa

SEQ ID NO: 57286 - protein, 281 aa, Unknown
  Obtained from environmental sample
  DOMAIN (155)...(256): ATP synthase alpha/beta chain, C terminal domain
  misc_feature (1)..(281): Xaa is any amino acid
MWCLLRHRIRRPFNTWPLIRRWQWPSTLCTKAKTYSSFTMTFQSTRWAYRTISLLLRRPPGREAFPGDVFYLHSRLLERAAKLSEARGGGSITALPIVETQAGDISSYIPTNVISITDGQIFLDTELFNSGFRPAIDVGLSVSRVGGSAQFKAIRKIAGRLRLDLAQYREMAAFAQFGSDLDKATQTKLAQGERLMEVLKQAQFNPYSTAEQYVILFTAVNGHLMDVETKNISTFIKGFLDHLAINNETILTNLNNSGESNVDTDQIIIEALESYKQMNQG

SEQ ID NO: 57287 - DNA, 759 bp, Unknown
  Obtained from environmental sample
  misc_feature (1)..(759): n is a, c, g, or t
atggcgaatttaagagacgttcgcctcaggatgcgggccataaggcaaaccctgcaggtaaccaaagcgatgaacttaatctcaaccgccaagctgcgcaagggacgccgtattctgatggacgttgagcctttctttacaagagtccagaaatctatgtttgatatactcgcgggagcgccgcttgaaaaaagcaaatactttgcgacatcagaaaaagagaaggaatcccacaccgcgataatcgtgataacaagcgacaagggccttgcgggcggttacaatgcgaatattttcaggcaggttaacctgctctgcgaaaaggtaaagaaccccatcctcattttggttggctcggtcgggtacaggtacttcatacattcaccctggcttgtcatggaaaatttttcatttaagtccaggctgcctgagctggatgaggcaaaggaaatctccgattatattatttcccaataccaatggggactatttgacaaagtccatcttgtatatacgcatatgtacagttccatcaaacttgttccaagggaaaggcagttgttgccccttgacctggaaagtatgcaggaagaatttgaaaggctcgggggaaaacgggagaaactcagttttgaatactcgccttcgaaagaagaggtatttgacgcccttgttcccatgtacgtaaaagagggtaatttacggctcccttgtggaagcttatgtaagcgagcaaagcgcctcggccgctctccataa

SEQ ID NO: 57288 - protein, 252 aa, Unknown
  Obtained from environmental sample
  DOMAIN (2)...(248): ATP synthase
  misc_feature (1)..(252): Xaa is any amino acid
MANLRDVRLRMRAIRQTLQVTKAMNLISTAKLRKGRRILMDVEPFFTRVQKSMFDILAGAPLEKSKYFATSEKEKESHTAIIVITSDKGLAGGYNANIFRQVNLLCEKVKNPILILVGSVGYRYFIHSPWLVMENFSFKSRLPELDEAKEISDYIISQYQWGLFDKVHLVYTHMYSSIKLVPRERQLLPLDLESMQEEFERLGGKREKLSFEYSPSKEEVFDALVPMYVKEGNLRLPCGSLCKRAKRLGRSP

SEQ ID NO: 57289 - DNA, 696 bp, Unknown
  Obtained from environmental sample
  misc_feature (1)..(696): n is a, c, g, or t
atgttgacagatagcgattcaacccccccgcctttgcccgctgaccgcgccgcgatacaaaaggcgatttggcttttggccgctgtggcgctcaatgccgttgagttggccataccgcggttgccgtttttgccttggctcaaacccggctttgctaatattattacaatcttgtggataatgaagtatggtttgggggacgcgttgctctataccgcgttacgggtttggatatcgggattttattttggcttctcgctgtttacgctatccttaagtctaagcggcgggctgctctctaccgcggcgatgtttgtgatttgggctacgctgggacggcgcgggcttacggggacggcggggacggctatcgtgggggcgttgtttcacaatgtcgggcagttggcggtcatatacgctatgatgtcgcaaaacatgggggtgctggggcagataccgtttatgctttgcgcggcggtggtgttcggggggcttgtaggggcgcttacgccgggcgttgggaagattcttgggtttgggattgataacgggatgagcggtattgatacggctaatatcagtacggatagtatcaaaaccgaccgtatcgatacaaatcattccaaaacgaccgttaccgccaaaatcgataatcgccgcgactttcgcggtatcaatatcgctgatgttcattaa

SEQ ID NO: 57290 - protein, 231 aa, Unknown
  Obtained from environmental sample
  DOMAIN (26)...(173): Heptaprenyl diphosphate synthase component I
  misc_feature (1)..(231): Xaa is any amino acid
MLTDSDSTPPPLPADRAAIQKAIWLLAAVALNAVELAIPRLPFLPWLKPGFANIITILWIMKYGLGDALLYTALRVWISGFYFGFSLFTLSLSLSGGLLSTAAMFVIWATLGRRGLTGTAGTAIVGALFHNVGQLAVIYAMMSQNMGVLGQIPFMLCAAVVFGGLVGALTPGVGKILGFGIDNGMSGIDTANISTDSIKTDRIDTNHSKTTVTAKIDNRRDFRGINIADVH

SEQ ID NO: 57291 - DNA, 570 bp, Unknown
  Obtained from environmental sample
  misc_feature (1)..(570): n is a, c, g, or t
atgggcggccgaactcgccgcctcctacgagcgaagactaggcaagccgcctaccaacataaaccgcgtaaatttccaagaaatccgtcaaggacgcctctctataacaaccagatggaacaaacaaccccccacggtgctgatagggatagcgaccgacgacaacctatactacgcgaaagtgctggtcaactactgatgcgcgcgttcacagccatagacgcggtaatagccgccgcgatgatatgcggagcggtcgccgcgttcgcctcaacaaactccattcgccccgaccgcgtcgcggtctatagacaaaacgccgtgatcgccgagtacccgctgaaagacgatatctcctttaccgtcaacgggaaaatcggagaggtcggcgtagagataaaaaacggaacggcaagcataaaccacgcaacctgtcccaaaggaatctgcaaactatccggcgcgataagcaacccgaacggccggctcatctgcgcgccgaataatataatggtcaagataatgtccgcgggagacgggaaaagcggcgtcgatggggtgacttactga

SEQ ID NO: 57292 - protein, 189 aa, Unknown
  Obtained from environmental sample
  DOMAIN (76)...(182): Protein of unknown function (DUF1312)
  misc_feature (1)..(189): Xaa is any amino acid
MGGRTRRLLRAKTRQAAYQHKPRKFPRNPSRTPLYNNQMEQTTPHGADRDSDRRQPILRESAGQLLMRAFTAIDAVIAAAMICGAVAAFASTNSIRPDRVAVYRQNAVIAEYPLKDDISFTVNGKIGEVGVEIKNGTASINHATCPKGICKLSGAISNPNGRLICAPNNIMVKIMSAGDGKSGVDGVTY

SEQ ID NO: 57293 - DNA, 1200 bp, Unknown
  Obtained from environmental sample
  misc_feature (1)..(1200): n is a, c, g, or t
ttgaaatatccgaagatcaatctttcagccgtcccgtccgtacccttaacggggctaaacgaatcggcgagagtggctctttccgccggtctttggaactggcggctgacttataacggcgccgctcagagagcgattcttgcttcggggcgtttcaccataaccgaagctgacgagcttgaattgttaagccccgctaaaaaccgacagttttttgcagaaagcggaactccaaaactgtacttccagtggtcgcagattgatgacgtttcgcattatattgcggaagtggacattacgcctgaattcagaaacccagttattaaaaagcagataacggatacgtccttttcagattcaagccttggagaaggaatctggtactggcgtgtaactcctgttttttctcaaaccaatgaaggcgatagcaacacctatggtgttacttattcccgcacatcgtcttttcgtatagttaaaaacgaagagccgcaaacgcccgcacccgtgcgttcttcacagtcaaaatccgtaacgctggaatcgccgtctaataatgcaatattgccggggctgactgcccttcgccagcagacagtattccgctggagcagtgatgaagcggtggcgaaatcaaggttcgttctttcacgtaactccaatccgctctcaggacaggctgtgatagaaatacccgatccaaacaggacgctccgcattgaccgtcttgatgaaggtgtctggtactggacagtggaagcgcaaactcccgaaggcgtaaatattaccgctcaaactccccggctactgcgggttctgcccattccgcttcttcccgctcccgccggccggcaacccgccgaaggattcagtatcggcatagaagaagcgaaaaaagttaatatcgaatttaaatggacacaggtacagggggcaaacgcctatatattcaccctttatcaggaaataaacggcggacggcggcagattacgcaaatagggccggaaaattttacttcatggacgacggacgttaaaacccttggacgcggaaattttatttggcggatagaggcggtaaacgcggggcgggacaatgaaattgaacagtccggcagccccgcggaaagccgttttaccgtggacattccccgcgccggacctgtaaaaataattaacgggccggaggactggccgtga

SEQ ID NO: 57294 - protein, 399 aa, Unknown
  Obtained from environmental sample
  misc_feature (1)..(399): Xaa is any amino acid
MKYPKINLSAVPSVPLTGLNESARVALSAGLWNWRLTYNGAAQRAILASGRFTITEADELELLSPAKNRQFFAESGTPKLYFQWSQIDDVSHYIAEVDITPEFRNPVIKKQITDTSFSDSSLGEGIWYWRVTPVFSQTNEGDSNTYGVTYSRTSSFRIVKNEEPQTPAPVRSSQSKSVTLESPSNNAILPGLTALRQQTVFRWSSDEAVAKSRFVLSRNSNPLSGQAVIEIPDPNRTLRIDRLDEGVWYWTVEAQTPEGVNITAQTPRLLRVLPIPLLPAPAGRQPAEGFSIGIEEAKKVNIEFKWTQVQGANAYIFTLYQEINGGRRQITQIGPENFTSWTTDVKTLGRGNFIWRIEAVNAGRDNEIEQSGSPAESRFTVDIPRAGPVKIINGPEDWP

SEQ ID NO: 57295 - DNA, 762 bp, Unknown
  Obtained from environmental sample
  misc_feature (1)..(762): n is a, c, g, or t
ttggcttatcgacacggccgagtatacaaatcggcggcaaataaaatggaaagcggaaagaaatcaaacggcaaattccggcttgtagattttcttgttatcctgctctgcctttccggcgctgtcttaagcgttaacctgttttgggctgatctgtttcaaaccctcaacgggcagaacaaaacgcccatcggaaccgttaacgtaaaaagaaatatcgtccagcgccgtatgtcggacagggtagtatgggacaggctgatcagagaaacgccggtatattccaatgacctgatccgcgtgggagataattccgaaatcgaccttcatgtaggcggcaatgaccttacgataaatgaaaatacgcttctccgcctccgctacgataaagaaaccggcgaatttcaaattgatcttagctcgggcagcatagggcttgttagcgatcccgaaagcggcggcgttgttttgaatatcatgggcaaacagatgaaagcgatgccgggaaccgcccttaacgccgccgccacggacaacggcgcgacactgcaagtcagcaaaggttcggcgctcattgcggaagaagggcaagaccgagagattggagcgggagcggcggtcgcaatggacagcgaaggttcgctccgtcctgaacccgccgtgtttgtcacccagcctaaacctaacgccctttaccgtaaaagcgccgatgagtctcttaacataattttttcatggaacaaaattaaattttcagcctga

SEQ ID NO: 57296 - protein, 253 aa, Unknown
  Obtained from environmental sample
  misc_feature (1)..(253): Xaa is any amino acid
MAYRHGRVYKSAANKMESGKKSNGKFRLVDFLVILLCLSGAVLSVNLFWADLFQTLNGQNKTPIGTVNVKRNIVQRRMSDRVVWDRLIRETPVYSNDLIRVGDNSEIDLHVGGNDLTINENTLLRLRYDKETGEFQIDLSSGSIGLVSDPESGGVVLNIMGKQMKAMPGTALNAAATDNGATLQVSKGSALIAEEGQDREIGAGAAVAMDSEGSLRPEPAVFVTQPKPNALYRKSADESLNIIFSWNKIKFSA

SEQ ID NO: 57297 - DNA, 1275 bp, Unknown
  Obtained from environmental sample
  misc_feature (1)..(1275): n is a, c, g, or t
gtggcgttcaggaacctggggttaatcgtcattgacgaggaacagcgtttcggcgtaaaggacaaggaaaggctcaaggaacttaaaaccaacgttgactgcctcacgctttcggcgacccccatccccaggacgctccacatgagccttttgaaaatccgcgacatgagtttgctggcgacggccccctccggcaggcagccgatagaaaccgtcattgaggaatacagcgacgagaggctggtcaaagcgatacgcaatgaggtagagagggggggacaggtcttcttcctccataaccggatcgaaaccctgcgggatacaaggataaaaatcgagcgcctggtgccggagattttggccgagaccgcgcacgggcagatggacgcgcaggaccttgaagacattatgcaccgctttgtgcacggcggctttcacgtgcttgtgtccacgacgataatagagaacggcatagacatccccaatgttaataccattataatagaccgcgccgacaagtacggcgtgtcccagttataccagctccgcggcagggtaggccgcagcgaccgcgtcgcctacgcatacctcctttacccgcagggcggtgagattaccgaactcgccatgaaacgcctccaggtgatctccgattttacggaactgggttccggtttcaagatcgccatgaaggacatggagatacgaggggcgggaaatcttttgggcagagaacaatcgggcgacatttattccgtaggctttgatttatatgtgaaacttttggaagaagccgtaaagcgtcttgaagactccaattacgagtcggaaacagagacccttcttgaacttgaatacacaggctttatccccgactcctacatagattcgccccagcaaaaaatggaagtttacaaaatgatagccgcaatacgcgacaaagaagacttggagcgcgtatactcggaattattggatcgcttcggtccgctgcccgatgaagccgcttctttgcttgctcttgccgaaatcaggattatatgccgccaattaacagtctcggtactgaaagaaagagccggcgttgtgcggatagagttcgccaaggcggcgcgcgtaaatgtagagcgtcttatacgcatgatgcagcaatccgccggcaaggtgaaacttgatccaaagaaagcgaatgtaatcctgcttacaacgggcagtatcggcttgaaagaaaaaagcgaatttatccgcgagaaactgtcgtctctcgcgggctag

SEQ ID NO: 57298 - protein, 424 aa, Unknown
  Obtained from environmental sample
  DOMAIN (113)...(190): Helicase conserved C-terminal domain
  misc_feature (1)..(424): Xaa is any amino acid
MAFRNLGLIVIDEEQRFGVKDKERLKELKTNVDCLTLSATPIPRTLHMSLLKIRDMSLLATAPSGRQPIETVIEEYSDERLVKAIRNEVERGGQVFFLHNRIETLRDTRIKIERLVPEILAETAHGQMDAQDLEDIMHRFVHGGFHVLVSTTIIENGIDIPNVNTIIIDRADKYGVSQLYQLRGRVGRSDRVAYAYLLYPQGGEITELAMKRLQVISDFTELGSGFKIAMKDMEIRGAGNLLGREQSGDIYSVGFDLYVKLLEEAVKRLEDSNYESETETLLELEYTGFIPDSYIDSPQQKMEVYKMIAAIRDKEDLERVYSELLDRFGPLPDEAASLLALAEIRIICRQLTVSVLKERAGVVRIEFAKAARVNVERLIRMMQQSAGKVKLDPKKANVILLTTGSIGLKEKSEFIREKLSSLAG

SEQ ID NO: 57299 - DNA, 1680 bp, Unknown
  Obtained from environmental sample
  misc_feature (1)..(1680): n is a, c, g, or t
atgcgcgaaaaaataatcatattaggcgcctgtgtcatgcaggggccggtaatcagaatagcgaaggaattgggattntacgctattgcgcttgacggcagttcttccgctccgtgtatttccatggcggatcagtttgaacaaatcgatttaaaagataaagaaggaattgaagcctttgcccgttctttacaaaacgcaggcagcaatatcggcataatgacagcgggaacggatttttccgcaagcgtcgcatgggtcgcggaaaatttagggcttccgggtattccctacgaagccgctcttaacgcttcggacaaatcaaggatgcgcgaatgttttaaaaaagcccgacttccttctccggattttattaccattaccgcttcggatttacccttttcatacaactccgaatttcacgctctcagttttcccttagtaataaaacctgttgacaatatgggaagccgcggctgccgccgtgtggacagtatcgaagatttaaacgaagctgcaaaaacagctatcggcttttcacgatccggccgcgcaattctggaaggctatatggaaggaccggaattttctgtagacgcaattgtttaccgcgatgaaatcactatctgcggcctcgcggacagacatatttattttccgccgtattttatcgaaatggggcatacaatgcccacagttattaagaccgaaaaacaggatgttatgcttgaaaccttttgcgcaggggtacgcgctcttggcatcgcgggcggaaaaaatatcggagctgcaaagggagatataaaattaacagttaacgggcctatgataggcgaaatagcggcgcgtctttcaggggggtatatgtcggggtggacatacccctattcatccggcgcgttgccaattaaaggcgctatccttgcggcgatgggacgcaagcctgaaggacttatcccgattaaaaaatggacatgcgccgaaagggcgttcatctccatcccgggaaccgtcaaacaaatagttggcgtagaaaaagccaaaaccgcaaaccacgttaatgactttttcctgcgaatcgcggaaggcgtcaaagtctccttccctgaaaacaacgtgacaaaatgcggcaacatcatcgcctccgcagaaacaagagaaaccgcaatccaagccgcagaaaccgccgcccgctcaatcctaatcaggctagatccgtcggacttggaaacaaaggaatttattttgaattttcctcacgcagaggcgcagaggcgcaaaggggaagataatgtatttcctcctaatgcctttattcttcccgatgaattagtaaccgctctttcgcatattgaagacgattatccttcaaacaacaactccgcgtcctctgcgcctctgcgcctccgcgagaaaaattccctatccattgccccattccccgaatttacctcatcatgtctaaaagactacatgggcagaaccgtggaagaagcccttaacgcagtccgattattatccggttttcccattccagtaagctctgaaaatgccgaaaatatagtaagacttggcagatcattctggagcgcgtttattcgcggctcttatcagggcgcggtctggtacatcgataatttgggagtgaaaattgattcaaaaccattggaaaaaacttaa

SEQ ID NO: 57300 - protein, 559 aa, Unknown
  Obtained from environmental sample
  DOMAIN (105)...(283): Phosphoribosylglycinamide synthetase, ATP-grasp (A) domain
  misc_feature (1)..(559): Xaa is any amino acid
MREKIIILGACVMQGPVIRIAKELGXYAIALDGSSSAPCISMADQFEQIDLKDKEGIEAFARSLQNAGSNIGIMTAGTDFSASVAWVAENLGLPGIPYEAALNASDKSRMRECFKKARLPSPDFITITASDLPFSYNSEFHALSFPLVIKPVDNMGSRGCRRVDSIEDLNEAAKTAIGFSRSGRAILEGYMEGPEFSVDAIVYRDEITICGLADRHIYFPPYFIEMGHTMPTVIKTEKQDVMLETFCAGVRALGIAGGKNIGAAKGDIKLTVNGPMIGEIAARLSGGYMSGWTYPYSSGALPIKGAILAAMGRKPEGLIPIKKWTCAERAFISIPGTVKQIVGVEKAKTANHVNDFFLRIAEGVKVSFPENNVTKCGNIIASAETRETAIQAAETAARSILIRLDPSDLETKEFILNFPHAEAQRRKGEDNVFPPNAFILPDELVTALSHIEDDYPSNNNSASSAPLRLREKNSLSIAPFPEFTSSCLKDYMGRTVEEALNAVRLLSGFPIPVSSENAENIVRLGRSFWSAFIRGSYQGAVWYIDNLGVKIDSKPLEKT

SEQ ID NO: 57301 - DNA, 1788 bp, Unknown
  Obtained from environmental sample
  misc_feature (1)..(1788): n is a, c, g, or t
atgaaactcaaaaattacatattggtgtgcggcggaacagggtgcgagtcgagcaaggccgacgatatataccgtaacttgatgaaagaactcaaagaccaaaacgtcgacggcgaagcgcaggttatcaagacaggctgcttcggcttctgcgagaaggggccgatagtcaagatactgccggacgacagcttttacgtacacgtgaaggccgaggacgccaaagagatcgtcgccgagcacattgtcaaggggcgccaggttcagagactgctctacaagaggagcgacgagaagatacacacgaagatcgaggacatcgacttctaccagaagcaggtgcgcgtggtgctacgcaactgcggctttatcgaccccgagaacataaacgagtacatagcccgcgacggttacgtggcgcttgagaaggtgctcttcgagatgaaacccgacgatgtcatcaaggagcttgaaatctccgggttgcgcggtcgcggcggcgccggattccccacgtggcgcaagtggtcgttctcaaagggcgtcccgggcgatcagaaattcatcgtctgcaacgccgacgagggcgatccgggcgcatacatggaccgcagtacgctggaaggcgacccgcattcggtgcttgaggcgatgaccatcgccgggcatacggtgggcgcgaaccaagggttcatctacatccgcgccgagtacccgctggccatccaccgcctcgagatcgccatcaagcaggccaaggagaacggcctcttgggtaacgacattctcggaagcggtttcaatttcgacatagagataaggctcggcgcgggcgctttcgtctgcggcgaggagacggcgctcttggcctccatcgagggcaagcgcggtatgcccgttccccgcccgccgttcccggcggtcaaggggctttggggcaagcctaccgttatcaacaacgtggagacgtgggcgaacatccccgttattataatgaaaggcggcgcgtggttcgccaagataggtacggagaagtccaagggcacaaaggtattcgccctcaccggcaagataaagaactccggcctgattgaagtgcctatgggtataaccctgcgcgagattatttacgaaatcggcggcggtattccgggcggcaagaaattcaaagccgttcagaccggcggcccctccggcggcgtcatcaccgccgactacttggacacgcccatcgactttgacaacctcgccaagctcggctccatcatgggttccggcggtatgattgtcatggacgaggacgactgcatggtcgacgtgaccaagttctaccttgagttcacggtcgatgagtcgtgcggcaagtgctccccgtgccgtgtcggcgggcgtcagctcttcaaccacttggagaaaatcacaaacggcgagggtacggaagaggacatccgcaagatgcgcctcatcggtaaggccatgcagaaagcgtcgctttgcgctctcggtcagaccgcgcccaaccctgtcgtctccacgctccagtatttcgagagcgagtacatggcccacataaaggagcgcaggtgtccggcgggcaagtgcaaaaagatgctacgcttctccatcgtggccgacaagtgcaaaggttgcggtctttgcgcgaagaagtgtcctgccggctgtatcaaaggcgagataaagaaaccgtacgtgatagactccgccgcgtgcataaagtgcggcgcgtgcgaggaggcgtgtaaattcaaggcagtcgtcaagaactaa

SEQ ID NO: 57302 - protein, 595 aa, Unknown
  Obtained from environmental sample
  DOMAIN (570)...(593): 4Fe-4S binding domain
  misc_feature (1)..(595): Xaa is any amino acid
MKLKNYILVCGGTGCESSKADDIYRNLMKELKDQNVDGEAQVIKTGCFGFCEKGPIVKILPDDSFYVHVKAEDAKEIVAEHIVKGRQVQRLLYKRSDEKIHTKIEDIDFYQKQVRVVLRNCGFIDPENINEYIARDGYVALEKVLFEMKPDDVIKELEISGLRGRGGAGFPTWRKWSFSKGVPGDQKFIVCNADEGDPGAYMDRSTLEGDPHSVLEAMTIAGHTVGANQGFIYIRAEYPLAIHRLEIAIKQAKENGLLGNDILGSGFNFDIEIRLGAGAFVCGEETALLASIEGKRGMPVPRPPFPAVKGLWGKPTVINNVETWANIPVIIMKGGAWFAKIGTEKSKGTKVFALTGKIKNSGLIEVPMGITLREIIYEIGGGIPGGKKFKAVQTGGPSGGVITADYLDTPIDFDNLAKLGSIMGSGGMIVMDEDDCMVDVTKFYLEFTVDESCGKCSPCRVGGRQLFNHLEKITNGEGTEEDIRKMRLIGKAMQKASLCALGQTAPNPVVSTLQYFESEYMAHIKERRCPAGKCKKMLRFSIVADKCKGCGLCAKKCPAGCIKGEIKKPYVIDSAACIKCGACEEACKFKAVVKN

SEQ ID NO: 57303 - DNA, 1035 bp, Unknown
  Obtained from environmental sample
  misc_feature (1)..(1035): n is a, c, g, or t
gtgggccatgtactcgctctcgaaatactggagcgtggagacgacagggttgggcgcggtctgaccgagagcgcaaagcgacgctttctgcatggccttaccgatgaggcgcatcttgcggatgtcctcttccgtaccctcgccgtttgtgattttctccaagtggttgaagagctgacgcccgccgacacggcacggggagcacttgccgcacgactcatcgaccgtgaactcaaggtagaacttggtcacgtcgaccatgcagtcgtcctcgtccatgacaatcataccgccggaacccatgatggagccgagcttggcgaggttgtcaaagtcgatgggcgtgtccaagtagtcggcggtgatgacgccgccggaggggccgccggtctgaacggctttgaatttcttgccgcccggaataccgccgccgatttcgtaaataatctcgcgcagggttatacccataggcacttcaatcaggccggagttctttatcttgccggtgagggcgaatacctttgtgcccttggacttctccgtacctatcttggcgaaccacgcgccgcctttcattataataacggggatgttcgcccacgtctccacgttgttgataacggtaggcttgccccaaagccccttgaccgccgggaacggcgggcggggaacgggcataccgcgcttgccctcgatggaggccaagagcgccgtctcctcgccgcagacgaaagcgcccgcgccgagccttatctctatgtcgaaattgaaaccgcttccgagaatgtcgttacccaagaggccgttctccttggcctgcttgatggcgatctcgaggcggtggatggccagcgggtactcggcgcggatgtagatgaacccttggttcgcgcccaccgtatgcccggcgatggtcatcgcctcaagcaccgaatgcgggtcgccttccagcgtactgcggtccatgtatgcgcccggatcgccctcgtcggcgttgcagacgatgaatttctgatcgcccgggacgccctttga

SEQ ID NO: 57304 - protein, 344 aa, Unknown
  Obtained from environmental sample
  misc_feature (1)..(344): Xaa is any amino acid
MGHVLALEILERGDDRVGRGLTESAKRRFLHGLTDEAHLADVLFRTLAVCDFLQVVEELTPADTARGALAARLIDRELKVELGHVDHAVVLVHDNHTAGTHDGAELGEVVKVDGRVQVVGGDDAAGGAAGLNGFEFLAARNTAADFVNNLAQGYTHRHFNQAGVLYLAGEGEYLCALGLLRTYLGEPRAAFHYNNGDVRPRLHVVDNGRLAPKPLDRRERRAGNGHTALALDGGQERRLLAADESARAEPYLYVEIETASENVVTQEAVLLGLLDGDLEAVDGQRVLGADVDEPLVRAHRMPGDGHRLKHRMRVAFQRTAVHVCARIALVGVADDEFLIARDAL

SEQ ID NO: 57305 - DNA, 885 bp, Unknown
  Obtained from environmental sample
  misc_feature (1)..(885): n is a, c, g, or t
atggataataagatgattaaccttaagataaacggacggcccgtgaccgtgcccgccgggacgacgatcctgcaggccgcccgtcagatagcggtgaacatccccaccctctgctggcatcccgaccttgaggcgtgggcctcctgcgggatatgcattgtgaaagcggagaattcgccgaagatgctgcgcgcctgcgccaccgccgtcgaggaggggatgtccataatcacccacgactcggagatagtggaggtgcgcaaaacggtgatagagctgattctctctacgcaccccaacgactgcctcgcctgcccgcgcaaccaaaactgcgagctgcagaggctggccgccgagttcggcatccgcgacaagaccttcccgcagcgtctacgcgacctgccggaagactcgtcgacgacttcgctggtgctcaacccggagaagtgcatactttgcggacgctgcgccaaagtatgccaaaacctgcaaggcgtgtgggcgcttgagttcctgagccgaggcgagaagacgcgcatagcgcccgccgccgacgtccgcttgaacgacagcccctgcatacggtgcggccagtgctcggcccactgtcccgtgggcgcgatctacgagaagtcggaggagcatatcgtttggaacgcccttcgtaagcccgacatgcacacggtggtgcagatagcccccgccgtccgcgttgccataggcgaggcgttcggcatgccctccggttcggtcgagacgggcaagctctacgcggcgttgcgccagcttggcttcaaggcggtcttcgacaccaacttctccgccgacctcaccatcatggaggaggggagcgagttcgtcgacaggtcacctcggccaatctga

SEQ ID NO: 57306 - protein, 294 aa, Unknown
  Obtained from environmental sample
  DOMAIN (217)...(293): Iron only hydrogenase large subunit, C-terminal domain
  misc_feature (1)..(294): Xaa is any amino acid
MDNKMINLKINGRPVTVPAGTTILQAARQIAVNIPTLCWHPDLEAWASCGICIVKAENSPKMLRACATAVEEGMSIITHDSEIVEVRKTVIELILSTHPNDCLACPRNQNCELQRLAAEFGIRDKTFPQRLRDLPEDSSTTSLVLNPEKCILCGRCAKVCQNLQGVWALEFLSRGEKTRIAPAADVRLNDSPCIRCGQCSAHCPVGAIYEKSEEHIVWNALRKPDMHTVVQIAPAVRVAIGEAFGMPSGSVETGKLYAALRQLGFKAVFDTNFSADLTIMEEGSEFVDRSPRPI

SEQ ID NO: 57307 - DNA, 909 bp, Unknown
  Obtained from environmental sample
  misc_feature (1)..(909): n is a, c, g, or t
atgaaaatcaaatttaaactgagtattttaattatcgccattgtagtggttattgtaacgggagtcgccgtactgcttttacggcaggcgtccagcatagcccttgatctttccaaacagaaaaccatgtatctggcgcgtcagaacgcacagtactgggacggtcgtatgagcggctatatagacgtactgcaaacactgtcgaatataatgaacttttatgaaaatcttccggcagaggaacggcggcagacatacgaagacacaatgatgtctgtttttgaggatatgcctgattttatcagaatgtttaccgtatggagacctgacgccattgacggtatggatgaaaaaaatatagacagaataggctcaaccaccaccggacagttcgcctatgccctggcaagagacaccggagagataaagcctttaaccgctgtagttgttgatgaagtaatggctcacattaccggacctaacgccaaagtagtccaaatgagcgatccctctccatttaagaatatgggaaaagatacttttgccgtcagaattgtagtccctattctcaataagcgcctcaatgaaacagtcggagctataggctgtcagttggatattagcatgatacaacccagaatagagcaaactatcgaagatttcgatgaagttacctctatggttatttactccgacaacgggtttgttttgggaaattacctgccggaatttataggaaagcaaattgacacggaaacacaatacggtccttatttagaagaagtcaaagatgttattaaaaacgcgcaggaatggcaagggacagcttacgaccccgaattgaaaacaaacatggtaatggcagtagccaatattcccataggagtttcccgacaacatggtcggtaa

SEQ ID NO: 57308 - protein, 302 aa, Unknown
  Obtained from environmental sample
  SIGNAL (1)...(23)
  misc_feature (1)..(302): Xaa is any amino acid
MKIKFKLSILIIAIVVVIVTGVAVLLLRQASSIALDLSKQKTMYLARQNAQYWDGRMSGYIDVLQTLSNIMNFYENLPAEERRQTYEDTMMSVFEDMPDFIRMFTVWRPDAIDGMDEKNIDRIGSTTTGQFAYALARDTGEIKPLTAVVVDEVMAHITGPNAKVVQMSDPSPFKNMGKDTFAVRIVVPILNKRLNETVGAIGCQLDISMIQPRIEQTIEDFDEVTSMVIYSDNGFVLGNYLPEFIGKQIDTETQYGPYLEEVKDVIKNAQEWQGTAYDPELKTNMVMAVANIPIGVSRQHGR

SEQ ID NO: 57309 - DNA, 690 bp, Unknown
  Obtained from environmental sample
  misc_feature (1)..(690): n is a, c, g, or t
atgaaaaaaacagcttttttagcgttgattttttacgctattgccgccaacggatatgcgggcgacagcgacggtatttatacgctgaaagtcggtcaatatgaagtatacatattggtagaatccgaaagagacggaaatacgggaattttggtcggagcggacgaggcggttataaagcgttacattccggcggaaggttttaagcacaccgcaaacgctgttttaatcaaagccccaaagcagaatattttgatagataccggaacgggagcgggcggtattattgtagagaaaataaaaaaactgggcgtacagcctgaaaatgttgacgctgttcttcttacccacctgcacggagaccatttcggcagtctgcaaaaagacggagcggcggttttttcaaaagcgaaagtttacctttccgccaaagaactggagtattttacaaagactcaagttaatcagggagcggtcgccgcccttgccccgtatggttcaagggttactgtatttgaaccgggcgaacttggtaaaagattgaaagaaatagttccgggaatttctccaatcgccgcttacggacacactcccgggcatacattgtttttaatagaaaacggcagagacaaacttctgataataggcgaccttttacatatagcgttggtgcaatttcccngtccctga

SEQ ID NO: 57310 - protein, 229 aa, Unknown
  Obtained from environmental sample
  SIGNAL (1)...(20)
  DOMAIN (71)...(223): Metallo-beta-lactamase superfamily
  misc_feature (1)..(229): Xaa is any amino acid
MKKTAFLALIFYAIAANGYAGDSDGIYTLKVGQYEVYILVESERDGNTGILVGADEAVIKRYIPAEGFKHTANAVLIKAPKQNILIDTGTGAGGIIVEKIKKLGVQPENVDAVLLTHLHGDHFGSLQKDGAAVFSKAKVYLSAKELEYFTKTQVNQGAVAALAPYGSRVTVFEPGELGKRLKEIVPGISPIAAYGHTPGHTLFLIENGRDKLLIIGDLLHIALVQFPXP

SEQ ID NO: 57311 - DNA, 720 bp, Unknown
  Obtained from environmental sample
  misc_feature (1)..(720): n is a, c, g, or t
atgttctacgagcacgactttcaggcgtttgtgactaaaccgattgacgtaatggagatggacgcggtcttaaaaaaatgggtgcatgacagaaaccgtgaagccaacgcctccgacgcgctttccatgatcgaagaagaagaaaaagaaatatcaatagagatacccggagtggatacgaaaaaagggcttgccctgtatgtaggcgataccagcatttatctgccccttctgcgttcgtacgttaccaacacaccgataacattggaaaaacttaaagctgtttctgcggaaaatttaccaaattatgtgatttccgtacacgggttaaaagggacgagcgcgggtgttggcgcggaagagatacgggtacaggcttttgaactggaaactctgtccagagcgggcgacttaaagggtgttctagctaaaaacgacaaacttatagcagatacggaagtcattgtcgccaatattaaagagtggctggataaaaatgacattcatgaagcaaaaccgcgcctgaaagctcccgacaaggatctgctggcgcaactgcgggaatattgcgagaactacgatatggacggtatagaagaaatcatgtacaagttggagagcgccgattatgaagaggatgcggagttaataaaatggataagggaaatggttgacatatccagaatggcagaggttgtaaagcgtttagcggaattatga

SEQ ID NO: 57312 - protein, 239 aa, Unknown
  Obtained from environmental sample
  DOMAIN (76)...(151): Hpt domain
  misc_feature (1)..(239): Xaa is any amino acid
MFYEHDFQAFVTKPIDVMEMDAVLKKWVHDRNREANASDALSMIEEEEKEISIEIPGVDTKKGLALYVGDTSIYLPLLRSYVTNTPITLEKLKAVSAENLPNYVISVHGLKGTSAGVGAEEIRVQAFELETLSRAGDLKGVLAKNDKLIADTEVIVANIKEWLDKNDIHEAKPRLKAPDKDLLAQLREYCENYDMDGIEEIMYKLESADYEEDAELIKWIREMVDISRMAEVVKRLAEL

SEQ ID NO: 57313 - DNA, 351 bp, Unknown
  Obtained from environmental sample
  misc_feature (1)..(351): n is a, c, g, or t
atgtcagtggaatccatagcagaaacacttttagagaagctaaagagcatagctcaaaccgaaactgtggttggccagcctatacactcaggagaatcgaccataattcccgttagccgaatatccgtgggtatgggcatgggcgggcataccggcaaaggcgacacagcctccagcggtggcgggttccgcatagaaccggtggcatttttggtgctcaaaggcgatgatgtccgcgttttgccaatagagaaagcgcagtccgttctctccaaaatcgtagatctcactcctgatgtagtggctgccctcttaaaaaatgtcccaaaaaaatccgaaaaagaaacttga

SEQ ID NO: 57314 - protein, 116 aa, Unknown
  Obtained from environmental sample
  misc_feature (1)..(116): Xaa is any amino acid
MSVESIAETLLEKLKSIAQTETVVGQPIHSGESTIIPVSRISVGMGMGGHTGKGDTASSGGGFRIEPVAFLVLKGDDVRVLPIEKAQSVLSKIVDLTPDVVAALLKNVPKKSEKET

SEQ ID NO: 57315 - DNA, 789 bp, Unknown
  Obtained from environmental sample
  misc_feature (1)..(789): n is a, c, g, or t
ttgttatcagtggtcgcggcagtgaagacgatattattgtatagcattgcgttgctcgtttccatctcctttgctcaaaattcaaatctgcaacgtggagatatgcattacgagcttcgtgctaaagatgcaagcggcaatatggcaaaggataaaaacataaaagaggcaataaaatactaccgccaggcacttacggatccaaaaacaaaagaaacagcagcctggaaattattgagggcttattattttttgggttgctttaccaagttggatttcaatgatatgcaaaacatttttgaaaaagcaaaaaacgaaggcaagaatttttttaaggtatatccaaaaaatgccgagatagcttattggtattccgttaatttagctctgtgggcaaacgtggtaaacccgcttgtggtgctgagcgcagggagcatacaagagaccagggatatagcaaacatgttgattgcgcaggagagcagcaacgtagaagcggctgcttatggttacaggatactcggaaggatgcaccaaaaattgcctcatgtggcttttattttgaactgggtgaataaggattcttcggaaatttatttccaaaaatccctagagctgaacccaaaagatttgggaacccatctctttttggcagaacattatgttgagagaggcaaaaagcaaaaagcagaggaattgttgcggcctataattaaaaccaagcctcgcgaggaggaattcttggaagacgagaggaatttgataagaatgcgggatttgctgaaataa

SEQ ID NO: 57316 - protein, 262 aa, Unknown
  Obtained from environmental sample
  SIGNAL (1)...(25)
  misc_feature (1)..(262): Xaa is any amino acid
MLSVVAAVKTILLYSIALLVSISFAQNSNLQRGDMHYELRAKDASGNMAKDKNIKEAIKYYRQALTDPKTKETAAWKLLRAYYFLGCFTKLDFNDMQNIFEKAKNEGKNFFKVYPKNAEIAYWYSVNLALWANVVNPLVVLSAGSIQETRDIANMLIAQESSNVEAAAYGYRILGRMHQKLPHVAFILNWVNKDSSEIYFQKSLELNPKDLGTHLFLAEHYVERGKKQKAEELLRPIIKTKPREEEFLEDERNLIRMRDLLK

SEQ ID NO: 57317 - DNA, 450 bp, Unknown
  Obtained from environmental sample
  misc_feature (1)..(450): n is a, c, g, or t
ttggtttatacggatattgaaacaggggaaaatgtgcgcggttcggtacagccgggcgaattttttggggtaaagtccgcgctgggacactttccccgcgaagaaaacgccatcgttatggcgaataataccgtcgtagtggcttttaccgttcccgaatttgaagcgctggcaatgtcaaataccaggattattttgaaaatgctcaaagtgttttccaatcaactgcggcgggtacacgcgcaagtcgcaagccttacaaaatcggaaagcgtcgaaccggaagaagggctttttgcccttggtaacaaatacttaaaaaacaagcgttacgcccatgcacagtatgtttttagccgctatcttatccattatccgacaagcgctaacgcgaagcaggcggaaaagaatcttcaacttgcggaaaccgctcttgcgaagggaaggtaa

SEQ ID NO: 57318 - protein, 149 aa, Unknown
  Obtained from environmental sample
  misc_feature (1)..(149): Xaa is any amino acid
MVYTDIETGENVRGSVQPGEFFGVKSALGHFPREENAIVMANNTVVVAFTVPEFEALAMSNTRIILKMLKVFSNQLRRVHAQVASLTKSESVEPEEGLFALGNKYLKNKRYAHAQYVFSRYLIHYPTSANAKQAEKNLQLAETALAKGR

SEQ ID NO: 57319 - DNA, 642 bp, Unknown
  Obtained from environmental sample
  misc_feature (1)..(642): n is a, c, g, or t
atggatctggacatgacggcatttgcccgcttttcgcgtgtttttaagcctggtgaaattattttttccgagtatgagccgggagacaccttttaccttatccagtcgggaaaggtaaaactgacgcaaaataccggagaaattgaacgtactctggatatccttcagccgtcggaaatgtttggcgagatggcaatattggaaaatctgccgcgttccgcctccgcgatagccgtagatgaagtcacggtaattgaattaaacgcgcagaattttgaaatccttatgctgggcaacccgcaaattgccctgaaactgctgcggattttctcaaagcggatttatgactcaaaacggcgggtcatgatccttaccctgaaagatccgcaggcaaaagtcgccgatgtgttcctgatgcttgacgaaaccagcgccaatgttgacaaaaacggcgatagacgggaatttcagacgaccgttgaggacattgcccactgggctggattgagtattaatcaaaccaatgaaattatgtcgcgctttgtcgcccagcgccggatggaaatatttcccaagaacatcgtgattaaaaacattaatgactttatccgctatgtcggcgcgcggcgcaggcgggtttaa

SEQ ID NO: 57320 - protein, 213 aa, Unknown
  Obtained from environmental sample
  DOMAIN (12)...(101): Cyclic nucleotide-binding domain
  misc_feature (1)..(213): Xaa is any amino acid
MDLDMTAFARFSRVFKPGEIIFSEYEPGDTFYLIQSGKVKLTQNTGEIERTLDILQPSEMFGEMAILENLPRSASAIAVDEVTVIELNAQNFEILMLGNPQIALKLLRIFSKRIYDSKRRVMILTLKDPQAKVADVFLMLDETSANVDKNGDRREFQTTVEDIAHWAGLSINQTNEIMSRFVAQRRMEIFPKNIVIKNINDFIRYVGARRRRV

SEQ ID NO: 57321 - DNA, 456 bp, Unknown
  Obtained from environmental sample
  misc_feature (1)..(456): n is a, c, g, or t
ttgggcatgggcgacgtggtcagcctggtggaaaaagcccaggaagttattgatcagaaagaagccctggaactccagaaaaaaatggagaaggaaaactttacccttgaggactggctgagtcagctccgctcggtaaagaaaatgggttccctgcaatcaatgctggaaatgattcccggtatgcagggccagataagcgaagaagatattgacaaggcggatctcaagcggcaggaagcgattatatcttcaatgacccgcaaggaacgcgccaatcatctgataatcggtccgccccgccgcagccgcattgcccgcggttcaggcacttcggtagcggaagtcgcccgccttataaagaaatttgaaaagatgcgcggcatgatgaaaaaaatggcaaagtacggaaagaatcccaacaactttatgcaggcaatgcagggaagaatttaa

SEQ ID NO: 57322 - protein, 151 aa, Unknown
  Obtained from environmental sample
  DOMAIN (33)...(130): Signal peptide binding domain
  misc_feature (1)..(151): Xaa is any amino acid
MGMGDVVSLVEKAQEVIDQKEALELQKKMEKENFTLEDWLSQLRSVKKMGSLQSMLEMIPGMQGQISEEDIDKADLKRQEAIISSMTRKERANHLIIGPPRRSRIARGSGTSVAEVARLIKKFEKMRGMMKKMAKYGKNPNNFMQAMQGRI

SEQ ID NO: 57323 - DNA, 426 bp, Unknown
  Obtained from environmental sample
  misc_feature (1)..(426): n is a, c, g, or t
ttgcagggaacccattttctttaccgagcggagctgactcagccagtcctcaagggtaaagttttccttctccatttttttctggagttccagggcttctttctgatcaataacttcctgggctttttccaccaggctgaccacgtcgcccatgcccaaaatgcggcccgcaatacgctcanggtagaacggctcanaatcttcgggcttttccccggttcccgtanacttcagcggcttgccggtgatggtttaagggagagggcggctcccccgcgggtatcgctgtcgaacttggtaagcaccaccccggtaaggccgattttctcgtcaaaggccttggcaatgtccacggcggactggccggtcatggcgtccgccaccaacagaagctcgtcgggttttgccgcctccttgagccgctga

SEQ ID NO: 57324 - protein, 141 aa, Unknown
  Obtained from environmental sample
  misc_feature (1)..(141): Xaa is any amino acid
MQGTHFLYRAELTQPVLKGKVFLLHFFLEFQGFFLINNFLGFFHQADHVAHAQNAARNTLXVERLXIFGLFPGSRXLQRLAGDGLRERAAPPRVSLSNLVSTTPVRPIFSSKALAMSTADWPVMASATNRSSSGFAASLSR

SEQ ID NO: 57325 - DNA, 729 bp, Unknown
  Obtained from environmental sample
  misc_feature (1)..(729): n is a, c, g, or t
atggccctccttgaggcggatgtaaacctcagggttgtccgccgtttcgtaaattccacaatagaagaagccaagggcgaaaaagttctgcgctcggtggacccgggccagcagttcgtcaaaatcgtccatgacaagctcgtctcttttttgggggacacggaaaagggccctaccggccgttccgcccaggaattgcagcttaaggggccggatactgtttcggttatcctcatgctggggcttcagggttcaggaaagaccaccagttcggccaaactggccctcaggctcaaaaaagagggccgaaagccccttcttgcggcctgcgatctcatacggcccgcggcggtcgagcagctttcggtactggcgggccagactggggtaccggtttataaagaggaagaggcaactgacaccgttaaggtattcaggggggcaatggactgggcgaagaagaacctcatcgacaccctgattgtagacaccaccggccgcctggaactcgacgaacacatgatggcggaacttcagcggctcaaggaggcggcaaaacccgacgagcttctgttggtggcggacgccatgaccggccagtccgccgtggacattgccaaggcctttgacgagaaaatcggccttaccggggtggtgcttaccaagttcgacagcgatacccgcgggggagccgccctctcccttaaaccatcaccggcaagccgctga

SEQ ID NO: 57326 - protein, 242 aa, Unknown
  Obtained from environmental sample
  DOMAIN (1)...(52): SRP54-type protein, helical bundle domain
  misc_feature (1)..(242): Xaa is any amino acid
MALLEADVNLRVVRRFVNSTIEEAKGEKVLRSVDPGQQFVKIVHDKLVSFLGDTEKGPTGRSAQELQLKGPDTVSVILMLGLQGSGKTTSSAKLALRLKKEGRKPLLAACDLIRPAAVEQLSVLAGQTGVPVYKEEEATDTVKVFRGAMDWAKKNLIDTLIVDTTGRLELDEHMMAELQRLKEAAKPDELLLVADAMTGQSAVDIAKAFDEKIGLTGVVLTKFDSDTRGGAALSLKPSPASR

SEQ ID NO: 57327 - DNA, 1176 bp, Unknown
  Obtained from environmental sample
  misc_feature (1)..(1176): n is a, c, g, or t
atgacattatgcagtataaataatagaggagaaaaaatggacttacaggaactgcgaaaaaaaattgatgaagttgacgatgatcttgtccgcttgtttcagcagcgtatggatgtttccgccgaaatagcccgatataaaaaagaaaataatctgcccgtgcatgatcccgcgcgtgaacgtgaaaaattatataagctgtcttttaaaacagacaccggaagagaatcatatattgttgcgttatacgccctgctttttgagttaagccgcgccgatcaggaacggattttaaatcaaacctgtgagcttacagatcgaatccagcaaagcatccgggatacggaatggatgtttccgtcgcggacagttatcgcctgtcagggaacggaaggctcatactcccagcttgctgcggaaaaattgtttgatcttccgagcatcatgtactgcagcacttttgaaagtgttttttcaacgattgatcacggactgtgccaatacggactattgccgcttgaaaacagcacggcaggttctatcaatcaggtgtacgatttaatgatgcgctatccgtacagcattgtgcgcagcgtcaggttaaaaatcgatcacagccttcttgcgaaaaaaggcgtgaaaatttccgatattaaagaagttttttcccacgaacaggcaatcgcccagtgcgcgggttatcttaaatcactgaactgcaagataacggcctgcgaaaatacggcaatagccgcaaagatggtaggtgaatccgacagaacagatgtggcggctctttcttccgcaaaatgcgcggccctgtacgatctgcaccgcctggccgattcggtgcaggatcgcggcagtaactttacgcgttttatctgcgtttcaaaatcgctcgccatttatccgggagcggacaagaccagtcttatgatgaccattccgaacaaaccgggttctctttaccatgttctgtcccgtttttatatacacgggattaaccttataaaactggaaagccgccctattcccgacagcgattttgagtttatgttttattttgatcttgaaacgtcggtttattcaaagaaattcagccagcttatgtgcgagctggaaaatttgtgcgaagaattccattatctcggaagttacacagagattgtttga

SEQ ID NO: 57328 - protein, 391 aa, Unknown
  Obtained from environmental sample
  DOMAIN (19)...(97): Chorismate mutase type II
  misc_feature (1)..(391): Xaa is any amino acid
MTLCSINNRGEKMDLQELRKKIDEVDDDLVRLFQQRMDVSAEIARYKKENNLPVHDPAREREKLYKLSFKTDTGRESYIVALYALLFELSRADQERILNQTCELTDRIQQSIRDTEWMFPSRTVIACQGTEGSYSQLAAEKLFDLPSIMYCSTFESVFSTIDHGLCQYGLLPLENSTAGSINQVYDLMMRYPYSIVRSVRLKIDHSLLAKKGVKISDIKEVFSHEQAIAQCAGYLKSLNCKITACENTAIAAKMVGESDRTDVAALSSAKCAALYDLHRLADSVQDRGSNFTRFICVSKSLAIYPGADKTSLMMTIPNKPGSLYHVLSRFYIHGINLIKLESRPIPDSDFEFMFYFDLETSVYSKKFSQLMCELENLCEEFHYLGSYTEIV

SEQ ID NO: 57329 - DNA, 396 bp, Unknown
  Obtained from environmental sample
  misc_feature (1)..(396): n is a, c, g, or t
atggcaaagatgagcttagaggaactgagaaacctgcgggacgccaaaaagaacgatctgcagaagcggggcaccgaaggcaaggaaatccatgtcatcgtaggaatgggaacctgcggtatcgccgccggggcaaagcaaaccctggacgcgtttgtaaccgggctgacggaaaacaaacttgataacagcgtgatcgtgcggcaaacaggctgcatggggatgtgccactccgagccgaccgttgaggttatcgctcccggtatgcctaccgtcatctatggaaacgtggatacttctgtcgtaaaagagattatccaaaaacatattatcggcaaggaactcctgagtggccgcattctggatcgtcccgctggtgacattgttaaaacataa

SEQ ID NO: 57330 - protein, 131 aa, Unknown
  Obtained from environmental sample
  misc_feature (1)..(131): Xaa is any amino acid
MAKMSLEELRNLRDAKKNDLQKRGTEGKEIHVIVGMGTCGIAAGAKQTLDAFVTGLTENKLDNSVIVRQTGCMGMCHSEPTVEVIAPGMPTVIYGNVDTSVVKEIIQKHIIGKELLSGRILDRPAGDIVKT

SEQ ID NO: 57331 - DNA, 657 bp, Unknown
  Obtained from environmental sample
  misc_feature (1)..(657): n is a, c, g, or t
atggcttataaaaactttattctgacctgcggtggtactgcctgtgaatccaacaaggggaatgaaattcacgaccaactcattgccgaggcggaaaagcagggtgttaagtctgaggttcagattgttaaaacaggctgtttcgggttttgcgagatggggccaatcgtcaaagtcctgccggatgaatcattctatgtattggtgaagcctgaggacgcgaaggagatcattgccgagcacatcatcaagggccgcgaggttaaacgacttctctataaagatgaaggccatacaaaacagtctgactccgtagaggacatccagttctatcagaagcaattcagggtggtgcttcgcaactgcggctttatcgatcctgnaagcattgatgaatacattgcccgcgaaggctacaaaggccttgagaaagtcctgtttgaatggaatcaggagcagattatcgcggaagtgagacttccggtctgcgcggacgcggcggcgccggtttccccacttggctcaagtgggaccttgcccgcaaagcccagggcgatgttaaatacgttatctgcaatgccgatgaaggcgaccccggcgcgtatatggaccgctccactgttgaaggcgatccccactcggttatcgagggcatga

SEQ ID NO: 57332 - protein, 218 aa, Unknown
  Obtained from environmental sample
  misc_feature (1)..(218): Xaa is any amino acid
MAYKNFILTCGGTACESNKGNEIHDQLIAEAEKQGVKSEVQIVKTGCFGFCEMGPIVKVLPDESFYVLVKPEDAKEIIAEHIIKGREVKRLLYKDEGHTKQSDSVEDIQFYQKQFRVVLRNCGFIDPXSIDEYIAREGYKGLEKVLFEWNQEQIIAEVRLPVCADAAAPVSPLGSSGTLPAKPRAMLNTLSAMPMKATPARIWTAPLLKAIPTRLSRA

SEQ ID NO: 57333 - DNA, 1362 bp, Unknown
  Obtained from environmental sample
  misc_feature (1)..(1362): n is a, c, g, or t
atggaatcaggagcagattatcgcggaagtgagacttccggtctgcgcggacgcggcggcgccggtttccccacttggctcaagtgggaccttgcccgcaaagcccagggcgatgttaaatacgttatctgcaatgccgatgaaggcgaccccggcgcgtatatggaccgctccactgttgaaggcgatccccactcggttatcgagggcatgatcaccgccggcaaggctatcggcgcaaaccagggttttgtttacatccgcgccgagtatccgctggctattgaacggctgaaaatcgccctgaaacaggcgcaggactacggcctgctggggaaaaacatcctcggttcgggctttgattttgatatcgaaattcgtctgggcgcgggggcctttgtctgcggcgaagaaaccgcgttgatcaaatccgttgagggtaaccggggaatgcccgtgccgaaaccgcccttcccggcaaacaagggtctgtggcaaaaaccgaccatcatcaacaatgttgaaacctttgcgaatatcccggtgattaccgccaagggcggggcctggcttgccaaactgggaaccgaaaaatccaagggaaccaaagtcttcgccctgaccggcaaggtaaaaaattccggcctggtggaagttccgatgggaactaccctgcgtgagatcatctttgaaatcggcgggggcataaagaacggaaaaaaattcaagggcgtacagaccggcggaccttccggcggtattcttaccgagaagtcgcttgacctggccattgactttgacacgcttaccgccaacggctccatgatgggttccggcggcatgatcgtcatggacgaggacgactgcgtggtagacgtggcgcggttctacatggatttctgcgttgacgagtcttgcggcaaatgctccccgtgccgaatcggtacttcgcaggttcttcacatattagagaagattgccgccggtaacggtgaagaggaagaccttgaaagccttgaagtcattggcaaggctatggccaaggcgtccctctgcgctttgggccagaccgcgcccaatccgacgctttccactgtaaagaattttaaagaagagtatctggaacatatccgcgacaagaagtgccgttctggcaagtgcaagaaactgatacgtttcttaatcgatccggaaaaatgtatcggctgcggtgcttgctcgaaaaaatgcccggctgcttgcattacacagattcagggaaccgataaaaagcggccgccttaccggatcgaacatgaggattgcttgaagtgcggcgaatgcttcaagacctgtaaattcaacgccatatccaagggctag

SEQ ID NO: 57334 - protein, 453 aa, Unknown
  Obtained from environmental sample
  DOMAIN (428)...(451): 4Fe-4S binding domain
  misc_feature (1)..(453): Xaa is any amino acid
MESGADYRGSETSGLRGRGGAGFPTWLKWDLARKAQGDVKYVICNADEGDPGAYMDRSTVEGDPHSVIEGMITAGKAIGANQGFVYIRAEYPLAIERLKIALKQAQDYGLLGKNILGSGFDFDIEIRLGAGAFVCGEETALIKSVEGNRGMPVPKPPFPANKGLWQKPTIINNVETFANIPVITAKGGAWLAKLGTEKSKGTKVFALTGKVKNSGLVEVPMGTTLREIIFEIGGGIKNGKKFKGVQTGGPSGGILTEKSLDLAIDFDTLTANGSMMGSGGMIVMDEDDCVVDVARFYMDFCVDESCGKCSPCRIGTSQVLHILEKIAAGNGEEEDLESLEVIGKAMAKASLCALGQTAPNPTLSTVKNFKEEYLEHIRDKKCRSGKCKKLIRFLIDPEKCIGCGACSKKCPAACITQIQGTDKKRPPYRIEHEDCLKCGECFKTCKFNAISKG

SEQ ID NO: 57335 - DNA, 957 bp, Unknown
  Obtained from environmental sample
  misc_feature (1)..(957): n is a, c, g, or t
gtgaagaacctgcgaagtaccgattcggcacggggagcatttgccgcaagactcgtcaacgcagaaatccatgtagaaccgcgccacgtctaccacgcagtcgtcctcgtccatgacgatcatgccgccggaacccatcatggagccgttggcggtaagcgtgtcaaagtcaatggccaggtcaagcgacttctcggtaagaataccgccggaaggtccgccggtctgtacgcccttgaatttttttccgttctttatgcccccgccgatttcaaagatgatctcacgcagggtagttcccatcggaacttccaccaggccggaattttttaccttgccggtcagggcgaagactttggttcccttggatttttcggttcccagtttggcaagccaggccccgcccttggcggtaatcaccgggatattcgcaaaggtttcaacattgttgatgatggtcggtttttgccacagacccttgtttgccgggaagggcggtttcggcacgggcattccccggttaccctcaacggatttgatcaacgcggtttcttcgccgcagacaaaggcccccgcgcccagacgaatttcgatatcaaaatcaaagcccgaaccgaggatgtttttccccagcaggccgtagtcctgcgcctgtttcagggcgattttcagccgttcaatagccagcggatactcggcgcggatgtaaacaaaaccctggtttgcgccgatagccttgccggcggtgatcatgccctcgataaccgagtggggatcgccttcaacagtggagcggtccatatacgcgccggggtcgccttcatcggcattgcagataacgtatttaacatcgccctgggctttgcgggcaaggtcccacttgagccaagtggggaaaccggcgccgccgcgtccgcgcagaccggaagtctcacttccgcgataatctgctcctga

SEQ ID NO: 57336 - protein, 318 aa, Unknown
  Obtained from environmental sample
  misc_feature (1)..(318): Xaa is any amino acid
MKNLRSTDSARGAFAARLVNAEIHVEPRHVYHAVVLVHDDHAAGTHHGAVGGKRVKVNGQVKRLLGKNTAGRSAGLYALEFFSVLYAPADFKDDLTQGSSHRNFHQAGIFYLAGQGEDFGSLGFFGSQFGKPGPALGGNHRDIRKGFNIVDDGRFLPQTLVCREGRFRHGHSPVTLNGFDQRGFFAADKGPRAQTNFDIKIKARTEDVFPQQAVVLRLFQGDFQPFNSQRILGADVNKTLVCADSLAGGDHALDNRVGIAFNSGAVHIRAGVAFIGIADNVFNIALGFAGKVPLEPSGETGAAASAQTGSLTSAIICS

SEQ ID NO: 57337 - DNA, 1074 bp, Unknown
  Obtained from environmental sample
  misc_feature (1)..(1074): n is a, c, g, or t
atggtaaacattaagataaacggaatccctcttcaagttgaggaagaaaccaccgttctggaagccgccagaaaagtgaacattaaaattcccacgctttgctacaacccggatctgcccgcctgggcatcctgcggtctttgcatagtcagaaccgcaggtgccggttctccgcgcatggcaagggcctgctcaactccggtggctgaaaacatggatataattacccacgatccggagatcattgccacgcggcgggtagtcctggaactgatcatgtccaatcacccctctgactgcctgcagtgcccgcggaacggaaactgcgaactgcaaaccctggcagccgaattcggcatcagggagctgccctttaaacatatttcaaacgggcttcccattgacgattcaaacccggcaatcgtgctgaacccggaaaaatgcatccgctgcggccgctgtgtaagggtctgtcaggatgtgcaaaatgtctgggccattgaattccttggccgcggcataaagggccgcatcgcgagcgcggctgacgcctctcttggcgaaagcccgtgtatcaagtgcggccagtgcgccgcccattgccctgtcggggccatttacgaaagggacgacaccgttaaggtctgggccgcattgcagaatcccgattgccacccggtggtgcagattgccccggcggtgcgggtcgccctggcggaagaattcggcctggaacccggaacggtttttaccaaaaaaatctacgctgctttaaggcgtctgggctttaaaactgtttttgacactaacttctcagccgaccttaccatcatggaagaaggcacggagcttgtgaaacgccttacggaaaagaaaagcgacattccgcttattaccagttgctgcccggcctgggttgactatatggaaaaatattacgcggatatgataccaaatttctcaaccgccaagagtccccagcagatgatgggcgcaatgatcaaggcttattgggcgggaaaagctgccgtagaccctgagnaaaatctttctcgtgccgatctgtcatggtaa

SEQ ID NO: 57338 - protein, 357 aa, Unknown
  Obtained from environmental sample
  DOMAIN (4)...(70): 2Fe-2S iron-sulfur cluster binding domain
  misc_feature (1)..(357): Xaa is any amino acid
MVNIKINGIPLQVEEETTVLEAARKVNIKIPTLCYNPDLPAWASCGLCIVRTAGAGSPRMARACSTPVAENMDIITHDPEIIATRRVVLELIMSNHPSDCLQCPRNGNCELQTLAAEFGIRELPFKHISNGLPIDDSNPAIVLNPEKCIRCGRCVRVCQDVQNVWAIEFLGRGIKGRIASAADASLGESPCIKCGQCAAHCPVGAIYERDDTVKVWAALQNPDCHPVVQIAPAVRVALAEEFGLEPGTVFTKKIYAALRRLGFKTVFDTNFSADLTIMEEGTELVKRLTEKKSDIPLITSCCPAWVDYMEKYYADMIPNFSTAKSPQQMMGAMIKAYWAGKAAVDPEXNLSRADLSW

SEQ ID NO: 57339 - DNA, 1341 bp, Unknown
  Obtained from environmental sample
  misc_feature (1)..(1341): n is a, c, g, or t
atggagcagtgcgtcatggttaatatttattttggggaaaaatgtattgcgctcttaaaactggcccttaaatatctaaaccgttataaacgccgttatagttttctattcatcgctcttgtttttggttttttcgtagtaacatttattacttctacaaaagacggaatgtacaacaatgtgtactattcggcgcagtcgcattatgcgggagatataacagcggtcggctatgatgaaagtactgatatacaacacatggaagaaaaagaaatttcggtaattattaatacagcggattccataaaattggaacctgaacataccgtattacgtactctttttggagatcacggcgttgtatatttcaacggtaatgccgtacagttaaaatatgttgttggatgcgattgggaaacagaagaacatttattttccaaaatggattttgtcgctacgccggataaaaaatatggagaagacggtattatcctgtcagaacctgtagctcgcaagcttggcgccgcaatgggggacagtattataatagaagtttatacgcgcaaacggcaaaagaatacaggcgtatttattgtaaggggtatagttaaggattcatcaatttttggatattttaaggtatatgtttccagattaacccttaaccgtttgttactttttgatgataacgattgttctgttattgggttctttcttgataaacctgccgacgctgaaaagtacagaaagaaacttcaggcggttttggaagaacgtctgctgtgcggaccgctggtttataacagagacgaattttcaagggtacaatgggatccttggtcggggttaaaagtatttttattaacaatgcccgtgtatctgtcggaaatatccgatttattggatgctatgaatgtgctgacttattttttatatattatgatgttgttaataatttttgtcagcgcggctgtaacatacaggctgatacttcacgagagggcgagggagatgggcattatgagggctataggtttttacggaggcgatttaaggcttgttttgtggacagaggttatagctcttggaataatatccctgtgcgcgggttttgtactcgctctccttttaagcggcttgtcttcgtttatatctttttcatggtttcccagttttgaaatattccagaaaaacggtaaattatccgttctgtatctgccaaaaacggttttacttaatgtggctcttgtatttgtcgtgcttattttcgccgcgtttttcccgtccttaaaagcttcaaaaagaaatttaccggcgttattatcaggagaagccttatga

SEQ ID NO: 57340 - protein, 446 aa, Unknown
  Obtained from environmental sample
  DOMAIN (232)...(437): Predicted permease
  misc_feature (1)..(446): Xaa is any amino acid
MEQCVMVNIYFGEKCIALLKLALKYLNRYKRRYSFLFIALVFGFFVVTFITSTKDGMYNNVYYSAQSHYAGDITAVGYDESTDIQHMEEKEISVIINTADSIKLEPEHTVLRTLFGDHGVVYFNGNAVQLKYVVGCDWETEEHLFSKMDFVATPDKKYGEDGIILSEPVARKLGAAMGDSIIIEVYTRKRQKNTGVFIVRGIVKDSSIFGYFKVYVSRLTLNRLLLFDDNDCSVIGFFLDKPADAEKYRKKLQAVLEERLLCGPLVYNRDEFSRVQWDPWSGLKVFLLTMPVYLSEISDLLDAMNVLTYFLYIMMLLIIFVSAAVTYRLILHERAREMGIMRAIGFYGGDLRLVLWTEVIALGIISLCAGFVLALLLSGLSSFISFSWFPSFEIFQKNGKLSVLYLPKTVLLNVALVFVVLIFAAFFPSLKASKRNLPALLSGEAL

SEQ ID NO: 57341 - DNA, 1368 bp, Unknown
  Obtained from environmental sample
  misc_feature (1)..(1368): n is a, c, g, or t
gtgnagaacgaaattattccgcgccgccacgaggatttgcgcgggataccggctttatgccacgatcttttcacaaacggaattacatatattgatttagctttccccatggactttttatcggaagacgactatttgtggctgccgtttttttcaaaggcggtaggttccgtcggtcttcccggcatggattacggcgaagtgtcaagtttgcttgcgcggacagtcggcggttttcacgcgatactgcacacaggggctgccgttccgggttcggacaacttcagaaaaaccgcgtctggtcttattgacttggccggacgcgacttgctcatttttaatttaaagtgcctggacgaaaaaatatcgccgtctttggatcttgccctgcgtttgatcagcgagacggatttttctgatcatgaccgtataaccgaccttgttttggaaatgaaaaccgaattttcttccggtcttgcgcctacggggcattcgttcgccgccaccagggcgggaagcggcaattctataaacagaagaacaaatgaaatatggggcgggatttcccagcttgagtttgtccaccgccttgccgggtatgacgctgcgacagtcgcctccaaactaaaatatatactggaaaaaattacaggcgcggggttaatcgctaacattacaggccttgcccataaaaccgcgggagaggaaatttcgcaaaggttcgcaaggttcggcgccccgaaaccgcgtcccgccttgtcccgcgctccggcggctttggaaaaagccgaagtattcgcttcttcctccctgcaaattggttttgcggcgcgggcaatgaaatcggcggctttttacactaaagaagagatggaggaaatattattggcccaccagctttcaacaggaacgttttgggaggatattcgcatgaagggcggagcttacggcgcgtttgcgcaaagcgacagccttaataactgtgttgctttcgcgacataccgcgaccccaaccccctgcgctctcttgaaacattttccgcgatactgaataacagcgcgtacggagaatgtgatgaagacgcgcttgtaaaaaacatcatcgggtgttatgcgaaagagatatacccgaagacaagccaattaaaagggcagatggattttgcccgctttctgttaggtttagatgaaaattaccggaaaaacaggatagagcgccttgtttcaatttccaccgcggatatcaaagcggctttttccgcgatgggaaagagagacgtgacgggctcggtaattatagccgggacaaaagccgcggaacaggcggcaaaagcgcttggaacagacgtacaagtactgccggtgtaa

SEQ ID NO: 57342 - protein, 455 aa, Unknown
  Obtained from environmental sample
  DOMAIN (1)...(197): Peptidase M16C associated
  misc_feature (1)..(455): Xaa is any amino acid
MXNEIIPRRHEDLRGIPALCHDLFTNGITYIDLAFPMDFLSEDDYLWLPFFSKAVGSVGLPGMDYGEVSSLLARTVGGFHAILHTGAAVPGSDNFRKTASGLIDLAGRDLLIFNLKCLDEKISPSLDLALRLISETDFSDHDRITDLVLEMKTEFSSGLAPTGHSFAATRAGSGNSINRRTNEIWGGISQLEFVHRLAGYDAATVASKLKYILEKITGAGLIANITGLAHKTAGEEISQRFARFGAPKPRPALSRAPAALEKAEVFASSSLQIGFAARAMKSAAFYTKEEMEEILLAHQLSTGTFWEDIRMKGGAYGAFAQSDSLNNCVAFATYRDPNPLRSLETFSAILNNSAYGECDEDALVKNIIGCYAKEIYPKTSQLKGQMDFARFLLGLDENYRKNRIERLVSISTADIKAAFSAMGKRDVTGSVIIAGTKAAEQAAKALGTDVQVLPV

SEQ ID NO: 57343 - DNA, 756 bp, Unknown
  Obtained from environmental sample
  misc_feature (1)..(756): n is a, c, g, or t
atgaaggtaacagcgggagcttattccgataaaggccgccgtcatcacaacgaggacgcttttctttgcgctctgtataccggaaccggcattgaagaaggcggcgcggagttttcaggcgttgttgacgcgccgcttttcttccttgtcgccgacggcatgggcggccatgatgcgggggacgccgccagcgcttttgtggcggaaaatatgcgcaatgcggcgcaggcggcggcaaacgaggagcgcgtttttaacgaagcttctattgaagatctggtaaaatctattcatgccgctttattaaaagaaggaaaagaaaaaggaacgccgaacatgggctccaccttgacgggcattttacttcaaagagacgctccctgcgcttttttcaacgcgggagacagccgggtctaccgtttacggaacggttttcttcagcagttaagcaaagacgattcgctttccgaaattatgccgggcgcggcaaaaaacataatcacaaacgctgtcggagcgggattgaaagagatatcagtcgcgagccgtttttcgcaatctgtcgcggttgcgggagacatattcctgatgtgcagcgacggcgttcacggttttgtaaaagatgatgatcttgaaaagtttcttgccggaacatttcttccgttggaaatcgcaaaatgtattgtgcaagccgcaatcgcgaataattctgatgataattgtaccgctgtgatggtcaagctggatggggagtag

SEQ ID NO: 57344 - protein, 251 aa, Unknown
  Obtained from environmental sample
  DOMAIN (42)...(249): Stage II sporulation protein E (SpoIIE)
  misc_feature (1)..(251): Xaa is any amino acid
MKVTAGAYSDKGRRHHNEDAFLCALYTGTGIEEGGAEFSGVVDAPLFFLVADGMGGHDAGDAASAFVAENMRNAAQAAANEERVFNEASIEDLVKSIHAALLKEGKEKGTPNMGSTLTGILLQRDAPCAFFNAGDSRVYRLRNGFLQQLSKDDSLSEIMPGAAKNIITNAVGAGLKEISVASRFSQSVAVAGDIFLMCSDGVHGFVKDDDLEKFLAGTFLPLEIAKCIVQAAIANNSDDNCTAVMVKLDGE

SEQ ID NO: 57345 - DNA, 591 bp, Unknown
  Obtained from environmental sample
  misc_feature (1)..(591): n is a, c, g, or t
ttgaacctcaaccgagaccaaggggcgaaggttcccctcttgaactgtccgaataaaatttgcaaacaggaaataccggaagattcgtgtttctgcgaccagtgcggcgttcatttactgcgctgtgacaaatgcggctttatcggcacaagcaaattctgcggaagctgcggcggttcaatgtccgccatcctgccgccggacgcgggtacctcttcatcttctacgccaacgccggtcaaagaagcgccgcctgccgttcctccatccgcggcgacagtaattgtttcgcttccttcggaaaaaattcttctatgccaccttgacggctggaacatggaaatttcggacggcaatattcttggcagaacaaacggcccgcacgcggcttcgctcggcaagttccctgtgatctcgtcaaatcacgcgaaagttacgaaggtaaataacgaatggtttatcacggatttaaattccacaaataaaacttatgttaacggcgtaaaactggagcctaatgttcctgtaaaaataaatcagaatgacgttgttattctcgccaatattacttntacggtgaaacttgcatga

SEQ ID NO: 57346 - protein, 196 aa, Unknown
  Obtained from environmental sample
  DOMAIN (119)...(187): FHA domain
  misc_feature (1)..(196): Xaa is any amino acid
MNLNRDQGAKVPLLNCPNKICKQEIPEDSCFCDQCGVHLLRCDKCGFIGTSKFCGSCGGSMSAILPPDAGTSSSSTPTPVKEAPPAVPPSAATVIVSLPSEKILLCHLDGWNMEISDGNILGRTNGPHAASLGKFPVISSNHAKVTKVNNEWFITDLNSTNKTYVNGVKLEPNVPVKINQNDVVILANITXTVKLA

SEQ ID NO: 57347 - DNA, 978 bp, Unknown
  Obtained from environmental sample
  misc_feature (1)..(978): n is a, c, g, or t
atgcgtaatcttcttgacgatacaatacgccggatgcctgaacgcctcgcctctcttacgcaggcggagcgcactgtcgacgccttgtctacaattacggaagctgacttcccgtcagagaaaaaagaggagcgttctgtcaacgatattctcgcggaacttgacgcgatgataggcatgacggacatcaaaagaaccgtccgcgaaattgcaaataaaattcaaatacaaaaagaacaggaagaaaaagacgggacaaagagcgcgggggagggcaacaacattgtcattaccggcaatcccggtaccggcaagacgaccattgtccgcacattgggcgcgttgtttaaaaccatcggccttcttaaaactgaaacggttattgaggtaaacggcaatgatttaaaaggctcttatcttgggcaatcgaaggacaaagtcaacgaaaagtgcgatgaagctatgggcggcatcctttttgttgatgaggcctatgtgttagccgacacccagcgcggcggagcggcagaccagtacgcaagagaggcggttgaaattcttatgacccgtttggaaaatgacaggacaaaatttgtcggcgtagtcgccggctatgaaaaagagatgcaaattttccttgatacggtaaatcccggaatgaggcggcgttttaagcattacctcagcttgagcgattacagcgcggaagaacttttcgcgatcttcagttccatggtgaaaaaagcgggttataccctggcgccggatgcgggcgaagccgcaaaagccgccattaccggcatgtacaataacaaggggccgaatctcggcaacgcgggagaaatcagggtgttctttgaaaagaccacaagcaggctggcgaccagacttgctgcgctctccaaagaagaacgctccgacaagttgaaaacaattgaagcctgcgacattcccggaaaagaaggaggcgcctcttga

SEQ ID NO: 57348 - protein, 325 aa, Unknown
  Obtained from environmental sample
  DOMAIN (94)...(278): ATPase family associated with various cellular activities (AAA)
  misc_feature (1)..(325): Xaa is any amino acid
MRNLLDDTIRRMPERLASLTQAERTVDALSTITEADFPSEKKEERSVNDILAELDAMIGMTDIKRTVREIANKIQIQKEQEEKDGTKSAGEGNNIVITGNPGTGKTTIVRTLGALFKTIGLLKTETVIEVNGNDLKGSYLGQSKDKVNEKCDEAMGGILFVDEAYVLADTQRGGAADQYAREAVEILMTRLENDRTKFVGVVAGYEKEMQIFLDTVNPGMRRRFKHYLSLSDYSAEELFAIFSSMVKKAGYTLAPDAGEAAKAAITGMYNNKGPNLGNAGEIRVFFEKTTSRLATRLAALSKEERSDKLKTIEACDIPGKEGGAS

SEQ ID NO: 57349 - DNA, 1224 bp, Unknown
  Obtained from environmental sample
  misc_feature (1)..(1224): n is a, c, g, or t
ttgggactggctattaccaaaaatctggtacagatgatggaagggcaattgggcgtagaaagcgaaaaaggcaaaggctcaacattcagcttccgtataaggcagggttttgtaaacgatttgattattggagtggaggtcgcggaaaaattacgcagtttcagctataccgacaacaagcgtatcattacgcaaaaacttataagggtcaatttaagctacgccagagtgcttgtagtagacgatatgaaaaccaatctggacgtagcttccggcatcctgcgcaaatacaaaatgcaggttgatcttctggacaacggaccggcggcgattgaaaggataaaagcgggaactcccatttacgacgtaatattcatggaccacatgatgcccggaatggacggcatagaagcggcggacaaaatccgcgcgttaggaacggaatacgcaaaaaaaattccaattatcgcccttaccgcgaacgccatacagggaaccgacaagatgttcttcgcgcacaatttccaggcgtttgtaacaaagcccattgatgtaatggagatggacacaattctcaaaaaatgggtgtatgacaaaaaccgcgataaagcttccggctcgccaattattgaagatacagaagaaaataaaatagagatatatatacctggagtgaacactagaaaagggcttaccctgtacggcggcgatatgggtatttatctgcctcttcttcgctcgtatattacaaacacgccgaatactattgaaaaactgaaaaatgtcacggcgggaaacctgccgggctatgttattgccgtacacgggctaaaaggcaccagcgcgggcataggggcggatcaaatacgggcggcggctttggaactggaaaacatatccagaaccggaaacttgcagggcgtattggcgaaaaatgacaaactcatcgccgatactaaaatcatcgtcagcggtataaaagagtggctggataaaaacgacattcacgaggcgaaacccaggcttaaagccccggataaggaacttttgaaacggctgagggaatactgtgaaaatttcgatattgacggcattgaagaagtcatgtcggaactggaaaaagccgactacgaagaagacgccgatttggtaaaatggatacgggaaaaaatcgacatatccaaaatgggcgaagtcgcacagcggctgggtgaaacggcctag

SEQ ID NO: 57350 - protein, 407 aa, Unknown
  Obtained from environmental sample
  DOMAIN (243)...(318): Hpt domain
  misc_feature (1)..(407): Xaa is any amino acid
MGLAITKNLVQMMEGQLGVESEKGKGSTFSFRIRQGFVNDLIIGVEVAEKLRSFSYTDNKRIITQKLIRVNLSYARVLVVDDMKTNLDVASGILRKYKMQVDLLDNGPAAIERIKAGTPIYDVIFMDHMMPGMDGIEAADKIRALGTEYAKKIPIIALTANAIQGTDKMFFAHNFQAFVTKPIDVMEMDTILKKWVYDKNRDKASGSPIIEDTEENKIEIYIPGVNTRKGLTLYGGDMGIYLPLLRSYITNTPNTIEKLKNVTAGNLPGYVIAVHGLKGTSAGIGADQIRAAALELENISRTGNLQGVLAKNDKLIADTKIIVSGIKEWLDKNDIHEAKPRLKAPDKELLKRLREYCENFDIDGIEEVMSELEKADYEEDADLVKWIREKIDISKMGEVAQRLGETA

SEQ ID NO: 57351 - DNA, 372 bp, Unknown
  Obtained from environmental sample
  misc_feature (1)..(372): n is a, c, g, or t
gtggccggtaatcgaaaaaaaattgtcgtggtagacgacaaccctgaaaacctgaacgcgctcaaaattaccctgaaagaaagctatatggtatatccaaacccctcagcccaggatatgtttgagttattggagcatatacggccggacttaatcctcctggatgtgcaaatgcccggaatgaacgggtatgaagccataaaaaaacttaaaggcagcgaagaacacaaggaaatacccgttatcttcctgacttccatgagcggcgaagaagatgaaaaagagggtttgcggcttggggcagtcgattatatccaaaaaccatttgtaacaccggtattgcttgaacggataaaaaagcatctactataa

SEQ ID NO: 57352 - protein, 123 aa, Unknown
  Obtained from environmental sample
  DOMAIN (6)...(119): Response regulator receiver domain
  misc_feature (1)..(123): Xaa is any amino acid
MAGNRKKIVVVDDNPENLNALKITLKESYMVYPNPSAQDMFELLEHIRPDLILLDVQMPGMNGYEAIKKLKGSEEHKEIPVIFLTSMSGEEDEKEGLRLGAVDYIQKPFVTPVLLERIKKHLL

SEQ ID NO: 57353 - DNA, 369 bp, Unknown
  Obtained from environmental sample
  misc_feature (1)..(369): n is a, c, g, or t
atgaccggtaatcgaagaaaaatcgtcgtggtagacgaacaccctgaaattctgggttccctcaagaatgtcctgaaggacctatacatggtatatccaaacccctcggctcaggatatgtttgagttattggaacatgtcaaacctgacttaattctgctggatgtggaaatgccggaaatgaacgggtatgacgccataaagaagctgaaaagcagcgaaaaattcagggaaatacccgttatcttcctgacgagtatgagcggcgaagaaactaaaatggtaggctttctgcttagcgccgccgattatatctcaaaaccatttgtaacgacggatttgcttgagcggataaaaaagcatctataa

SEQ ID NO: 57354 - protein, 122 aa, Unknown
  Obtained from environmental sample
  DOMAIN (6)...(119): Response regulator receiver domain
  misc_feature (1)..(122): Xaa is any amino acid
MTGNRRKIVVVDEHPEILGSLKNVLKDLYMVYPNPSAQDMFELLEHVKPDLILLDVEMPEMNGYDAIKKLKSSEKFREIPVIFLTSMSGEETKMVGFLLSAADYISKPFVTTDLLERIKKHL

SEQ ID NO: 57355 - DNA, 543 bp, Unknown
  Obtained from environmental sample
  misc_feature (1)..(543): n is a, c, g, or t
ttgcaaatggccggcgatcgaagaaaaaaaattgtcgtggtagacgatagccatgaaaacctgaattccataaagaataccctgcaggacatatacatggtatatccaagcccctccgcgcaggatatgtttgaattactggaacatgtcaagccggaattaatcatactggacgtgaaaatgccgggtatgaacgggtatgagaccatcaaaaagctgaaaagcagcgacaaattcagggaaatacccgttatcttcctgacaagtatggacgacacgcaaagtgaaatgaaaggcttacagcttggcgccgttgattatatccacaagccctttgaaaccccgctgctgctccagcggataaaaacgcagctttccatggtggaacatcaatgggaaattatggatctgcttgaagtaaaaatgcaggaggtgaaactgcgcgaaatggcggaacaggcggcgcaggaagcgtcccacgccaagactaacttcctttcccgcatgagccatgaaataagatcccccttaaacgcgttatag

SEQ ID NO: 57356 - protein, 180 aa, Unknown
  Obtained from environmental sample
  DOMAIN (9)...(122): Response regulator receiver domain
  misc_feature (1)..(180): Xaa is any amino acid
MQMAGDRRKKIVVVDDSHENLNSIKNTLQDIYMVYPSPSAQDMFELLEHVKPELIILDVKMPGMNGYETIKKLKSSDKFREIPVIFLTSMDDTQSEMKGLQLGAVDYIHKPFETPLLLQRIKTQLSMVEHQWEIMDLLEVKMQEVKLREMAEQAAQEASHAKTNFLSRMSHEIRSPLNAL

SEQ ID NO: 57357 - DNA, 591 bp, Unknown
  Obtained from environmental sample
  misc_feature (1)..(591): n is a, c, g, or t
gtggcgctggcggtaaaccaggtaagcagcatgaggcaggtcattctgaaaactttgccgtctttcatggaaaaaatggaagttttttcgggagtggtattaagcgaagactatgaaatgatccccgcgcttcacattcccacggtaatcaggatggcgcggcgcacaaaaaccatagacatgaaaaaacgccatgttgattatgaacgcatgcgcaaatccatccttgttgtggatgattcaaaaccgacgcgcgacatagagcgcgatattcttgaggcagaaggctataaagtggatgtcgccacggatggttccgaagcgcttgcggcggcgaaaaacacccagtacgatttaatttgcaccgatatttttatgccgaatatggacggctttatgctgactgacaacatccgcaaaaatgaccgtttaaaagacattcccattatcgcaatctcgtccaagagcgacgagaaagaccaaaacagggcggcgtccctgggaataaaccgctatatcgtaaaaagcgcgtttaacgatcatgatttgatatccgccgttaaagaattaatcggagaagccaatggataa

SEQ ID NO: 57358 - protein, 196 aa, Unknown
  Obtained from environmental sample
  DOMAIN (73)...(188): Response regulator receiver domain
  misc_feature (1)..(196): Xaa is any amino acid
MALAVNQVSSMRQVILKTLPSFMEKMEVFSGVVLSEDYEMIPALHIPTVIRMARRTKTIDMKKRHVDYERMRKSILVVDDSKPTRDIERDILEAEGYKVDVATDGSEALAAAKNTQYDLICTDIFMPNMDGFMLTDNIRKNDRLKDIPIIAISSKSDEKDQNRAASLGINRYIVKSAFNDHDLISAVKELIGEANG

SEQ ID NO: 57359 - DNA, 1263 bp, Unknown
  Obtained from environmental sample
  misc_feature (1)..(1263): n is a, c, g, or t
ttgctccaagcgatgaaaatcctaaaatcctttgtgcgagaattcgcagttcccattgccacggcgcttgtggtgatattttttgccatacaagcctatagaattccaagcggttcaatggaaaacaccctttatgagggggattttcttttaggattaaaatttgtttatggtattccaattccattttcgtacagcaaaataccaatttccgagccagatgtaggtgaaattgtgatattccgttaccctggtgaacctgaatatccggattacgataccaaacgctatgctcatattgcaaatgccttgatgctaggcaactttttttgggacaaagaagcaccagagggaagcccaaaattaatccactacgcagacggcccaaaagattatataaaaagatgcgtagcaaaaagcgggcagcgtgttgcggttaaaggtggcaagctgtttttgaatggagtggagcaacacttgcgaggtcttgggaaatatacggaaaggaacagagaaaacacgccaagggattatttaaaagaaataaaagttccagttccagacgagaccataatttttgataccctttccactcacgacctttggtggattcgctcgcttatggttcaagaaatgccagatagccttgttgagttcaatataattttaaccaaaaacgggcaaagattgcaaaattatacttttgagaattttcgcgtgccaatagaaaaccacaagtatttgctactaaacacgctttttagccggaataaaataatcccgcaaaatttgagaatgggagataccataatcggtactatggatttggattttttcagcaaatatgcccgcacaggatttttaactcgctataatcccaatatgttgcaaaaaagcattttcggcagccgtcttgttggctacgatgcctttgacggttcgcaactagaagacttggaagttaatgtagctcttgaggatagtttggagttgaagtggcaaataacagtgaatggaaaacctgttaatcaatacacagtaaaagaccaagtttattttatgatgggcgataaccgcgacaattccgcagacggtcgctattgggggtttgtcagcgcaaggaatataaaagccaaagcctttataatatattttagcttagacaaagaatccagagttgaattgctaaaaccttggacttgggttttcttgccagccgacatccgctggggtcgcatagctaggattatacattttatataa

SEQ ID NO: 57360 - protein, 420 aa, Unknown
  Obtained from environmental sample
  DOMAIN (34)...(156): Peptidase S24-like
  misc_feature (1)..(420): Xaa is any amino acid
MLQAMKILKSFVREFAVPIATALVVIFFAIQAYRIPSGSMENTLYEGDFLLGLKFVYGIPIPFSYSKIPISEPDVGEIVIFRYPGEPEYPDYDTKRYAHIANALMLGNFFWDKEAPEGSPKLIHYADGPKDYIKRCVAKSGQRVAVKGGKLFLNGVEQHLRGLGKYTERNRENTPRDYLKEIKVPVPDETIIFDTLSTHDLWWIRSLMVQEMPDSLVEFNIILTKNGQRLQNYTFENFRVPIENHKYLLLNTLFSRNKIIPQNLRMGDTIIGTMDLDFFSKYARTGFLTRYNPNMLQKSIFGSRLVGYDAFDGSQLEDLEVNVALEDSLELKWQITVNGKPVNQYTVKDQVYFMMGDNRDNSADGRYWGFVSARNIKAKAFIIYFSLDKESRVELLKPWTWVFLPADIRWGRIARIIHFI

SEQ ID NO: 57361 - DNA, 591 bp, Unknown
  Obtained from environmental sample
  misc_feature (1)..(591): n is a, c, g, or t
ttgtcttcttcgctcatcaaaagagatttcctctccgcacccatccaaagcttatcacgagcctcttcaaagtctaactgcgtaaccgttggatttccaaatctggctgccataagagccgcttcgttcacaagattttccaaatctgcgccagcaagccccggcgttccttttgcaacgtcttttacattaacttctttgtctagcggaactttgcgtttttccagatgcactctcaaaattgcctcgcgccccaccaaatctggaagtcccacaacaacctgcctgtcaaagcgaccaggtctgagcaatgctttatccaaaacatcggggcggtttgtggctgcaactaaaataacaccttcatttggagcaaagccatccatttcaacaagcaattggttcaaagtctgctcacgctcatcgtgcccgccgccaagccctgcgccgcgttgcctgccaactgcatcaatttcatctataaataaaatgcaaggtgcattcttttttcccgtttcaaacaaatccctaactcggcttgcgccaacgcccacaaacatctcaacaaaatccgaaccgctcatgctgtaa

SEQ ID NO: 57362 - protein, 196 aa, Unknown
  Obtained from environmental sample
  misc_feature (1)..(196): Xaa is any amino acid
MSSSLIKRDFLSAPIQSLSRASSKSNCVTVGFPNLAAIRAASFTRFSKSAPASPGVPFATSFTLTSLSSGTLRFSRCTLKIASRPTKSGSPTTTCLSKRPGLSNALSKTSGRFVAATKITPSFGAKPSISTSNWFKVCSRSSCPPPSPAPRCLPTASISSINKMQGAFFFPVSNKSLTRLAPTPTNISTKSEPLML

SEQ ID NO: 57363 - DNA, 513 bp, Unknown
  Obtained from environmental sample
  misc_feature (1)..(513): n is a, c, g, or t
gtgcttatctgccgagaagagcttgccgaaaacccgaataacttggaatcgcacgttgttatgtgctggtcgttaatacggctgaaccgtttggaagaggcaatgcgctatgcccgcgccggaagagcgttgtaccgctttgacgtaagaataacccagataatgggagaaataagttactatcagggaaggaatgacgaggcgctgcaatatttacaggaatacgccagcatggctccggaagggcagagaattgatcaagtttattatttgatgggagagatatttatccgtcagggaaaattccgtcatgccgacatcgccctttcaactgccgttcactgggttccgaataatgcggcatggtgggtcagacttgcctacacaagggaaaacgctaaagattatagtagcgcgatagaagcttacgaacgagcgctttctcttaattcccaactgtccgacgccaagcggggaattgaacgaatcaggcagttaatgaatcctcagtaa

SEQ ID NO: 57364 - protein, 170 aa, Unknown
  Obtained from environmental sample
  DOMAIN (120)...(153): Tetratricopeptide repeat
  misc_feature (1)..(170): Xaa is any amino acid
MLICREELAENPNNLESHVVMCWSLIRLNRLEEAMRYARAGRALYRFDVRITQIMGEISYYQGRNDEALQYLQEYASMAPEGQRIDQVYYLMGEIFIRQGKFRHADIALSTAVHWVPNNAAWWVRLAYTRENAKDYSSAIEAYERALSLNSQLSDAKRGIERIRQLMNPQ

SEQ ID NO: 57365 - DNA, 1362 bp, Unknown
  Obtained from environmental sample
  misc_feature (1)..(1362): n is a, c, g, or t
ttgcttttgatgccgtcctttttaactttaacattaggctgtaaactcaaccaactggaaagcgaagcgataaccgacgcttttctgcgggcgggctttgaacaggcgcaaaaagcgccctcggtagttattgttaatacctgcactgtaacgtcaaaggcggatcaaaaagcgagacgggttataagaaaagcgttacgcgattatccaaagagtaaagttcttgttacgggctgttacgctcagttaaacagcgaagatttgttaaagttagacgacggtaaaaaaaagcggctgtttgtaattaaaaaagacagtattatcgatctgcctgattattacaatgggaatgaacaaatagaaagcatattggaaaaattttcaaggagaccgcaggcaaaaacgggggagcggttttttcaatttaacccgcaggttttttcagatcatacaagaagttttttaaagattcaggatgggtgtaacaaccattgtacctactgcagaattcgtctggcgcgcggcgcgagtatcagtcttgacgcggacgaggtattgtcgcgtttacggatactggagaaaaatcacgcggaagccgtgcttacgggcgtaaatatcagtcagtaccgcgatgaaaaaaaagcggctaaccttgcgcggcttttggatcatcttttaaaaggaacggaaaaaatcgccctgcgcttatccagtcttgcgcccgataaaattgatgaggagctttcaggcgttttatccgataaacggatacgccctcattttcatttatcgattcaatcgtgcagtaaaaaaatacttgaaaaaatgggacgctcctacgacggtaaaatcatcgaagacgctgtttctcttttgcgccgcgcaaaagatgatccgttccttgcctgcgatattatcacaggcttccccggggaaacagaaacggagtttaaagaaacttttgaaatgtgcaaaanaatggacttcgcatggatacatgtatttccgtattcaaaaagaccgggaaccgccgccttttcattccccgatatgttacatgaaaccgaagttacaaaacgggtagggcttttaacagaccttgcgcagcggggcagagcggactatgtccggcgccggcttggcaaagaagttgacgtgctggtagaaaaaggcggcggaaaatcctgccgcggagtttcggaaaattacctgaaaacgcttatccgttacaagggagaccagccgtcgcccggagaggttttaaggtgcgaattgctggaaaaacctgacgctgaaaaaaacgaagattatgacgccatagctgtttttggaggtaagggaattcgaatccctgacttctag

SEQ ID NO: 57366 - protein, 453 aa, Unknown
  Obtained from environmental sample
  DOMAIN (11)...(94): Uncharacterized protein family UPF0004
  misc_feature (1)..(453): Xaa is any amino acid
MLLMPSFLTLTLGCKLNQLESEAITDAFLRAGFEQAQKAPSVVIVNTCTVTSKADQKARRVIRKALRDYPKSKVLVTGCYAQLNSEDLLKLDDGKKKRLFVIKKDSIIDLPDYYNGNEQIESILEKFSRRPQAKTGERFFQFNPQVFSDHTRSFLKIQDGCNNHCTYCRIRLARGASISLDADEVLSRLRILEKNHAEAVLTGVNISQYRDEKKAANLARLLDHLLKGTEKIALRLSSLAPDKIDEELSGVLSDKRIRPHFHLSIQSCSKKILEKMGRSYDGKIIEDAVSLLRRAKDDPFLACDIITGFPGETETEFKETFEMCKXMDFAWIHVFPYSKRPGTAAFSFPDMLHETEVTKRVGLLTDLAQRGRADYVRRRLGKEVDVLVEKGGGKSCRGVSENYLKTLIRYKGDQPSPGEVLRCELLEKPDAEKNEDYDAIAVFGGKGIRIPDF

SEQ ID NO: 57367 - DNA, 519 bp, Unknown
  Obtained from environmental sample
  misc_feature (1)..(519): n is a, c, g, or t
ttggggtatagtcttaataggctaaaagtgaattttataattcggtatattcttaaacggcttctcttgcttgcgccggttctccttgtggtgtcggcattgattttctttcttatccgctttactccctccgacccaatcggctctatcacaagcggacggaggatcagcgacgaaacgcgggcgtcccttataaccaagtaccatttggacaagagccttccgcagcagtactttatctggatcagtaacgcggtaaagggagacatgggagacagtttcagacacggtcagcctgtggggtttctcctcgcggaaaggcttccggttactattcaacttgtttttatgagcgctatcttcgctatccttttggctgttcccgcgggaattatcagcgctgttaaaaagcatacggtaattgatcgcgctatttcggcttttatgattttctgcgtgtcctcgcctgtttttttaaacgctanttttattaatgttgatttttgttttaaaacttaa

SEQ ID NO: 57368 - protein, 172 aa, Unknown
  Obtained from environmental sample
  misc_feature (1)..(172): Xaa is any amino acid
MGYSLNRLKVNFIIRYILKRLLLLAPVLLVVSALIFFLIRFTPSDPIGSITSGRRISDETRASLITKYHLDKSLPQQYFIWISNAVKGDMGDSFRHGQPVGFLLAERLPVTIQLVFMSAIFAILLAVPAGIISAVKKHTVIDRAISAFMIFCVSSPVFLNAXFINVDFCFKT

SEQ ID NO: 57369 - DNA, 804 bp, Unknown
  Obtained from environmental sample
  misc_feature (1)..(804): n is a, c, g, or t
ttgactgaaattttgtataattatattatgttgagtcttgtcgcacctgttaaaaacgcattctataatctgggtttttttgccagaactttaaaaggaaccgccaattttatccgttattcacgggcttcttttaaaattcttattatgcagatactttttaccttcgtttacgctatggggataacaacccttcttgctctggctatcggagcggctgtaaatattatcggaacaccgtttcttaccaaaataaaccagcagcagttaatttacacccttttgattataattataacaagggaattaggtccgcttttaacggcttttattgttatcgcccgttcggcgaccgctatcgctacggaaatagcgggaatggttatttctcatgaagttgaggcttatatttcaatcggagtagacccaattgaacatctggcggttccgaggtttctgggtgttaccatttcacttgtattgatgaatatttatttttccgttttcgggcttgcgggttcatatattatttccaagattttcagctcgacgcctacgtctatggattactactttacaaatctgttacagcatttgggtatcagtgatgttcttctttcattaataaaaagcgtcgtcttcggagcgatcatatctatcggcgctgtaattgaggggttttcggtggaaagggcgagcaccgaagttcctgttgcgggtttacgggctgtcagcggcgcttttgcgctgtgtatagtcgtagacgtaattatctcaggcttattttatgttgtgttggcatga

SEQ ID NO: 57370 - protein, 267 aa, Unknown
  Obtained from environmental sample
  DOMAIN (17)...(263): Domain of unknown function DUF140
  misc_feature (1)..(267): Xaa is any amino acid
MTEILYNYIMLSLVAPVKNAFYNLGFFARTLKGTANFIRYSRASFKILIMQILFTFVYAMGITTLLALAIGAAVNIIGTPFLTKINQQQLIYTLLIIIITRELGPLLTAFIVIARSATAIATEIAGMVISHEVEAYISIGVDPIEHLAVPRFLGVTISLVLMNIYFSVFGLAGSYIISKIFSSTPTSMDYYFTNLLQHLGISDVLLSLIKSVVFGAIISIGAVIEGFSVERASTEVPVAGLRAVSGAFALCIVVDVIISGLFYVVLA

SEQ ID NO: 57371 - DNA, 672 bp, Unknown
  Obtained from environmental sample
  misc_feature (1)..(672): n is a, c, g, or t
atgcgtaaccgcggattatttcttttttgggcgtttgtcttgctcttttcctgcaatccttccggcagagaaataaatatacaggaagacccgtcgtacaaaaaaatacaagagtcttatgacacagacagattaaaggaaattctccaatcagccagagagagcattttccgagtttggaatgagggcaaggagccgcctttgcccgcgcttggtgaaaacgaaggtttggctgtccgccttattgttgacggaaaagaccgaggatgtctcgcatggtatatgcgatcaggcgatatgaatctctttgccgcattctgcgccgctcaagccctaaacgacccccgttacgagccgcttcgtcatgaagaggcggaaaatactcttgtagaactgcttatattcggcgactggcaggaaatgtctaaacctacggactttattcccggttaccacaatctttggatttataacgatcataatataattctttcgaaatccgacaacactattcttcaagcgtcgctggctgtgcaaagaaactatacaaaaaaagagtttctggaaaaaatctgcgttaaagcggggttggacaaagacgcatggaagaaagacaaaaaacttgtttggcgtcgaagtcccgctgtttggattacagagcctctgcaataa

SEQ ID NO: 57372 - protein, 223 aa, Unknown
  Obtained from environmental sample
  SIGNAL (1)...(23)
  DOMAIN (43)...(221): AMMECR1
  misc_feature (1)..(223): Xaa is any amino acid
MRNRGLFLFWAFVLLFSCNPSGREINIQEDPSYKKIQESYDTDRLKEILQSARESIFRVWNEGKEPPLPALGENEGLAVRLIVDGKDRGCLAWYMRSGDMNLFAAFCAAQALNDPRYEPLRHEEAENTLVELLIFGDWQEMSKPTDFIPGYHNLWIYNDHNIILSKSDNTILQASLAVQRNYTKKEFLEKICVKAGLDKDAWKKDKKLVWRRSPAVWITEPLQ

SEQ ID NO: 57373 - DNA, 1206 bp, Unknown
  Obtained from environmental sample
  misc_feature (1)..(1206): n is a, c, g, or t
atgaaggatcgccgtcctcccgtagggtggcgtttgttcggtcagcgttatacattggacagcgaaatacatcattacgtttcgcctccaagatttattattcctaatatacgccaagaagatcagcggcacatggtaaaaggtttggatatcatgaaagttttcggatcaaaaacagcggacaggctcttaaaagaaagcgattatccaaagtacgcgggtttggaaagagtaatgaattcattacagcagaatatgacgagtataaaagacgattattggttttcgacatattatacaaatattttgtaccagataaaaacacaggcgctttttgaaaacggaacgggtttttattttacggaaaaacccgcatggaatttaaaagctatgaactcagcccacggaacatgggcggaacttaggcatgatacaatactttccgtgaaacaaaattactccgaagcgacagggggaagttcaaagacattcagaacaaaaccgcttccgaaacctattcactatatcgaaccgaacgtaccattctggaatgcttccgctgtgggaattcagaagctgtatagaatattggaaaaatacgattttctggacggaagttcagcttatgttttggcaagtatgcatggaatttttgtaaaagcggcggaaatttccaaattggaagccgatgacaaagaagtatccgcgaaagaccttgaatggatcgctactattcctaaacaactggcaaaacttgtagtcgctttattatcaggcggatgggtagacaatgaagattcacttcgcatggcgttggtagcggatgtatttaccgccacagaacaaaacttggttcttgagtccgctgttggtattccataccgcctttatatccccttgaatgacaagcagggcggaaagcgaatagcggtaggttacggtttcagctattacgaattcactcaacccatctcgaacaggcttaataacgaacagtggaaagccgttgtgtacgctgataattttgacatgaaaaaatatcagcccttttggatgcagggaaaagtcagccgtgcgaagtangttctcgggttaagcgtactttctaaccacgaactacacgaaagagagaagaaatttaccacgaaccacacgaaccaccaggaaccgagaaagcagagagatttactacatatacgcgtgtag

SEQ ID NO: 57374 - protein, 401 aa, Unknown
  Obtained from environmental sample
  misc_feature (1)..(401): Xaa is any amino acid
MKDRRPPVGWRLFGQRYTLDSEIHHYVSPPRFIIPNIRQEDQRHMVKGLDIMKVFGSKTADRLLKESDYPKYAGLERVMNSLQQNMTSIKDDYWFSTYYTNILYQIKTQALFENGTGFYFTEKPAWNLKAMNSAHGTWAELRHDTILSVKQNYSEATGGSSKTFRTKPLPKPIHYIEPNVPFWNASAVGIQKLYRILEKYDFLDGSSAYVLASMHGIFVKAAEISKLEADDKEVSAKDLEWIATIPKQLAKLVVALLSGGWVDNEDSLRMALVADVFTATEQNLVLESAVGIPYRLYIPLNDKQGGKRIAVGYGFSYYEFTQPISNRLNNEQWKAVVYADNFDMKKYQPFWMQGKVSRAKXVLGLSVLSNHELHEREKKFTTNHTNHQEPRKQRDLLHIRV

SEQ ID NO: 57375 - DNA, 432 bp, Unknown
  Obtained from environmental sample
  misc_feature (1)..(432): n is a, c, g, or t
atggccgaaagcggtagactggtcgcggtcgcggcaaaggaaaaaaatatttcaatctccctttcctgcccgcccgatttaatggtacaggcatacagttcgcttttggttcaggcgattgttaatctccttgacaacggtataaagtactcgggcaaaaattatccgattactgttctcgcctacaagcaagaagaacaacttattattgaagtaaaagacaaaggcatcggcatacccgccgggcatatagaccgtatttttgagcgcttttaccgcgcggatcgaagccgaagccgtgaagccggaggcacgggcctcggcctttccattgtccgccacattgccctgctccaccgggggagcgtcgaagcggaaagccacaccggggaaggctctacattccggttaaagctgccgctgggacaataa

SEQ ID NO: 57376 - protein, 143 aa, Unknown
  Obtained from environmental sample
  DOMAIN (31)...(142): Histidine kinase-, DNA gyrase B-, and HSP90-like ATPase
  misc_feature (1)..(143): Xaa is any amino acid
MAESGRLVAVAAKEKNISISLSCPPDLMVQAYSSLLVQAIVNLLDNGIKYSGKNYPITVLAYKQEEQLIIEVKDKGIGIPAGHIDRIFERFYRADRSRSREAGGTGLGLSIVRHIALLHRGSVEAESHTGEGSTFRLKLPLGQ

SEQ ID NO: 57377 - DNA, 354 bp, Unknown
  Obtained from environmental sample
  misc_feature (1)..(354): n is a, c, g, or t
gtggattatttctttatcggggatcccgaactggtgacggccttccgctttatcggcattgaaggccgcgccgtgcgggatactgcggaggcggcggctgttttcaggcgcatcacagaaggatgggtcgaagacgcagatgttgttctgcccgacgccgtaaagggcgcggaaggctgccgcgtgctgatcctcaccgaagagaccgccggctggattgaggaactcctcgtcaactggcagctttccggacgctatcccctgatagtggagatccccggcataatgggcaggatgcccggcaagaaaacccttgtggattcaatccgcgaggcaatcgggatacatgtttaa

SEQ ID NO: 57378 - protein, 117 aa, Unknown
  Obtained from environmental sample
  misc_feature (1)..(117): Xaa is any amino acid
MDYFFIGDPELVTAFRFIGIEGRAVRDTAEAAAVFRRITEGWVEDADVVLPDAVKGAEGCRVLILTEETAGWIEELLVNWQLSGRYPLIVEIPGIMGRMPGKKTLVDSIREAIGIHV

SEQ ID NO: 57379 - DNA, 303 bp, Unknown
  Obtained from environmental sample
  misc_feature (1)..(303): n is a, c, g, or t
atgaaacgaaaagtgttgtttgtgtttacgctgctgttggttcttggcatggctgcgtacgcgcaggaggccgcgggagcggaaagctcgccgacttcggtctggaaatattttgccgccgcgcttgcggtaggcatttcctgtatcgcgggcggcatggcggtaggccgtataggagcggcggcaatgggcgcgatgagcgaaaatcccgagctttcgggaaaggccctgccctacgccggccttgcggaaggtatctgtctctggggcttcctcgtagccctgctgattttaattctctaa

SEQ ID NO: 57380 - protein, 100 aa, Unknown
  Obtained from environmental sample
  SIGNAL (1)...(21)
  DOMAIN (35)...(100): ATP synthase subunit C
  misc_feature (1)..(100): Xaa is any amino acid
MKRKVLFVFTLLLVLGMAAYAQEAAGAESSPTSVWKYFAAALAVGISCIAGGMAVGRIGAAAMGAMSENPELSGKALPYAGLAEGICLWGFLVALLILIL

SEQ ID NO: 57381 - DNA, 453 bp, Unknown
  Obtained from environmental sample
  misc_feature (1)..(453): n is a, c, g, or t
ttgaatattttgatatggcgggaattctggttccctgtatctgcatttttttcggccgcggttatatggcgatgcatagcgcgcgaaaagccattactgaaacacggcattatgacttttattatggaaggttttgtcgaggttatggaaaccgcttccggctatatttccaacaccgtcagctttctccgcgtaggggccttcgcgctttcccacggcgtattgtcatacatcgtattccggtttaccgaggagcttgccaattccggcggccccataggttccatttcgggcctgctggttttagtcttcggaaatctggtaatcattgtgctggaggggatgattgtggctattcaggtagtacgcctgcaatattatgaatttttcagcaagttttttactgaaaccggagtggaatttgccccgttccgtttcagaaaaggcgaatag

SEQ ID NO: 57382 - protein, 150 aa, Unknown
  Obtained from environmental sample
  misc_feature (1)..(150): Xaa is any amino acid
MNILIWREFWFPVSAFFSAAVIWRCIAREKPLLKHGIMTFIMEGFVEVMETASGYISNTVSFLRVGAFALSHGVLSYIVFRFTEELANSGGPIGSISGLLVLVFGNLVIIVLEGMIVAIQVVRLQYYEFFSKFFTETGVEFAPFRFRKGE

SEQ ID NO: 57383 - DNA, 1419 bp, Unknown
  Obtained from environmental sample
  misc_feature (1)..(1419): n is a, c, g, or t
ttgatggaaaaactccgctcaagctgcgaattcctgggagtggaattgcctgccgaaccaacccaggacagcgtcctgccgggtgaagcggaagaagccctgtgcgaaaaactctgttcaaccatcaacgcgctgaagcaaaaggaaattatcgtcaggcaggaaaagcagagcgtggaggaagcgtacagcgaagcaaaggcattttcgaatctgaacgcccctttttccgatttggatcaactgtcgttccttaccctgcgtgtgggccgtcttgatccaaaagttcaaagtgaattaaaacaaacgcttggagagcgagccgtgatcatcccgctgggaggcggcacctccgatggaggcgaaggaaacgaccgtttgcttgccgcaagttcccgcaaaggccgctttgcccttgactccgagttaaaaaaatgttcattcaaaccaattgccattccggaaggttatcagggagtgcccgccgaactgcttgaggggcttgaggggcggttaaaaaacgcggaaaaagaacttgaagaaattgaaaacgaanaaaacaaaatacgggacgagtcacaagccgcgctgtaccggcttggatcaatactgcttatgggcatagccgccgaggaaataaaatcccggcttgtttccacttccagcgtttatctgctttccggctggattcccgctgacatgattaaccagacggccgccgatctttcaaagatcacgcacggcaggacggcaatccgcatttatgtccccgatgaagtccccgaagtgaaggatggcagcgaaaaagtgccagtctccatgagacacggcaaatttgtaaaaggttttgaaggcgttatcttttcctacggcgcgccgctctacggtactatcgatccaacacccgttgtcgcgattttttttaccttgctttttgggatcatgttcggcgattcaggacaaggcgccgtcttgctgctattaggcctgcttaccggcaacattcgccgtcttgcgaaattcaaaaattattccaccccgttgatatcagtaggaatcgcctcaatagtgatgggcttcgtaacaggcgagattttcacaagagaggacctgcttgtagcccctaccagggcgattactcaagtccttaccggccgcccgatagacagactgcttaccatcatgcctcttgccgaacacggcggcagcgttattaagctgttctatttctttggctttacaatcggcatgggggttattctcaactcgctggggctcttgataaatatatacaacaagtgcgcgcttaaaaaatacgaagaagcgttcttcgggaaaacaggactgtccggccttctgctgttctggtacgcgatattcattgccctgcgctgtatttttttcaaagaggcgttttga

SEQ ID NO: 57384 - protein, 472 aa, Unknown
  Obtained from environmental sample
  DOMAIN (3)...(471): V-type ATPase 116kDa subunit family
  misc_feature (1)..(472): Xaa is any amino acid
MMEKLRSSCEFLGVELPAEPTQDSVLPGEAEEALCEKLCSTINALKQKEIIVRQEKQSVEEAYSEAKAFSNLNAPFSDLDQLSFLTLRVGRLDPKVQSELKQTLGERAVIIPLGGGTSDGGEGNDRLLAASSRKGRFALDSELKKCSFKPIAIPEGYQGVPAELLEGLEGRLKNAEKELEEIENEXNKIRDESQAALYRLGSILLMGIAAEEIKSRLVSTSSVYLLSGWIPADMINQTAADLSKITHGRTAIRIYVPDEVPEVKDGSEKVPVSMRHGKFVKGFEGVIFSYGAPLYGTIDPTPVVAIFFTLLFGIMFGDSGQGAVLLLLGLLTGNIRRLAKFKNYSTPLISVGIASIVMGFVTGEIFTREDLLVAPTRAITQVLTGRPIDRLLTIMPLAEHGGSVIKLFYFFGFTIGMGVILNSLGLLINIYNKCALKKYEEAFFGKTGLSGLLLFWYAIFIALRCIFFKEAF

SEQ ID NO: 57385 - DNA, 402 bp, Unknown
  Obtained from environmental sample
  misc_feature (1)..(402): n is a, c, g, or t
atgcagcctgacgaacatactccggaagatttagcggtttttcgtcttcatcaggcgagggagtgtttgcaggcagcgttagcggccatagatttcaagacagccgctaaccgctcgtattactgtatcttccacgcaatgcgtgcggttcaagcgcttgataggttcgattccagaaagcattccggcgtaatagataatttccgcaaagactacatcagaacaggaattttttccggagaattttcaaaagttatcgggaaagcctttgatgtacgccttgaaagcgattacgaagatttctacgttgtttcaaagagcaaagttacgtctcaggtcgaaaacgccaaggccttagaggctgtggagaagtacatcggcgagagaatccaaagcacgtga

SEQ ID NO: 57386 - protein, 133 aa, Unknown
  Obtained from environmental sample
  DOMAIN (8)...(126): Protein of unknown function DUF103
  misc_feature (1)..(133): Xaa is any amino acid
MQPDEHTPEDLAVFRLHQARECLQAALAAIDFKTAANRSYYCIFHAMRAVQALDRFDSRKHSGVIDNFRKDYIRTGIFSGEFSKVIGKAFDVRLESDYEDFYVVSKSKVTSQVENAKALEAVEKYIGERIQST

SEQ ID NO: 57387 - DNA, 1494 bp, Unknown
  Obtained from environmental sample
  misc_feature (1)..(1494): n is a, c, g, or t
ttggaaaacgacaaggttgcggaactggtggtcgagcggccggattacttccggctggtgggaaacatctacaggggcaaggtagtctccatcctccccggcttgcaggcggcgttcgtcgacatagggctcgaaaaatgcgcgttcctgcacgcttcggacgtagacccgtcgctcttgcttgaggaggacgagatgatggaccgcttcgccggacggggcgggagaaactccaaaagccgcaaggtgccgagaatccccatagagaaggtgctgaccaaggggcaggagatactggtgcaggtggccaaggagcctatacgcaccaaaggcgccaaggttaccacgcagatcagccttgccgggcgctttttagtgctggtgcccgacacagacttcatcggcgtgtctaagaagacgagcgactcggcccgcaggacgaagctcaagaagctgatctcgcagatcaagccgcccggaatagggttcatcgtgaggacgaacggactcaaggtttccgagaccgagttcgtaaacgagatacacatgcttttggacgcgtggcgaaaaacacaggagacggcgctgtcgggcagcggggcgaggctggtgcaccgcgaactgggtataaccacgcgcgtaatacgcgacctcttctccgaagacgtgacggaggtctacgccgatcaagaggaggactacaaggagatacaaaactacgtgaaggcgctctcgccggagatgaccaagcgcgtcttcctctaccgcgacaagacgccgctcttcgaccggttcaacatagagaaggacttagacaggctgctcaaacgcaaggtctggctgaagagcggcggttacgtgctgattgaccggacggaggcgctggtggcgatagacgtaaacaccggcagaaacgtgggtaagaatagggcgagtttggaggatacgatctttaagacgaacatggacgccgccgccgagatatgccggcaattgcgtctgcgcgacatcggcggcctcatcgtggtagacttcatagacatgatgagcgcggataaccgccgcaaaatcgaatccgccatgaagaaactcttagacgccgacccctcggccacagactgcactcccctatccaagttctgcctgatggagatcacccgcaaacgcgtccgcccggaactgcaagagttcttcacggacgtctgcatcacctgcggcggcttaggctggatattctcgcccgaaacggtaacggcaagaatagggcgggatttgagacgcgcccacgacaaaccgaacaccataacggtaacgatccaccccgcagtggcggagtatctgagggacaacagcggcccggcgggcgttacgatgaaatccatgctggagaaagagcataagtgccggctgaatatcgtggaggacgaggaatacgatcaagacgagttcacatttaaggaaatcgccggcggggacgttcgagacgaggggtga

SEQ ID NO: 57388 - protein, 497 aa, Unknown
  Obtained from environmental sample
  DOMAIN (20)...(117): S1 RNA binding domain
  misc_feature (1)..(497): Xaa is any amino acid
MENDKVAELVVERPDYFRLVGNIYRGKVVSILPGLQAAFVDIGLEKCAFLHASDVDPSLLLEEDEMMDRFAGRGGRNSKSRKVPRIPIEKVLTKGQEILVQVAKEPIRTKGAKVTTQISLAGRFLVLVPDTDFIGVSKKTSDSARRTKLKKLISQIKPPGIGFIVRTNGLKVSETEFVNEIHMLLDAWRKTQETALSGSGARLVHRELGITTRVIRDLFSEDVTEVYADQEEDYKEIQNYVKALSPEMTKRVFLYRDKTPLFDRFNIEKDLDRLLKRKVWLKSGGYVLIDRTEALVAIDVNTGRNVGKNRASLEDTIFKTNMDAAAEICRQLRLRDIGGLIVVDFIDMMSADNRRKIESAMKKLLDADPSATDCTPLSKFCLMEITRKRVRPELQEFFTDVCITCGGLGWIFSPETVTARIGRDLRRAHDKPNTITVTIHPAVAEYLRDNSGPAGVTMKSMLEKEHKCRLNIVEDEEYDQDEFTFKEIAGGDVRDEG

SEQ ID NO: 57389 - DNA, 882 bp, Unknown
  Obtained from environmental sample
  misc_feature (1)..(882): n is a, c, g, or t
atgaacgcacgctgggaaagggaaaaaatcgatattcagaaaatccgtgagataaagcaacggatagaagagctaaaaattgacgagacgcggtatgaacgcgaggggaatctttcaaaggcggcagaagtaaaacacggaaaaattcccgaagcgcaaaaacaacttgccgcccttacggatcaaatggaaaaaaagagggagagtgctaaagggggcggagcttccgcgcttttacgcgaggaagtaagcgaggaagacattgcgggagtagtgtcaatgtggacgggtattcccgtctcaaagatgctctccggcgagttgcaaaaatatttagacctggaaaaagctcttgaaaagcgcgttgtcggtcaggatgaagcccttgccgcagtcgccgacgcaattaggcgaaacaagtccgggctttccgactcggcgcgcccgttagggtctttcctctttttgggaccgaccggcgtgggaaaaactgaactcgccaaaacactggcggactttttgttcaatgacgaaaaagccctgacaagaattgacatgagcgagtacggagaaaaacattcggtaagccgcctgattggcgcgccaccgggttatgtggggtatgagcagggcggccaactgaccgaggcagtcaggcgacggccttacagcgtaatcctttttgacgaaattgaaaaagcccaccctgaagtgttcaatgtatttttacagatactcgacgacggccgcctgacggacggacagggacgcgttgtcgattttaggaacgtgattatcataatgacaagcaacttgggttcggacttgatattggaagcgcaaaatcctgaaaccttgcgtgactcattgatggaactttaa

SEQ ID NO: 57390 - protein, 293 aa, Unknown
  Obtained from environmental sample
  DOMAIN (152)...(283): ATPase family associated with various cellular activities (AAA)
  misc_feature (1)..(293): Xaa is any amino acid
MNARWEREKIDIQKIREIKQRIEELKIDETRYEREGNLSKAAEVKHGKIPEAQKQLAALTDQMEKKRESAKGGGASALLREEVSEEDIAGVVSMWTGIPVSKMLSGELQKYLDLEKALEKRVVGQDEALAAVADAIRRNKSGLSDSARPLGSFLFLGPTGVGKTELAKTLADFLFNDEKALTRIDMSEYGEKHSVSRLIGAPPGYVGYEQGGQLTEAVRRRPYSVILFDEIEKAHPEVFNVFLQILDDGRLTDGQGRVVDFRNVIIIMTSNLGSDLILEAQNPETLRDSLMEL

SEQ ID NO: 57391 - DNA, 474 bp, Unknown
  Obtained from environmental sample
  misc_feature (1)..(474): n is a, c, g, or t
atgagtgtaaaagttgttgtcttcgactatggcggcgttatttgctttacgcccacgcccgaaatgaggatcgagcttgtgaggcttagcgggttgtccgcggaagtcctgtgggatttggatcggaaataccgcggcgagtgggacaggggaacctatgacgggatcggtcactacaggttcatgctggcaaaggccggcgtctctcttggcgatgacagccttgcgcagattgcgcgggccgacattgaaagctggagccatataaacccggacactttccgcctgatgaaggacattaaagccgcgaggcttcgtctcgggattctttccaatataccccgcgattttcccagggacagtatgccggtattcgccgaagctgacatcgccgtttactcctgcgatcttggtataataaaacccgaggcgggtatttatgaagaattgataaaaaaagctcggttgccctaa

SEQ ID NO: 57392 - protein, 157 aa, Unknown
  Obtained from environmental sample
  misc_feature (1)..(157): Xaa is any amino acid
MSVKVVVFDYGGVICFTPTPEMRIELVRLSGLSAEVLWDLDRKYRGEWDRGTYDGIGHYRFMLAKAGVSLGDDSLAQIARADIESWSHINPDTFRLMKDIKAARLRLGILSNIPRDFPRDSMPVFAEADIAVYSCDLGIIKPEAGIYEELIKKARLP

SEQ ID NO: 57393 - DNA, 1650 bp, Unknown
  Obtained from environmental sample
  misc_feature (1)..(1650): n is a, c, g, or t
atgtttgaagcggcctttccgtttgacgagaccgaggatcagcttcgctgtattcaggagatcaaacaggatatggaaagtgtctcgcccatggacaggcttgtctgcggtgacgttggtttcggtaaaacagaagtcgcccttcgcgcgtgtttcaaggcgattatgggagggaaacaggccgcatttctcgccccaacgacaatccttgtcgaacagcactatgaaaattttattgaaagattttcaaggttccccgtaaaagtagcgatgctatcacgatttgtagacagaaaaaaaacgcgaataattcttgaacagttaataaagggcgaaattgatttactgataggtacccacaggattattcaacgcgacgttcagtttaagaatcttggtttaatagtcattgacgaggaacagcgttttggagtcaaagacaaggagcgcttaaaggaattaaaaacaaatgtagattgcctgactcttaccgcgactccgattccccgcacactccatatgagccttgtaaaaataagggatatgagcctattggctaccgctcccggaggcagacaaccgatagaaacatttgtcgaagaatacgacgactatttaatatcgcgtgcggtccgcagagaggttgaaaggggagggcaggtcttttttttgcataaccggattgaaaccctgcgtgacacaaggttaaaaatcgagcgcctggtgcntgagattctggcggaaaccgcgcacgggcagatggacgcgcaggtgcttgaggacgtgatgcaccgctttgtgcacggcggctttcacgttcttgtgtccacaacgataattgaaaacggcatagacattccgaatgttaataccattatcatagatcgcgccgatatgtacggcgtgtcccagttataccagctccggggcagggtaggccgcagcgaccgtgtcgcctacgcttaccttttgtaccctcagggcggggagattaccgaactcgccatgaaacgcctccaggttatttccgattttacggaacttggttccggtttcaagatcgccatgaaggacatggagatacgcggcgcgggaaaccttctgggacgcgaacagtcaggcgacatttattccgtgggttttgatctgtaccttaaattattggatgaagctgtcaggcgtcttgagaattcaagttacgagggtgaaacagaaaccctgctggaactggaatattccggcttcattccggacagctatattgattcacagcaggaaaaaatggaaatatataaaatgatcgccgcggtaagggacaaggatgagcttgagcgcgtctacgcggatctggaggatcgtttcggcccgccgcccgatgaggccgcttcgcttctcgcgcttgcggagatcaggataatctgccgcggacttgccgtgtcgtcgctgagggaaagggaaggcatcgtaagggtggagttcgcgaaggtttcccatgtcaaagtcgaccgtcttatacggcttatgcaggagtctatgggcaaggtgaaacttgatcctaagaagcccaacgtgcttatgcttgccgccggtaatatcggcttgaaagagaaaagcgaatttataagggagaagctggcagcgctggcgtga

SEQ ID NO: 57394 - protein, 549 aa, Unknown
  Obtained from environmental sample
  DOMAIN (7)...(169): Type III restriction enzyme, res subunit
  misc_feature (1)..(549): Xaa is any amino acid
MFEAAFPFDETEDQLRCIQEIKQDMESVSPMDRLVCGDVGFGKTEVALRACFKAIMGGKQAAFLAPTTILVEQHYENFIERFSRFPVKVAMLSRFVDRKKTRIILEQLIKGEIDLLIGTHRIIQRDVQFKNLGLIVIDEEQRFGVKDKERLKELKTNVDCLTLTATPIPRTLHMSLVKIRDMSLLATAPGGRQPIETFVEEYDDYLISRAVRREVERGGQVFFLHNRIETLRDTRLKIERLVXEILAETAHGQMDAQVLEDVMHRFVHGGFHVLVSTTIIENGIDIPNVNTIIIDRADMYGVSQLYQLRGRVGRSDRVAYAYLLYPQGGEITELAMKRLQVISDFTELGSGFKIAMKDMEIRGAGNLLGREQSGDIYSVGFDLYLKLLDEAVRRLENSSYEGETETLLELEYSGFIPDSYIDSQQEKMEIYKMIAAVRDKDELERVYADLEDRFGPPPDEAASLLALAEIRIICRGLAVSSLREREGIVRVEFAKVSHVKVDRLIRLMQESMGKVKLDPKKPNVLMLAAGNIGLKEKSEFIREKLAALA

SEQ ID NO: 57395 - DNA, 921 bp, Unknown
  Obtained from environmental sample
  misc_feature (1)..(921): n is a, c, g, or t
ttggattacatcgggcggaatggttctttattcctaatcgacagggaaagacttgaaaacacccatgagagccttgtacgagagtaccatggcttgtattcgagggcggtaagggaaaagtacgaatatccgttaccggagcgtctattgcttaattttgaagaaatgctgaagaaagacgcttcttccgtttcccgtatgatttcgtttagatcgattaaaggagaggcgaaaaaaggagtctgtcacattgaacttgcctgcgaaccgggacgcagttttttcggcaacatcaattacctaaaagaggagtttgcctctctgcttggaagcggctggcaaattgccgtagcggcggagtcgcaggtgcaggcggatcgcataaaaacgctccttgaaccgcataagtctttatcgataatggcagtccctctttccgccggtttttgcctgccggatatcaaatttatgctggtgcaggaaaacgagattttcggcaggcgtaaacttccgccgcgctccttaaaaaccgtccgctcaagcccgatagacacattccttgaaatcaatcccggcgattacattgtccatgtaaatcacggcatcggtctttttaagggtatcgaaaggttgtcgtccggcggaaacgaaagagactatataaaaattgaatacgccgacgaggagacggtatttgttcccgtagaacagcttaaccttgtacagcggtatatcggaaacgacggattgcaagcgccgcggttagacaaactcggctccaagagctgggaaaacagannagggaaggtaaaaaaatccgtagaagacatcgcgcatagactgatagagctttattcaaaacggaaacaggcgcaaggcttcgcgttttccaaaggattcagagtggcagacgatgtttga

SEQ ID NO: 57396 - protein, 306 aa, Unknown
  Obtained from environmental sample
  DOMAIN (188)...(286): CarD-like/TRCF domain
  misc_feature (1)..(306): Xaa is any amino acid
MDYIGRNGSLFLIDRERLENTHESLVREYHGLYSRAVREKYEYPLPERLLLNFEEMLKKDASSVSRMISFRSIKGEAKKGVCHIELACEPGRSFFGNINYLKEEFASLLGSGWQIAVAAESQVQADRIKTLLEPHKSLSIMAVPLSAGFCLPDIKFMLVQENEIFGRRKLPPRSLKTVRSSPIDTFLEINPGDYIVHVNHGIGLFKGIERLSSGGNERDYIKIEYADEETVFVPVEQLNLVQRYIGNDGLQAPRLDKLGSKSWENRXGKVKKSVEDIAHRLIELYSKRKQAQGFAFSKGFRVADDV

SEQ ID NO: 57397 - DNA, 876 bp, Unknown
  Obtained from environmental sample
  misc_feature (1)..(876): n is a, c, g, or t
gtgctttcaataatctcatcagatgaaccaaacggtaatttaaataagggaatatcatattgtaaaatcgccagtgaaatgggagccgatatagcccttttccccgaaatgtggaatattggatataattttagtttaagaaagcaaaacgaaagtaaatggcttggtaacgcaatagacgcgaatagtgattttttcaggaaatttcaagaccaggcaaaaacgctggaaatggccattggaattacatatttggaaaaaggggtaaaccttcaacggaataccgtgtcaattattgattatcagggaaattgcgttttaacttatgctaaagtacatacatgtgattttgatgatgaaaaatatttagcgcctggagatgatttttacgttacagaattacagactaaaaacggacaaattaaaataggcgcaatgatttgttatgacagggaatttcccgaaagcgcgcgtattctgatgttgaagggagctgaaattatactggttcctaacgcctgccctatggaaataaacagaaagagccagttaagggcaagggcatttgagaatatggttggtatagcattggctaattatgccaatggacagcctgattgtaacggacattcgctggcgtatgatggtatggcatacggagaaaccagcccgaataaatttgaagcgagagatacgctgataatagaggccggtgaaggcgaaggggtatatatagccaaatttgatgttgaaaaaatacgggagtatagaaaaaaggaagtgtggggaaatgcctacaggaagccctcaaaatattccctgttaatttccgacaaaattgaagaacccttcataagagataattcacgaagataa

SEQ ID NO: 57398 - protein, 291 aa, Unknown
  Obtained from environmental sample
  DOMAIN (1)...(173): Carbon-nitrogen hydrolase
  misc_feature (1)..(291): Xaa is any amino acid
MLSIISSDEPNGNLNKGISYCKIASEMGADIALFPEMWNIGYNFSLRKQNESKWLGNAIDANSDFFRKFQDQAKTLEMAIGITYLEKGVNLQRNTVSIIDYQGNCVLTYAKVHTCDFDDEKYLAPGDDFYVTELQTKNGQIKIGAMICYDREFPESARILMLKGAEIILVPNACPMEINRKSQLRARAFENMVGIALANYANGQPDCNGHSLAYDGMAYGETSPNKFEARDTLIIEAGEGEGVYIAKFDVEKIREYRKKEVWGNAYRKPSKYSLLISDKIEEPFIRDNSRR

SEQ ID NO: 57399 - DNA, 669 bp, Unknown
  Obtained from environmental sample
  misc_feature (1)..(669): n is a, c, g, or t
gtggctagcgaaaaaattctggaagtgctgaagatgctgccggacgcgactttggaaacggtatacatgacctttgtgtcgacttttttcgcatgccttcttggtttcccgttaggcgcatatttgtacatcgcgtctccctccggccttgctccccgccccgttttatacaacgtgctttcccgcgtcgtgaacctgttccgctcgcttccctttatcatactgatgatcctgcttatccccctgacgcggatgatcataaaaaccagcataggccctacggcggtaatcatcccgctttcaatagccgccgcgccctttgtagcgcgtgtcgccgaatccgccctttccgaggttgatcagggcgtgcttaccgcagccagggcgatgggctcgaccaacttccagatcgtccgcaaagtgctgatccccgaagccatgcccgcgcttgtttccggcctcgccctgacgatcatcaacctgataggctattctgcaatggccggggctataggcggcaggggcctgggcgaccttgccatacgctacggctattaccgcttcaggacggacgtaacaatcggcgcggtaattgtcataatgatcctggtgganacggtgcagattatcggcacggcgatcagcagaagccttttgtcaaaacgctga

SEQ ID NO: 57400 - protein, 222 aa, Unknown
  Obtained from environmental sample
  DOMAIN (17)...(220): Binding-protein-dependent transport system inner membrane component
  misc_feature (1)..(222): Xaa is any amino acid
MASEKILEVLKMLPDATLETVYMTFVSTFFACLLGFPLGAYLYIASPSGLAPRPVLYNVLSRVVNLFRSLPFIILMILLIPLTRMIIKTSIGPTAVIIPLSIAAAPFVARVAESALSEVDQGVLTAARAMGSTNFQIVRKVLIPEAMPALVSGLALTIINLIGYSAMAGAIGGRGLGDLAIRYGYYRFRTDVTIGAVIVIMILVXTVQIIGTAISRSLLSKR

SEQ ID NO: 57401 - DNA, 597 bp, Unknown
  Obtained from environmental sample
  misc_feature (1)..(597): n is a, c, g, or t
atgattgttctaaaaggcatctccaaatcttacggtcatgttacggctgtacgccgcgccgaccttgccgtttcttcaggctgtattttcgggatcatcgggcgctcaggcgcgggcaagtccagcctgctgcggacaatgagcctgcttgagactccggacacgggcgaggtgtactacaacaacgagcgcgtggacacattgcggggagcggctctgcttcagcggcgcagaaaaatgggaatgatattccagaatttcaatctgcttggatcgcgcgacgtaatggggaatatcgcctaccctctggaaatcgcaggctttaaccggaaacaaattgaaaagcgcgttgacgagcttctggagatggttgatattgccgacaagcgcagggcaaggatgcgggaactctccggcggtcagaaacagcgggtggctatcgcccgcgctctggctggaaaccccgaggtgcttttctgcgacgaagcgacaagctcccttgacccgcagaccacccggtcaattctcgccctgatccgcgacttgcagcagaggctgaaaataacggtggtgctgattcccatcagatggaggtaa

SEQ ID NO: 57402 - protein, 198 aa, Unknown
  Obtained from environmental sample
  DOMAIN (27)...(198): ABC transporter
  misc_feature (1)..(198): Xaa is any amino acid
MIVLKGISKSYGHVTAVRRADLAVSSGCIFGIIGRSGAGKSSLLRTMSLLETPDTGEVYYNNERVDTLRGAALLQRRRKMGMIFQNFNLLGSRDVMGNIAYPLEIAGFNRKQIEKRVDELLEMVDIADKRRARMRELSGGQKQRVAIARALAGNPEVLFCDEATSSLDPQTTRSILALIRDLQQRLKITVVLIPIRWR

SEQ ID NO: 57403 - DNA, 720 bp, Unknown
  Obtained from environmental sample
  misc_feature (1)..(720): n is a, c, g, or t
ttggaattctcgaccaaagacgatgtgaggagctatctggagtcggtctacaatacgatcatactgaaagatgtggccgaaagcaacaattttagcgacatcagccgtttggagagaatcgtaaagtacatggctgacaacataggcaaagagacgtctgcgaacaacatagctgaaacgatgtcgggtgacggggcgaaaataaacgtccgtaccgtggaaaaatacttgaaagcgctttgcgacagttacatactgtaccgcgccgacagatacgacgtccgcggtaaaagattgcttaaaacgctcaacaagtactacatcgtcgataccggtttgcgctacgctctcttgggcgatagaacgatagacaccggtcgtatgcttgaaaatatcgtttacttggaacttgtacgccgcggtagaaaagtatatgtgggcaaaatggatgtgctgaacaaggagaaaagcgaaaacggcggcgtaacgggcaaatacgtcacacgtgaaattgatttcgtcgtagagggcggcgatgggacggaatactatcaggtgtcgcaaagcgttttggaccccaagacgctggaacgagaactttcttccctaaatgcgatatccgaccacaaccccaaatacctgctgacgatggacccgctgccggccaacagctcacacggtataaaacagatcaacatatcggactggttgcttgaatag

SEQ ID NO: 57404 - protein, 239 aa, Unknown
  Obtained from environmental sample
  misc_feature (1)..(239): Xaa is any amino acid
MEFSTKDDVRSYLESVYNTIILKDVAESNNFSDISRLERIVKYMADNIGKETSANNIAETMSGDGAKINVRTVEKYLKALCDSYILYRADRYDVRGKRLLKTLNKYYIVDTGLRYALLGDRTIDTGRMLENIVYLELVRRGRKVYVGKMDVLNKEKSENGGVTGKYVTREIDFVVEGGDGTEYYQVSQSVLDPKTLERELSSLNAISDHNPKYLLTMDPLPANSSHGIKQINISDWLLE

SEQ ID NO: 57405 - DNA, 585 bp, Unknown
  Obtained from environmental sample
  misc_feature (1)..(585): n is a, c, g, or t
gtggttggtttgcaacttggagcgttttgcgttgttctcgaaacacagttctccggcgttacggccattccgttttcaacgtttctattgctaatgcagcctattcacttggctattggcatagtagagggtattgttacagccgccattttgagtttcgtttacaaggctcgtcctgaaatcatggagagtacgcggaacaaaaccgtaatccaaagcaacgtcccgatgaggggggtgcttattgtacttgcaattacaaccgtactgataggcggcgccctctccgtatttgcttcttcttacccggacggtcttgagtgggctataaaaaaagcgattggaacaacgggtcttaaaacagcaaacccgattattgaaaaagcggaacaagcccaagacgcggtagccgttatgccggattacgacttcaaaaacgccgaggaagatggctccgggataggaacgacgatagcgggtatcgccggcgggttactcacctttttacttgcgggcgccgccgcgcttgcaatatatgccgttaaaagaaaacgaanaggtcaatctgttccaacaaacgcgtga

SEQ ID NO: 57406 - protein, 194 aa, Unknown
  Obtained from environmental sample
  misc_feature (1)..(194): Xaa is any amino acid
MVGLQLGAFCVVLETQFSGVTAIPFSTFLLLMQPIHLAIGIVEGIVTAAILSFVYKARPEIMESTRNKTVIQSNVPMRGVLIVLAITTVLIGGALSVFASSYPDGLEWAIKKAIGTTGLKTANPIIEKAEQAQDAVAVMPDYDFKNAEEDGSGIGTTIAGIAGGLLTFLLAGAAALAIYAVKRKRXGQSVPTNA

SEQ ID NO: 57407 - DNA, 471 bp, Unknown
  Obtained from environmental sample
  misc_feature (1)..(471): n is a, c, g, or t
atgaaaaagaaagaagaaaagaaagcaaaaccggaagaaagcaccattgcgatatttctcagggaaatcagcaacattccgttgatgactcgggaagaagaggaaataacagcccgtgcggccgccgaaggcgacaaagccgcaagggaaaaacttataaacgccaatttacgctttgttgtaaatatagcgaaaaaataccaggggctgggtcttccccttgaagacctgatagccaccggcaatctcgggcttgtaaccgcagttgaccgttttgaagttgataaaaacaaccgctttatttcttacgcggtctggtggatacgccagagcatattaagcgccctttccgaaaaaaccagaatgataaggcttccggtaaaccgcgttttggaacttgtcaaacttgaaaaagcgaagaaaatggttttaaaccaaaacaacgccgaagacgaaatagcggctctctaa

SEQ ID NO: 57408 - protein, 156 aa, Unknown
  Obtained from environmental sample
  DOMAIN (13)...(49): Sigma-70 factor, region 1.2
  misc_feature (1)..(156): Xaa is any amino acid
MKKKEEKKAKPEESTIAIFLREISNIPLMTREEEEITARAAAEGDKAAREKLINANLRFVVNIAKKYQGLGLPLEDLIATGNLGLVTAVDRFEVDKNNRFISYAVWWIRQSILSALSEKTRMIRLPVNRVLELVKLEKAKKMVLNQNNAEDEIAAL

SEQ ID NO: 57409 - DNA, 927 bp, Unknown
  Obtained from environmental sample
  misc_feature (1)..(927): n is a, c, g, or t
atgattgatactattattaatatgttttcgtttgcgtttctggtcagggccttcgttgtcggggcgcttgtctcaatctgcgcctcgctgctcggcgtaagccttgtgctgaaacgctattcgatgatcggcgacggcctttcccatgtgggctttttctcacttgccctggcaacagcgctgaacacagcccctttatacgtcgccatcccgatagtggtcgccgccgcttttttgctcctgcgcatgagcgaaaacagcaagatcaagggagacgccgcggtcgcgctgatttccaccggctctctcgccgtaggcgtgattatcatatcacagtcaacaggcatgaacaccgacgtgtgcaattatcttttcggcagtattctcgctatgaagaaatccgacgtgtacctgagcgtcgccctttcggttaccgtgctgttcctctttatactgttttacaataaactgttcgccgtaacctttgatgaaactttcgcgaaagccagcggagtaaagacagggctgtacaatatgctcatcgcccttttgaccgccctgaccatagtgcttggcatgcgtatcatgggcgccgtgctgatttccagcctgattatttttcccgctttaagctcgatgcggctgtttaagaaattcaggagcgtcaccgtctgttccgcagtaatttcaatactgtgtttttttaccggcatagttantttcgtatatatacgccacgccgacaggcgcgagcgttgtaatggtcaatataattatttttgtgttattctggttaatagaaaacatacgcaattcaactgttctaaacaaatacaggaggaaaaattatgcgtaaaaccaaattctcggaaaaaaatctttttatcgccgcaatcataccggcgcttgtcatcttgctttgcgtaa

SEQ ID NO: 57410 - protein, 308 aa, Unknown
  Obtained from environmental sample
  DOMAIN (10)...(244): ABC 3 transport family
  misc_feature (1)..(308): Xaa is any amino acid
MIDTIINMFSFAFLVRAFVVGALVSICASLLGVSLVLKRYSMIGDGLSHVGFFSLALATALNTAPLYVAIPIVVAAAFLLLRMSENSKIKGDAAVALISTGSLAVGVIIISQSTGMNTDVCNYLFGSILAMKKSDVYLSVALSVTVLFLFILFYNKLFAVTFDETFAKASGVKTGLYNMLIALLTALTIVLGMRIMGAVLISSLIIFPALSSMRLFKKFRSVTVCSAVISILCFFTGIVXFVYIRHADRRERCNGQYNYFCVILVNRKHTQFNCSKQIQEEKLCVKPNSRKKIFLSPQSYRRLSSCFA

SEQ ID NO: 57411 - DNA, 717 bp, Unknown
  Obtained from environmental sample
  misc_feature (1)..(717): n is a, c, g, or t
atgattcaaataaactgtcaaagccttacgtttggctatgacggacatagtgtggtctccggcctgaacttttccgtacaggccggggattttctcctgactgccggggaaaacggctccggcaaatccactttgataaaaggtttgctgcggctgatacctccaatggaaggaacaatcactttttcgtctgaatttgcgccgtgtcagacaggctacctctcacagcaggcggccgcaaaacaggatttccccgcgggagtttttgaaatcgtcctgtcgggaaacgcggggaagcagggactttttcctttttacaggcaacaggacaggcgaaaggcggaaaaaaacctgcggctgctcggcattgaagatctgaaagaccgctgttttcgggaactttcaggcgggcaacagcggcgtgtcttgctggcccgttccctgtgcgccgcggaaaaactcctcgtgctggacgaaccctttgcgggattagacccattgataagcgcggaactgtaccgtctcctcgcgcaaatcaaccgcgaaatgggcatgaccataataatggcttcccatgacattgaggccgcttcctgcgcgacaaaggtattgcatttgcaaaggcagcagctttttttcggcagtatggaagaataccttggttcggaaattggtaaaaaattctttgtaaaaaaagaggcgaccgccaatgattga

SEQ ID NO: 57412 - protein, 238 aa, Unknown
  Obtained from environmental sample
  DOMAIN (29)...(209): ABC transporter
  misc_feature (1)..(238): Xaa is any amino acid
MIQINCQSLTFGYDGHSVVSGLNFSVQAGDFLLTAGENGSGKSTLIKGLLRLIPPMEGTITFSSEFAPCQTGYLSQQAAAKQDFPAGVFEIVLSGNAGKQGLFPFYRQQDRRKAEKNLRLLGIEDLKDRCFRELSGGQQRRVLLARSLCAAEKLLVLDEPFAGLDPLISAELYRLLAQINREMGMTIIMASHDIEAASCATKVLHLQRQQLFFGSMEEYLGSEIGKKFFVKKEATAND

SEQ ID NO: 57413 - DNA, 918 bp, Unknown
  Obtained from environmental sample
  misc_feature (1)..(918): n is a, c, g, or t
atgttcaccggttgcggcaagagcaacaaacccgctaccgacaatgccaaaatcagcattgtaacgaccatcttccccccctacgatttcgcccgcgccatcgccggagataacgccgagatcacaatgctcctcccgcccggctccgaatcgcactccttcgaaccgcgcccgcaggacatcatcaaaatccagaatagcggcgtgttcatccacgtaggcggcgaatccgacgcttgggttaaagatattctgaagtcgatagacaatcccaagatgaaggtcgtcaccatgatggactgcgttgaagccgtcgaggaagagatcgtcgagggcatgcaagaggaagagggagaggataagaaggacggcgagggcgaagatggccccgaatacgatgaacacgtatggacgtcgccgcgcaacgcgaaattgatcgtgcggaagatttccgaaacgctccgcgaggccgacccgtcaaacgccgaaacctatcagaagaataccgaggcgtacctctcgcggctcgacgaattggacgcgaaattcaagggcgtggtagatagcgctacccgcaagacgctggtgttcggcgaccgcttcccgttccgctatttcgccgacgcctacgggctgaagtatttcgcggcgttcccgggatgcgcgaccgagaccgaggcgagcgcgaagaccgtggcgtttctgatcaacaagataaagacggagaagattccggtcgtcttccacattgaactttccaatgagcgcatggccgacaccataagcgaagaaaccggcgcgaaaaaactcctgcttcacgcctgccataacgtttccaaaaaagattttgacgcggggcttggctatcttgattttatgcgtaaaaatgtcgagaatttgcgtgaggcgctgcactga

SEQ ID NO: 57414 - protein, 305 aa, Unknown
  Obtained from environmental sample
  DOMAIN (1)...(305): Periplasmic solute binding protein family
  misc_feature (1)..(305): Xaa is any amino acid
MFTGCGKSNKPATDNAKISIVTTIFPPYDFARAIAGDNAEITMLLPPGSESHSFEPRPQDIIKIQNSGVFIHVGGESDAWVKDILKSIDNPKMKVVTMMDCVEAVEEEIVEGMQEEEGEDKKDGEGEDGPEYDEHVWTSPRNAKLIVRKISETLREADPSNAETYQKNTEAYLSRLDELDAKFKGVVDSATRKTLVFGDRFPFRYFADAYGLKYFAAFPGCATETEASAKTVAFLINKIKTEKIPVVFHIELSNERMADTISEETGAKKLLLHACHNVSKKDFDAGLGYLDFMRKNVENLREALH

SEQ ID NO: 57415 - DNA, 834 bp, Unknown
  Obtained from environmental sample
  misc_feature (1)..(834): n is a, c, g, or t
atgagcggaacgggagccgatgtatacgctatggatgtcctgtctctgtacaagtttgcgggaaacgtcacactggagaatctggattcctatatggcgctggatccgggctttctcaagggtgattacagggaaaatattctggacgctgtccgttatcaaaacgggacatggtttttacctttgaattatgacttcagttattttacctatgacgccactctggttcctcaggaaatcgcgggcaggtttggcgttgacaaatccttcagtatcgaagacttgttaaagataggaatgccattatacaacggcgcttataaactctttaacttaaatgacttttcccgcagtccacgcaatatgttcaccgcgcttcttggtgaaaatattcaaacttatctgaatttatcggacaaaaaaccgaatttcgctgacggcagttttgccgctatgcttgattctgtaaaagattacgggcagcggggtttaatacctcagggagttaccggtcagcagaatgccgggcaggtcaggcagcgggctatgggagagccggcagacaggatttattttaagcaatacagcggcgttaacctgctctctcaattcacgcgtaaattaggcattatcaggagaatggcggaaggcggaatggcgatgggcattgatactgatgatgaaatcgcgggtgttcaagccaacgccgccggttctgtccctttcacatacagccggggttttggaattaacagccagtcaaaaaacaaagaggctgcctgggcgtttataaaattccttctttcatgnaaatgcagacttccgcagatatga

SEQ ID NO: 57416 - protein, 277 aa, Unknown
  Obtained from environmental sample
  misc_feature (1)..(277): Xaa is any amino acid
MSGTGADVYAMDVLSLYKFAGNVTLENLDSYMALDPGFLKGDYRENILDAVRYQNGTWFLPLNYDFSYFTYDATLVPQEIAGRFGVDKSFSIEDLLKIGMPLYNGAYKLFNLNDFSRSPRNMFTALLGENIQTYLNLSDKKPNFADGSFAAMLDSVKDYGQRGLIPQGVTGQQNAGQVRQRAMGEPADRIYFKQYSGVNLLSQFTRKLGIIRRMAEGGMAMGIDTDDEIAGVQANAAGSVPFTYSRGFGINSQSKNKEAAWAFIKFLLSXKCRLPQI

SEQ ID NO: 57417 - DNA, 915 bp, Unknown
  Obtained from environmental sample
  misc_feature (1)..(915): n is a, c, g, or t
atgaagttgccagggttttgcaaaacaaggctgatctatatcttaatgaatagtagaggagccttttttaaccggcctttttttggaacggggtttttatttgtactgccagggcttttaggtttctgcgttttctttatcgctcccttcggcctgtccctggtctacgcttttatggacaaacccatagccggttcctttatcggcttcgagaatttcacgtccctgtttaagaaccgggcctaccttttgggccttgtgaatacgctacggtttatcggcatatcgacgcccctcaacctgggcatttctctgggtatcgctatgttggtaaaccggatcgtcaaaggcaaggaatggttttcgcttgtctttctcattcctctggtgattccctccggctcaatggtcttcttctggaagacgctcttttcctacgacggcgcgctgaacggaatgtttcacgcccttggaattgccaagattaactggcttgattctgctttggctctgcctgtgatgatcctgattttcctttggaaaaactgcggttacaacatggtgctttttctggccggactgggaaacatccccagggattattacgaggcggcatggatggacaacgcatcgtttttgcaggttttccgccacattaccattccctgtcttcttcccactacggtactggcactgatcatgtctattatcaattcattcaagatattccgggagatataccttataaccgggaactacccccaccatagcatctataccctgcagcactttatgaacaatatgtttacctccttgaattatccccgcttgacttccgcaaccgcggtactggttttgctcattgttttctttacccagtttttactgcgtcttgagcggagggccgcgtcatga

SEQ ID NO: 57418 - protein, 304 aa, Unknown
  Obtained from environmental sample
  DOMAIN (82)...(304): Binding-protein-dependent transport system inner membrane component
  misc_feature (1)..(304): Xaa is any amino acid
MKLPGFCKTRLIYILMNSRGAFFNRPFFGTGFLFVLPGLLGFCVFFIAPFGLSLVYAFMDKPIAGSFIGFENFTSLFKNRAYLLGLVNTLRFIGISTPLNLGISLGIAMLVNRIVKGKEWFSLVFLIPLVIPSGSMVFFWKTLFSYDGALNGMFHALGIAKINWLDSALALPVMILIFLWKNCGYNMVLFLAGLGNIPRDYYEAAWMDNASFLQVFRHITIPCLLPTTVLALIMSIINSFKIFREIYLITGNYPHHSIYTLQHFMNNMFTSLNYPRLTSATAVLVLLIVFFTQFLLRLERRAAS

SEQ ID NO: 57419 - DNA, 879 bp, Unknown
  Obtained from environmental sample
  misc_feature (1)..(879): n is a, c, g, or t
atgaggaatcttgcggcaaaagggaacccgcgtggaattgtcttttttcttgtcgtccttggtttgctttttctttttcccctgatcgttaccctggccggttcttttatgacggaacaggcgatccttttgaattattcttccagggttacttcctttgatcttggcgcggggattacggaaagatttaaaagaatgctccttattcccaatcctgccagtttagatcaatatgccggggttttgatcagcgagccttccttcctggtcctccttttcaattccctgaagatagctctgccggttacgctgggtgccttggggacaggcatccttaccgcttacggctttaccatctggcaatggaaatacaaggaacggcttttcctggcctatatagtcgtgatgctcatgcccctgcaggcggtactagtgccgaactacatcatagcagcgatttttggtatacaaaaaagctacctggcaattattctaccgggcattttttcgcccttcgccgtctttctggtgcgccagagcatgaaggccattccgaccgcctatttcgaggccgccaaaattgacggggctggaaactggtacatacttttttatgtactcatccctcagctcaaatcaaccatcgcggccctgtgcatgcttacctttatcgaatactggaaccttgtggaacaggcggtgatcttcatcgatgattacaggcttgaacctctttctatttacctgtcccgtttggcggacgggaaaaccgcgcttattttcgcagcatcctgcgtgtatatgtttttgccgatctggtttctcttctccggtcagaaggatttggaaaagggtattgagctatcgggagtaaagtga

SEQ ID NO: 57420 - protein, 292 aa, Unknown
  Obtained from environmental sample
  DOMAIN (92)...(288): Binding-protein-dependent transport system inner membrane component
  misc_feature (1)..(292): Xaa is any amino acid
MRNLAAKGNPRGIVFFLVVLGLLFLFPLIVTLAGSFMTEQAILLNYSSRVTSFDLGAGITERFKRMLLIPNPASLDQYAGVLISEPSFLVLLFNSLKIALPVTLGALGTGILTAYGFTIWQWKYKERLFLAYIVVMLMPLQAVLVPNYIIAAIFGIQKSYLAIILPGIFSPFAVFLVRQSMKAIPTAYFEAAKIDGAGNWYILFYVLIPQLKSTIAALCMLTFIEYWNLVEQAVIFIDDYRLEPLSIYLSRLADGKTALIFAASCVYMFLPIWFLFSGQKDLEKGIELSGVK

SEQ ID NO: 57421 - DNA, 312 bp, Unknown
  Obtained from environmental sample
  misc_feature (1)..(312): n is a, c, g, or t
ttgcgcctacgggtttcggaattgttaggactttcggaagcggaaattgaacgggtcaaatcagtgctggcgaacagactcacaaaagacggtgaaattattttaacctcggaggaggagcgctctcagcagacaaaccttgaaagggcatattctcgcatggagacgctgattacaggcgcggctagactgccaaaggtacgaagacccacaaaaccaagtaaaatggcaaaagaaaagcgcctccttgcaaagaggcgccaatcacaaaaaaagaccgaaagggcgaaacaggcagattgtttcacgtga

SEQ ID NO: 57422 - protein, 103 aa, Unknown
  Obtained from environmental sample
  misc_feature (1)..(103): Xaa is any amino acid
MRLRVSELLGLSEAEIERVKSVLANRLTKDGEIILTSEEERSQQTNLERAYSRMETLITGAARLPKVRRPTKPSKMAKEKRLLAKRRQSQKKTERAKQADCFT

SEQ ID NO: 57423 - DNA, 1437 bp, Unknown
  Obtained from environmental sample
  misc_feature (1)..(1437): n is a, c, g, or t
ttgagagaattaatacaccattttgttgaacatcgtgtcgaagttgtcacgcgccgcacccgtttcgatttacgcaaggcggaagaacgcgcccatatcctcgaaggactggttatcgcccttgctaacattgacgaagtaatcgctattatcaaggcgagcaaagatgtggcgacggcgcggcttaaactgcaagggcgctttaagctgtccgaggcacaatctgaggcaatcgtcgagatgcgtttgggccgccttacgagccttgaaatcgaaaagattgaaaaagagcttgcggagctgaaagttcaaatcgcttacttcaaatccctgttagccgatgaaaagaaactgcgcggcgttatcaagaccgagacaagggagattgccgacaaatacggggacaagcggcgcacggaaataatcgcgggcgaagtggaaaatatcaatatcgaagacttgatcaagaaagaggaaatgatgattctcatttccaatcttggttatgtaaaacgggtacctgtatccgcttataaaaatcaaggaagaggaggcaagggtatgcagagcgcaaaacttgcggaagacgattatgtggggcagatttttgtcgcctcaactcacgagtacattatgttcattaccagcgccggcaaagcgtactggatgaaagtccacgaactgccggaaggcacaaggataagcaaaggctcccacatcaagagcctgcttacggtttctccgaacgaggatattaccgccatagtgtcgctcaaggacttcagcgacagcgaatacctgttcatgggaacctcgcacgccgttgtcaaaaaagtaaaaaccagcgaatttgtaaacgccaagacaaggggcatagtagcgataaatctggacgacggcgacaagcttgtaagcgcgcttttgacgaagggcgacgacgaagtggtgttgatttcccgcaagggacaggctcttcgcacccacgaagaacacgtccgcgccatgggacgctcctcaagaggggtcacaggcatgaaactttccgaaggggacgagctgaccggtatgctgagggtagataccggcaaagattcgccgcctgagaaagtcgaaaaaatgctgatcatctccgaatacggctacggcaagcgggttgatttcagcgagttttcatcgcacgggcgcggcaccggcggtcagaagatttacacggtcagcgataaaaccggcgaaattgtcggctgtgtcaacgtgtttgacgatgacgatataatgtgcattacaagccagggcaagtctattaaaatgaaagtagacgatatccgcgtaatgggacgctccgctcagggcgtgcgcttactcagtattgacaagccggattttgtaataggtctcgacagaatcgttaaggaagacgaagctgccgtaggagaataa

SEQ ID NO: 57424 - protein, 478 aa, Unknown
  Obtained from environmental sample
  DOMAIN (1)...(134): DNA gyrase/topoisomerase IV, subunit A
  misc_feature (1)..(478): Xaa is any amino acid
MRELIHHFVEHRVEVVTRRTRFDLRKAEERAHILEGLVIALANIDEVIAIIKASKDVATARLKLQGRFKLSEAQSEAIVEMRLGRLTSLEIEKIEKELAELKVQIAYFKSLLADEKKLRGVIKTETREIADKYGDKRRTEIIAGEVENINIEDLIKKEEMMILISNLGYVKRVPVSAYKNQGRGGKGMQSAKLAEDDYVGQIFVASTHEYIMFITSAGKAYWMKVHELPEGTRISKGSHIKSLLTVSPNEDITAIVSLKDFSDSEYLFMGTSHAVVKKVKTSEFVNAKTRGIVAINLDDGDKLVSALLTKGDDEVVLISRKGQALRTHEEHVRAMGRSSRGVTGMKLSEGDELTGMLRVDTGKDSPPEKVEKMLIISEYGYGKRVDFSEFSSHGRGTGGQKIYTVSDKTGEIVGCVNVFDDDDIMCITSQGKSIKMKVDDIRVMGRSAQGVRLLSIDKPDFVIGLDRIVKEDEAAVGE

SEQ ID NO: 57425 - DNA, 1317 bp, Unknown
  Obtained from environmental sample
  misc_feature (1)..(1317): n is a, c, g, or t
ttgctctggtccatagatgaaccgcctataccctccggaacggttctgccggtgtatatcaagtctaatatcaataaagtctgggttgtcggtctgccggagggctggcacggcggcaagaaccagatggacaaaatagagattccgttttcccgctttgaacttgtgggaagcaagagaaaagccaaaatgcgggcggaggctttttccaaatacgcgcttagctatgcggaaaatttgcaggacggactgccgatacgggatgcccccgataacaacggccggcggatctaccgtttgaaaatgggcgagattatcaaaattctttctgtcacggagggcagtccggctatcggctcaacgggagagcccctgccgggcgaatggtataaagtgcttaccgaagacggcagcacgggctactgtttctcataccggctcaggctgtttgagtatggcgacgggcagtttgttgtttccggggctgtcatcaatgaaaaaaccgaagatcccgttctggatgaactgttgtcaaaaacctggtcgcccgaatcgtatttaacaatgattaactcaaaaaaaatcaatcttgaagaattgtataagaattggcactttgatccgggacaggagaccggacgtgccagaatttttgcacccgatattgacagcaacaaccagtcgcataacagtattgacaaaagctattcgtataccagcatccggcgtgacggtaatcgaacatggcgttttgaagggaccaacctttcaatgcagcttagatcagacacgatcctggccgtacagtttctggaagggagcggcagtacaaggactttgctctttgtctcgctgcctgtcagcgtggacgatcttatcttccaggaaaccgcacgccgcaatagactgtacaacgagatttacaatcaggggccggtatataccagtaccaactatggaacgatcacttttaagcaagattcgcttccgggaggcacgactccagcggggggcgggacgttttcatggaagaatttcgatctgctggttcccagattcatccctgaagatattgagggggacgggacgattctgatagaccttttccttgaccgctcgcttgaggagcgttacgacggagcgttcaccctgcgctttacaaatacgaggattgcgctgcgctgcatgtactcgctggacaatgaagggttcaggatagagatagtccccgattcgagcattgaggatgtcaccattatgcggcggggggcgtcgccgatggttttgtacttcttcagggacacggagttctggtaa

SEQ ID NO: 57426 - protein, 438 aa, Unknown
  Obtained from environmental sample
  misc_feature (1)..(438): Xaa is any amino acid
MLWSIDEPPIPSGTVLPVYIKSNINKVWVVGLPEGWHGGKNQMDKIEIPFSRFELVGSKRKAKMRAEAFSKYALSYAENLQDGLPIRDAPDNNGRRIYRLKMGEIIKILSVTEGSPAIGSTGEPLPGEWYKVLTEDGSTGYCFSYRLRLFEYGDGQFVVSGAVINEKTEDPVLDELLSKTWSPESYLTMINSKKINLEELYKNWHFDPGQETGRARIFAPDIDSNNQSHNSIDKSYSYTSIRRDGNRTWRFEGTNLSMQLRSDTILAVQFLEGSGSTRTLLFVSLPVSVDDLIFQETARRNRLYNEIYNQGPVYTSTNYGTITFKQDSLPGGTTPAGGGTFSWKNFDLLVPRFIPEDIEGDGTILIDLFLDRSLEERYDGAFTLRFTNTRIALRCMYSLDNEGFRIEIVPDSSIEDVTIMRRGASPMVLYFFRDTEFW

SEQ ID NO: 57427 - DNA, 1278 bp, Unknown
  Obtained from environmental sample
  misc_feature (1)..(1278): n is a, c, g, or t
atggcctttgtgcaattttccaaagtttccctcgctttcggcgaccgcgatattcttaaagacgtaagtctgcatttaacggcgggctctcgggcgtgtctcgcaggggcgaacggatcggggaagtccacgctgatgaaggtgcttgccggggagcttcccgcggattcgggcgacagggcggtgcagcggggcacgcggatttcctacctgccccagtcgggaattgtccacgtgggaaagagcctgcgcgacgaggcggaaacggcgtttgcccacattcaggaactgattgaccgctctgaaaaaatcgccgccctcntgcaaaacgccaaaagcgacgacggaacgtcaaaagcccttctggaagaccaccaccgcctgcaggaacagattgaaaattccggctactaccgccgcgacgccgcgatctcttccgtgctggctggctttggcttttcgcctaacgaccttgaccgggacacgggcgaattttcgggcggatggcagatgaggatcgccctggcgaaagcgctgcttgaacagcctgacattctgcttcttgacgagccgaccaactatctggacatagaagcccgcgcctggcttgaaaactggctggccaaatttcccggcggctgcctgctggtttcccacgaccgctatttccttgatgtcaccgtcaacgaggtctacgagatttttcagggcaatcttaaacgctatgcgggcaactacagcgcctacgaaaaaacgcggcaaatggaactcgccagcctcatgaaacgctatacggaacagcaggaggaaatcgccaaaaccgaggctttgatccgccgcttccgttacaaagcttcaaaggcggcctttgcccaggagcttatcaaacggctcgaaaaaatggagcgcatagaaatccccgagaacctgaaaaagataaacataaatttcccgccgccgccccattcgccgcgggtcgcgctgaccattgagggtcttggcaagagctacggcgcaaagaaggttcttcatgggctggatctgacacttgattccggcgagaggctggtggttgccgggccaaacggagcgggcaagacgacgcttctgcggatactcgcgggcaatgacaatgatttgaaggctcgtaaaattcggatcggggataagcgccggctatttttcgcaggacgccgccgaggcgttgaacggcagcgaacaggtaatcgatttcatggaaaccaacgcccccacagcactcattccaaaaatacgtga

SEQ ID NO: 57428 - protein, 425 aa, Unknown
  Obtained from environmental sample
  DOMAIN (29)...(237): ABC transporter
  misc_feature (1)..(425): Xaa is any amino acid
MAFVQFSKVSLAFGDRDILKDVSLHLTAGSRACLAGANGSGKSTLMKVLAGELPADSGDRAVQRGTRISYLPQSGIVHVGKSLRDEAETAFAHIQELIDRSEKIAALXQNAKSDDGTSKALLEDHHRLQEQIENSGYYRRDAAISSVLAGFGFSPNDLDRDTGEFSGGWQMRIALAKALLEQPDILLLDEPTNYLDIEARAWLENWLAKFPGGCLLVSHDRYFLDVTVNEVYEIFQGNLKRYAGNYSAYEKTRQMELASLMKRYTEQQEEIAKTEALIRRFRYKASKAAFAQELIKRLEKMERIEIPENLKKININFPPPPHSPRVALTIEGLGKSYGAKKVLHGLDLTLDSGERLVVAGPNGAGKTTLLRILAGNDNDLKARKIRIGDKRRLFFAGRRRGVERQRTGNRFHGNQRPHSTHSKNT

SEQ ID NO: 57429 - DNA, 411 bp, Unknown
  Obtained from environmental sample
  misc_feature (1)..(411): n is a, c, g, or t
ttgccgcgttttttcgtaggcgctgtagttgcccgcatagcgtttaagattgccctgaaaaatctcgtagacctcgttgacggtgacatcaaggaaatagcggtcgtgggaaaccagcaggcagccgccgggaaatttggccagccagttttcaagccaggcgcgggcttctatgtccagatagttggtcggctcgtcaagaagcagaatgtcaggctgttcaagcagcgctttcgccagggcgatcctcatctgccatccgcccgaaaattcgcccgtgtcccggtcaaggtcgttaggcgaaaagccaaagccagccagcacggaagagatcgcggcgtcgcggcggtagtagccggaattttcaatctgttcctgcaggcggtggtggtcttccagaagggcttttga

SEQ ID NO: 57430 - protein, 136 aa, Unknown
  Obtained from environmental sample
  misc_feature (1)..(136): Xaa is any amino acid
MPRFFVGAVVARIAFKIALKNLVDLVDGDIKEIAVVGNQQAAAGKFGQPVFKPGAGFYVQIVGRLVKKQNVRLFKQRFRQGDPHLPSARKFARVPVKVVRRKAKASQHGRDRGVAAVVAGIFNLFLQAVVVFQKGF

SEQ ID NO: 57431 - DNA, 315 bp, Unknown
  Obtained from environmental sample
  misc_feature (1)..(315): n is a, c, g, or t
gtggtccgggttgttcccctttcgtccgctgaccttatcgcccgcgggctgcctgcgcagctgaacttgcgcggtattcggagttcggttgggtttggtaggcgggtgcgccccctagtccatccggtgctctacccccggcaagcatcgctgcacgcaatacctaaatatttttcggagagaacaagctatcgcccagtttggttggcctttcacccctatccaaagctcatccggacgcgtttcaatgcatatcggttcggccctccacggggtgtcacccccgcttcggcctggccttggatagatcactaa

SEQ ID NO: 57432 - protein, 104 aa, Unknown
  Obtained from environmental sample
  misc_feature (1)..(104): Xaa is any amino acid
MVRVVPLSSADLIARGLPAQLNLRGIRSSVGFGRRVRPLVHPVLYPRQASLHAIPKYFSERTSYRPVWLAFHPYPKLIRTRFNAYRFGPPRGVTPASAWPWIDH

SEQ ID NO: 57433 - DNA, 1647 bp, Unknown
  Obtained from environmental sample
  misc_feature (1)..(1647): n is a, c, g, or t
atgatcattgacgaaaatcaccctttttcctcttttggactttcagagccggtgttacaggctatcgcccgtaaaggctggacagcgcccagttcgatccaaagtatagccctgcccaggctgcttgccgatgaggggcattgtattgtaaaggcccgcacgggcacagggaaaacagccgccttcgggataccgcttattgaaagactcacccaggccggtcatgccccgcgcgcgttgatccttgccccgacccgtgagcttgcccttcaggtttccagagaaattgcttctctggttacagggcattatcccagggtaacggctgtttatggcggcgcttccatcagaaaccagatactcgatctgcggcgcggaacggaaattgtggtgggaactcccggccgtgttatggatctgatggaacgcaagactctggatgtttcagcggtggactggtttatcctggacgaagccgatgaaatgctggatatgggcttttttgaggatgtggaaaaaatacttgccgcggtgaaggaagccgcggcacatgccgctgaagcgggacggcaggacggtacccgggttgctggcgctagaagcgcgggcactagaagtgccttgcacatagcccttttttccgcgaccatgcccgaacctatcttaaaagtagtacgcaaacacattggcgatgccgaaataatcgtggatgccgcgcccgaggacgaaaagcccctggttgatcagtactgcattctcgtcaggcgggaggacaaactcgaagccctcaggcggatcatcgacagttccgacgaattttacggattaatcttttgcgctacaaaggtggaaaccgacgaactggcgcgaaggcttgttgaagcgggttatcccgccgaggccatacacggcgatctttcccaggaaatccgggagcgcaccctgcggcgtttccgcctgcgccagcatggttcgcggaaccacgccgtcgcggctgtttccgcgggcggcgagccggctattctcgtagctaccgatgtcgcggctcgcgggcttgatattgagaatctcacccatgtcatcaactgggatcttcccaatgaccgtgaaacttatgtccaccgcataggcaggacagcgagagccgggaagcgcggcatagcgatcagccttgccgctctctcagatcgggggcgtatacaccagatttcccggatgatggaaaagactctgggctgcggaattttatggcttaaagtcccatcggtaaagtcggttatgaaggcccttcgacggcagatcagttccagggtggttgccgccctgcccgggcaggaacccgctgccggaaacaacgagccattggctgacgcggcaacgccttctgaaaaaacgatagactccgaggtcaaagaaatgccggaggcttcgcctttccttgccaaggtttgccgcagcctgatagaccggctgggcgcggaaaaggctgttgaagccctggtatccctgagttatggcgagttccttgatcccgggcgttatgggcctatcaccgaatttcaggaagaagattttcatgaacctgtcaaagccgccggtaaaagcgccggcggcagaagtgccggcgggcaatttcgccggcggtaa

SEQ ID NO: 57434 - protein, 548 aa, Unknown
  Obtained from environmental sample
  DOMAIN (291)...(383): Helicase conserved C-terminal domain
  misc_feature (1)..(548): Xaa is any amino acid
MIIDENHPFSSFGLSEPVLQAIARKGWTAPSSIQSIALPRLLADEGHCIVKARTGTGKTAAFGIPLIERLTQAGHAPRALILAPTRELALQVSREIASLVTGHYPRVTAVYGGASIRNQILDLRRGTEIVVGTPGRVMDLMERKTLDVSAVDWFILDEADEMLDMGFFEDVEKILAAVKEAAAHAAEAGRQDGTRVAGARSAGTRSALHIALFSATMPEPILKVVRKHIGDAEIIVDAAPEDEKPLVDQYCILVRREDKLEALRRIIDSSDEFYGLIFCATKVETDELARRLVEAGYPAEAIHGDLSQEIRERTLRRFRLRQHGSRNHAVAAVSAGGEPAILVATDVAARGLDIENLTHVINWDLPNDRETYVHRIGRTARAGKRGIAISLAALSDRGRIHQISRMMEKTLGCGILWLKVPSVKSVMKALRRQISSRVVAALPGQEPAAGNNEPLADAATPSEKTIDSEVKEMPEASPFLAKVCRSLIDRLGAEKAVEALVSLSYGEFLDPGRYGPITEFQEEDFHEPVKAAGKSAGGRSAGGQFRRR

SEQ ID NO: 57435 - DNA, 465 bp, Unknown
  Obtained from environmental sample
  misc_feature (1)..(465): n is a, c, g, or t
atggcgagttccttgatcccgggcgttatgggcctatcaccgaatttcaggaagaagattttcatgaacctgtcaaagccgccggtaaaagcgccggcggcagaagtgccggcgggcaatttcgccggcggtaattttaccggcaggagaagggatgaccggacgcgcagggcttcaggcccgcacgcgccaatgggcaagcgcggttcgggcagggaattccgggaagaaacaggcgattttacgcgggtatatgtaggccagggacggcagcacggccttggcgccagggacatagccagtctgttaatgcgcgcgggcggcattcccggacgtcttgtagatgaaatagaaatgaaagattactgttcgtttgcgaccctccccgcagacgccgccaaacgggcctgcgctttttcccgcaaagaccagcaatcgcctgtaatacgccccgcaaaaccctaa

SEQ ID NO: 57436 - protein, 154 aa, Unknown
  Obtained from environmental sample
  DOMAIN (71)...(153): DbpA RNA binding domain
  misc_feature (1)..(154): Xaa is any amino acid
MASSLIPGVMGLSPNFRKKIFMNLSKPPVKAPAAEVPAGNFAGGNFTGRRRDDRTRRASGPHAPMGKRGSGREFREETGDFTRVYVGQGRQHGLGARDIASLLMRAGGIPGRLVDEIEMKDYCSFATLPADAAKRACAFSRKDQQSPVIRPAKP

SEQ ID NO: 57437 - DNA, 384 bp, Unknown
  Obtained from environmental sample
  misc_feature (1)..(384): n is a, c, g, or t
ttggcatatattgatccaccgtataatcaacatccatatggatcgaattattttatgcttaatttaataattgattatattgaaccgcaaattattagtaaaatttcaggcattcctaataattggaatagatcaatttacaacaaaaaagcatacgcttataattcatttaaggaacttgtagaaaaaattaaagcaaaatatttattaatttctttcaattctgagggctttattcggcataatgaaataataagtttattgaaaaaagttggaaaattggaaattttggaaacaagatataatacatttagaggcagtagaaatttaagaaatagagatatacatattaaagaatatttatatttagttgaaaaaaaataa

SEQ ID NO: 57438 - protein, 127 aa, Unknown
  Obtained from environmental sample
  misc_feature (1)..(127): Xaa is any amino acid
MAYIDPPYNQHPYGSNYFMLNLIIDYIEPQIISKISGIPNNWNRSIYNKKAYAYNSFKELVEKIKAKYLLISFNSEGFIRHNEIISLLKKVGKLEILETRYNTFRGSRNLRNRDIHIKEYLYLVEKK

SEQ ID NO: 57439 - DNA, 1371 bp, Unknown
  Obtained from environmental sample
  misc_feature (1)..(1371): n is a, c, g, or t
atgctgtttctggcgtattatttaatcgcgaatttaattaataagcccattgaacagcttatattcggcgttaagcagcttgccgacggcaatcttgacacgcagattaacatatcgtcgcatgatgaattaagaatgcttgcagacacatttaataaaatgacgggcgaattaaaaaagacaatagaagaggcggcttatgagcgcgctgaaaaacaaaagataaatacggagcttagcgtcgccgcctcaatacagataagcatgctgccgagaattttcccgccgtttccggacaggaatgaatttgacatatacgcctcaatgtttcccgcaagggaagtaggaggcgatttttacgatttcttttttgtggataaagacaaccttgccctggttattgccgacgtatccggcaagggaattccggccgcgctttttatggtaatcgcgaaaacattaataaatgataacagctacgggaaaacccccgccgccgtatttgaaaatgtaaacaaaaaactctgtgaaaacaatgaaatggggctgtttgttacggcatttttcggtctttataatataccctcgggaagatttgtttttgtaaacgccgggcataatcctccgctgttaaaaagaagcggtaaaagttatgaatttattaatacagaaccttgtattgttttagcgttcatggaagacataaaatacaaagaagaagagctgtacattaagcccggcgacatgctttatttttacacagacggcgtaacggaagcgatgtcgcatgacaaagaattattcggagagcaaaggcttgtaaacgcccttaacaaaaatatagattgttacccgcaggatcttttacaggcgataaaacgcgaagttgacattttttccggcggaaatgaacaggcggacgacattacaatgctcgcgataaaaatcagcgaaaatccggacagccctgttaaaaagatgaagcttcaggcaaatgttaaaaatttaagccgagtaattaattttgtaaataaagaattggaaaaaataaattgtcagcccgatatgtgtgatataattgacgttgtagtagaggaaatttttgtaaatatagcgaattacgcttatgagccggacattggagatgtaactatatatgtttccgcctcggataaggtggaaattaaatttgaggataacggaaaaccttataatcctattgagactgacgatccaaatctggagatagatatttcccagcgggaaatagggggactggggatttatcttgtgaagaagcttgtggattttattgaatattcgcggattgaggataggaatgtgctggtgattactaagaagcttgggtaa

SEQ ID NO: 57440 - protein, 456 aa, Unknown
  Obtained from environmental sample
  DOMAIN (1)...(60): HAMP domain
  misc_feature (1)..(456): Xaa is any amino acid
MLFLAYYLIANLINKPIEQLIFGVKQLADGNLDTQINISSHDELRMLADTFNKMTGELKKTIEEAAYERAEKQKINTELSVAASIQISMLPRIFPPFPDRNEFDIYASMFPAREVGGDFYDFFFVDKDNLALVIADVSGKGIPAALFMVIAKTLINDNSYGKTPAAVFENVNKKLCENNEMGLFVTAFFGLYNIPSGRFVFVNAGHNPPLLKRSGKSYEFINTEPCIVLAFMEDIKYKEEELYIKPGDMLYFYTDGVTEAMSHDKELFGEQRLVNALNKNIDCYPQDLLQAIKREVDIFSGGNEQADDITMLAIKISENPDSPVKKMKLQANVKNLSRVINFVNKELEKINCQPDMCDIIDVVVEEIFVNIANYAYEPDIGDVTIYVSASDKVEIKFEDNGKPYNPIETDDPNLEIDISQREIGGLGIYLVKKLVDFIEYSRIEDRNVLVITKKLG

SEQ ID NO: 57441 - DNA, 681 bp, Unknown
  Obtained from environmental sample
  misc_feature (1)..(681): n is a, c, g, or t
gtggtaattacaggatacaaaggcacggcaacgacagtccgcatccccgctacgatacagggcttgccggtcaaggaaataggggaaagagctttttggggtatcagttctcctggttttaattatgccgtcaatcaaaacataaccagtataatgattcccgagggagttactacaataggcgaaagagcatttgaggattgtacagccttacgtaccgtaagcctgccagacacgcttacaagcataggatatgcggcatttgacgactgcaaggcccttgattctataaagcttccggttggccttaaggaaataagaagtagtgttttccgtggatcaggtcttacttcaataagttggccggctgggttaaccagaatcccttatgagacgtttcaaagaacaaaatttcgcaacgtgactatccccgaaggtgttatcgaaatatttgataacgcattttatgaatgtacaaacttaacaagcgttactctacccacaactatcagggaaataggtagttgggcatatggtaattgttcatcgttaaccacaataagcatcccagaaacggtaacaaagatagagtttggccctaatccatttgaaggatgccgtaatctaaaactcgaaagccaggccgccttgcggcgagtcggctatacaggttcgttttaa

SEQ ID NO: 57442 - protein, 226 aa, Unknown
  Obtained from environmental sample
  misc_feature (1)..(226): Xaa is any amino acid
MVITGYKGTATTVRIPATIQGLPVKEIGERAFWGISSPGFNYAVNQNITSIMIPEGVTTIGERAFEDCTALRTVSLPDTLTSIGYAAFDDCKALDSIKLPVGLKEIRSSVFRGSGLTSISWPAGLTRIPYETFQRTKFRNVTIPEGVIEIFDNAFYECTNLTSVTLPTTIREIGSWAYGNCSSLTTISIPETVTKIEFGPNPFEGCRNLKLESQAALRRVGYTGSF

SEQ ID NO: 57443 - DNA, 1095 bp, Unknown
  Obtained from environmental sample
  misc_feature (1)..(1095): n is a, c, g, or t
ttggaattaaccggtaaaaaagtgctcggcattggcgacgcttcaggtatgtttcctattgataacggcaaatacaacactttaatgataaaacagtttgacgatcttatcgcttcaaacaattacagttggaaaattgcaaacattctcccctccgttttaaacgccggtgaaaacgcaggtgtcctcaccgcacaaggggcgaaattgcttgattcgtccggctgcctgcgggacgggattcctctctgcccgccggaaggagacgcgggaacgggcatggttgcgactaacagcgttgcggagcgtacaggtaatgtttcggcgggcacttccatttttgcgatgatcgttatggaaaaagaactgtcaaaggtataccccgaaattgatattgtcactaccccgtcgggaaagcctgtggcgatggttcactgcaacaactgtacttccgatattgacgcatgggtaaaattattcaagggactgattgacatgagcggcgcaaaaattgaaaagcctgcgctttatgacgtgctgtattacaaagctttggaagcggatgatgattgcggcgggcttctttcatataattattattcaggcgaaactattacgggaattgaggaaggacgtcctctgttcgcgcgcctgcccgacagcaattttacgccggcaaattttatgcgaacccttcttttttcgagtatggcgacattaaagtacggcatagatattcttaccgaaaaggaaaagacgaagatagacagcctgttaggtcatggcggcttgttcaaaacaaaaggcgtaggacagcgatttatggcggcggtctttaacgcacccgtctcggtaatggaatccgccggtgaaggcggagcatggggcatcgcccttctttccgcgtttatgcgcgagggcgcgaaaactctggaaaaatttcttgcggaaaaagttttcgcgggaaagaccggcgtgcgcattgatcctgatccgaaagatgtggaaagttttaaaaaatttatggaacaatataccgcaggacttaaaattgaaaagtccgcggttgaaaattttaagaggggtaaattatga

SEQ ID NO: 57444 - protein, 364 aa, Unknown
  Obtained from environmental sample
  DOMAIN (99)...(336): FGGY family of carbohydrate kinases, C-terminal domain
  misc_feature (1)..(364): Xaa is any amino acid
MELTGKKVLGIGDASGMFPIDNGKYNTLMIKQFDDLIASNNYSWKIANILPSVLNAGENAGVLTAQGAKLLDSSGCLRDGIPLCPPEGDAGTGMVATNSVAERTGNVSAGTSIFAMIVMEKELSKVYPEIDIVTTPSGKPVAMVHCNNCTSDIDAWVKLFKGLIDMSGAKIEKPALYDVLYYKALEADDDCGGLLSYNYYSGETITGIEEGRPLFARLPDSNFTPANFMRTLLFSSMATLKYGIDILTEKEKTKIDSLLGHGGLFKTKGVGQRFMAAVFNAPVSVMESAGEGGAWGIALLSAFMREGAKTLEKFLAEKVFAGKTGVRIDPDPKDVESFKKFMEQYTAGLKIEKSAVENFKRGKL

SEQ ID NO: 57445 - DNA, 1191 bp, Unknown
  Obtained from environmental sample
  misc_feature (1)..(1191): n is a, c, g, or t
atgcccctgctgccagtgcttgccgaaatggaaggcgtcggcataatgatagagcctgatgtcttaacaagttatggaaaggagcttgaaaccgaactggggaatctccagcgtgatacctggaaaatggcggggcatgaatttaatttggcgtccaccaggcaattacaggaggtgctttttaccgagcgcaaactgaagccggggaaaaagctcaagactggctattccaccgatgccgcgacccttgaagagcttgcccgcgaggatccgcttcccgctctgatactccggcaccgtactctcgcgaagctgaaatccacttatgtggacactctggcgggcatggctgacggtgaaagaaggctgcatacaaactttgaccagtgcggaacggcgacaggccgcctttccagccgggaacctaatttgcagaatattcccatccgcgccgaggaaggccgccgtatacgcgaagcctttattgccggtccgggctgccttttattatccgttgactacagccagatagagcttgtggttttggcccatctttcacaggatgaaaaccttcttgccgccttcagggacggtacggatgtccatgcccgtaccgccgcgttgatattcggcgtcggcgaagacaagataaaaccggaacagcggcgcatggcaaagacgatcaatttcggcgtgatgtacggcatgagcgcgttcaggctttcaaacgaattggggatcagcagaaccgacgcgatgaattttataacggcgtattttaacacatattcgggcgttaggcgttttattgaggaccttatcaaaaaaacagaggactgcggttatgtctcaacaatacttggccgccgccggtatatccccaccattaactcgcgaaacaagaccgaaaaagccgccgccgagcgcattgcggttaacacccccattcagggttctgcggcggatattgttaaaaccgccatgatcaatctggacaaacgccttaccgccgagaaaagcagcgcgcatattctgctgcaggttcacgatgaactcatccttgaatgtccgaaagatactgcggacaaaacggtggaactggttaaaacggaaatggaacaagcggtaaaactaagcgttccgctgagggtaagcgtggagacaggaagccgctggggcagtttccactaa

SEQ ID NO: 57446 - protein, 396 aa, Unknown
  Obtained from environmental sample
  DOMAIN (17)...(395): DNA polymerase family A
  misc_feature (1)..(396): Xaa is any amino acid
MPLLPVLAEMEGVGIMIEPDVLTSYGKELETELGNLQRDTWKMAGHEFNLASTRQLQEVLFTERKLKPGKKLKTGYSTDAATLEELAREDPLPALILRHRTLAKLKSTYVDTLAGMADGERRLHTNFDQCGTATGRLSSREPNLQNIPIRAEEGRRIREAFIAGPGCLLLSVDYSQIELVVLAHLSQDENLLAAFRDGTDVHARTAALIFGVGEDKIKPEQRRMAKTINFGVMYGMSAFRLSNELGISRTDAMNFITAYFNTYSGVRRFIEDLIKKTEDCGYVSTILGRRRYIPTINSRNKTEKAAAERIAVNTPIQGSAADIVKTAMINLDKRLTAEKSSAHILLQVHDELILECPKDTADKTVELVKTEMEQAVKLSVPLRVSVETGSRWGSFH

SEQ ID NO: 57447 - DNA, 747 bp, Unknown
  Obtained from environmental sample
  misc_feature (1)..(747): n is a, c, g, or t
atgagggggttttgcatgagcggcataatggtcagggccgagggccttgtaaaaaattatatttccggaaacgagaatcttcatatcctaaagggagtcagttttgaaattccccttggtcgctcggcggcaatcagcggacagagcggcagcggaaaaagcaccctgctgaatatactgggcggccttgatcactgcgatgcgggaagcgcctttgtcggcgatatggaaattaccgcgcttgcggagaaaggcctttctgcgtaccgcagcaggaaagtcggatttatttttcagttccattacctgttaaaagattttaccgccctggaaaacgtcatgctgccggcatacatggccggcatgaataaaaagaaagccctggaaagggccagggaactgcttgccgacctaatgcttgccgaccggacggggcatttcccttcccagctttcaggcggcgagaggcagagggtggctgtcgcgaggtctatggtcaatgatcccgatcttattttagccgacgagcctacgggcaaccttgatcccgataacagcgcgattgtcgccgaactgctttataggggcgcggaaaaatggggtaagacccttttggtggtaacccatgacgagaaactcgcggcaagggccgcctgctgctataccctggtaaacggtctgttaagtgtaaccaaaaaggtaaccgcgccttccagggaaggctcgctttctaaggaaagcgtatga

SEQ ID NO: 57448 - protein, 248 aa, Unknown
  Obtained from environmental sample
  DOMAIN (40)...(226): ABC transporter
  misc_feature (1)..(248): Xaa is any amino acid
MRGFCMSGIMVRAEGLVKNYISGNENLHILKGVSFEIPLGRSAAISGQSGSGKSTLLNILGGLDHCDAGSAFVGDMEITALAEKGLSAYRSRKVGFIFQFHYLLKDFTALENVMLPAYMAGMNKKKALERARELLADLMLADRTGHFPSQLSGGERQRVAVARSMVNDPDLILADEPTGNLDPDNSAIVAELLYRGAEKWGKTLLVVTHDEKLAARAACCYTLVNGLLSVTKKVTAPSREGSLSKESV

SEQ ID NO: 57449 - DNA, 1209 bp, Unknown
  Obtained from environmental sample
  misc_feature (1)..(1209): n is a, c, g, or t
atgaaggcgggcgttatttgcgcgggggccgccgcggggatcgccgtcagcctcgtgccgatcatcgtcacccttattgtcgcggacggaatgatcagaggaatcattgaccgctacctggagatggggacaggccatatgcaggtattcagctttaccggcgcggacagcctgaacggggcggcagataaaatacggaggattgacggcgtcaggggagtatggcttgaacagcggggaatgggggtgctgatagggaaaaaaggaaagaccggggccagtatccgcgccatagatccttctttttgggaggacgcgggaagcagggagtatctaaagcttattgccggaaatgtccggcttgagacagaccggcaaatgctgttaggcgaaagccttgccgcttccatcggagcccaaaccggggatacggtgcgccttatgaccattgtaacaggtgataatggaataaatatgcccaggattacccccttcaccgtttcgggcatagtatcatccggctatcacgagctggacgccctgtggtgcataatcagcggcgggggaggccgccggatactcccgccggagactacatcaagccttattgtcaaggtcgaagatccgtataacaccgttaactcgatggcctggccgctgtacgcggctctggacgcggggttcagcgtgtatacatggaaagacctgatgcgctcccagtacagctcctacgaatcaacgcgccagatactgctgttgataatggcgttaattgtaatagtcgcggcggtaaatgtttcatccgccacttccatgctggtgatagaacggcagcgggacattgccgtgttaaaggttacgggggcaagcgcgaggggcataacggatgtttttctgtgggggagttttcttaccggtttgtgcggggcgcttatcggcattgccgcggggctgctgcttggcaatttcataaaccccattgtccgctcgctggaaaaaatatttagttttttcagcagactgggcggcggcggagaggtaaagattctggatcccggtttctaccttgaaaccatccccataatcattgactggcaggcggtattcctgattggcttttttacggtgctctgttcggttatcgcctcatggcttcccgccatgcgcgccggaagactgaagccgatggaactgcttagaaggaattga

SEQ ID NO: 57450 - protein, 402 aa, Unknown
  Obtained from environmental sample
  SIGNAL (1)...(28)
  DOMAIN (199)...(395): Predicted permease
  misc_feature (1)..(402): Xaa is any amino acid
MKAGVICAGAAAGIAVSLVPIIVTLIVADGMIRGIIDRYLEMGTGHMQVFSFTGADSLNGAADKIRRIDGVRGVWLEQRGMGVLIGKKGKTGASIRAIDPSFWEDAGSREYLKLIAGNVRLETDRQMLLGESLAASIGAQTGDTVRLMTIVTGDNGINMPRITPFTVSGIVSSGYHELDALWCIISGGGGRRILPPETTSSLIVKVEDPYNTVNSMAWPLYAALDAGFSVYTWKDLMRSQYSSYESTRQILLLIMALIVIVAAVNVSSATSMLVIERQRDIAVLKVTGASARGITDVFLWGSFLTGLCGALIGIAAGLLLGNFINPIVRSLEKIFSFFSRLGGGGEVKILDPGFYLETIPIIIDWQAVFLIGFFTVLCSVIASWLPAMRAGRLKPMELLRRN

SEQ ID NO: 57451 - DNA, 1362 bp, Unknown
  Obtained from environmental sample
  misc_feature (1)..(1362): n is a, c, g, or t
ttgatgaaaataaacgaaaaaaatgatttgactaatggaaagattttacaaaggctgttgtatcttgccgtaccaatattaggctcgcaaacgcttcaaatgttatataacttaaccgatatgttttggttaggtcgtttgggcagtaaagaagtagccgcaacaggggcggtcgggctttatttgtggatgtctgttgcatttatgctgttatgcagtgtcggggcgagtattggagtttctcaggcatttggggcaaatgatataaataaagctaaatcatatacgcatacaagcctgttcttatgcgtagttttaggtttattatacacggcgataatgcttatatttcgttataaattaataagtttttttaattttaaagaagaggatgtaaaaatatttgcagaggattacttatccatcgtatcagtaacgataactcttacctttttgtctgcaactatgggagcagtttttacggcatcaggcaattcccgaacgccgtttttatgtaatataatcggtacagctataaatatggtacttgaccctatatttatatttcctctcaggcttggcgtattaggggcggcttatgcgacaataatcggacaaactgttgttttcacaatgtttattgtttttattaaaataagcaagaaacgtccttttgaaaaaataaaattatttactgtcccaaaatggaatgatattgtatggattattaaaaaagcactgccaataggagcggagagttttctgtttacatttcttgtaatggcaacaacaaggcgtgaagctttttttggagctgacgcaattgcattaagccgtataggttctcaaatagaatcactgacatggttggtcggtggtgcatttggtactgcattggtttcgttcataggacaaaattatggtgcaaaaaaatgggatcgcattagcgaaacattcaagatagcttctttagctatgtttttttatggggcttttgttacgtttgtattggcggtacttggcaagtatttatttggtttgtttttgcccgatcctgtgttaatagagcgtagtgttttatacctccgtattattgcaatatgtcaaataccgctgtgtctggaagccgtatcaagtaattccttccgtggcttaggcaatacgctttcacctgctattataaacacgatctgcaatattttacgagtgccatttgtttatattctatcaatggaaatatttgggtttggtttaataggaatttgggttggtatttcattaagtgcatgcatgaaaagtatttggtcatacacttggtatttaattactgaacgaaaaagaaaaaatgtaaaaaatatataa

SEQ ID NO: 57452 - protein, 453 aa, Unknown
  Obtained from environmental sample
  DOMAIN (25)...(186): MatE
  misc_feature (1)..(453): Xaa is any amino acid
MMKINEKNDLTNGKILQRLLYLAVPILGSQTLQMLYNLTDMFWLGRLGSKEVAATGAVGLYLWMSVAFMLLCSVGASIGVSQAFGANDINKAKSYTHTSLFLCVVLGLLYTAIMLIFRYKLISFFNFKEEDVKIFAEDYLSIVSVTITLTFLSATMGAVFTASGNSRTPFLCNIIGTAINMVLDPIFIFPLRLGVLGAAYATIIGQTVVFTMFIVFIKISKKRPFEKIKLFTVPKWNDIVWIIKKALPIGAESFLFTFLVMATTRREAFFGADAIALSRIGSQIESLTWLVGGAFGTALVSFIGQNYGAKKWDRISETFKIASLAMFFYGAFVTFVLAVLGKYLFGLFLPDPVLIERSVLYLRIIAICQIPLCLEAVSSNSFRGLGNTLSPAIINTICNILRVPFVYILSMEIFGFGLIGIWVGISLSACMKSIWSYTWYLITERKRKNVKNI

SEQ ID NO: 57453 - DNA, 1746 bp, Unknown
  Obtained from environmental sample
  misc_feature (1)..(1746): n is a, c, g, or t
atgaaaatggcgagtaaacctttaaagttccaattccaatccggccttgcccatcaggtttacgccattgacagcgttgtcaatctctttaccgattactctcgggaatttatgccgatttcgcaggcggcggactttgtcttggaaaacgatgtggttccaaacatagccccatattacgaatttaacgaagagtggctctattccaattaccgtgaaatagtggaaaccaatcgtaaatcagcggagatacgggcggacattcccatcaatgatcatcttatctatgatgacggtttgatgctccacaatacaagattcgaaaataaatccgcgcgttatcccattttcacgatagaaatggaaaccggtacgggcaaaacttatacatactttcgtaccattcatgaattaaaacgtaattatgggtttcgtaaatttatcgttatcgttcccagtatcgcaatttatgaagggactatcaaagcattcaaacaaacaaaagaacactttaaaaccttttaccagaacgacaacacaaacattattgaatatgacggcaaatatatctcccgtctgcgctctttttccaattctggttttacagaaatacttgtaatgaccatcgacagttttaacggagcgtcaaatcttatttacaaacctaccgagaaacttcaaggcgagtggcttcctgttgaatatatacaaaagacgcgtcccattttaattcttgatgaaagccagaattaccgcacgcctctcgcccgcgaagcgttacgcaccttaaatccgcttttcgcgattaactacagcgccacgcccgtagataaatacattctggttacccgcctttcacctggcgacgctttcaggcagaatcttgttaagcgtatcagcgtctgcggcgttacggcgcagtacaaccttaacgatgaaactttgactctttccattgaagaaattaagaaaaaccccatcaccgccgacatcaaagcctgctgcatccgcggcggaattaaaacgcgggaaacgctcaagaatctaaaacccggcgacgatcttggtcagaaaacaaagaatcccgattttacgggctttattatcgatgaaatcaattacgccaaacaggaaataatttttaccaaccagtcagtgctgaataaaaaagatgccgccggccttaccctttccgagcgggaagtctaccgggtggaaatcaaagaagccataaaacagcattttcagaaacaaaaatatttattgaataagggcatcaaggtacttacccttttttttattgacagggttccccattacaaaggagagcatgatgcttttatccgctgttactttgaagccgcctttgacgaattaaaaaccagcgatgattattttaagcgtttcgatgtgagccatgttcatgccgggtattttgcccccaagaaagaacaaaaaactgcggctaagactggcggggatgaagaattttttgattatgtggaacttgacgactataagggcaaagataaaaaagaaattaaagaggcggaaaaagaagcatttagcctgataatgcaggacaaggaaacgcttttgacgcttccagatggaaaagatcctaaaaagaatgtcgcctttatctttgcccattccgcattgcgagaaggatgggacaaccccaatgtctttaacatctgccttcttaaagaaccccgtttacgatacgacgaaccccgcncataa

SEQ ID NO: 57454 - protein, 581 aa, Unknown
  Obtained from environmental sample
  DOMAIN (12)...(277): Type III restriction enzyme, res subunit
  misc_feature (1)..(581): Xaa is any amino acid
MKMASKPLKFQFQSGLAHQVYAIDSVVNLFTDYSREFMPISQAADFVLENDVVPNIAPYYEFNEEWLYSNYREIVETNRKSAEIRADIPINDHLIYDDGLMLHNTRFENKSARYPIFTIEMETGTGKTYTYFRTIHELKRNYGFRKFIVIVPSIAIYEGTIKAFKQTKEHFKTFYQNDNTNIIEYDGKYISRLRSFSNSGFTEILVMTIDSFNGASNLIYKPTEKLQGEWLPVEYIQKTRPILILDESQNYRTPLAREALRTLNPLFAINYSATPVDKYILVTRLSPGDAFRQNLVKRISVCGVTAQYNLNDETLTLSIEEIKKNPITADIKACCIRGGIKTRETLKNLKPGDDLGQKTKNPDFTGFIIDEINYAKQEIIFTNQSVLNKKDAAGLTLSEREVYRVEIKEAIKQHFQKQKYLLNKGIKVLTLFFIDRVPHYKGEHDAFIRCYFEAAFDELKTSDDYFKRFDVSHVHAGYFAPKKEQKTAAKTGGDEEFFDYVELDDYKGKDKKEIKEAEKEAFSLIMQDKETLLTLPDGKDPKKNVAFIFAHSALREGWDNPNVFNICLLKEPRLRYDEPRX

SEQ ID NO: 57455 - DNA, 777 bp, Unknown
  Obtained from environmental sample
  misc_feature (1)..(777): n is a, c, g, or t
atgacccgcgtgaatttaaattttgtgaatgacgtttgttataagggagcctttgaacttaaccgttcaataaaagaaggaaaacctctggggcttgaggtctttggacatgagggaaaaaccatttatgaagttctttcaactttgccggaaaaggtaaaggagagctggtttgcttttgatcatttttattctgatataggttttgaagaagcccttcccattgtcttttcccataaaccgaaaaagatcatagacataggcgggaataccgccaagtgggctatctgttgttgccgccatgatcccaatgtggaggtgaccattgtagaccttcccgggcagactcaggcggcggagcgaaaaatagcgcaagccggtttttcagacagaataaaaacccaggcctgtaatgttcttgataaaaaaacagcgattccttccggcgcggacataatttggatgagccaatttctggactgtttttcccttgatgaagttaccctgattatggaaaaggtgcgtcccgcggccggatctaatgcttatgtgtatattcttgaaccattttgggacaaacagcgttttgaagccgcttctttttcgcttcaagctacatctctttattttacatgtatggcgaacggaaacagtaaaatgtaccgctatggtgaacttgcgcaggctgtagaaaaggccggctttgacgttgttgacgcgaagcataatttaggttccaacgagtattcgcttttatgttgtcggagcaaacagtga

SEQ ID NO: 57456 - protein, 258 aa, Unknown
  Obtained from environmental sample
  DOMAIN (14)...(231): O-methyltransferase
  misc_feature (1)..(258): Xaa is any amino acid
MTRVNLNFVNDVCYKGAFELNRSIKEGKPLGLEVFGHEGKTIYEVLSTLPEKVKESWFAFDHFYSDIGFEEALPIVFSHKPKKIIDIGGNTAKWAICCCRHDPNVEVTIVDLPGQTQAAERKIAQAGFSDRIKTQACNVLDKKTAIPSGADIIWMSQFLDCFSLDEVTLIMEKVRPAAGSNAYVYILEPFWDKQRFEAASFSLQATSLYFTCMANGNSKMYRYGELAQAVEKAGFDVVDAKHNLGSNEYSLLCCRSKQ

SEQ ID NO: 57457 - DNA, 702 bp, Unknown
  Obtained from environmental sample
  misc_feature (1)..(702): n is a, c, g, or t
atgttgtcggagcaaacagtgagcggcggaccgtacatttcccgcctttgcgcatgggctcccggaatagagaattccggcgaatgggatgaatgggcgcagggtaagcgcgatatatcttccggcgcgaaaggccaggaaacgcaaggtccggcaatcaattttaccgactccctgttccgccgccgcttaagtcaaatctcaaagatgacagtacatgttgttcatgatttactgcccgtgggaaacgatacgaaaatactttttgtctcattcaggggcgagctttcgcggcagtatcagattaacaaaatgttgatagaagaaaaatccttgatgcccgcggctttttctctttcggtttttaacgcgccagcggcgctggcttccatcgcgctgggactaagggggggatactcggcgctttatccgggaaacaattctttttcctcgggccttgcggcggcggcgtcgtttgtatcgggtactcaggaggaacttatttttgtgtatgccgatgaggagccgccgccggaatacaggcgctattttagcgaatgtcctcccgcaatagcctttgcccttcttttgacacgggacccacaaacccattccgttcctctttcatcactcaatgaagcggaaggcagcccgcttgaatttctcaggctccttctcaggaaaatacatgctaccccctga

SEQ ID NO: 57458 - protein, 233 aa, Unknown
  Obtained from environmental sample
  misc_feature (1)..(233): Xaa is any amino acid
MLSEQTVSGGPYISRLCAWAPGIENSGEWDEWAQGKRDISSGAKGQETQGPAINFTDSLFRRRLSQISKMTVHVVHDLLPVGNDTKILFVSFRGELSRQYQINKMLIEEKSLMPAAFSLSVFNAPAALASIALGLRGGYSALYPGNNSFSSGLAAAASFVSGTQEELIFVYADEEPPPEYRRYFSECPPAIAFALLLTRDPQTHSVPLSSLNEAEGSPLEFLRLLLRKIHATP

SEQ ID NO: 57459 - DNA, 885 bp, Unknown
  Obtained from environmental sample
  misc_feature (1)..(885): n is a, c, g, or t
atgaagcggaaggcagcccgcttgaatttctcaggctccttctcaggaaaatacatgctaccccctgaaatgcctccgataacaaacaaactgctctatgctcacagagtatttggaaaatggtcttcgtttttcgtttttgggctaagttcgctgattctggtagtaatagtttttcccgttatgtgccttgtgtttcatcccaaagaacggtttaaaaaatacggaaggcgttttgtttcggcttccatgagggtctttgtttcctatatgcattttatcggaattgtaaatctggaaacagataaccgtgaaaaataccggcatctttcatcaaagatagtagttgcgaatcatccgtctattcttgacgtagttatacttctttcgcttattccaaacgccgactgtattgtgaatacgaatttaagccgtaattttattgtaaaaggaattgttcgtcatctctatatactcaattctcttgatcttgataatattttacaggcttgcaccgaatcattaaaacttggaaactgcttagtcatttttcccgaaggaaccagaactccaagaacaggtaaagtaattctgaaaaaaggagccgcccgcatttctctgtattcgggctgtaatattgttcctatacatataggaggtacagataaatacggtctgggtaaaaaagacccctggacaggttttaatccacgtgagcgttatatttatgatatcagcatgggacctgaaattaatcctgaaaaataccgcaatcttcccacgccaaaagcggtaagagcgataacaaaagagatagcggcttttctgtttccgtcaaaagaggcatcggctgtaagcgccgtagaaaaagatgatgaagattaa

SEQ ID NO: 57460 - protein, 294 aa, Unknown
  Obtained from environmental sample
  DOMAIN (96)...(219): Acyltransferase
  misc_feature (1)..(294): Xaa is any amino acid
MKRKAARLNFSGSFSGKYMLPPEMPPITNKLLYAHRVFGKWSSFFVFGLSSLILVVIVFPVMCLVFHPKERFKKYGRRFVSASMRVFVSYMHFIGIVNLETDNREKYRHLSSKIVVANHPSILDVVILLSLIPNADCIVNTNLSRNFIVKGIVRHLYILNSLDLDNILQACTESLKLGNCLVIFPEGTRTPRTGKVILKKGAARISLYSGCNIVPIHIGGTDKYGLGKKDPWTGFNPRERYIYDISMGPEINPEKYRNLPTPKAVRAITKEIAAFLFPSKEASAVSAVEKDDED

SEQ ID NO: 57461 - DNA, 1011 bp, Unknown
  Obtained from environmental sample
  misc_feature (1)..(1011): n is a, c, g, or t
atgtggcgggtacaattacataaaataaactatgatgaaagggaatatcaggcggtcagggaagtaatcgattcggggtggcttaccatcagtcagaaaacgtatgactttgaagcggccttttcaacatttctgggacatgacgcgcagtgtcttgccgtttcaaactgtaccgccgctctgcacatggcgctcttggttttgggtatagggcagggcgatgaagtaatcactccggcgctgacctttatcgccgatcaaaatgttacgcgcatgaccggggccgaaaatgtactggccgatattgcctcaatggaagactggtcaatggacggcgatgacatagaggcgcgtatcacgtcaaaaacaaaggcggtgatgatcgttcattacgcgggttatgcctgcgacatggggcgcgtcgccgctttgtgcaaagagcgcaatctgtttcttatagaagactgcgcccatactcccggggcggattacaagggacagccgctgggcactttcggcgacatagcggctttcagtttttttggcaacaagaatatcgccgtgggcgaaggcggcatggttgttacgcgcaatcctgaactgttcgcaaaattaaaaagcttgcgctcgcatgggatgaccgtccaatcgtttgaccgcttcaagggcagggcgtcatcttacgacgtggaatcgccggggttaaattacaggattcacgagatcagttccgctttgggactggttcaattacaaaaacttgaggaagccaacgcaaagcgaaaagaaatagttgaacattattttaagcggctggataatgtttcatcaattgccattccttacaggcatttctcccgcgggaaaccgaattaccatattatgcccatcctgctctctgatccgctggacagaagcgcggttattgaatccatgaaacaggacggcgttcaaaccagcatacattatccggctatccagcgctttacggcatacagggacaagggttaa

SEQ ID NO: 57462 - protein, 336 aa, Unknown
  Obtained from environmental sample
  DOMAIN (9)...(329): Aminotransferase class-V
  misc_feature (1)..(336): Xaa is any amino acid
MWRVQLHKINYDEREYQAVREVIDSGWLTISQKTYDFEAAFSTFLGHDAQCLAVSNCTAALHMALLVLGIGQGDEVITPALTFIADQNVTRMTGAENVLADIASMEDWSMDGDDIEARITSKTKAVMIVHYAGYACDMGRVAALCKERNLFLIEDCAHTPGADYKGQPLGTFGDIAAFSFFGNKNIAVGEGGMVVTRNPELFAKLKSLRSHGMTVQSFDRFKGRASSYDVESPGLNYRIHEISSALGLVQLQKLEEANAKRKEIVEHYFKRLDNVSSIAIPYRHFSRGKPNYHIMPILLSDPLDRSAVIESMKQDGVQTSIHYPAIQRFTAYRDKG

SEQ ID NO: 57463 - DNA, 2262 bp, Unknown
  Obtained from environmental sample
  misc_feature (1)..(2262): n is a, c, g, or t
atgaaaggttacaatgttctgcacccgatgggttttgacgcttatggtctgcccgctgaaaattacgccattaagaccggcactcaccccgctgttacaacggcggcaaatgtcaacaggttccgcgcccaaattaaggcgcttggtttttcctacgattgggatcgcgaagtcgatacgtccgtcgaagactattaccgctggactcagtggattttcttaaaactttttgagaagggactggcttacgaggcggaaagcccgataaactggtgtccttcctgcaagaccggtcttgccaacgaagaagtaaaagacggtctttgcgagcgctgcggcgaaaaagtaacacgcaaacgaatacgtcagtggattttgaaaataaccgcctacgctgaacgcctgcttgcggatttggatttgctggattggcctgagcctgtaaaacttatgcagcgcaactggattggccgcagtgagggcgcgaatgttgtgtttaaagttgataaatcaacgttaaaagataatgaagacctgtcctttgaaatttacacaacgcgccccgacactcttttcggcgtaacttacatggttctctctccggaacatccgctggtggacaaacttacaacgccagaacaaaaacaggcagttgcttcatatatcgaagccgccgcaagaaagagcgatcttgaacgtactgatctcgcgaaggaaaagacgggcgtgttcagcggcgcgtacgctattaatcccgtaaacgatcaaaaaattccaatttggatagcggactatgtgttgatctcctacggcacaggggcgattatggcggttcccgcccatgatgaacgcgactgggattttgccaaagcgtttaatctgccgattgtgcaggtggtcgcggaaaaatttgacgccaacggaaactattcccatgagccgcctgagtgtaccatagccgacggctattccgtcaactcaggttcctttaacggcttacccaccgcggagaccaaaaagcgcgtaacggactggctggaagaaaaaggcatcggcaagcgggcggtcaattataaactgcgggactggattttcagccgccagcgctactggggcgaaccgattccggtggtgcattgcccccactgcggcatagtgccgttagctgaaaaagacctgccgctgaaattgccgcaagtaagctcctatgcgcccaccggcaccggcgagtccccgctggcgggtatcgaagaatgggttaacactacttgcccaaaatgcggcggaaaggcgcaacgggaaaccaacaccatgccccaatgggctggctcctgctggtactatctgcgctaccttgatccgcataacgataccgcctttgccgcgcaggataaaatcaattactggcttcccgttgacctctacgtcggcggcgctgaacacgcggtactgcacctgttatacagccgcttctggcacaaagtgctgtacgactgcggcctggtgaatatcatcgaaccgtttcagcggttgatcaatcagggaatgattctcggcgaggacaaccagaagatgagcaaaagccggggtaatgtaattaaccctgatgatattatcaaagaatacggcgctgatgccatgcgggtctatgaaatgtttatggggccgcttgaggtaagcaagccctggaatacggcgggtctggtcggagtatcgcgttttctggaaaagctgtgggcaattagcgagaaaagcaaaccttcgacagaagatggcatcggcgaagaacaaaggctagagctaacaaggctgcttcataaaactatcaagaaggtttcaagcgacaccgcgaccttaaattttaacacagccataagtcagatgatgatttattcaaacgagctgataaaactggatggcgttcccccttcactttggaagccccttgtgatcatgcttagcgcttacgccccgcatcttggggaagagctttgggaaaagcttgggaataaaggttccgtttcaaaacatccctggcctgcttatgatgaaagccttacggtggacgaggaagttaccgtcgttgtacaggtgaacggaaaaatcagggacaagtttggcgcggcgtacaacacatctacggaggaacttgaaaagaccgccagggctttgcctggaattcaaaagtggattaactgtaaaacaattgcgaaggttattgtggtgccggataaactggtaaacattgtgttaaaaaattaa

SEQ ID NO: 57464 - protein, 753 aa, Unknown
  Obtained from environmental sample
  DOMAIN (601)...(722): Anticodon-binding domain
  misc_feature (1)..(753): Xaa is any amino acid
MKGYNVLHPMGFDAYGLPAENYAIKTGTHPAVTTAANVNRFRAQIKALGFSYDWDREVDTSVEDYYRWTQWIFLKLFEKGLAYEAESPINWCPSCKTGLANEEVKDGLCERCGEKVTRKRIRQWILKITAYAERLLADLDLLDWPEPVKLMQRNWIGRSEGANVVFKVDKSTLKDNEDLSFEIYTTRPDTLFGVTYMVLSPEHPLVDKLTTPEQKQAVASYIEAAARKSDLERTDLAKEKTGVFSGAYAINPVNDQKIPIWIADYVLISYGTGAIMAVPAHDERDWDFAKAFNLPIVQVVAEKFDANGNYSHEPPECTIADGYSVNSGSFNGLPTAETKKRVTDWLEEKGIGKRAVNYKLRDWIFSRQRYWGEPIPVVHCPHCGIVPLAEKDLPLKLPQVSSYAPTGTGESPLAGIEEWVNTTCPKCGGKAQRETNTMPQWAGSCWYYLRYLDPHNDTAFAAQDKINYWLPVDLYVGGAEHAVLHLLYSRFWHKVLYDCGLVNIIEPFQRLINQGMILGEDNQKMSKSRGNVINPDDIIKEYGADAMRVYEMFMGPLEVSKPWNTAGLVGVSRFLEKLWAISEKSKPSTEDGIGEEQRLELTRLLHKTIKKVSSDTATLNFNTAISQMMIYSNELIKLDGVPPSLWKPLVIMLSAYAPHLGEELWEKLGNKGSVSKHPWPAYDESLTVDEEVTVVVQVNGKIRDKFGAAYNTSTEELEKTARALPGIQKWINCKTIAKVIVVPDKLVNIVLKN

SEQ ID NO: 57465 - DNA, 597 bp, Unknown
  Obtained from environmental sample
  misc_feature (1)..(597): n is a, c, g, or t
atggtccttggcacagacgcgttccacgaaggggggaaggcctcctatacccataaagggtttattcatttcggggacgcggacggcaagaacggggagcgggaagatcgtataaccgaattttttacccgctgcggcgtcgcctttgtgcttgagccgaatatgaagcggaagctctggtataagtacatgatcaacgtgggggccaaccaggccacggccgtactgcggctgccctacgcggcgctgcagaacaagggcggaaaaggtgagagcagggaggcgcgccttctctttgagaatgctatgcgcgaggtaatcgccgtagccaacgccgaagggataggccttaatgaaagcgacatagagagcgtctacaaaattatgaacggccttaacccttccggttatacctcaatgtgccaggatgttcttgccggcagaaaaacagaagtggagatgttcagcctcgccttgatggaactggcaaaaaaacacaatatcagcgtgcctgtgaacgaaacgctttatctgcaattaagggtaattgaaaacaaggggactggggactggggactcgggatcagggaaaagtga

SEQ ID NO: 57466 - protein, 198 aa, Unknown
  Obtained from environmental sample
  DOMAIN (54)...(184): Ketopantoate reductase PanE/ApbA C terminal
  misc_feature (1)..(198): Xaa is any amino acid
MVLGTDAFHEGGKASYTHKGFIHFGDADGKNGEREDRITEFFTRCGVAFVLEPNMKRKLWYKYMINVGANQATAVLRLPYAALQNKGGKGESREARLLFENAMREVIAVANAEGIGLNESDIESVYKIMNGLNPSGYTSMCQDVLAGRKTEVEMFSLALMELAKKHNISVPVNETLYLQLRVIENKGTGDWGLGIREK

SEQ ID NO: 57467 - DNA, 603 bp, Unknown
  Obtained from environmental sample
  misc_feature (1)..(603): n is a, c, g, or t
ttgtacgatttgctgggcgcgctgaaatctgaattcctgccgcgaatttacatccagccggatgaaagcgagtgcatacccgcccggcaggtaacggctttcgccgattctatcggcgcgatccccgcttacgcctacctgggcgatgtgggggaatcgcccaccggagacaaaaaggccgaaaaattcgaggatgattacatagaagaactctttgcggagttgtcccgcctgggttacagggctgttgcctatatgcctccccggaacaccgccgaacagcttcgcagggtgcggcggctttgcgccaggtggggctttatggaaatctccggcgttgacatcaacagttcgcgccagttattcaactgccccgaagttttgcgggatgaatcccgccacctgctggacaccacctgggcgcttattgcccacgagcggcttgcttctatagagagtcgcttcggtcttttctctcaggagaatcccctggcaagtgaaagccttgcgcggcggctgaatttgtatgccgcgtttgggaaacgcttggatctttaccatcctgaagattccgccgtgaaaattgcagactggcgtaaataa

SEQ ID NO: 57468 - protein, 200 aa, Unknown
  Obtained from environmental sample
  misc_feature (1)..(200): Xaa is any amino acid
MYDLLGALKSEFLPRIYIQPDESECIPARQVTAFADSIGAIPAYAYLGDVGESPTGDKKAEKFEDDYIEELFAELSRLGYRAVAYMPPRNTAEQLRRVRRLCARWGFMEISGVDINSSRQLFNCPEVLRDESRHLLDTTWALIAHERLASIESRFGLFSQENPLASESLARRLNLYAAFGKRLDLYHPEDSAVKIADWRK

SEQ ID NO: 57469 - DNA, 648 bp, Unknown
  Obtained from environmental sample
  misc_feature (1)..(648): n is a, c, g, or t
atggctgaaaaaggcgtccatgtgtattcaacggacgaaaaaatgggcatccaggcaaatgaacacgcccgtcccaaacaaacggcgaaanccggacgcccggaacggatcgatcctgaatatatacggcacggcacaagcgggatcatcgcgtccagggacgtagcgacaggggagattgtcaagcctatgatacagcctacccgtaccgagaaagactttgtaacccatgtcgaatcggtggtttcgctgcaccctaatgacaagcacatttttataacagataatttgaacacccatatgtcggaaagcctggttaggctggccgcaagaacagacaatatcgctgaaacaactttgggaataaagggaaaagccggcatcctaaaaaacaagcagaccagggccgaatttctgacagatgattcacatcgtatagtgttcgtctacacgcccaaacattgttcatggttaaaccagatagaatgctggtttagtattatcacaagacgtttgttaaataaaagggcttcatttaaaagcgtttatgatcttgagcacaaaataaaatgttttattgattattataatcaatacttaaaaaaaccttttcaatggaattataaaggcaaattattacgtgtctga

SEQ ID NO: 57470 - protein, 215 aa, Unknown
  Obtained from environmental sample
  misc_feature (1)..(215): Xaa is any amino acid
MAEKGVHVYSTDEKMGIQANEHARPKQTAKXGRPERIDPEYIRHGTSGIIASRDVATGEIVKPMIQPTRTEKDFVTHVESVVSLHPNDKHIFITDNLNTHMSESLVRLAARTDNIAETTLGIKGKAGILKNKQTRAEFLTDDSHRIVFVYTPKHCSWLNQIECWFSIITRRLLNKRASFKSVYDLEHKIKCFIDYYNQYLKKPFQWNYKGKLLRV

SEQ ID NO: 57471 - DNA, 507 bp, Unknown
  Obtained from environmental sample
  misc_feature (1)..(507): n is a, c, g, or t
atgccatggaaaaccgcaacgaaagtggaattaagtgaaaaacaggagcaaatattaaaagaatatgcggcaggcacccatacgccgctgcatttaaagaaacgggcgcaaatagtattgaaagcagccgaaggaagaacgaacaattcaatagagaaagacctgggattggctgccaaggccgtgaagctgtggcgggacagatacggcgcccggcatgaagaattgaagcgcacggaggcggaaacgccgagaaagatgcgctgcgtaatagaggaaatactttctgacagtcaacggcccggatgcccctgtacatttacggaggggcaggttgccgccatacttgcgatggcttgcgaagaccctgaaaaacgcgggctgccattttcgcattggacgcccgggctgttgcaaatggaagttataaaactcggcatagtagaaagcatatcggtccggcaagtcggacgttttttaaaaagaaaaagacttacagcctcataa

SEQ ID NO: 57472 - protein, 168 aa, Unknown
  Obtained from environmental sample
  misc_feature (1)..(168): Xaa is any amino acid
MPWKTATKVELSEKQEQILKEYAAGTHTPLHLKKRAQIVLKAAEGRTNNSIEKDLGLAAKAVKLWRDRYGARHEELKRTEAETPRKMRCVIEEILSDSQRPGCPCTFTEGQVAAILAMACEDPEKRGLPFSHWTPGLLQMEVIKLGIVESISVRQVGRFLKRKRLTAS

SEQ ID NO: 57473 - DNA, 510 bp, Unknown
  Obtained from environmental sample
  misc_feature (1)..(510): n is a, c, g, or t
atgaaccctgccgcctacgcgcaggttaaagaagaaaaaaaagcaaaaacttccaaaaccggaaaaacggaattttcccgtttctttgacgatcttcgcggcgttacggcggaaggaatcggccctttgcgggatcttcctgtttccgaagaaacggtaaatcttttaatggacgaggtccgcaatacgggcgatattttacgaaaccgcccttttcccgaagagatcatgcgctacaaacaggcggttcgtaattttatgaactatgttgtaaaaaacagttttaccctggaacacgaggaagggctcccgaattttttaaagcccggcttttcaggcaggcgcggcactcccgaagcgatgaaggggaaactgtacaccaaaattcaggttattgacaagaaacttgaagacctggcggatatgcttcttgcaagccagtcccagcagatggaactggtttcccgtcttgaggaaatacgcggccttctggtagacttaatgcaatag

SEQ ID NO: 57474 - protein, 169 aa, Unknown
  Obtained from environmental sample
  DOMAIN (7)...(169): Protein of unknown function (DUF327)
  misc_feature (1)..(169): Xaa is any amino acid
MNPAAYAQVKEEKKAKTSKTGKTEFSRFFDDLRGVTAEGIGPLRDLPVSEETVNLLMDEVRNTGDILRNRPFPEEIMRYKQAVRNFMNYVVKNSFTLEHEEGLPNFLKPGFSGRRGTPEAMKGKLYTKIQVIDKKLEDLADMLLASQSQQMELVSRLEEIRGLLVDLMQ

SEQ ID NO: 57475 - DNA, 942 bp, Unknown
  Obtained from environmental sample
  misc_feature (1)..(942): n is a, c, g, or t
atgagtgacgataacgagtatgataatatagaagacgacgttgttcttgatgatgagcccaaagtaaacaatgtcatcacaggcgccgacgccggcatagagtcccttgcccccgacacgcccatttacaggctccgtcttttatattctcatgagacatttctcgccgtttacagggaagacaaccttgcccccaacactatggttatagtgcctacccgttacggccgcgatctcgctcaggtaatcggctccgtgcgcggaaaacttccgcccgtttccgaaattgcgtggatagtgcgagccgcgactcaggaagatttggacaaggcctgcaaaaaccacaaacaggaaaaagaaacatttgatatttgttttaaaaaaattgaatatcataaacttgaaatgaaactggttcttgtacactatcttttggaagaaccaaaaatattatttttctttaccgccgataacagggtagattttagggaacttgtaaaagaccttgtaagtgtttttaagatgcgaattgaactgcgtcaaatcggcgtgcgcgacgaagcgcgtgtgcttggcggcctgggagtctgcgggcgcggttattgctgccactgtgtttcggacaaacttaaacctgtttcaattaagatggcgaaagatcaaaaactttcgcttaactccgttaaaatttcaggtccttgcgggcgtcttatgtgctgtctgttttatgaatacaatttttacagcgaacagcagcgcacccttccgcaggagggcataagagttaaccacaataacgaatcatggaaaattaccgaagttaatccggttacggggcaaataaaattaagcgccgacgacggccgcctgatgaccgccaccgcagcccaatttgaaaggacagataaccactggcgcttaaaagaagcggtgaaagtttaa

SEQ ID NO: 57476 - protein, 313 aa, Unknown
  Obtained from environmental sample
  DOMAIN (95)...(182): PSP1 C-terminal conserved region
  misc_feature (1)..(313): Xaa is any amino acid
MSDDNEYDNIEDDVVLDDEPKVNNVITGADAGIESLAPDTPIYRLRLLYSHETFLAVYREDNLAPNTMVIVPTRYGRDLAQVIGSVRGKLPPVSEIAWIVRAATQEDLDKACKNHKQEKETFDICFKKIEYHKLEMKLVLVHYLLEEPKILFFFTADNRVDFRELVKDLVSVFKMRIELRQIGVRDEARVLGGLGVCGRGYCCHCVSDKLKPVSIKMAKDQKLSLNSVKISGPCGRLMCCLFYEYNFYSEQQRTLPQEGIRVNHNNESWKITEVNPVTGQIKLSADDGRLMTATAAQFERTDNHWRLKEAVKV

SEQ ID NO: 57477 - DNA, 1392 bp, Unknown
  Obtained from environmental sample
  misc_feature (1)..(1392): n is a, c, g, or t
gtggagactcatttgaatagcgaaaaattattctcatcttccgccgatgttttttcatggttatcaggattcatcaatcttgagcgggggcagacaccgaaaagtttcaggatcgacagaatggaattcctgacgcagtttgcgggaaacccgcacaagctcatgccttccattcacatagctggctcaaagggcaagggttcggtaacgggaatgtcagccgccatgctgacagccgccggctttcgcgccgcccgctatatgtcgccgcatgtcatcgacatacgcgaaaggatttgccttaacaattcatattttgacgaagaagtataccgcatcgcgggcaatgaactgcgggatattacggaaaggctaccctctacggcaaatcctctttttgatccatccacccccgacggatgtgagccgacatattttgaacttttaacgctattttttttcctgtgcgccaaacatggaaactgtaacgtaatggtcgtggaaacgggcatgggcggtcggctggattcaaccaatgttcttgatccgctgttaagcgtgataaccttaattgaactggaacatacaggctttttgggcgacacaatcgcaaaaatagcggcggagaaagcgggcataattaaacaaggcaaaccgctggttttggcaaagcaaagcgaagaagctttggaaatttttaataaaaccgtaaaagaaaaaaacagcccattgatttattttccggaaacagaggaaatttccaacttaaaaattactaccgaaggtacggactttactctctcattcaaaactgaaaacaaaactttttcaaagagtcccatcttccccactccgctgtccctttttattcctgtgccgggaaaagtgcaggcggaaaacgccgctcttgccattgccgccgtaaaaaccgcctttccgcatattggcgaagacgctatccgtgcgggacttcgtaatttaaaaatcccggcgcgttttgaaaaaatagctcctgaatttgttattgacggcgcccacacgccggaaagccttgcgcttaccattgaaaccttttgtctgttatacggcgaaggcggtattcttgttttctgctgcgccgccgacaaggacgcgatggcaatggcaaaaatagcgcatccctattttgcgaaaataattatcactacccccggaacttttaaagcaagcaacccgcctcaggtttacgaagcgtttgcggcgcaagcggggcgggagaaaacacagcttattcctgatacacgggaagccgtaaaggaagcgcgtaatttcgcggcaaaggataaattgccaatcttagggacggggtcgttttacttggtttcggaaatacgcaagataatcttaccttga

SEQ ID NO: 57478 - protein, 463 aa, Unknown
  Obtained from environmental sample
  DOMAIN (329)...(410): Mur ligase family, glutamate ligase domain
  misc_feature (1)..(463): Xaa is any amino acid
METHLNSEKLFSSSADVFSWLSGFINLERGQTPKSFRIDRMEFLTQFAGNPHKLMPSIHIAGSKGKGSVTGMSAAMLTAAGFRAARYMSPHVIDIRERICLNNSYFDEEVYRIAGNELRDITERLPSTANPLFDPSTPDGCEPTYFELLTLFFFLCAKHGNCNVMVVETGMGGRLDSTNVLDPLLSVITLIELEHTGFLGDTIAKIAAEKAGIIKQGKPLVLAKQSEEALEIFNKTVKEKNSPLIYFPETEEISNLKITTEGTDFTLSFKTENKTFSKSPIFPTPLSLFIPVPGKVQAENAALAIAAVKTAFPHIGEDAIRAGLRNLKIPARFEKIAPEFVIDGAHTPESLALTIETFCLLYGEGGILVFCCAADKDAMAMAKIAHPYFAKIIITTPGTFKASNPPQVYEAFAAQAGREKTQLIPDTREAVKEARNFAAKDKLPILGTGSFYLVSEIRKIILP

SEQ ID NO: 57479 - DNA, 837 bp, Unknown
  Obtained from environmental sample
  misc_feature (1)..(837): n is a, c, g, or t
atgcttcttgattaccataaaaaaaacggtcttgattttgatttttcagttgacgcttttgacatatgcgccgaatcaatagatatagcaaaaaacgcccgttatacctctaacgcgcttcgctcagacggttcttcatgcaggcatattctcgattcttatntgattcaagacggcgatgaatatatagtacccgaaaacattcgtaaaaaggttcgattttttcctcacaatataatgcgcggacttgacaagcagtatgatattatttttttcagaaactcgttaatttatttttcttcaaagtcaagaatttccgttatcaacaatatttccgaatcgcttttcattaacggacttttatttatcggcgcttcggaaacggcgtccgtaagacaccctctgcttgcaagtaaaaatttatccggtgttttttattttcaaaaaacaggaaccccgtatatttatgaacggttggaaaatcatccccctattaccgagcatcgtaaatactcagattacaaacaaaaaaaacatgaaaagccccacgttgaaaataaaattaaatcttttcatccaaaaaatgaaattaccgtaagctgcgccgaaataaatgaaatattaaaaaaagacgacggcagaccaaacgccgaagaaacgcttgacactattaaaaacaatgacccttcttctctttcgggaagcgttcttgctgcgtcagccatttattatctaagcgcgcaggactttgacaatgcggatataattatttcacaccttgaaaaatacaactcaagcgcgtttacaagatttttacgcggcgaatatcatttttaa

SEQ ID NO: 57480 - protein, 278 aa, Unknown
  Obtained from environmental sample
  DOMAIN (1)...(148): CheR methyltransferase, SAM binding domain
  misc_feature (1)..(278): Xaa is any amino acid
MLLDYHKKNGLDFDFSVDAFDICAESIDIAKNARYTSNALRSDGSSCRHILDSYXIQDGDEYIVPENIRKKVRFFPHNIMRGLDKQYDIIFFRNSLIYFSSKSRISVINNISESLFINGLLFIGASETASVRHPLLASKNLSGVFYFQKTGTPYIYERLENHPPITEHRKYSDYKQKKHEKPHVENKIKSFHPKNEITVSCAEINEILKKDDGRPNAEETLDTIKNNDPSSLSGSVLAASAIYYLSAQDFDNADIIISHLEKYNSSAFTRFLRGEYHF

SEQ ID NO: 57481 - DNA, 1008 bp, Unknown
  Obtained from environmental sample
  misc_feature (1)..(1008): n is a, c, g, or t
atgattagaacgctgatagtggatgacagtccgctggttcgttcaattttaagggattttcttgaaagtgaaggctcatttgaaattatagatgaagccgaaaacggacaggacggcgtaaataaagccaaagaatgtaatcccgatcttatcactatggattatgaaatgcccataatgaacgggcttgacgctattgtagaaattagaaaattcagttcatgcggcatagtagtaataagcacccacgataccgcaaagatggcttatgaagcaaccgttaagggagcgcatgaattcttcgccaaggataatttcacttctaaaatgagcgacatacaaagaagcgaaatatataacactttaaaacatataacaaatattagaaataaggagcatgtacaaagcgaagctacggaacagatcagcaccgttcacagaaaaataaactgcatagttatagcgtcttctacaggcggtcctatggcattgtgtcaattactttccgcgcttcccgccgattttcctgttccgataatgcttgtacagcacaacacctcaggatttgacaaaggttttgtacaatggctggacggttattcgcagctcgacgtaaaacttgccgaagaaggaatctatccaattgaaggcaatgtttatgtcggacctaccgaaaaacatttaactgtgggtgcggaaggcatagcttttaatttagacgcccctgtctgtaatcaaagaccgtcggctgacattttatttaaaaccgccgcggaacattacggcgattctcttatcagcgtagttcttaccggaatgggaagcgacggagcggaaggcacgcgggctgtaaaaaaagcgggcggcattactatcgctcaggatgaggcgacttccatgatcttcggtatgccgcaagaggcaatcgctacaggttgtgtagacattgtacttccattaaatgaaatcgctcaaaaattattggaattaacaggcggagaaagttaa

SEQ ID NO: 57482 - protein, 335 aa, Unknown
  Obtained from environmental sample
  DOMAIN (2)...(123): Response regulator receiver domain
  misc_feature (1)..(335): Xaa is any amino acid
MIRTLIVDDSPLVRSILRDFLESEGSFEIIDEAENGQDGVNKAKECNPDLITMDYEMPIMNGLDAIVEIRKFSSCGIVVISTHDTAKMAYEATVKGAHEFFAKDNFTSKMSDIQRSEIYNTLKHITNIRNKEHVQSEATEQISTVHRKINCIVIASSTGGPMALCQLLSALPADFPVPIMLVQHNTSGFDKGFVQWLDGYSQLDVKLAEEGIYPIEGNVYVGPTEKHLTVGAEGIAFNLDAPVCNQRPSADILFKTAAEHYGDSLISVVLTGMGSDGAEGTRAVKKAGGITIAQDEATSMIFGMPQEAIATGCVDIVLPLNEIAQKLLELTGGES

SEQ ID NO: 57483 - DNA, 852 bp, Unknown
  Obtained from environmental sample
  misc_feature (1)..(852): n is a, c, g, or t
ttggcgacatcaagcctttcgattttcggcgatcaccaggacgtaatggcgtgccgccagaccggctgggctatgcttgcttccaacaatgttcaggaagtaatggacatggcgtgtgttgcccatgcttcaaccctgcgttcccgcgtgcctttccttcatttctttgacggtttccgcaccagccacgaacttcaaaatattgaggaaatttcctacgatgtaatgcaccagatgattgacgatgatctcgtaaccgcccaccgcacaagaggccttactcccgaaaaacccagtattcgcggaacagcccaaaacccggatacctatttccagagccgcgagggcgtggacaagtattacgaaaaagttcccggtatcgttcaggctgaaatggacaagtacgcgaaactgacaggcagagcctatcatatctttgattactacggcgcgaaagacgctgaaaacataatcatcataatgggctcaggcgcagacacttgcgaagagacaatcgactaccttaacagcaaaggcggaaagacaggcatggtaaaagtaaggctgtaccgtcctttcaacgcgaaactttttgtaaaagccctgccttcttcggttaaagcaattgccgtcttagaccgcacaaaagaaccgggttctttgggcgagccgttatatgaagatgtccgcaccgctatcgcggaaatgcaggcttcaggcgaatttaagtctaatcccgttgtactcggcggacgttacggcttgggttcaaaagaatttacccccgcatggtcaaggcgtattcgaaaaccttacaggcaagaaaatcgccaatttcatcgtcggtattaa

SEQ ID NO: 57484 - protein, 283 aa, Unknown
  Obtained from environmental sample
  DOMAIN (1)...(133): Pyruvate flavodoxin/ferredoxin oxidoreductase, thiamine diP-binding domain
  misc_feature (1)..(283): Xaa is any amino acid
MATSSLSIFGDHQDVMACRQTGWAMLASNNVQEVMDMACVAHASTLRSRVPFLHFFDGFRTSHELQNIEEISYDVMHQMIDDDLVTAHRTRGLTPEKPSIRGTAQNPDTYFQSREGVDKYYEKVPGIVQAEMDKYAKLTGRAYHIFDYYGAKDAENIIIIMGSGADTCEETIDYLNSKGGKTGMVKVRLYRPFNAKLFVKALPSSVKAIAVLDRTKEPGSLGEPLYEDVRTAIAEMQASGEFKSNPVVLGGRYGLGSKEFTPAWSRRIRKPYRQENRQFHRRY

SEQ ID NO: 57485 - DNA, 2526 bp, Unknown
  Obtained from environmental sample
  misc_feature (1)..(2526): n is a, c, g, or t
atgaagatgtccgcaccgctatcgcggaaatgcaggcttcaggcgaatttaagtctaatcccgttgtactcggcggacgttacggcttgggttcaaaagaatttacccccgcatggtcaaggcgtattcgaaaaccttacaggcaagaaaatcgccaatttcatcgtcggtattaatgacgatgtggaacacaagagtattgattacgatccgcattttgtattggaagaagaaggcttgagcgaagcgttgttctacggcttgggatcagacggcacggtcggcgcgaacaagaactcaatcaagatcatcagcgaggcgaaaccggaactcaacgcgcaggcgtacttctcctacgactcgaaaaaatccggcggctttaccgtatcgcacctccgcttcggcaagggcgctataagaaggccgtaccttatcaactcggcggacttccttgcatgccacaaattttcctacatggaaatgtacgatatgcttaaaatgctcaagtcaggcggcacattccttcttaacagccccttcaaagcggcggatgtatggaagaatatccccgtagaggcacagaagcgcataatcgacaaaaaattaaaattctatgttataaacgccgccgaaattgcgtttaacaccggcatgggcaaccgcatcaacacggtcatgcaggccgcttatttcaagatttccggcatattgtccgaagaagaagcggtaagacgcatgaaggaacatatcgaacattcctacggcaagaagggcaaagacgtagtagaaaagaactacaaaaccgtagacgcgtcattaaccgccgttgaggaagtaaaatatccttccaagaccgaaggcgacatccacatgaaaaaaccctttgcaacagcgaaggattcatggatcaaggaagttcttggaaccatgtctgtacaggaaggcgacaccctgcctgtcagcaaacttcccgaagacggaacattcccgacagcgactacccagtacgaaaaacggtctgttgccgagcgcgttcctatttggaacccggaagtctgtatacagtgcggtaactgtacggttgtttgtccccatgcctgtatgcgctttaagaaccttaccgatgatcaagttgcgaaagcgccgaaagggtttaagactgcggaaattaaaccgaagccggtagcaggccagaaagcggcgctcgtaatcgcctgcgaggactgttactcttgcggcgtttgtttcaatatctgcccaatgtccaataaaggtcaggagaagccgtcgttgtcatggaaatcttacgcagacgatcacgagttccacgcagaacaagttgccgtttgggattacttcctttcattgccggaaacacctgctgaagagcttacatcaccgaaagcccttgcctacaagcgtcccttgtttgaattctcaggcgcctgcggcggctgcggtgaaactccctacgttaaacttatgtcgcagttgttcggcgaccgcgcgattatcgcaaacgcaacgggctgttcctcgatttacggcggaaacctgccgactaccccctactgcaagcgcgcagacgggcgcgggccttcatggtctaacagcttgttcgaggacgccgctgaatttgctatgggcttccgtcttacaagtgacaagctcgccgtacatgcccgcgcaattgccgagaaggcaaagagcgaaggcattgccgcaggaatcatcgacaagattctttccaacaatcaggccgatgacgcggcgattgacgaactgcgcaaaaacatagacgagctaaaagcttctcttaagaacgattccagaatcacggcgaaacttcttgtttcgttagctgactattttgtaaaacgttcagtgtgggcgttcggcggcgacggctgggcttatgacattggtttcggcggtttggatcacgttatcgcttccggcaaaaatgtaaaccttttgtgcatggataccgaagtttattccaataccggcggacagatgtccaaagcgacgcctgtcggcgcaatcgcgaaattcgccaatgccggaaagaatattacaaagaaagaccttggcgcaatagcgatgagctacggttatgtgtatgttgccaaagtttcaatgggcgcgaacatgaatcaggttatcaaggcgttccgcgaggcggaatcctacgatggcccgtcgcttataatcgcatactcgcactgtatcaaccacggaatcgacatgagcaaggggcttgagcagggtaaagcggttgttacaagcggtctgtggccgttgttccgttacgacccaaggctcaaggatcagggaaagaatcccttccagcttgactccaaagaagcgaccacaagcattgaagacttcatgtacaaggaagttcgcttcaagagtttgaaagccgccaaccccgatcgcgccgatgcattgctcgcaaaagcaaaagctcatgctgaacgggtttggaaagagtacaaatatattgcggatagaccgttctag

SEQ ID NO: 57486 - protein, 841 aa, Unknown
  Obtained from environmental sample
  DOMAIN (346)...(369): 4Fe-4S binding domain
  misc_feature (1)..(841): Xaa is any amino acid
MKMSAPLSRKCRLQANLSLIPLYSADVTAWVQKNLPPHGQGVFENLTGKKIANFIVGINDDVEHKSIDYDPHFVLEEEGLSEALFYGLGSDGTVGANKNSIKIISEAKPELNAQAYFSYDSKKSGGFTVSHLRFGKGAIRRPYLINSADFLACHKFSYMEMYDMLKMLKSGGTFLLNSPFKAADVWKNIPVEAQKRIIDKKLKFYVINAAEIAFNTGMGNRINTVMQAAYFKISGILSEEEAVRRMKEHIEHSYGKKGKDVVEKNYKTVDASLTAVEEVKYPSKTEGDIHMKKPFATAKDSWIKEVLGTMSVQEGDTLPVSKLPEDGTFPTATTQYEKRSVAERVPIWNPEVCIQCGNCTVVCPHACMRFKNLTDDQVAKAPKGFKTAEIKPKPVAGQKAALVIACEDCYSCGVCFNICPMSNKGQEKPSLSWKSYADDHEFHAEQVAVWDYFLSLPETPAEELTSPKALAYKRPLFEFSGACGGCGETPYVKLMSQLFGDRAIIANATGCSSIYGGNLPTTPYCKRADGRGPSWSNSLFEDAAEFAMGFRLTSDKLAVHARAIAEKAKSEGIAAGIIDKILSNNQADDAAIDELRKNIDELKASLKNDSRITAKLLVSLADYFVKRSVWAFGGDGWAYDIGFGGLDHVIASGKNVNLLCMDTEVYSNTGGQMSKATPVGAIAKFANAGKNITKKDLGAIAMSYGYVYVAKVSMGANMNQVIKAFREAESYDGPSLIIAYSHCINHGIDMSKGLEQGKAVVTSGLWPLFRYDPRLKDQGKNPFQLDSKEATTSIEDFMYKEVRFKSLKAANPDRADALLAKAKAHAERVWKEYKYIADRPF

SEQ ID NO: 57487 - DNA, 537 bp, Unknown
  Obtained from environmental sample
  misc_feature (1)..(537): n is a, c, g, or t
atgaaattagcgggaaaaacagataaggttctttacggcggagattataatcccgaacagtggcctaaggaaatttggaaagaagacatgcgtcttctgactttggcgggaatcgatatcgtaagcatcaatattttcagttgggcggcattacagccgtctgaagatgagtacaatttttccgttctggacgatattgcagaaaccgtaagcgcggcaggaatgaaaatatgtttcggcaccgcgaccgcgacacacccggcatggatggcgcgtaagtatcccgaagttcttcgtacaaatacagacggctcaaaacgcaaattcggcgacagggaaaattcatgccccaacagcaatatttatcgtctttactcaagcaggcttgcgcgcaagctggctgagcgttacgggaaactggaaaaccttgccgcctggcatgtgtcaaatgaatacagcggttattgttactgcgataattgccagactgctttcaaaaaatggctgataaaaagatacaaaacgctgaagcgttaa

SEQ ID NO: 57488 - protein, 178 aa, Unknown
  Obtained from environmental sample
  DOMAIN (15)...(178): Beta-galactosidase
  misc_feature (1)..(178): Xaa is any amino acid
MKLAGKTDKVLYGGDYNPEQWPKEIWKEDMRLLTLAGIDIVSINIFSWAALQPSEDEYNFSVLDDIAETVSAAGMKICFGTATATHPAWMARKYPEVLRTNTDGSKRKFGDRENSCPNSNIYRLYSSRLARKLAERYGKLENLAAWHVSNEYSGYCYCDNCQTAFKKWLIKRYKTLKR

SEQ ID NO: 57489 - DNA, 1263 bp, Unknown
  Obtained from environmental sample
  misc_feature (1)..(1263): n is a, c, g, or t
atggcgctattgtttttgaggaaagggactaggcgtatgaaatatgttataataggcaattcagctgctggcgtaggagccgtagaaggtattaggcaaattgacaaacagggcgaaatcacaatcatcacagacgaaccgcatcatacatattcacgcccgctgatctcttatcttttgctcggcaaaacagacgaagaaaggatgaaataccgtgacaatgatttttacacaaaaaacaatgttaaaatgcttcacgcaagcgcaaaaggaatagatgcaaattcaaagcaggtggttttgtccagtgaggagaaaataccttacgacaaacttcttgttgcaactggttccacagcgtttgttccgccatttgaagggcttgattcggtaaatgacaaatatacttttatgagcctagatgatgcacataagttggacaaggttttggatgggcataagcgcgtactgataataggtgcggggcttatcggcttgaaatgcgctgagggtatattgaaaagggcggcgcatatcactgtgcttgaccttgctcctagaattttatccagtattttggatgaggacggagcgaaaatagtccaagaacatattgaaggcgagggcgttaagtttatgctctctggaaacgtcaagcgttttgagaaagataccgcaattttagagaatggtgaaaagataaactttgatatccttgttctggcggttggtgttcgcccaaatacttcgcttttgaaagatattgcaaatattgagaaaggcattgttgtcaattcaaaatcggaaaccacggctgcggacatttatgctgctggagactgcacccagtcgtttgacatatcgagcggccagagcaaaatcatggcgttgctgcccaatgcttatatgcaaggggaatgcgcggggctaaatatggctggcggtgacaagagctttgacaaggctatacctatgaacgccataggattttttggattgcatatgatcacggctggaaattacagcggggaagcatatgccgagaatggataccatcattacaagagactgttttacaaagaaaataagttgaacggatttattttgattggcaatgtggaaagagctggaatttacacaagccttatacgggagcaaacgccgcttgattcaatagattttgccctcgtatgcgaaaagccagggcttatggcattcaaaaaagaagacaggcaaaaaaaacttgggggcaaagcgaaatga

SEQ ID NO: 57490 - protein, 420 aa, Unknown
  Obtained from environmental sample
  DOMAIN (155)...(244): Pyridine nucleotide-disulphide oxidoreductase
  misc_feature (1)..(420): Xaa is any amino acid
MALLFLRKGTRRMKYVIIGNSAAGVGAVEGIRQIDKQGEITIITDEPHHTYSRPLISYLLLGKTDEERMKYRDNDFYTKNNVKMLHASAKGIDANSKQVVLSSEEKIPYDKLLVATGSTAFVPPFEGLDSVNDKYTFMSLDDAHKLDKVLDGHKRVLIIGAGLIGLKCAEGILKRAAHITVLDLAPRILSSILDEDGAKIVQEHIEGEGVKFMLSGNVKRFEKDTAILENGEKINFDILVLAVGVRPNTSLLKDIANIEKGIVVNSKSETTAADIYAAGDCTQSFDISSGQSKIMALLPNAYMQGECAGLNMAGGDKSFDKAIPMNAIGFFGLHMITAGNYSGEAYAENGYHHYKRLFYKENKLNGFILIGNVERAGIYTSLIREQTPLDSIDFALVCEKPGLMAFKKEDRQKKLGGKAK

SEQ ID NO: 57491 - DNA, 2505 bp, Unknown
  Obtained from environmental sample
  misc_feature (1)..(2505): n is a, c, g, or t
atgtatcagatcggcacgagagctatgtatatcggcgcaagcggctcgacgacgacgacaataggttcgggaactgatccaaacggctcaagcgtcagtttgggcgtgggacaacaaggctctgttttctccggttggaataattctacgatttggaatatcagcggcaatttggttgtgggcggcgatttgcccacgctcaaagataatacgcaaagccccgctcccactctgccggggtctaacccgtcgcccggcacggcggctaatcccttccttgttaccaacgaagccgatctccgcaaagtcggaaccggcactgacggctggacgctttcggcgcactacaaacagacacagaacatcacgctgaccagtaacttatccgtgattggcacaaacattaataagttcaccggttcgtatgacgggaacgaaaaaatcatttccggcttgaccatgacacgcaccagcgttagttattttggattattcggctatatcggatcagacggcgttgtaaaaaatgttaccgttaccaacggctcgataaccggaaccgcaagcagttatttcggaggcattgccggacagaacgaaggcacgattgaaaactgctcctttagcggaaccgtcaacggcgacacaaccagcgatgatgtcggcggcattgtgggacggaataccggcactataataaacagcagaaacaccgcaacggtaagcggcaggacacgggtcggcggcattgccggagagaatcagggcaaaatcgacaacagttacaacacgggagccattaccggcagtcagcaagtcggcggtatctccggtggaaattccggcagtggtaattatataaagaactgctataacacgggaaatgttatcagtaccaccgctaccaccacatctaatgccggcggcattgtcgggcaatcaagcgcactggtagaatactgctacaataccggcaatgtttcgggaaccggcggggtcggcggcatagtgggatacaccaacaccggaagcgccattcaaaactgcgtatcgctcggcgcaagggtaacaggcaacggtactagtaacggtcgcatagccggaactaatagcagtactgtcaccggcaacttagcccgtatagatatgaaagtcggcataagcggctcagaggcgttagtaactacaggagcggcaggaaataatgcaggcgcaaatgtcagtttgggcacgtcactgtctactgttttcaacacaggctggctctccacgctttggactataccctacaggcatttgacaataggcgtcaatttggcaacgctcaaaacaaacacgcaaagcccggctcccacgcttccggcagagtaccttgtacccggcacggcggaaaatcccttcctcgtcgccaccgaagccgatctccgcaaagtcggcactgaaacaacaacaggaggctggacgctttcggcgagctataaacagacggcgaacatcacgctgacaagcgcatttacaaggattggcactttcacagacaccggcaaattctctggcacgtatgacggggacggaaaaactatcaccggcttgaccataaccggctccgcttatcagggagttttcggcgcaaacagcggcacgttgaaaaacatgaccgtaaccggcacggtaacaaataccggaaccggggttaataacagcaccggcggcattgcgggcgtaaatcaaggaacgattgacaactgttcctttagcggaaccgtcaacagcgcaaacgccaatcaaatcggcggcataaccggatataattacgacacggtgataaacagcagaagcggcgcaacggtaagcggcgtaacttccgtcggcggcattgccggacagaatcagggcaagattgaaaacagttacaacacaggaaacgtcagcggcacaaatcaagtaggcggtatcaccggagccaattccggcacgggcagtaatataaggataaggaacagctataacacgggcgatattaccgcaactactacctctactgccaatgccggaggtattatcgggaattgcacgacaggctcattggtagaatattgctacaataccggaaccgttaccggcttacaatatgtcggaggcatagttggaaccggcggctcaacagttaccgtgcaatactgcgtatcactcagcacaagggtgataaccaccactaacagcacctatgccggacgcataagtggagctgaaggcgtaaccatgaccggaaacaaagcccgttcaaatttgatactcggaccaagcagtgaaaccggactgatatataacggcacaggatcaaacaaaaacggcgaaaatgccgatgttggtacgtcagtgcagaccgtattcaccagctttgatccgaatatttggtatatatggaacttaagcatgacagtaggcggtgatttgcccacattaaggaagaaagagcaaacaccagcccccaagcttccgtga

SEQ ID NO: 57492 - protein, 834 aa, Unknown
  Obtained from environmental sample
  DOMAIN (269)...(297): The GLUG motif
  misc_feature (1)..(834): Xaa is any amino acid
MYQIGTRAMYIGASGSTTTTIGSGTDPNGSSVSLGVGQQGSVFSGWNNSTIWNISGNLVVGGDLPTLKDNTQSPAPTLPGSNPSPGTAANPFLVTNEADLRKVGTGTDGWTLSAHYKQTQNITLTSNLSVIGTNINKFTGSYDGNEKIISGLTMTRTSVSYFGLFGYIGSDGVVKNVTVTNGSITGTASSYFGGIAGQNEGTIENCSFSGTVNGDTTSDDVGGIVGRNTGTIINSRNTATVSGRTRVGGIAGENQGKIDNSYNTGAITGSQQVGGISGGNSGSGNYIKNCYNTGNVISTTATTTSNAGGIVGQSSALVEYCYNTGNVSGTGGVGGIVGYTNTGSAIQNCVSLGARVTGNGTSNGRIAGTNSSTVTGNLARIDMKVGISGSEALVTTGAAGNNAGANVSLGTSLSTVFNTGWLSTLWTIPYRHLTIGVNLATLKTNTQSPAPTLPAEYLVPGTAENPFLVATEADLRKVGTETTTGGWTLSASYKQTANITLTSAFTRIGTFTDTGKFSGTYDGDGKTITGLTITGSAYQGVFGANSGTLKNMTVTGTVTNTGTGVNNSTGGIAGVNQGTIDNCSFSGTVNSANANQIGGITGYNYDTVINSRSGATVSGVTSVGGIAGQNQGKIENSYNTGNVSGTNQVGGITGANSGTGSNIRIRNSYNTGDITATTTSTANAGGIIGNCTTGSLVEYCYNTGTVTGLQYVGGIVGTGGSTVTVQYCVSLSTRVITTTNSTYAGRISGAEGVTMTGNKARSNLILGPSSETGLIYNGTGSNKNGENADVGTSVQTVFTSFDPNIWYIWNLSMTVGGDLPTLRKKEQTPAPKLP

SEQ ID NO: 57493 - DNA, 1893 bp, Unknown
  Obtained from environmental sample
  misc_feature (1)..(1893): n is a, c, g, or t
ttggttgacagggaatttggaacaggctcggttaaggtgacccccgctcacgacccaaacgattacgctacagggcttagacacaaactcccgatgctcaacatattaaacgaagacggatcgctgaacgaaaacgcaggcgagttcaagggcttgaaaggagagaaggcgagagccgcggtagttgagggcttggaaaaagaggggcttttgataaaagtagaagaccacgaaatgcaggttggcaaaagcgaccgctcaaaaacgataatcgagccgtatttgagcgatcagtggtttgtgaaaatggacaagctggcagaaaatgcaatgcgagccgttgaaaacggcgaggtgaaattcacgcctgcgcgttatgcaaaaaattatctgaactggctgggcgaaaaacgcgactggtgcataagccgccaactctggtgggggcatcagattcctatatggtacgcaagcaccgaaccaactcaattagcgggcagggatgatattcattattttaaagcggagagcggtgattggctggtttgctcattggaaaaagatttgcaggaaaatgaaatagaaggcttgaagctgatgcgagaccctgatgttttggacacttggttcagttccgctctttggccccatagcacaatgggctggcccggcaaaacagaggatttgaaaaatttttacccgacctcggttttggtaaccgctcgcgatataatttcgctttgggttgcgaggatggttatctttagccaagagaatatgggagagattccctttcacgatgtatatataaaccccacgattttagacggtcagggcagaaggatgagcaagtcgcttggcaacggcgttgaccccttagacataatagaaaaatacggagccgattcactccgctttgtgatgtgttcgatatgcacggaaaatcaggaagcgaggctcccggtaaaaaaggaaaaacttgaagacggcagagagataaacataagcgaaaaatttgaaataggcagaaactttggcaacaaactatggaacgccgccagatttttgcaaccccatttatctttagtggagagtggagagtggagagtggagagtattgaagacaagtggattctctcccgcttaaacaccgttgtaaaagaaacgcagaactccattgcaaactaccgcttttccgaatacgccgctacaatataccattttgtttgggacgatttatgcagccgttatttggaaataaaaaaaggtgagatttcaaaagagtccagctctttgctctcccattcgctttacacggttttggatttattgcaccccattatgccctttatcacagaagaattaaacgacattctcttcccaaattcgcaaagggttattttgagggaattcccaaaagcagacgaaggtttgataaacgcggaaatagaaaaacaatttgaagatatatttaccattgtagaagcggtgcgttctgtgcgtggtcgctattccatagctccctcccaaaaaatcaccgccgttgcaaaaaccacagtggatttaaaatccagcaaatccatgattgaagatttaggactgtgcagttttgagcttggcgaaaaaccagccttcagtgcgagcgtggttataccgggtggcgaagtttttgttcctttggaaggaattttgaacaaagaaactgaagttgcccgcctaaaaaaggaaattgaaaaagcggagagttttgctgcgagcattgagaaaaaactttccaatgagaattttgtgaagaatgcgcctgctgccgtgatagacggcgagcggcagaagttggctacgcagagggatattgtggagaagagtagggtggcactaacagagttaacttaa

SEQ ID NO: 57494 - protein, 630 aa, Unknown
  Obtained from environmental sample
  DOMAIN (1)...(321): tRNA synthetases class I (I, L, M and V)
  misc_feature (1)..(630): Xaa is any amino acid
MVDREFGTGSVKVTPAHDPNDYATGLRHKLPMLNILNEDGSLNENAGEFKGLKGEKARAAVVEGLEKEGLLIKVEDHEMQVGKSDRSKTIIEPYLSDQWFVKMDKLAENAMRAVENGEVKFTPARYAKNYLNWLGEKRDWCISRQLWWGHQIPIWYASTEPTQLAGRDDIHYFKAESGDWLVCSLEKDLQENEIEGLKLMRDPDVLDTWFSSALWPHSTMGWPGKTEDLKNFYPTSVLVTARDIISLWVARMVIFSQENMGEIPFHDVYINPTILDGQGRRMSKSLGNGVDPLDIIEKYGADSLRFVMCSICTENQEARLPVKKEKLEDGREINISEKFEIGRNFGNKLWNAARFLQPHLSLVESGEWRVESIEDKWILSRLNTVVKETQNSIANYRFSEYAATIYHFVWDDLCSRYLEIKKGEISKESSSLLSHSLYTVLDLLHPIMPFITEELNDILFPNSQRVILREFPKADEGLINAEIEKQFEDIFTIVEAVRSVRGRYSIAPSQKITAVAKTTVDLKSSKSMIEDLGLCSFELGEKPAFSASVVIPGGEVFVPLEGILNKETEVARLKKEIEKAESFAASIEKKLSNENFVKNAPAAVIDGERQKLATQRDIVEKSRVALTELT

SEQ ID NO: 57495 - DNA, 759 bp, Unknown
  Obtained from environmental sample
  misc_feature (1)..(759): n is a, c, g, or t
atggaaacacgctacaaccacaaagagatagaagaaaaatggctcaaaaactggaatgagcaaaagaatttcaaacctgccagcgatgcgtgcaggggtaaccctacgtggctgcccctacgtgagcatttttccattgtaattccgccaccaaatgtaacaggcgcattgcacctaggtcatgcgcttaacaacaccattcaagacattctcattcgctacaacagaaagctaggcaaaaacacgctttggattcccggcacagaccacgccggaattgcaacccaagcggttgtggaaaaacgattgttaaaagatgaaaagaaaacccgccacgatttgggcagggaagaacttgtaaaaagaatttgggattggaaaaatgaatacgaagctcgcataacaagccagcttaaattgctcggttccagctgcgactgggataggcaaagatttacgctagaccctatgtgcgcaaaagcagttcgctatgccttctttaacctttttaaaaaaggcttgattttcagaggcaaaaggcttgtgaactgggacactcatttgcacaccgccgttgcagacgatgaaatttaccacgaaacagtaaaaggtcatttttggactttcaaatatcccctatcagacggcagtggctacattcccgttgncacaaccagaccagaaacaattttaggcgacacggcagttgcggttcacccagaagatgaacgctataanaattcattggcaaaactttga

SEQ ID NO: 57496 - protein, 252 aa, Unknown
  Obtained from environmental sample
  DOMAIN (13)...(252): tRNA synthetases class I (I, L, M and V)
  misc_feature (1)..(252): Xaa is any amino acid
METRYNHKEIEEKWLKNWNEQKNFKPASDACRGNPTWLPLREHFSIVIPPPNVTGALHLGHALNNTIQDILIRYNRKLGKNTLWIPGTDHAGIATQAVVEKRLLKDEKKTRHDLGREELVKRIWDWKNEYEARITSQLKLLGSSCDWDRQRFTLDPMCAKAVRYAFFNLFKKGLIFRGKRLVNWDTHLHTAVADDEIYHETVKGHFWTFKYPLSDGSGYIPVXTTRPETILGDTAVAVHPEDERYXNSLAKL

SEQ ID NO: 57497 - DNA, 813 bp, Unknown
  Obtained from environmental sample
  misc_feature (1)..(813): n is a, c, g, or t
atggcggacgcgcacgcccgctgctccttttgcggtatatggcatgagcggcccaaggcggacgccaaattaaccgacgtcgcggcgaatctccctcaagcgcgcgccgccggctgcaaattcgtagatttcaccggcggcgagccgctgatgcaccccgatcttccggagttcctgcgcctggccaaaaaagcgggtttaatgacctccgtcaccacaaattgcctgctgtttgaggagcgggccaaggaactttccggcctgatagacctgccccatttcagcatagacgccgacagcgcccccctgcacgataaaataagaggctgtcaatcgtacgacaaagtaataaagagcatagacgccgcgatagccaaccgcatctaccccgacctgctcttcacctacaccgaagagaacatagacgccgtggaaggcgtttggcgtctggctcgtaagaaccgtctgatcctgatcttagaccccgttttcgcccaatggggccccgacaaattagcccgcgatacacatcaaaaagccgtaaatttcgcccaaaagcgaggcgtctacctaaaccgagcccacctcctgttgcgtgacaaaggcggcaaccatccccgcgcccccatatgccgggccgcaacctcaacgatagtaatcacccccgacgacaacctaaccctgccctgctaccaccaccgctgcgccgcggtcggcataaacggaaacctaaccaaagccctgaattccaaagagcgggccgacgccctaaccaagagggccgctacgccttctgcgaaggctgccacataa

SEQ ID NO: 57498 - protein, 270 aa, Unknown
  Obtained from environmental sample
  DOMAIN (1)...(151): Radical SAM superfamily
  misc_feature (1)..(270): Xaa is any amino acid
MADAHARCSFCGIWHERPKADAKLTDVAANLPQARAAGCKFVDFTGGEPLMHPDLPEFLRLAKKAGLMTSVTTNCLLFEERAKELSGLIDLPHFSIDADSAPLHDKIRGCQSYDKVIKSIDAAIANRIYPDLLFTYTEENIDAVEGVWRLARKNRLILILDPVFAQWGPDKLARDTHQKAVNFAQKRGVYLNRAHLLLRDKGGNHPRAPICRAATSTIVITPDDNLTLPCYHHRCAAVGINGNLTKALNSKERADALTKRAATPSAKAAT

SEQ ID NO: 57499 - DNA, 783 bp, Unknown
  Obtained from environmental sample
  misc_feature (1)..(783): n is a, c, g, or t
gtggggacgggcaactacaacgagatcaccgccgagttctacaccgacctcacgctaatcacagccgaccagaagataggcgccgaggcaaaccgcttcttcagaaacatggcggtggcgcacctaaacgacaactacgagtacctgttagtcgcgccggccaacctgaaaagcggcgtcttggcgcttatagacgagcaaatcgcgcttggggaaaaagggcgtatagtcatgaaactgaactccatgaccgatatagacataatccgaaagctctcggaggcctcttgcgccggcgtgaagatagacctgatcatccgcggcatctgctgcttgataccgggactgcccggagctacggagaacatatcggtgataagcatagtgggccgcttcttggaacactcgcgagtctacagcttcggcgtaggctcggcgcaaaagatgtacatagcctccgccgacatgatgacgcgaaacacgacgcgccgcgttgaggtagccgccccgatactggacgaacagataaaagcgctcatcaacaagatgatcaatacggaactgtgcgacaacgtaaaagcgcgccgtctgcgcagcgacggctactacgaaaagatacaccgcgacggcgaaccggtggacagccaagagcaacttataaaggaagccgcggaacgaatggaaatcgcgaggcggcaagagatgtccgcatcggataaaaaaaagagcgcggtgcgctccaaactcaaggactggctgatacggttgacggattggatataa

SEQ ID NO: 57500 - protein, 260 aa, Unknown
  Obtained from environmental sample
  DOMAIN (1)...(225): Polyphosphate kinase
  misc_feature (1)..(260): Xaa is any amino acid
MGTGNYNEITAEFYTDLTLITADQKIGAEANRFFRNMAVAHLNDNYEYLLVAPANLKSGVLALIDEQIALGEKGRIVMKLNSMTDIDIIRKLSEASCAGVKIDLIIRGICCLIPGLPGATENISVISIVGRFLEHSRVYSFGVGSAQKMYIASADMMTRNTTRRVEVAAPILDEQIKALINKMINTELCDNVKARRLRSDGYYEKIHRDGEPVDSQEQLIKEAAERMEIARRQEMSASDKKKSAVRSKLKDWLIRLTDWI

SEQ ID NO: 57501 - DNA, 672 bp, Unknown
  Obtained from environmental sample
  misc_feature (1)..(672): n is a, c, g, or t
atggattccgccggccttcccggcaaacttgccgactgttccgaaaaagaccctgcaaagtgcgaactttttatcgttgagggcgactctgccggcggctccgcaaagggaggccgcgacaggcggcatcaggccatactttcgctctgggggaaaatgctcaatgtggaaaagcagcgcattgagaaagttataaccaacgataaattgcagcccataatagccagcataggcgcgggctgcggcaacgaatttgacatcaccaaaatccgctaccataaaattattatcatggcggatgccgatgtggacggttcccatatccgcaccttgctgcttacatttttttaccgctacatgacgccgcttatcgaacatggccacgtttaccttgccatgccgccgctttacaagatcagttatgacagaaaatcattttacgcttatgatgacaacgaaaaaaacaggcttcttttggaatccggcaaagaccccgaaaaagtttccgttcagcgttacaaaggtcttggtgaaatgaactccgatcagttatgcgacactacaatggatccgtcaaagagaaatattattcaggttcatcttgacgataccgttgaagcggaaagaatttttaccactcttatgggcgaagttgtcgggtccgcgccgtga

SEQ ID NO: 57502 - protein, 223 aa, Unknown
  Obtained from environmental sample
  DOMAIN (21)...(132): Toprim domain
  misc_feature (1)..(223): Xaa is any amino acid
MDSAGLPGKLADCSEKDPAKCELFIVEGDSAGGSAKGGRDRRHQAILSLWGKMLNVEKQRIEKVITNDKLQPIIASIGAGCGNEFDITKIRYHKIIIMADADVDGSHIRTLLLTFFYRYMTPLIEHGHVYLAMPPLYKISYDRKSFYAYDDNEKNRLLLESGKDPEKVSVQRYKGLGEMNSDQLCDTTMDPSKRNIIQVHLDDTVEAERIFTTLMGEVVGSAP

SEQ ID NO: 57503 - DNA, 432 bp, Unknown
  Obtained from environmental sample
  misc_feature (1)..(432): n is a, c, g, or t
gtggacggcacggagcacgacctcataagggagattctcgaaacggagatagggcgtatggagagccgccacgaagacggtgcgaagatattcgactttctcggggcggcggcgccgtcgttcggtatgataggaacgctggtcggcctcgtgctgatgcttggcaacatgagcgacgtggcctctatcggccccaatatggcggtggcgctcatcaccacgctctacgggtcgattctggcgaatatcgtttgtatacctttcgcggagaagctgaaggcgtattccgccaaggaaattatggtaaaagagctaatgttggagggtataatggcgctgcagtccggcgacaacccgcgtatcgtggcgcagaagttgagcgtcttcctagagccggcgcagcgggccgcggtcttgaaagaaaagaactaa

SEQ ID NO: 57504 - protein, 143 aa, Unknown
  Obtained from environmental sample
  DOMAIN (1)...(108): MotA/TolQ/ExbB proton channel family
  misc_feature (1)..(143): Xaa is any amino acid
MDGTEHDLIREILETEIGRMESRHEDGAKIFDFLGAAAPSFGMIGTLVGLVLMLGNMSDVASIGPNMAVALITTLYGSILANIVCIPFAEKLKAYSAKEIMVKELMLEGIMALQSGDNPRIVAQKLSVFLEPAQRAAVLKEKN

SEQ ID NO: 57505 - DNA, 774 bp, Unknown
  Obtained from environmental sample
  misc_feature (1)..(774): n is a, c, g, or t
gtggcgcgtcagaagaagccgaaagagggccccaagggggcgccggcgtacatgaatacgtggggcgatatgtgtacgctgctgctctgcttcttcgttatgctgttggccatgtcgaccatcgacccgaccaagtttaaggtcgccgcgagttcgttccacaacgccttaagcggtgttctcgagtcgttcccgacgatactcatcacgaaagacgtctatatcccgaggatggggggccagcagcagaataaacgcatggccatagacgcggtgaccaagatgcgcgagaaggtgaaagaagagggtttggaagaggctataaaggtgcaggtgacggagaccgggatagcgataaagatagccgatccggtgggcttcgagtcggggagcgccgacgtgaaccccaagctgtacggggtgctgaacgatttggccaacgtcataaacgccgcgcctacgagccagatacgggtggaggggcacaccgacaacgtgcctatacacagcgcgaagtacccgtcgaactgggagctatcgtcggcgcgggcgctgaacgtggtgcggtacatggcaaacaacggcgacgtggatccgtcgcgtatgagcgctataggctacggcgagtacaggccgatagcgcccaacacgacaccggagaacaggaagaccaacaggcggatagaagtatatgtagactatgttcaaaagaaggacggggatatgcccaagggatccgacgagagctactcggaaccgggggcgggatactga

SEQ ID NO: 57506 - protein, 257 aa, Unknown
  Obtained from environmental sample
  DOMAIN (126)...(226): OmpA family
  misc_feature (1)..(257): Xaa is any amino acid
MARQKKPKEGPKGAPAYMNTWGDMCTLLLCFFVMLLAMSTIDPTKFKVAASSFHNALSGVLESFPTILITKDVYIPRMGGQQQNKRMAIDAVTKMREKVKEEGLEEAIKVQVTETGIAIKIADPVGFESGSADVNPKLYGVLNDLANVINAAPTSQIRVEGHTDNVPIHSAKYPSNWELSSARALNVVRYMANNGDVDPSRMSAIGYGEYRPIAPNTTPENRKTNRRIEVYVDYVQKKDGDMPKGSDESYSEPGAGY

SEQ ID NO: 57507 - DNA, 546 bp, Unknown
  Obtained from environmental sample
  misc_feature (1)..(546): n is a, c, g, or t
atggcggacgacaagaagaaagacgcggctcccgccccgggggacggcggtgaaaagaagaagggcggcaatttgatccttacaatagggatcgtggtcggcattttgattatctacgccccggttacctatttgctcgtgcccaagccgccggccaacgaggaagagatcgcccaaaaggcgaaggaggactcgttgcggatagcctccgaggccgcgacgaaggtgggggccaccaccgaagacacgccgatagagttcattgtgaacatatcgggggcggaggatcgttttctcaaagcgacggtcatctttgagtacgaagaaaaaaacgagaaacttggggcggagctgcgtaagagggcgccgaccaagtacaaggatatgctgataaagcacatgtcgagcctctcgcttacggagattaccgacccgtcggagcgcgacaagatatgcaaggatctgcaacgtatggtaaacgcgtcgttgccgaaaggtatgggtgagatacggagcgtgatgtttacaaattatattacgcaatga

SEQ ID NO: 57508 - protein, 181 aa, Unknown
  Obtained from environmental sample
  DOMAIN (22)...(181): Flagellar basal body-associated protein FliL
  misc_feature (1)..(181): Xaa is any amino acid
MADDKKKDAAPAPGDGGEKKKGGNLILTIGIVVGILIIYAPVTYLLVPKPPANEEEIAQKAKEDSLRIASEAATKVGATTEDTPIEFIVNISGAEDRFLKATVIFEYEEKNEKLGAELRKRAPTKYKDMLIKHMSSLSLTEITDPSERDKICKDLQRMVNASLPKGMGEIRSVMFTNYITQ

SEQ ID NO: 57509 - DNA, 543 bp, Unknown
  Obtained from environmental sample
  misc_feature (1)..(543): n is a, c, g, or t
atgagcgacatactgtcacaggaagaggttgatgcgctgctcaacgcggtgtcgtccggggatcttggcgaccaatcgttcgacgatgtgaaggccgatacccccattgaagacgaaataccgttgtcgctctacgactttaagaggcctgaccgcgtttccaaagatcagatgcgcacgttgcagaacttgcacgagggctacgcccgccagttctccaccacgctcacaaactttttgcgcaccttcatcgagacgcagctcgtcagcgtcgaccagttgacatactcggaatttgtgatgtccatatcgaacccgagctgcatttacgtgttccgtatggagccgcttgagggtttggcgatcttggagataaacccgtcgctggtgttttacataatcgacaggctgttcggcgggcaggggcgcccttttgagggcaaccgcgagctgacgatgatcgagcagaacgtgataacccgcatagtgcagcgcggcctctcggattgtgcacggtggggagcatatctcggccgaatctga

SEQ ID NO: 57510 - protein, 180 aa, Unknown
  Obtained from environmental sample
  DOMAIN (45)...(180): Flagellar motor switch protein FliM
  misc_feature (1)..(180): Xaa is any amino acid
MSDILSQEEVDALLNAVSSGDLGDQSFDDVKADTPIEDEIPLSLYDFKRPDRVSKDQMRTLQNLHEGYARQFSTTLTNFLRTFIETQLVSVDQLTYSEFVMSISNPSCIYVFRMEPLEGLAILEINPSLVFYIIDRLFGGQGRPFEGNRELTMIEQNVITRIVQRGLSDCARWGAYLGRI

SEQ ID NO: 57511 - DNA, 1080 bp, Unknown
  Obtained from environmental sample
  misc_feature (1)..(1080): n is a, c, g, or t
gtgcgggacaaagtcagggagcttaggggccgccttgacgccatgctaaccgcctgggaggagaactcccttggcgacagactcagggtggacgaaagccatgtgcgccgtgttgttgcggagatcacgggcattcccctgacgcaccttgaagaaaaagaatccaggcgtcttttgaatatcgaggaagagcttcaccggggggttgttggccaggatgacgctgtaaggagagtagcttcagctatacgccgttcgcgcgtcggggtgtcttcgccaaagcgaccccttggttccttcattttcctgggcccgaccggagtaggcaaaaccctgcttgctaagcggctttccgaatatctttttgaaactcccgattcacttgtacgcatcgatatgtctgactacatggaaaagcacaacgcctcaaggctcgtaggcgcgccccctggttatatcggttacgacgaaggcggctttcttaccgagcgcataaggcgcaacccctacagggttattctttttgacgaaatggaaaaagcccatgtggacgtgtttaacgtgtttctccagatcctcgatgacggccgcttaaccgacggccagggccgggtggtggatttcaagaacgtcatcatcataatgaccagcaatttaggctccgagctgatccttgaggcgaaagacccggaggacatacgctccgccctccttgagcttctgaagcagagctttaggccggagtttctgaaccgcattgacgagaccgtgatctttaaccgcctgggtaaacctgaaatcgcgaaaatcgtggacatccaactggagtacctggcttccaggctgcaagagcggaaaatcaccctcaagctgaccaacgcagccaaggagcttcttgcggagcggggctacgatccccttttcggcgcccggcccctcaagcggaccattcagggggatctggaaaatcccctggccaaggcgattatcgcgggtaaaataaaagaaggggatacgattagcgctgacgcaaacagcgccgataaggaaaaagaggcgttggttttcaagaagacatga

SEQ ID NO: 57512 - protein, 359 aa, Unknown
  Obtained from environmental sample
  DOMAIN (99)...(308): ATPase family associated with various cellular activities (AAA)
  misc_feature (1)..(359): Xaa is any amino acid
MRDKVRELRGRLDAMLTAWEENSLGDRLRVDESHVRRVVAEITGIPLTHLEEKESRRLLNIEEELHRGVVGQDDAVRRVASAIRRSRVGVSSPKRPLGSFIFLGPTGVGKTLLAKRLSEYLFETPDSLVRIDMSDYMEKHNASRLVGAPPGYIGYDEGGFLTERIRRNPYRVILFDEMEKAHVDVFNVFLQILDDGRLTDGQGRVVDFKNVIIIMTSNLGSELILEAKDPEDIRSALLELLKQSFRPEFLNRIDETVIFNRLGKPEIAKIVDIQLEYLASRLQERKITLKLTNAAKELLAERGYDPLFGARPLKRTIQGDLENPLAKAIIAGKIKEGDTISADANSADKEKEALVFKKT

SEQ ID NO: 57513 - DNA, 1029 bp, Unknown
  Obtained from environmental sample
  misc_feature (1)..(1029): n is a, c, g, or t
atgataaggcacacttacaatatggttaaaaaaatttcttttttatttttactatttgtcattgtcgcgggctttgctttttccgcgcagggtgacaaccttacgcttaaaattgccgtaatggggccgggagaccaactatatttttggtgggggcatatcgcccttattgtggaagattcctatgacgatacaagttatttttttgattacggattattttcgtttgataatgataatttcttttataactttgcttttggcagattgctatacagttgcggtgtttccagatctaaaggaagttttaatacatataaaaaaaccaatcgggacataacggtttatacgctggaccttccgcctgagaccaaaataaaaatcagggattttgccatgcataatgttcttccagaaaaccgtgattattattaccaccatttcagggataactgttcaacaaggataagggatataattgatcttgcgactgacgggcagttaaagaaagaatttgaaaatacaaacggcggttttactttacggaaccacgtgcgccgccacacatggttttcgcccgtaattgactggtttttaaattttttaatgggacagaatattgatacgcaaatcactatttgggaagatatgtttcttcccgcggaagtcggcaaaagaatagaaaatttttggtacacggacgttaacggcaacaggcgaaaacttgtatcgtccgttgaaattattaatagggcaaaagaccgtcccgccgttcttgaaaaaccgcgaaaacaatggccaagggaacttgccttaagccttgtgttatccgccatattttctttctttttctttttacaggcaaaaaataaaaagccgggcagggtattggccggactcagcatgagtttaagcggcctttttttcggctctgtcggtcttcttctatattttatgagtctttttacaaatcatgattacacctaccataatattaacatgattttctgtaccccgcttcttctgtaa

SEQ ID NO: 57514 - protein, 342 aa, Unknown
  Obtained from environmental sample
  SIGNAL (1)...(28)
  misc_feature (1)..(342): Xaa is any amino acid
MIRHTYNMVKKISFLFLLFVIVAGFAFSAQGDNLTLKIAVMGPGDQLYFWWGHIALIVEDSYDDTSYFFDYGLFSFDNDNFFYNFAFGRLLYSCGVSRSKGSFNTYKKTNRDITVYTLDLPPETKIKIRDFAMHNVLPENRDYYYHHFRDNCSTRIRDIIDLATDGQLKKEFENTNGGFTLRNHVRRHTWFSPVIDWFLNFLMGQNIDTQITIWEDMFLPAEVGKRIENFWYTDVNGNRRKLVSSVEIINRAKDRPAVLEKPRKQWPRELALSLVLSAIFSFFFFLQAKNKKPGRVLAGLSMSLSGLFFGSVGLLLYFMSLFTNHDYTYHNINMIFCTPLLL

SEQ ID NO: 57515 - DNA, 1617 bp, Unknown
  Obtained from environmental sample
  misc_feature (1)..(1617): n is a, c, g, or t
gtgaaatatccggatatcgaggatttcgtatgtccgaaagaagggaccggcggcaacggttgccaaaggctgcgtctggtcgggatgagcggcgcgatcctcggggatcatcgacaaatgttcaaactattgaaacacagttccatcgagttctgcccgacgaaccgcctcggctgcgccacggcgctcgcggcggagtgggcgatgagcggcgcgggcacggacggcggcgtggttaccgccttcggcggtctaggcgggttcgcggctacggaggagctgataatgattctgcggataaacaattttatctgtacggacaaaaattatgacttcctgccggagatggcaagaacgtttgaactgatctcgaagaaaaacgtgccgccgaacaagccgatcatcggcgagcggatattccgcgtagagtcagggatacatgtggacgggatactgaaacagcctatgtgctatgaaccctttccgccggagattgtcgggcagacgcgaaagatagtgctcggaagacagagcggcgccgcgtctgtacgcgccaaattgtcggaactgaaattgcggtatgatgaggaagagataccgcttattctcgcaacggtcaagacaatggcggttgaaaaacgtggcgcggttacggatagggaattttcggctatcgtcaaatctgtacaagggacgcacccctacggggtgcggactaatctaatggagaacatacgttctaccgagctatgcacccctaacggggtgcgcagtccggttcatccaactataacgtctgaagcgcctaatatcaataacatcaaaagatatatagtagacagcaccctccgcgacggagagcaaacgcccggcatcttcttttcgccgaatcaaaaatcagagatagccgcgctcctcgactcgtacggcgtccatcaaatagaagcgggcgttccggcggcgtcgccggaagaaaaatcaacaatcatcaacataatcaaaaaccgtaaaaacgccataatatccgtatgggcgcgcctcgtcccctccgacatccgacacgcgatagacgtacgccccgacctcatacacatctgcgtcccggtatcgcaaacgcaaattcacgagaaattgcgcacggataaagagagcgtgatcaacaggctgcgcgaatgtttacagatagtcgaaaaaagcggcatccggctctccgtaggattcgaagacgcgttccgggccgacatcgatttcatgatatcggtatctcagatccttacggactccggcgtaacccgcatacgcctctccgacaccgtaggcgtcgcttccccgtctcaatgccgcactctcttaaagaatatctccgccgcgttaaacggcaaagcaaatctcggcatccacgcccacaacgacctcggtatggccgtagcgaacacaatagaggcggcgaaatcaggctgcctatacgccgacgtaacaatcggcggcataggcgaacgcgccggaaactgtaatttagcggaattggtatgcgcgagctcgtcaatattcgattgggggataacgggggatgcggcgcgggagttgcaacgggagatcgggaggaggttgttttaa

SEQ ID NO: 57516 - protein, 538 aa, Unknown
  Obtained from environmental sample
  DOMAIN (284)...(531): HMGL-like
  misc_feature (1)..(538): Xaa is any amino acid
MKYPDIEDFVCPKEGTGGNGCQRLRLVGMSGAILGDHRQMFKLLKHSSIEFCPTNRLGCATALAAEWAMSGAGTDGGVVTAFGGLGGFAATEELIMILRINNFICTDKNYDFLPEMARTFELISKKNVPPNKPIIGERIFRVESGIHVDGILKQPMCYEPFPPEIVGQTRKIVLGRQSGAASVRAKLSELKLRYDEEEIPLILATVKTMAVEKRGAVTDREFSAIVKSVQGTHPYGVRTNLMENIRSTELCTPNGVRSPVHPTITSEAPNINNIKRYIVDSTLRDGEQTPGIFFSPNQKSEIAALLDSYGVHQIEAGVPAASPEEKSTIINIIKNRKNAIISVWARLVPSDIRHAIDVRPDLIHICVPVSQTQIHEKLRTDKESVINRLRECLQIVEKSGIRLSVGFEDAFRADIDFMISVSQILTDSGVTRIRLSDTVGVASPSQCRTLLKNISAALNGKANLGIHAHNDLGMAVANTIEAAKSGCLYADVTIGGIGERAGNCNLAELVCASSSIFDWGITGDAARELQREIGRRLF

SEQ ID NO: 57517 - DNA, 1083 bp, Unknown
  Obtained from environmental sample
  misc_feature (1)..(1083): n is a, c, g, or t
atgccttccagtacaatcgcttttggcaacggtaagtttgtcattgactctgtcgattatagtaatgtaaaaatgtcgacttcaaaggacggcataacgtggacaaccggaacagacagcgtactaaataataatgtcaaaacaatagcttatggtaacaataagtttgtcgcctgtggattgagcaactcaatctcgtattcatctgacggtataacatggacagctataaaaaatgtaccaaccggcaattccaacgctagcattaatacaatcgcctatggtaacggtaaatttgtcgccggtggaacagacggtagcagagtaatatattcaaatgacggcataacatggacaggcatagaaacctatgtacttggcaacaaagaaggtatccccaattacaacaacggcactaggaacggcgcttacgcaatcgcatatggtggcggcaactttgtcgccattggaagcaaaaatatagcgtattcatctgacggcgtaacatggacaactacaacaaccaacaatttaggcttaggctcaatttctatcgacgcaatcgcctatggcgacggcaagtttgtcgccgtgggaggggtgacgactttaaagactgatatagtgtattcatctgacggcggcataacatggacagccgtaacgactactgcattcgactacctctacaacggaaaacccagtaatggcgtcatcaacgcaatcgcctatggcaacggcaagtttgtcgccgcgaacattaaaggcgaaatggcgacttcaacggacggactaaaatggacagccgtagatgcaagcggttttttcagtatcatggcaatcgcctttggcaatggtatgtttgtcgccccgtgtatcagcgcggatgaagaaacccgcaccatcaacggaataatagcgacttcaaaggacggtaaaaactggacagccgtatcggacaacacattcatcgacaacacaatcttcaacgaggacaacattgacatcgtctcggcaatcgcctttggcaaagacaagtttgtcgcggggacttataaaggcaaaatggcgtatatcaaataa

SEQ ID NO: 57518 - protein, 360 aa, Unknown
  Obtained from environmental sample
  misc_feature (1)..(360): Xaa is any amino acid
MPSSTIAFGNGKFVIDSVDYSNVKMSTSKDGITWTTGTDSVLNNNVKTIAYGNNKFVACGLSNSISYSSDGITWTAIKNVPTGNSNASINTIAYGNGKFVAGGTDGSRVIYSNDGITWTGIETYVLGNKEGIPNYNNGTRNGAYAIAYGGGNFVAIGSKNIAYSSDGVTWTTTTTNNLGLGSISIDAIAYGDGKFVAVGGVTTLKTDIVYSSDGGITWTAVTTTAFDYLYNGKPSNGVINAIAYGNGKFVAANIKGEMATSTDGLKWTAVDASGFFSIMAIAFGNGMFVAPCISADEETRTINGIIATSKDGKNWTAVSDNTFIDNTIFNEDNIDIVSAIAFGKDKFVAGTYKGKMAYIK

SEQ ID NO: 57519 - DNA, 534 bp, Unknown
  Obtained from environmental sample
  misc_feature (1)..(534): n is a, c, g, or t
atgatggccgaggattttttggggcgcgtagggtatttttggaatacgggaaaaccttatacctattacaaaaatgttttttgcgattttgaatttaccagatccgataacgggactgccggagattattcctacttgggaatttacggctggtccaggaacccgatgatagaatggtatatcgttgaggattggtacggaagcggaatcatcagaccttcaaatatgggaggcggcgcgagtaaaaaaggcgagtttaccgtggacggcgaagtatattttatttatcaggcgacaaggccttcaggttcaggcaatatcgaaggcagaaacgtctctttccagcaatatttcagcgtgcgccaatcacgccgccaaagcgggacaatttccataaccgaacattttaaagaatgggaaaaattaggcatgaaactcggcaataatatgtatgaggcgaaattcctcgtcgaagccggcggcggcaaaggctggttcgacgcctcgcgcatttatttctatcaaaaagattga

SEQ ID NO: 57520 - protein, 177 aa, Unknown
  Obtained from environmental sample
  DOMAIN (1)...(170): Glycosyl hydrolases family 11
  misc_feature (1)..(177): Xaa is any amino acid
MMAEDFLGRVGYFWNTGKPYTYYKNVFCDFEFTRSDNGTAGDYSYLGIYGWSRNPMIEWYIVEDWYGSGIIRPSNMGGGASKKGEFTVDGEVYFIYQATRPSGSGNIEGRNVSFQQYFSVRQSRRQSGTISITEHFKEWEKLGMKLGNNMYEAKFLVEAGGGKGWFDASRIYFYQKD

SEQ ID NO: 57521 - DNA, 756 bp, Unknown
  Obtained from environmental sample
  misc_feature (1)..(756): n is a, c, g, or t
atgggtaagggaagcggcgtcatgatcgaagttaaaaatatcaaaaaatcatttaacgataacagcgttcttaacggattaagttttaaaattaacaaaggggacgttcttacgataatagggcccagcggcgcgggtaaaactacccttcttcgctgtatagacttccttgaacgcgccgacgagggaacgctggttttcgacaacgaaagttttgattttacaactgtcactaaaaatcaaatctacgctatacgcagaagaataggttttgtttttcaaagctacaatctttttaacaacaaaacagcgttgggaaatgtaatggatgggttattggcgcggaaaacacttaagccggaagcgaagcgcattgcgaaagaggcgctggacaaggtagggctttccgaccgttacgactactaccccgcccagctttccggcggccagcagcagcgcgtaggaatcgcccgcgccctcgcgcccaaacccgacctcattctctttgacgaaccgacttccgcactggatccggagcttataggcgaggttctttccgtcatgaaactgctcgcgagcgagggtgttactatggtggcggtaacccacgaactgggtttcgcgcgcgacgccgcaaaccgcgtaattttcatggataaaggcctaattgtggaagacgcgccttccaaacaatttttcgacaacccgcggcatgaaagaatccgcttgttcttgaataaaactgataaccaatag

SEQ ID NO: 57522 - protein, 251 aa, Unknown
  Obtained from environmental sample
  DOMAIN (9)...(224): RecF/RecN/SMC N terminal domain
  misc_feature (1)..(251): Xaa is any amino acid
MGKGSGVMIEVKNIKKSFNDNSVLNGLSFKINKGDVLTIIGPSGAGKTTLLRCIDFLERADEGTLVFDNESFDFTTVTKNQIYAIRRRIGFVFQSYNLFNNKTALGNVMDGLLARKTLKPEAKRIAKEALDKVGLSDRYDYYPAQLSGGQQQRVGIARALAPKPDLILFDEPTSALDPELIGEVLSVMKLLASEGVTMVAVTHELGFARDAANRVIFMDKGLIVEDAPSKQFFDNPRHERIRLFLNKTDNQ

SEQ ID NO: 57523 - DNA, 837 bp, Unknown
  Obtained from environmental sample
  misc_feature (1)..(837): n is a, c, g, or t
atgctgaaactcatgaccgacggatttttcatctatcccaaccgcgaattccgcgaggcttttgcccctcaggatttatggaaagtaaaacctataggggaaaaccacccgtggatagaagaacaggtttcttacgcaaaaactcttgcggagcttttcggcaaagatattatgcttttctacaatatcttttctccggctacaactttcaaatttgtaagacttggcagcaaggaatttctgtcgcgtaacatcgaccccgaaactcttctggcgaatcttcttatcaaagatagggatgccgtccttcacgcgatgaatgcagcggcgcgggacttggccgcccttgcctcccgcgtagttcaagcgggagtggacggcatatacctcagctcgcagaacgtaagcgacgcaaggataggcggcgacatacaccgttatacgctgtttccgggggattgtcaaattcttaacgccgcgaaatccgcgcgggacaatgtttataacatcctgcatatctgcggctacggggggcacaccaacacattcgaaaattttattgattaccccgccgatattttcaactgggcggccgtctttgaaaaactcccgttggaaaaggggaaaaaactttttaaggacaaacccgtcatcggcggctttgacaataccgtcgaaggaattttatacaaaggaagccgcgaggaaattcaagctgaaacaaaacgcatccttgccgaagcgggacgcaaagggataattttaggcgcggactgcacattaccaagggacattgatttacaacacttaaaatgggtaagggaagcggcgtcatga

SEQ ID NO: 57524 - protein, 278 aa, Unknown
  Obtained from environmental sample
  misc_feature (1)..(278): Xaa is any amino acid
MLKLMTDGFFIYPNREFREAFAPQDLWKVKPIGENHPWIEEQVSYAKTLAELFGKDIMLFYNIFSPATTFKFVRLGSKEFLSRNIDPETLLANLLIKDRDAVLHAMNAAARDLAALASRVVQAGVDGIYLSSQNVSDARIGGDIHRYTLFPGDCQILNAAKSARDNVYNILHICGYGGHTNTFENFIDYPADIFNWAAVFEKLPLEKGKKLFKDKPVIGGFDNTVEGILYKGSREEIQAETKRILAEAGRKGIILGADCTLPRDIDLQHLKWVREAAS

SEQ ID NO: 57525 - DNA, 954 bp, Unknown
  Obtained from environmental sample
  misc_feature (1)..(954): n is a, c, g, or t
atgggaaacacgaaattgccgcctttgatggaatattttgcaaacatagaagatccgagacgggagaccaaaaacaagaaatacccgctcattgaagtcatagcaatcgcatttctagctgtgatgagcggggcagacggatgggaatccatagaacgctacgggataatgcgggaaaaatggctgtgcaagtttttggccttgagggaagggataccgaaacacgacgtgtaccggcgggtgctctgtgcaatacggagtgagctgttggaggcttgttttatgaactgggtaagggacataaagcagaatatacagcgtgaggtgatagcgatagacgggaagaccgtgcgtgggatggcaaccaagagccgtttcaaggcagggacggaggtaaaatcaatacatctggtaagcgcgtgggcgacggagaatcagctggtgtttgcgcaggtacagacggaagaaaaaagcaatgaaataacggcgatacctgcgcttttggagcagataacgatagccggctgcatcataacgattgatgcgatgggctgccagtatgagatagcggacaaaatcgttaaaaaaggggcggattacgtgttttccctgaaagggaaccaggaaaccctgcatgacgcagtggaagaatattgggatatgcttgacttcaacaaacatgaggcgcaggccaaatatatcaggttccgcagtgtgtcgacgtatgaggaaaaacatgggagaaaagaaacccgcgattatgcggtaagcgacgacgtacagtggttgcgcgagcagtttcccaaatggaagaccatcaaatcaataggagtggtggaatcgaccagagataccggggatgaggccaaaaccgagcggaggtattttgtttccagcctagatcgcagacgaggacctgtttgctcacactgtccgggcgcagatgggggatag

SEQ ID NO: 57526 - protein, 317 aa, Unknown
  Obtained from environmental sample
  DOMAIN (109)...(304): Transposase DDE domain
  misc_feature (1)..(317): Xaa is any amino acid
MGNTKLPPLMEYFANIEDPRRETKNKKYPLIEVIAIAFLAVMSGADGWESIERYGIMREKWLCKFLALREGIPKHDVYRRVLCAIRSELLEACFMNWVRDIKQNIQREVIAIDGKTVRGMATKSRFKAGTEVKSIHLVSAWATENQLVFAQVQTEEKSNEITAIPALLEQITIAGCIITIDAMGCQYEIADKIVKKGADYVFSLKGNQETLHDAVEEYWDMLDFNKHEAQAKYIRFRSVSTYEEKHGRKETRDYAVSDDVQWLREQFPKWKTIKSIGVVESTRDTGDEAKTERRYFVSSLDRRRGPVCSHCPGADGG

SEQ ID NO: 57527 - DNA, 834 bp, Unknown
  Obtained from environmental sample
  misc_feature (1)..(834): n is a, c, g, or t
ttgaaaccagaagaaagcaaaaatttacgaaatattgcgctgcggcttcgctacgacctccttgaaatgattggcgtgggggttgcagggcatttgggcggttcaagttcgcttgccgaattggcggcgtacctgtatttttaccgcatgaattttgacgcacagcgcttgcccgaccctgaccgtgaccggctggtgctttcaaaagggcacgccgcgttgattcagtatgcggcgctctgcgagaaaggctgcttcccccgcgaagagctgaaacgggtaaagaagatcgacggccttttgcagggccaccccgaccttagcatccccggcatcgaagcggttaccggctccctcgggcaggggctgtcagtcgcgctgggcatggcgctggctttaaggctggataagagcccggcgcgggtttacgcggtcatgggcgacggggagcagagcgaaggccagctctgggaagcggcgatggcggcagccaattttaaggctgacaaactcaccgcattcctcgactggaacaaggtgcaggcaaccggggttacaaaagatattttcagcatccccgatttggacaaaaagtgggcggctttcggctggaacgtgctaagcgcgaacgggcacgactttgacgaaattgacggtgcggttgaaaaagccatcgcatgcaaaggccagccttccattattatcctcgatacggttaagggaaaagcttttagctttgccgaaggaaaccccgcataccataacgggatactcaccgaggaaacatatcagcaggcgattcgcgagttggacgcggcaaaggcagggatataa

SEQ ID NO: 57528 - protein, 277 aa, Unknown
  Obtained from environmental sample
  DOMAIN (106)...(236): Thiamine pyrophosphate enzyme, C-terminal TPP binding domain
  misc_feature (1)..(277): Xaa is any amino acid
MKPEESKNLRNIALRLRYDLLEMIGVGVAGHLGGSSSLAELAAYLYFYRMNFDAQRLPDPDRDRLVLSKGHAALIQYAALCEKGCFPREELKRVKKIDGLLQGHPDLSIPGIEAVTGSLGQGLSVALGMALALRLDKSPARVYAVMGDGEQSEGQLWEAAMAAANFKADKLTAFLDWNKVQATGVTKDIFSIPDLDKKWAAFGWNVLSANGHDFDEIDGAVEKAIACKGQPSIIILDTVKGKAFSFAEGNPAYHNGILTEETYQQAIRELDAAKAGI

SEQ ID NO: 57529 - DNA, 354 bp, Unknown
  Obtained from environmental sample
  misc_feature (1)..(354): n is a, c, g, or t
atggaaagaaaaatgatgagtttacgaaaagcctacggagataccctggtggaactgggcaaggaaaaccagaacatcgttgcgctggaagccgacctcggcaaatcaaccatgtcctgtctttttaaggaagccttcccggagcgctattttgaaatggggatcgccgagcagaacatggcctcggttgccgcaggccttgcccttacagggaaaattgccttttacagcacgttcgcggtattcgcgtcgggccgcgcctacgatcaaatccgctgttccatcgcgatacctcacgcgaacgtgcggatctgcggttcaagctgcgggctaatcgacttcggcgacggctag

SEQ ID NO: 57530 - protein, 117 aa, Unknown
  Obtained from environmental sample
  DOMAIN (6)...(117): Transketolase, pyridine binding domain
  misc_feature (1)..(117): Xaa is any amino acid
MERKMMSLRKAYGDTLVELGKENQNIVALEADLGKSTMSCLFKEAFPERYFEMGIAEQNMASVAAGLALTGKIAFYSTFAVFASGRAYDQIRCSIAIPHANVRICGSSCGLIDFGDG

SEQ ID NO: 57531 - DNA, 366 bp, Unknown
  Obtained from environmental sample
  misc_feature (1)..(366): n is a, c, g, or t
atgcagggaaatcgtaccgagcgtcttggtagcntgattcaggaacttatcagcagtcttattcttgaaagcagaatcaaagacccaagaatctcacaatttgtctcaataaccagggtgaatgtcacgcgcgatctttcatatgccgacgtatatgtttccaacatccgggaaacggcgaaccttgaacgcaacgcgcagggcctgcaaagcgccgccggttttatccaggcccaactgggcgccgccttaaaaatacggaaaatcccccatctgcgcttccatgccgacaccagcattcgggaaggttttgacatggtgcagaagatagagcagttggcgggggtaaatacaaaagaagaataa

SEQ ID NO: 57532 - protein, 121 aa, Unknown
  Obtained from environmental sample
  DOMAIN (5)...(110): Ribosome-binding factor A
  misc_feature (1)..(121): Xaa is any amino acid
MQGNRTERLGSXIQELISSLILESRIKDPRISQFVSITRVNVTRDLSYADVYVSNIRETANLERNAQGLQSAAGFIQAQLGAALKIRKIPHLRFHADTSIREGFDMVQKIEQLAGVNTKEE

SEQ ID NO: 57533 - DNA, 756 bp, Unknown
  Obtained from environmental sample
  misc_feature (1)..(756): n is a, c, g, or t
gtgagggatgagaaaatcgcccgcgagtattcgtccaaacgccaggaattgaaacgctttgaggacgccaaaaacttcaagcaggtgaccgccgagaccctgcgcgacaggatcagcgacggcaccatacaggaactcaaggtgatcatcaaggccgacgttcagggttcggcggaggctctcaagagcagccttgaaaaactttccaccagggaaatccggctgcatgtcatacaggccctgcccggcccgattaacgaaggcgacgtcgatctcgcgatcgcgtcaaaggcaattatcatcggctttaacgtgcggccccttccaaaggcaaaggttttggcggagcaggaaaaagttgatatacgcaaatacaacatcatctataaggcggtcgaggaaatccaccaggcgatggagggcatgctcaagcccgataccaaagaggaagttatcgcctcggtagaggtgcggaataccttcaaggttccaaaggtcggaacaatcgccggctgtttcgtacagagcggcgtagtcaagcgtagcgccaacgtcaacgtaatccgcgcggagattgtgatccactcgggcaaaatcgcctcgctcaggcgcttcaaggacgacgcccgcgaagttgcggccggttacgaatgcggcatagggctggaaaattttgacgacatacaggtcggcgatcaatttgaagtgatcgagattgtagaggtcgcgagaaagttaagcagcagccagggttga

SEQ ID NO: 57534 - protein, 251 aa, Unknown
  Obtained from environmental sample
  DOMAIN (167)...(235): Elongation factor Tu domain 2
  misc_feature (1)..(251): Xaa is any amino acid
MRDEKIAREYSSKRQELKRFEDAKNFKQVTAETLRDRISDGTIQELKVIIKADVQGSAEALKSSLEKLSTREIRLHVIQALPGPINEGDVDLAIASKAIIIGFNVRPLPKAKVLAEQEKVDIRKYNIIYKAVEEIHQAMEGMLKPDTKEEVIASVEVRNTFKVPKVGTIAGCFVQSGVVKRSANVNVIRAEIVIHSGKIASLRRFKDDAREVAAGYECGIGLENFDDIQVGDQFEVIEIVEVARKLSSSQG

SEQ ID NO: 57535 - DNA, 603 bp, Unknown
  Obtained from environmental sample
  misc_feature (1)..(603): n is a, c, g, or t
ttgtcgattttgtttaccgcaacgatgattggaactccggcttcctttgcgtggttgatcgcctcgatggtctggggcatgaccccgtcatccgcggctacaaccagcaccactatgtccgtaacctgcgcgccccgcgccctcatgcgcgtaaacgcctcgtggcccggcgtgtcaaggaaggtaattctgccgtgcggcgtctctaccatgtacgcgccgatgtgctgggttatcccgccaaactcgcccgacactacgtccgctttccggatagcgtccagcagtttggttttgccgtggtcaacatgtcccataacggtaacaaccggcggccggggcagcatatccgcgccttcgtccgttccggtgtcaattattgtctcatcatacaggctgatgatttttacgtcggcgccgaattcggcggccagtatcgtcgcggtatcggcgtctatctgctggttaatggtaaccatcatgccaagcttcatcagcttttggattaagtccgacgccttgaggttcatttttcttgccagttccgacaccgaaatattttccatgatctcaattgatttgggcaccgggttggcaatataa

SEQ ID NO: 57536 - protein, 200 aa, Unknown
  Obtained from environmental sample
  SIGNAL (1)...(26)
  misc_feature (1)..(200): Xaa is any amino acid
MSILFTATMIGTPASFAWLIASMVWGMTPSSAATTSTTMSVTCAPRALMRVNASWPGVSRKVILPCGVSTMYAPMCWVIPPNSPDTTSAFRIASSSLVLPWSTCPITVTTGGRGSISAPSSVPVSIIVSSYRLMIFTSAPNSAASIVAVSASICWLMVTIMPSFISFWIKSDALRFIFLASSDTEIFSMISIDLGTGLAI

SEQ ID NO: 57537 - DNA, 459 bp, Unknown
  Obtained from environmental sample
  misc_feature (1)..(459): n is a, c, g, or t
gtggttgatcgcctcgatggtctggggcatgaccccgtcatccgcggctacaaccagcaccactatgtccgtaacctgcgcgccccgcgccctcatgcgcgtaaacgcctcgtggcccggcgtgtcaaggaaggtaattctgccgtgcggcgtctctaccatgtacgcgccgatgtgctgggttatcccgccaaactcgcccgacactacgtccgctttccggatagcgtccagcagtttggttttgccgtggtcaacatgtcccataacggtaacaaccggcggccggggcagcatatccgcgccttcgtccgttccggtgtcaattattgtctcatcatacaggctgatgatttttacgtcggcgccgaattcggcggccagtatcgtcgcggtatcggcgtctatctgctggttaatggtaaccatcatgccaagcttcatcagcttttggattaa

SEQ ID NO: 57538 - protein, 152 aa, Unknown
  Obtained from environmental sample
  misc_feature (1)..(152): Xaa is any amino acid
MVDRLDGLGHDPVIRGYNQHHYVRNLRAPRPHARKRLVARRVKEGNSAVRRLYHVRADVLGYPAKLARHYVRFPDSVQQFGFAVVNMSHNGNNRRPGQHIRAFVRSGVNYCLIIQADDFYVGAEFGGQYRRGIGVYLLVNGNHHAKLHQLLD

SEQ ID NO: 57539 - DNA, 363 bp, Unknown
  Obtained from environmental sample
  misc_feature (1)..(363): n is a, c, g, or t
gtggtcataaactggaatatgaacagcaccgacatagacctgcacgtaatagaccccacaggcgaagagtgctactacagccacagaaaaacgcgcatcggcggacgcataagccccgacgtcacagagggctacgggccggaacaattccttttgaaggaggcggtaaaggggaaatacaaggtctacgtcaactatttcggcgatcgccaagtcacaaacgcagggccgtctaccgtcatggcggaagtctacatcaaatacgccgacaagaccgaacagcgtaaagtcgtgtgtttgcaaatgtcaaacgcgaagagaggctcaggcggaaatgtgttggtaacggagtttaagttttga

SEQ ID NO: 57540 - protein, 120 aa, Unknown
  Obtained from environmental sample
  misc_feature (1)..(120): Xaa is any amino acid
MVINWNMNSTDIDLHVIDPTGEECYYSHRKTRIGGRISPDVTEGYGPEQFLLKEAVKGKYKVYVNYFGDRQVTNAGPSTVMAEVYIKYADKTEQRKVVCLQMSNAKRGSGGNVLVTEFKF

SEQ ID NO: 57541 - DNA, 390 bp, Unknown
  Obtained from environmental sample
  misc_feature (1)..(390): n is a, c, g, or t
atgaatacgctaaaatctcgtttaactgtcgtcgccgcgtttgttatcattgcggcgttaggggtgtcggttttcttaaactgcggatcaaaaaaatccgacgaatcttcgccgcgggagaactcgacctacccaaccctgaaaattaacggaaaggaagaccctaacgtctatctgcaatcgcttgatattgaagtggaagtgtcggggaacatagcttccacacggcaaactatggtcttcaaaaataagaccgaccgcgtattagagggcgaactgacatttccgttgcccgaagggcgcaccgtaacattctacgcgctcgacatcaacggcaagatgcgcgaggccgtgccggtggaaaaggtgagcgggacgggagttctttga

SEQ ID NO: 57542 - protein, 129 aa, Unknown
  Obtained from environmental sample
  SIGNAL (1)...(27)
  misc_feature (1)..(129): Xaa is any amino acid
MNTLKSRLTVVAAFVIIAALGVSVFLNCGSKKSDESSPRENSTYPTLKINGKEDPNVYLQSLDIEVEVSGNIASTRQTMVFKNKTDRVLEGELTFPLPEGRTVTFYALDINGKMREAVPVEKVSGTGVL

SEQ ID NO: 57543 - DNA, 780 bp, Unknown
  Obtained from environmental sample
  misc_feature (1)..(780): n is a, c, g, or t
ttgaattaccggctgcctatggcctacccggattcgctcgaaaaattcgcggtaaaagcgacagtttggaagagcagcctaaaaccgcttgtcccggattcagccgacgggcttcgcttcgacaaagtcgatgagaactatgtcgcctcgttttcccgcgaaaaataccgccccgcccgcgcgttgaatttcgccttgcctacgcccgttgacattccgcagcttatgatgcaaccggcgcaggggaactactatttcttcgcctcggttacacctaagttggaaacgcgtaaaaagcggtgggagaacgatctggcgattatttgggacgtctctttgagcggctcgcaacgcgatttgaaacgtgagttggatctgctcaataccatttttactgataagaaagacgcaaatgttcatctttactttctgaataataaatttaaaaagatagccaataaaggaacaagcaacggcgagtataaagtcagtaacggtaagtgggacgagttgaaagaggttttagagacggcggttttcgacggcggcaccgacttttcaaagatcaatccgaacgacattacgggaaatgaaattttgttcttttccgacggaatatcaacgctcagcgacgccgactttctgaaaaacgccaacgcanaccgccctatacattgccttgtctcttccgcaaaggccgactacagcgctatgaagttgattacgggcaagtcaaagggtaagtttattaatatcaacgcgctctcttcccaaaattaa

SEQ ID NO: 57544 - protein, 259 aa, Unknown
  Obtained from environmental sample
  misc_feature (1)..(259): Xaa is any amino acid
MNYRLPMAYPDSLEKFAVKATVWKSSLKPLVPDSADGLRFDKVDENYVASFSREKYRPARALNFALPTPVDIPQLMMQPAQGNYYFFASVTPKLETRKKRWENDLAIIWDVSLSGSQRDLKRELDLLNTIFTDKKDANVHLYFLNNKFKKIANKGTSNGEYKVSNGKWDELKEVLETAVFDGGTDFSKINPNDITGNEILFFSDGISTLSDADFLKNANAXRPIHCLVSSAKADYSAMKLITGKSKGKFININALSSQN

SEQ ID NO: 57545 - DNA, 1176 bp, Unknown
  Obtained from environmental sample
  misc_feature (1)..(1176): n is a, c, g, or t
atgaaactattcgaaccattaatgttaaaatttgaagacgggaattgggctggcgatccggaattaggcctgatggatacaatacttgaacagaaccccaagctaataaaaatactggaaaacgacatcacgcagggcaatccaggctcaacattcgggaggcaggatacgccgagcgtggaacaaatagtgagggcggcgatctacaaagagatgaaaaaacttgattaccgctcattggaatacgcgcaggaagattccaggatatgtgaaaagtttgtaaaaataaacccgctacggccgtatagttttcaagtatggcaaaaatacataagccgggttagcgaagaaaaactggaaaagttcatgatagcgatgaacaaaatagcgataggggaaggcctggaagacatgcaggaattccggcaggacactacggtaatagagacggacatccattacccgacgaacaacagccttgtgtgggactgcataaaacaggcatcaaacgtggtaaaaaaaaagagcgaatacggagggacgataaaggcggacaggattatagccgcgatggaagagttggtaccggtaatggaaaaggtcttggggatgacggaacgcagagagataatgaaagagcaagtgcctgttgaggaaaaaatattttcgatatacgagcggcatacggacataatagtgaaagggcggagggaagttcagttcggtcataaagtaaacattgggagcgggaggagcaacttaatactaacctgcgagatactggaaggcaacccgaaggacagcgaattgtacgaggggacgttaaagaaacttaaaaaagattacggcgagactcctgcctcaagtgttgcggacggcggttttgcgagcaaggcgaacatagaatattcacagaaggcaggaataataaatatagtgttcaacaagatccggggcagcatgcaaaacatagcgagcagcaaatgggtggaaaacaaactgaagcgctggaggagcgggatagaggcggtaatttcaaatttgaaacgcgggtttcaaatacggcgatgcacatggaaaggtattgcacattatggacaaaaggtattttggagtgtcattggatataaccttcgtgtaatgaccggtgctatattacagacaatgactttatag

SEQ ID NO: 57546 - protein, 391 aa, Unknown
  Obtained from environmental sample
  DOMAIN (214)...(378): Transposase DDE domain
  misc_feature (1)..(391): Xaa is any amino acid
MKLFEPLMLKFEDGNWAGDPELGLMDTILEQNPKLIKILENDITQGNPGSTFGRQDTPSVEQIVRAAIYKEMKKLDYRSLEYAQEDSRICEKFVKINPLRPYSFQVWQKYISRVSEEKLEKFMIAMNKIAIGEGLEDMQEFRQDTTVIETDIHYPTNNSLVWDCIKQASNVVKKKSEYGGTIKADRIIAAMEELVPVMEKVLGMTERREIMKEQVPVEEKIFSIYERHTDIIVKGRREVQFGHKVNIGSGRSNLILTCEILEGNPKDSELYEGTLKKLKKDYGETPASSVADGGFASKANIEYSQKAGIINIVFNKIRGSMQNIASSKWVENKLKRWRSGIEAVISNLKRGFQIRRCTWKGIAHYGQKVFWSVIGYNLRVMTGAILQTMTL

SEQ ID NO: 57547 - DNA, 312 bp, Unknown
  Obtained from environmental sample
  misc_feature (1)..(312): n is a, c, g, or t
atggacaaaagaaaaaggtatactgccgaggagaaagtaaggattctcagagaggtgcttgaagacgggaaacaaataagccaagtggccgagcaatacgggcttcacccgaacaatatttttaactggcggaagcagcttttcgagggcggaatccaaaccttccagatcaaaagggctgacgtcagcgagaaagccgaggagaggaaaatagccgaccttcaggaaaagatcaaacagaaagacgaagtgatagcggaactagccgaggaactcttggggctaaaaaaaaagaactgtggccatcggtag

SEQ ID NO: 57548 - protein, 103 aa, Unknown
  Obtained from environmental sample
  DOMAIN (4)...(95): Transposase
  misc_feature (1)..(103): Xaa is any amino acid
MDKRKRYTAEEKVRILREVLEDGKQISQVAEQYGLHPNNIFNWRKQLFEGGIQTFQIKRADVSEKAEERKIADLQEKIKQKDEVIAELAEELLGLKKKNCGHR

SEQ ID NO: 57549 - DNA, 774 bp, Unknown
  Obtained from environmental sample
  misc_feature (1)..(774): n is a, c, g, or t
atgagccttgaagaacgggaaaccgcggaaaaggaaataacacgcctganaagcaagaccgggatttctttggaaaccattttacagtatgcggggataccgcacaggacgtggcacgaatgggcgcagcggcgcggggcccagacgaagcacaacaacaacatcccgaaggcgtattacctgaccccggaagaaatccatgcgattaccgcttattgcatcaacaacccgttaaaaggctaccggatgcagagctgggagatggtggacagtatgaagaggaaacaagggacagggataaaagcctgggaattaacagacgaaatatgggaagtggcacggcagtttattccagagagtaaacgggaagaaggaaaaacctatcaacggaagccaggcgggggaaggaagcccttgcctccgcgtcaggtattagcaggaatctttttcgtgttgcggaccggcatacagtggaaagcattgccaaaagaatacggagcggcaagcagcgtccatgagtatttcagtagatgggcgcaagcagggttgttcatgcggttatggcaggaagggctgttgagttatgacgaactgcagggtattggctgggaatggcaaagcgtggacggttgcatggtaaaagcgcctttagcccgggaatcggcgggaaggaatccgactgaccgggggaaaaaaagggacgaaacgcagccttgcagtcgaatcacacggattaccgataggtatagtcgtcagcggggccaacacgcatga

SEQ ID NO: 57550 - protein, 257 aa, Unknown
  Obtained from environmental sample
  misc_feature (1)..(257): Xaa is any amino acid
MSLEERETAEKEITRLXSKTGISLETILQYAGIPHRTWHEWAQRRGAQTKHNNNIPKAYYLTPEEIHAITAYCINNPLKGYRMQSWEMVDSMKRKQGTGIKAWELTDEIWEVARQFIPESKREEGKTYQRKPGGGRKPLPPRQVLAGIFFVLRTGIQWKALPKEYGAASSVHEYFSRWAQAGLFMRLWQEGLLSYDELQGIGWEWQSVDGCMVKAPLARESAGRNPTDRGKKRDETQPCSRITRITDRYSRQRGQHA

SEQ ID NO: 57551 - DNA, 486 bp, Unknown
  Obtained from environmental sample
  misc_feature (1)..(486): n is a, c, g, or t
gtgaaccccgaactcaatgacgctattgccgataagctgctgcccctgcgggaaatcgccacgccgaacattttngaggcggaacagctttcgcgcataaaagaaatcagtactattgagcagatgaaggaagcagcaaggattatccacggaaaaggcgccaggcacctttttttgaaagggggcgcaaaattgaaagaaaccatggaagccgcctcgcccaaagcgatggaccttttttacgacggcaaaaatttcgagctttttgaagaagacttgattgaaaccacctggacgcacggggccggttgtactacctcggcagcaatcgccgctgggttagcctgcggcctttccgtccgggatgctgtaattctcgcgaaaaagttcattacagcaagcctgaaagccggttttgcccttaacaagtgggtaggtcccggtaacccctccgcctggagaaaagaaaagctcttcccgaattag

SEQ ID NO: 57552 - protein, 161 aa, Unknown
  Obtained from environmental sample
  DOMAIN (1)...(149): Phosphomethylpyrimidine kinase
  misc_feature (1)..(161): Xaa is any amino acid
MNPELNDAIADKLLPLREIATPNIXEAEQLSRIKEISTIEQMKEAARIIHGKGARHLFLKGGAKLKETMEAASPKAMDLFYDGKNFELFEEDLIETTWTHGAGCTTSAAIAAGLACGLSVRDAVILAKKFITASLKAGFALNKWVGPGNPSAWRKEKLFPN

SEQ ID NO: 57553 - DNA, 351 bp, Unknown
  Obtained from environmental sample
  misc_feature (1)..(351): n is a, c, g, or t
atgataaaaatcgcgacgattgccggttccgacgcttcaggcggggcgggtcttgaggcggatctaaaaacttttgaagaatacggactttacggcatggcggccattacgcttatcgccacgatggatccggataacaactgggcgcacaaggttttccccctggatgaaaacgcccttcgctctcagcttcaaactgtttttaagggagtcggcgtaacagccgccaagtcgggtatgctgggtaccttttacgcagtggatctttgcagggaatttattgatagattcaaaataaaaaattacgtccttgatccggtgatggtctgcaaaggcgcaggcgaagcgtga

SEQ ID NO: 57554 - protein, 116 aa, Unknown
  Obtained from environmental sample
  DOMAIN (11)...(116): Phosphomethylpyrimidine kinase
  misc_feature (1)..(116): Xaa is any amino acid
MIKIATIAGSDASGGAGLEADLKTFEEYGLYGMAAITLIATMDPDNNWAHKVFPLDENALRSQLQTVFKGVGVTAAKSGMLGTFYAVDLCREFIDRFKIKNYVLDPVMVCKGAGEA

SEQ ID NO: 57555 - DNA, 624 bp, Unknown
  Obtained from environmental sample
  misc_feature (1)..(624): n is a, c, g, or t
ttgaggtgtccgccaaactcaattagtatattattattaaagccagagaacaaaggagccgccatgcttttatccgatgttgtgattgtcctttcacgcccggaaaaggccggaaatgtgggggccgtttgccgggccatgaaaaacatggacctttcccgccttcgccttgccgcgccagatttttcgctgacagataccgtttcggaagccgggctcggcttcgggggggatttagcagttatccgcgcgagggcaattcacgcttttgatgtttgggaaaaagctgaaaccttcgacagcctgccagccgctgtaaaagactgcgccctgacgattggcacaacccgccgcaggggccgccatcgcaagcaggttaccatgacgccttcggaaaccgccgccttcttattgaaccatcccggccccgcggctttggtctttggaaatgaacggaccgggcttgaggatgaagagcttgagctttgcaatttagcctctcacatccccgcagacgaggctttcccttctcttaacctttcccacgcggttcagatttacacctatgagcttttcaaaaccctatcctgtccccgcgcgaaggtaccccgattgatgcggtaa

SEQ ID NO: 57556 - protein, 207 aa, Unknown
  Obtained from environmental sample
  DOMAIN (26)...(189): SpoU rRNA Methylase family
  misc_feature (1)..(207): Xaa is any amino acid
MRCPPNSISILLLKPENKGAAMLLSDVVIVLSRPEKAGNVGAVCRAMKNMDLSRLRLAAPDFSLTDTVSEAGLGFGGDLAVIRARAIHAFDVWEKAETFDSLPAAVKDCALTIGTTRRRGRHRKQVTMTPSETAAFLLNHPGPAALVFGNERTGLEDEELELCNLASHIPADEAFPSLNLSHAVQIYTYELFKTLSCPRAKVPRLMR

SEQ ID NO: 57557 - DNA, 777 bp, Unknown
  Obtained from environmental sample
  misc_feature (1)..(777): n is a, c, g, or t
atgaaagtcggacaatatgaagtttatatattggtagaatccgaaagggatgggaatacagggattttagtcggagcggacgaggctgttctgaaacgctacatccccacggaaggttttaagcataccgccaacgccgttctaatcaaaaccccgaaacagaacatattgatagataccggaacaggagcaggcggtattattgtagataaagtaaaaaaattgggagtccagccggaaaatattgacgccgtccttattacccacctgcacggtgaccacttcggcagcctccaaaaagacggggcggcggttttctcaaaagcgaaaatttacctttccgccaaagagcacgaatactttacaaaaaccaatgttaatcagggagcggttgccgcccttgccccgtacggctcaaaggttaccacatttgaacccggagaacttggtaaaaatttgaaagaaattgttctggggatttcccccatcgccgcctacggacacacgcccggacacacgctctatcttgtagaaaacggcaaagacaaactgttaattatcggagaccttctgcacatagcattggtacagttccccgttcctgagatcagcgcgacttacgacatggatcaaaaagccgctgccgccgcgcgcaggcaggttttagcttatgccgcgaagaacaaaatcccggttgcggggatgcacattgtttacccgggaacaggcggcgtgagcgttgacgggagcgggtttaaattttcgccggggaaatag

SEQ ID NO: 57558 - protein, 258 aa, Unknown
  Obtained from environmental sample
  DOMAIN (43)...(236): Metallo-beta-lactamase superfamily
  misc_feature (1)..(258): Xaa is any amino acid
MKVGQYEVYILVESERDGNTGILVGADEAVLKRYIPTEGFKHTANAVLIKTPKQNILIDTGTGAGGIIVDKVKKLGVQPENIDAVLITHLHGDHFGSLQKDGAAVFSKAKIYLSAKEHEYFTKTNVNQGAVAALAPYGSKVTTFEPGELGKNLKEIVLGISPIAAYGHTPGHTLYLVENGKDKLLIIGDLLHIALVQFPVPEISATYDMDQKAAAAARRQVLAYAAKNKIPVAGMHIVYPGTGGVSVDGSGFKFSPGK

SEQ ID NO: 57559 - DNA, 1851 bp, Unknown
  Obtained from environmental sample
  misc_feature (1)..(1851): n is a, c, g, or t
atgcactgtattaagaaaataactaatgatctggtttgggtcggcgcgaatgacaggcggctggcgttattcgaaggtgtttattccgtaccggcgggggtatcgtacaattcataccttttaaccgatgagaaaaccgtgctctttgatactgtcgataaagcggtgcggcagagattcctggaaaatgtaaaagaagcgcttaaaggcagaaaactggattaccttgtggtgcagcatgtcgaacccgaccattccgccgtaattcccgatttaatacgtcagcatcccgaattaaaaattgtttgcagcgcaagggtattggaatttataaaacaattctacgattttgatatagattcgcacgtccgtttggtcgaagaaaacgagacattgaataccggaaagcacacttttcagtttattatggcccctatggtgcattggccggaagtcatgtttacctacgattcaacagctaaaatacttttttccgcggacgcgtttgggcacttcggagcattgaacggcgctcttttcgcggacgaagtgaattttgccaaggattatatggacgaggcgcgccgttactatgcaaatatagtcggaaaatacggggtacaggttgaatcggcgctggataaagcgtccgcctttaatatagaaatgatatgtccgcttcacggatttgtatggcgttcaaacttaaatgaaatcatttcaaaatatatgctttggagcaagtacgagccggaagagcgcggcgttatgatcgcttacgcatccgtctacggaaatacggaaaacgcggcggaaattcttgccctgcgcttacgcgataaaggaattaaaacagttatatatgacgtttcagttactccggcatcagagatagtaagcgccgcgtttcaatggagccaccttgtgtttgcgtccacaacctacaacgcgggaattttcgtaacaatggaagccttgattaatgatcttgcggcgcacaatattcagaaccgccgcgttgccattatcgaaaacggttcatgggctgccacaagcggcggcttgattcgtgaaatactgggcaagtgcgaaaaaattaattttcttgaaaataatgtcagcatactatccggcttaaaaaaagcgcagctttcagatattgaatcaatggcggaagcaatcggcgcggatttccccgctcccgcgggagttgctcagaataatcaggctgtaccaaacaccgttgatcccgccgttatgttcaagctgtcctacggtttatttgtattaacagccagagacggcaataaggacaacggctgtattatcaataccgttatgcagataacggtaactcccgtgaaaataacaatcggggtgaataaagccaattatacccatgatatgattataaagacaggaaaattcaatgtttccgttttaagcgaaaaagcgccttttagtgtttttcaacaatttggttttcatagcggaaaagacacggataaattcgccggcagcggcgaagccgtgcgtgcgccaaacggcgtccgttatctgtcagaatatgcaaacggcgtgatttccgctgaagtgaaagaaactgttgattgcggcacacatacgctgtttatcgccgaggtgaatcaggcgttttcgctgtcacgcgacgcaagcgtgacctatcaatattactttgacaacataaaaccgaaaccccagccgccgaagggaaacaaaaagggatttgtctgcaagatttgcggatatgtgcatgaaggcgatactttgccggatgattttgtttgtccgctttgtaagcacggggcaggggattttgagagactttga

SEQ ID NO: 57560 - protein, 616 aa, Unknown
  Obtained from environmental sample
  DOMAIN (580)...(613): Rubredoxin
  misc_feature (1)..(616): Xaa is any amino acid
MHCIKKITNDLVWVGANDRRLALFEGVYSVPAGVSYNSYLLTDEKTVLFDTVDKAVRQRFLENVKEALKGRKLDYLVVQHVEPDHSAVIPDLIRQHPELKIVCSARVLEFIKQFYDFDIDSHVRLVEENETLNTGKHTFQFIMAPMVHWPEVMFTYDSTAKILFSADAFGHFGALNGALFADEVNFAKDYMDEARRYYANIVGKYGVQVESALDKASAFNIEMICPLHGFVWRSNLNEIISKYMLWSKYEPEERGVMIAYASVYGNTENAAEILALRLRDKGIKTVIYDVSVTPASEIVSAAFQWSHLVFASTTYNAGIFVTMEALINDLAAHNIQNRRVAIIENGSWAATSGGLIREILGKCEKINFLENNVSILSGLKKAQLSDIESMAEAIGADFPAPAGVAQNNQAVPNTVDPAVMFKLSYGLFVLTARDGNKDNGCIINTVMQITVTPVKITIGVNKANYTHDMIIKTGKFNVSVLSEKAPFSVFQQFGFHSGKDTDKFAGSGEAVRAPNGVRYLSEYANGVISAEVKETVDCGTHTLFIAEVNQAFSLSRDASVTYQYYFDNIKPKPQPPKGNKKGFVCKICGYVHEGDTLPDDFVCPLCKHGAGDFERL

SEQ ID NO: 57561 - DNA, 516 bp, Unknown
  Obtained from environmental sample
  misc_feature (1)..(516): n is a, c, g, or t
ttgacgattacatcagaaaagttcccgaatttcccaaaaaagggaattcttttttatgatataacaagcatccttgccgctcccgaagcgtttagattctgcatcgacagaatggtggaaatctacaaagacaaaaaaattgacgccgtagccgcgatagaagccagaggttttttatttgccgccgcttacggatacaaaacaaatattccgataattccaatccgaaaaaaaggcaaacttccgggcgttactctttccaaaaaatacgatcttgaatacgctcaagccgagattgaagtccatgcgaccgatgttcccaaaggaaagcgcgtgcttcttaccgatgatcttatcgcgacaggcggcactttgaacgccgctcgctcgctgttaatcgaagggggcgcggaagtgccggaaatctttggtatagtgggactgcctattcttaattatcattcggttcttgatcctacacctgttactactttgttagagtatcatactgagtag

SEQ ID NO: 57562 - protein, 171 aa, Unknown
  Obtained from environmental sample
  DOMAIN (20)...(156): Phosphoribosyl transferase domain
  misc_feature (1)..(171): Xaa is any amino acid
MTITSEKFPNFPKKGILFYDITSILAAPEAFRFCIDRMVEIYKDKKIDAVAAIEARGFLFAAAYGYKTNIPIIPIRKKGKLPGVTLSKKYDLEYAQAEIEVHATDVPKGKRVLLTDDLIATGGTLNAARSLLIEGGAEVPEIFGIVGLPILNYHSVLDPTPVTTLLEYHTE

SEQ ID NO: 57563 - DNA, 1905 bp, Unknown
  Obtained from environmental sample
  misc_feature (1)..(1905): n is a, c, g, or t
atggaatggaatagagcatttgacagacgattggattttatagccaaatatcgcagtttggacaaaagagtgcctttggaaaaaaagaaggctcttcattacttaaaccagcaaagaggctgcttccacgcttttcaatatacaaataaaattttagagctttttatatttctagacgaagaaaacagcatagaaacttctctttcttacctctcttcagatttaaaaaacctaggcgatgtactactccgctctgcaaatccaacaaatccgtttttcttggcaataagagaagaagtccccacttggcacgcagcaaatgtggacgcatcagacttggaaccagatgtagaaaccgaagacgaagacaatgaacaaaagctagaaataaccataatgcgcacagatgctggcaaagacataagcgaccacgaaatgagacgcacgctccgcaacttgcgcgcaaggctaaaagcttggcaagtggaactcagcataatagcagatataaccgcagaatttgacgatttagacgaacacgaaaccgaagatgcggttttaaaactctctttggaaagcgaaccgctcaaaataaaaagcaaaagaggcgagctttttgttggctttgttccaatacaagaaatttacgactatcatttggaactcggtcgcaggcacaaagcaaaacacaacatgatgatagttagctccaacatacgcacatatttaggtagccaaacttacaccaacgcaagccttttagatgcattcctcggcatgaaaaaaaatggaaccatagaagaattcccatttttgcacaacggaatgactttaaccggagacgatttgcaatcgcaacgcccaaagcacgatggcgaaaaatggcatttatacatagaccacccaaaaataataaacggagcgcaaagccttttcacttacgaacaatatgcaagcagagaagatgaaccagttaatccgcttgttttggtaaaagtagttattccatatccttcagaaacagaagaacacgaatctggcaattttgtaaggctcgtgactatggcaaacaaccgccaaaatccggtgttcagctatcatttgcgcgcagcagacgatttgcaattctttatttggcaaaaaatgcaagcagagggtttttattacatatacaaagaaggcgttagaccaaaaactcgtacacgtaaattggaagttcgcatgcgcccagaactttccaaaactatgctccttttagattccaaaataacagaaagccgtgcaagcgaccaagtttttgaccaagagagtttttatcaacgctgctttggatcattttacaggcaaaccacagaacacgaaagcccctttgttcgcttatgcattatctacacaaaagcttggcagcttttgggcagacttcctttaaagataaaagcggtaacgcccggacaaggaacccgcatagaaccaaacaaagacaatcccttgacttcggtgtcttggtatggtggcaaattagaagataaatttgcattccgttgtgcaattcgcgaggtgacaatagcactgactctcagatattggctacactacggaaggcctttcagagactttcaaactctgcaagacaacgaaaacgaattcaacagctcaataataagatttgtgaaaaaaatcttagatggtgctctttcaaaagtgatagtcaccgaatacaaagacaatccaaaatactttgatgtgctccgagtcatagacaatgaaaccggagaaaccgtggaaaggcgcgtttggaagggttttaccaatacagatgtttataaccatctcttgagtatcatgagtaaaagtgagcgcacgtgggaaaaatgcaatggcggcttagacgatatatgggattag

SEQ ID NO: 57564 - protein, 634 aa, Unknown
  Obtained from environmental sample
  misc_feature (1)..(634): Xaa is any amino acid
MEWNRAFDRRLDFIAKYRSLDKRVPLEKKKALHYLNQQRGCFHAFQYTNKILELFIFLDEENSIETSLSYLSSDLKNLGDVLLRSANPTNPFFLAIREEVPTWHAANVDASDLEPDVETEDEDNEQKLEITIMRTDAGKDISDHEMRRTLRNLRARLKAWQVELSIIADITAEFDDLDEHETEDAVLKLSLESEPLKIKSKRGELFVGFVPIQEIYDYHLELGRRHKAKHNMMIVSSNIRTYLGSQTYTNASLLDAFLGMKKNGTIEEFPFLHNGMTLTGDDLQSQRPKHDGEKWHLYIDHPKIINGAQSLFTYEQYASREDEPVNPLVLVKVVIPYPSETEEHESGNFVRLVTMANNRQNPVFSYHLRAADDLQFFIWQKMQAEGFYYIYKEGVRPKTRTRKLEVRMRPELSKTMLLLDSKITESRASDQVFDQESFYQRCFGSFYRQTTEHESPFVRLCIIYTKAWQLLGRLPLKIKAVTPGQGTRIEPNKDNPLTSVSWYGGKLEDKFAFRCAIREVTIALTLRYWLHYGRPFRDFQTLQDNENEFNSSIIRFVKKILDGALSKVIVTEYKDNPKYFDVLRVIDNETGETVERRVWKGFTNTDVYNHLLSIMSKSERTWEKCNGGLDDIWD

SEQ ID NO: 57565 - DNA, 576 bp, Unknown
  Obtained from environmental sample
  misc_feature (1)..(576): n is a, c, g, or t
atgccacacaaccattttcgttttgggatagagggattagcagaagtatctggcaagccgtacacggcagccgctccgccgccacgtacattgctttacccaacagaattgacacacgcacaccgtgcccttaccgatttctacaatgacattaaccattgcgttcctgctaacacattagatcgcattcaacatttttcacactccgtacacacccgtatgcgttacgagcgaggtacaaccacaaattcaacttcggcatcaaaagcgtttgaccttggcacaggtgtttgtcaagactatacgcaaatattgctagccattctccgtcttgacaaaatcccttgtcgctatatagccggactagcatccgactacggcgaaacccatgcttgggttgaagcgtggacaggaacccagtactgcgccatagaccccacgcgcaacaaacttatagatgaaggctacatagccatttcaaggggtcgcgactctgccgactgctccatagaacgcggagtattcaagggcataagccgcggaatacagacagtgcgtttggctatggatatataa

SEQ ID NO: 57566 - protein, 191 aa, Unknown
  Obtained from environmental sample
  DOMAIN (93)...(147): Transglutaminase-like superfamily
  misc_feature (1)..(191): Xaa is any amino acid
MPHNHFRFGIEGLAEVSGKPYTAAAPPPRTLLYPTELTHAHRALTDFYNDINHCVPANTLDRIQHFSHSVHTRMRYERGTTTNSTSASKAFDLGTGVCQDYTQILLAILRLDKIPCRYIAGLASDYGETHAWVEAWTGTQYCAIDPTRNKLIDEGYIAISRGRDSADCSIERGVFKGISRGIQTVRLAMDI

SEQ ID NO: 57567 - DNA, 1236 bp, Unknown
  Obtained from environmental sample
  misc_feature (1)..(1236): n is a, c, g, or t
gtgagtggcgtgagtaaagggacgttgagcggctcaaatccatatacactgcctatcagcggttttatttcgaacggaacattaaatgtggcggtagcaaaatcgggctataccataaacggctcgccaaagacggtggctatatattacataaatgcctttacacttaacagtgttaccgccaacggctcttcaacgcagaccaccacgcagttgacattaacatttaacaaggctgttagcgggcttaccgcctccgacatcacattgagcggagtgtctggcgtgagcaaggggacgttaagcggttccaatccgtacaccctgcccatcaccatcagcggctttacttcaacgggagggacattaaatgtggcggtcgcaaaatccggctatacgataaacggctcgccaaaaacggcaacaatttatggatgggttgatcccgcaactcaaacaacccaattaactggcggcactgtattacaaagttatagcggcggctggggagtagctcttccaggttcaccgtacttttatgatacatgggattatagtaatggcgccggaagcacaaataaatttacatggtatggggtaaatcagggcggcggaggcgcatttaaaactgaatggacagcttattttcttgcccgtctggggttccattggggtaacggcggaagttatactaaatataataatatttatattgactacaacttcaaaagaacaaataacgcgtcatctcccggcggcggttggataggaatatacggctggattagaagcccgtccgcttcaaacgctaatgataaattgatcgaatactatattgctgacgactggtttaaggataaacaggttgatcttacagatattattacatttggtgacggaaaagaactgggttcttttcaagtagacggcgcgacatacaaaatctataagaacacacagatagatcagccatctactgatggaaaaaaagattttacccaaattttcagcatacgccagggccgtcggacttatgggactatttccgttaccgaacattttaaggcatggagcaaatacttaaaactggatgatattgttgaagcaaaatttaaggttgaagcgtttggcggcaacggcaatcttgatctgtcttatctgtacttatcgcaggaagcaaaccgaagaagctggatagaggcaggaacgccgcctgttgattatacccctgtgtag

SEQ ID NO: 57568 - protein, 411 aa, Unknown
  Obtained from environmental sample
  DOMAIN (175)...(386): Glycosyl hydrolases family 11
  misc_feature (1)..(411): Xaa is any amino acid
MSGVSKGTLSGSNPYTLPISGFISNGTLNVAVAKSGYTINGSPKTVAIYYINAFTLNSVTANGSSTQTTTQLTLTFNKAVSGLTASDITLSGVSGVSKGTLSGSNPYTLPITISGFTSTGGTLNVAVAKSGYTINGSPKTATIYGWVDPATQTTQLTGGTVLQSYSGGWGVALPGSPYFYDTWDYSNGAGSTNKFTWYGVNQGGGGAFKTEWTAYFLARLGFHWGNGGSYTKYNNIYIDYNFKRTNNASSPGGGWIGIYGWIRSPSASNANDKLIEYYIADDWFKDKQVDLTDIITFGDGKELGSFQVDGATYKIYKNTQIDQPSTDGKKDFTQIFSIRQGRRTYGTISVTEHFKAWSKYLKLDDIVEAKFKVEAFGGNGNLDLSYLYLSQEANRRSWIEAGTPPVDYTPV

SEQ ID NO: 57569 - DNA, 459 bp, Unknown
  Obtained from environmental sample
  misc_feature (1)..(459): n is a, c, g, or t
atgactaacgagcctgtggaaacggctgatgccgcatatgaccgtgttttctattacacgcaacggtggaagatagagcggttccattatgtgctaaagtcaggctgcgctgtggaaaaactgcaggaacggagcatggacaagacgacgctgctggtgctgatgtattcagtcatagcggtaatgataatgaatatgacatacattgcccggctgcatcctgaaaaaccgtgcacgatattttttgaggaagaggaatggaaagtgctgtattgtacggctaacaggacaaagaaagcgcctcgcaaaccctatagcatggagaaagcggtaacctatcttggccgtcttggagggccgaagcgcgctcccagcgacggcccgcccgggctaaaaaccgtgtggttgggcctgagtacgcttaacactttattggcttacagggagtggttacagtga

SEQ ID NO: 57570 - protein, 152 aa, Unknown
  Obtained from environmental sample
  misc_feature (1)..(152): Xaa is any amino acid
MTNEPVETADAAYDRVFYYTQRWKIERFHYVLKSGCAVEKLQERSMDKTTLLVLMYSVIAVMIMNMTYIARLHPEKPCTIFFEEEEWKVLYCTANRTKKAPRKPYSMEKAVTYLGRLGGPKRAPSDGPPGLKTVWLGLSTLNTLLAYREWLQ

SEQ ID NO: 57571 - DNA, 678 bp, Unknown
  Obtained from environmental sample
  misc_feature (1)..(678): n is a, c, g, or t
atggagtccaaacatacgacattttgcgcatcgactcagtacacggcgactattaccttaacggccaaaactggctacacattgcaaggggtgaccgctgacttctttacagttgcgggggcaaaatcggttaacaacaacgccaattccggcgttgttactgcagtgttcccgtccactggtgcttactttctgggcgacaccggccccggcgggggtaaaatcttttactatagtgcggaaggctttaccatgacggacaccgatgaggtatgccattaccttgaagccgcgccaaacaatatgtcttctacccttagatgggcatcgtcagactatacctctattaatatagccggcacggaaacaacgataggtgcgggcaggaaaaacaccgcccttattcttgcaacggacgctaacgcccctgccgccaaagcctgcaaggactaccggggatccaataaccttgacgactggttcctccccagcagagatgaattgaacgaactgtatgagaacaggtcttatgtaggcaatatgggaaccaataactactggtcttcgtcgcagtacaatgatggctgcgtgtggcttcagcaattcgacattggctttcagcacggcctcggccccaagttcatcaattatagcgtccgtgccgtccgggctttttaa

SEQ ID NO: 57572 - protein, 225 aa, Unknown
  Obtained from environmental sample
  misc_feature (1)..(225): Xaa is any amino acid
MESKHTTFCASTQYTATITLTAKTGYTLQGVTADFFTVAGAKSVNNNANSGVVTAVFPSTGAYFLGDTGPGGGKIFYYSAEGFTMTDTDEVCHYLEAAPNNMSSTLRWASSDYTSINIAGTETTIGAGRKNTALILATDANAPAAKACKDYRGSNNLDDWFLPSRDELNELYENRSYVGNMGTNNYWSSSQYNDGCVWLQQFDIGFQHGLGPKFINYSVRAVRAF

SEQ ID NO: 57573 - DNA, 771 bp, Unknown
  Obtained from environmental sample
  misc_feature (1)..(771): n is a, c, g, or t
atgagtaatatcgcgaaagccttccaaaacggaaaagcctttatcggttttgtaaccggcggggatccaagcgttgaaaaaacaaaagagttcgcgctggaaatgatcagggccggcgccgacctcgtggaaataggcattccattttcagaccccatagccgaaggcccggttatacaggaggcgaatatccgcgccctgggcaacggagccactgtcgaaaaaatgtttacccttgttcaagatctgcgaaaagaaacccaggttccgattgtatttttaacgtaccttaaccctgtttttcattacggttatgacgctttctttaagaaggcaagcctttgcggccttgacgggatcatcatccccgatctgccctttgaggaacaggccgaagtacgggaagccgcgagtcaatacggcgtggaccttatctcgcttatcgcccctacttcagaggcgcgggtaaaggaaatcgcccgaagcgcgtcaggttacatctatctggtttcctcaatgggcgttaccggagtacgcagcgaaatcaccaccgatctcgcttctattgtcaaaacgatccgttccgtgacaaaggttcccgtagcaatcggcttcggcatacacaccccggaacaggcggagcagatggccgcaatggctgacggcattatcgtgggcagcgccattgtcaaaatcatcgcggaacacggcggggacgccgggccgcatgtttaccgttatgtcaaggagatgaaaaacgccgtgcaatag

SEQ ID NO: 57574 - protein, 256 aa, Unknown
  Obtained from environmental sample
  DOMAIN (8)...(256): Tryptophan synthase alpha chain
  misc_feature (1)..(256): Xaa is any amino acid
MSNIAKAFQNGKAFIGFVTGGDPSVEKTKEFALEMIRAGADLVEIGIPFSDPIAEGPVIQEANIRALGNGATVEKMFTLVQDLRKETQVPIVFLTYLNPVFHYGYDAFFKKASLCGLDGIIIPDLPFEEQAEVREAASQYGVDLISLIAPTSEARVKEIARSASGYIYLVSSMGVTGVRSEITTDLASIVKTIRSVTKVPVAIGFGIHTPEQAEQMAAMADGIIVGSAIVKIIAEHGGDAGPHVYRYVKEMKNAVQ

SEQ ID NO: 57575 - DNA, 924 bp, Unknown
  Obtained from environmental sample
  misc_feature (1)..(924): n is a, c, g, or t
atgaatagcagaggaagatttggtgattacggcgggcagtacatccccgaaacattgatgaacgagcttatcaatctggaaaaagcctataaccattacaaggcggacggcggctttacggcggaattaaacgatttgttaaaaaattacgcaggccgcccttcgctgttgtactatgcggaaaaaatgagctgcgatctggggggagcgaaaatctacctcaagcgggaggacatgaaccacaccggctcgcacaaaatcaacaatgtgcttggccaggccctgctggcgaaaaaaatgggcaaaacaaggatcattgccgaaaccggtgcgggccagcacggggttgcggcggcgactgcggcggctctgctggggctggagtgtgaggtctttatgggcaaagaagacactgaacgccaggccctcaatgtgtaccgcatggaattgttaggcgcaacggttcaccccgtaacgtccggcacgcagaccttgaaagacgcagtcaatgaaaccatgcgggaatgggtcagccgtgtccacgacacccactatgtgcttggatcggtaatggggccgcacccctttcccgccatggtgcgggattttcagagcgtaatcggaatagaggcacgggaacaaattctggcggcggagggcagacttccggcggcggtgctggcctgcgtgggcggcggcagcaacgctatgggtattttctaccgtttcattcccgatacggcagtgcggcttatcggctgcgaggcggctggactgggaatcgatacggaacaacacgccgccaccattgccaaaggctcggtggggatttttcacggaatgaaatcctacttttgccagaatgacgagggccagatcgccccgttttatcaatttcagcgggccttgattatccgggcatag

SEQ ID NO: 57576 - protein, 307 aa, Unknown
  Obtained from environmental sample
  DOMAIN (48)...(307): Pyridoxal-phosphate dependent enzyme
  misc_feature (1)..(307): Xaa is any amino acid
MNSRGRFGDYGGQYIPETLMNELINLEKAYNHYKADGGFTAELNDLLKNYAGRPSLLYYAEKMSCDLGGAKIYLKREDMNHTGSHKINNVLGQALLAKKMGKTRIIAETGAGQHGVAAATAAALLGLECEVFMGKEDTERQALNVYRMELLGATVHPVTSGTQTLKDAVNETMREWVSRVHDTHYVLGSVMGPHPFPAMVRDFQSVIGIEAREQILAAEGRLPAAVLACVGGGSNAMGIFYRFIPDTAVRLIGCEAAGLGIDTEQHAATIAKGSVGIFHGMKSYFCQNDEGQIAPFYQFQRALIIRA

SEQ ID NO: 57577 - DNA, 1464 bp, Unknown
  Obtained from environmental sample
  misc_feature (1)..(1464): n is a, c, g, or t
ttgaaaaacggcactatctatttttcggactttaaccctataagcggaatggaacagaacagttttatttttcagcaggcggcaagaatagggttcagtcacagcgattgncttgaatacattntgcgtaacgcgtgttcaagatacggaattgattttaaccccgaaaaaaaggacaatgaggacaaacagcgggttaatgtgctgcttggaggcttaacttccgaacggcaggtttccgtgttaagcggaacaaacacatggttaaaattattgaattcctcaaaatattaccccgtgccgtatattttaactttagaaaaaaaagaatactgtgtttatgaaataccatacgcaatcgccctgaatcacacaacggaggaaatttacgctcaaattaaaaaatccggctttacaaaatttacgctggcgcttaaaaaaaatattataaccgcgcttgaagccggaaatatagcccgctgcaagagcgttgactcaaaatgtatttcttttgtggattttctggacatgaccaaacagcaggacgcggatatttttatatgtttgcacggagggttcggggaaaacggggcattgcagacattattggaacagcacaaaatacattttaacggttcagggtcaaaggcttccagactttgcatggacaaattcggaacaggccagcatgttgattcattaaaaataaaaaaactgcgctcatgtaaaaagaaaaaggttaacgcaaaacaaattaaagagatggcgggatcggaaaagagacattggaaaaagttttgcggttttctgggcggggatacgatagttgtaaagcccaataacgacggatgttccaccggaattgtggttctgcgaagtcctgaagatttacaaacatactgcgagctttgttcagacggcgcgggttttattcctgaaagcacatttaagaaccagcctaataaaattaacctgccggcggaattaggtgattttatttttgaggaatacatagaaacgcaaaaacttgaagtgaagggaaacaaggttgtaaccaagtcaaaggcggactgggtggaattaacggtaggggttttggaaaaacacggaacataccgctcaatgaacccaagcgtaaccgtcgcggataacgccgttctttccctggaagagaagtttcagggcgggacaggcattaattttacgccccctccggaaaatattattaagcctgaactggtaaaaattataaagaaaaacatggaaattaccgcgaaggaatgcggcgttaaagattactgccgtatagacatattcgcgaacaacaaaacaaacgaaattattgtaatagagataaacagcctgccgggtttgtctccgtctacggtattgtttcaacagggggcaaaagaggagcctccgctgtatccaatggaattgttggagtatatcatttcaaggtaa

SEQ ID NO: 57578 - protein, 487 aa, Unknown
  Obtained from environmental sample
  DOMAIN (64)...(222): D-ala D-ala ligase N-terminus
  misc_feature (1)..(487): Xaa is any amino acid
MKNGTIYFSDFNPISGMEQNSFIFQQAARIGFSHSDXLEYIXRNACSRYGIDFNPEKKDNEDKQRVNVLLGGLTSERQVSVLSGTNTWLKLLNSSKYYPVPYILTLEKKEYCVYEIPYAIALNHTTEEIYAQIKKSGFTKFTLALKKNIITALEAGNIARCKSVDSKCISFVDFLDMTKQQDADIFICLHGGFGENGALQTLLEQHKIHFNGSGSKASRLCMDKFGTGQHVDSLKIKKLRSCKKKKVNAKQIKEMAGSEKRHWKKFCGFLGGDTIVVKPNNDGCSTGIVVLRSPEDLQTYCELCSDGAGFIPESTFKNQPNKINLPAELGDFIFEEYIETQKLEVKGNKVVTKSKADWVELTVGVLEKHGTYRSMNPSVTVADNAVLSLEEKFQGGTGINFTPPPENIIKPELVKIIKKNMEITAKECGVKDYCRIDIFANNKTNEIIVIEINSLPGLSPSTVLFQQGAKEEPPLYPMELLEYIISR

SEQ ID NO: 57579 - DNA, 933 bp, Unknown
  Obtained from environmental sample
  misc_feature (1)..(933): n is a, c, g, or t
atgagaatcttcataacgggcggaaccggcaacataggccaatacgtagtcttatccatgattaacgccggccacgacgcgctcgtattgtcgcggaatccgagcaagtatccgtcgctatcgcaaaatcaaaaggtaacggcggtaaagggcgacatcaccgatcatcaactaatggcggagtgcgttaaggggtgcgacgcggtgatacacattgcgcttggctggggcgacgagcccatgtcaatgctgacaggcgataccgccgcgacggtcaatttgcttgagaccgcagaaaaggccggcgtgaagaagtttatctacacgagcagcactgcggctatgggccgtatgcggcagacgatggaagagtcgatggcgaatctgcctgtcgatctatacggcagcacgaaagcggcgtcggaggcgtacgtattgngattcagaanatattacggcgatnacggtcgcgaggtatcaatganacgcaacatcattcgcccgggatacacctactctacgccgccgtattccgacggttccacgcagcccgacgcccgcttcagagacatagcggaggccgtggtcaacagcaagccgatagtgctgacaaaacacgacggcacgcagttcatatcggcggaagagatcgcgcaactctatctgaaattggcggaaagcgataagaacgaggaggtctatctggcgctcgccgacaactttacaagttgggagcagatcgcgaaaatcgccatagaatattacccgtcgtcaaaatctgaaatcgtattgaacgaccttggttggagcgagaagcctatgctgtttgacgttagccggatacgtgaggatttcgggttgtcgttaggcggccgggatacgttgatcgaacatattaggtggaatgtcgatcgggctaagggtatgctttga

SEQ ID NO: 57580 - protein, 310 aa, Unknown
  Obtained from environmental sample
  DOMAIN (3)...(222): Polysaccharide biosynthesis protein
  misc_feature (1)..(310): Xaa is any amino acid
MRIFITGGTGNIGQYVVLSMINAGHDALVLSRNPSKYPSLSQNQKVTAVKGDITDHQLMAECVKGCDAVIHIALGWGDEPMSMLTGDTAATVNLLETAEKAGVKKFIYTSSTAAMGRMRQTMEESMANLPVDLYGSTKAASEAYVLXFRXYYGDXGREVSMXRNIIRPGYTYSTPPYSDGSTQPDARFRDIAEAVVNSKPIVLTKHDGTQFISAEEIAQLYLKLAESDKNEEVYLALADNFTSWEQIAKIAIEYYPSSKSEIVLNDLGWSEKPMLFDVSRIREDFGLSLGGRDTLIEHIRWNVDRAKGML

SEQ ID NO: 57581 - DNA, 393 bp, Unknown
  Obtained from environmental sample
  misc_feature (1)..(393): n is a, c, g, or t
atggggagcgaaatcgaagaactgttcgccatatcgccgggactggagggcgcggacctcagaaaagtatcgccttttccgcagtattttcagaccatcatcgacccgtcggggccggaactcgcccagaccgacgtgcgggagggcagcaaaatattccacctaacggtcttcgccgtggaaaaaggcgttacggcggcgggagtcgtggaagacatcaccgcgccgcgcgtgcggatcgaaacgacggtcgacagggctcgggaactcatcaaaaagaacgtgtctacggttcagcagatagcgttcctcttaggagaaaacgcggcggagtccgaggcgatactcaattccatcatcgagtcttacaccgtgggcgatcccgacgcatga

SEQ ID NO: 57582 - protein, 130 aa, Unknown
  Obtained from environmental sample
  misc_feature (1)..(130): Xaa is any amino acid
MGSEIEELFAISPGLEGADLRKVSPFPQYFQTIIDPSGPELAQTDVREGSKIFHLTVFAVEKGVTAAGVVEDITAPRVRIETTVDRARELIKKNVSTVQQIAFLLGENAAESEAILNSIIESYTVGDPDA

SEQ ID NO: 57583 - DNA, 1596 bp, Unknown
  Obtained from environmental sample
  misc_feature (1)..(1596): n is a, c, g, or t
atgaccgcccccgcgctgaatgccgcgaaaaaagcgccggtctacacggagcttgccaaatgtcaggactgctacaagtgcatccgcaagtgcccggtgaaatccatcaaggtggagaaggggcaggcgagcatcctatttgaccgatgtatctactgcgggcgttgcgtggtgaattgctcggcccgcgccaaacattacagacacgataccgacaaggtgaagttgcttttggcggacgggcggaaaacgattgtttccctcgctccgtcgttcgtatcggaattcaccgattggaagccggaagagcttatcgccgcgctgaaaaaattggggttcgccgccgtgtcggagaccgccctaggcgcggatttcctctccgcgcggatcgcccgcgatttagcgccgctggccgccagccgcgccgccacgggcaagccgcccttgatgatctcatcggcctgtcccgccatcgtcgattacatacagctctacgccccgatcctcgcgccctacatttcgccgcacgcctcgccgctgctcacgcacgccagatttctccgctcgcattacgaatcggaaggcggcgagaaaatcgcggtggtgttcatagggccgtgcatcgccaaaaaacacgaggccgatttgcgcaacacggagatcgacgcggccattactttcaccgaattgcgcagatggctggacaaagagggcgtgacgccgcagacgatttcgttttcgatgtcccattccgccgtagcggattgcaagttcgagccgcgccggagcgctaaaggggcgttcttcccccttgagggcggggagataaaggctttttccgcctacgtggcggaagcggctaaggcggagaggggctacatacacaccatctcggcctccggctttccggcggtgcgcaggattttggagggcttcgaccccgccgcgctggacgaaccggtgttcttagaactcttagcttgtcccagcggctgcgtcaccggccccggcatgtccggcgcggtgcccggcgtcatacgccatacccgcctatgggattacgcccgctccgccgacgataccctcgacgccgacacgctctcccgcctgccgctcgtagacgccgattatcctacgtcaatactgatggacgccccgcatacggaacaagagatatccgaggcgcttttgggcgtggggaaatacagcctcgccggacggctcaactgctcaagctgcggttacgacacctgccgcgatttcgccataggactgctcgacgggcgggcggagaaatcgatgtgcgcctcgtatatgcgcgaactcgcaaacaaaaccgccaacggacttatcaaggcgatccccaacggcgtagtcattgttgaccgcgacttaaaatcattgattgcaacatacagttcgcccgcctcatggggagcgaaatcgaagaactgttcgccatatcgccgggactggagggcgcggacctcagaaaagtatcgccttttccgcagtattttcagaccatcatcgacccgtcggggccggaactcgcccagaccgacgtgcgggagggcagcaaaatattccacctaa

SEQ ID NO: 57584 - protein, 531 aa, Unknown
  Obtained from environmental sample
  DOMAIN (407)...(438): Putative Fe-S cluster
  misc_feature (1)..(531): Xaa is any amino acid
MTAPALNAAKKAPVYTELAKCQDCYKCIRKCPVKSIKVEKGQASILFDRCIYCGRCVVNCSARAKHYRHDTDKVKLLLADGRKTIVSLAPSFVSEFTDWKPEELIAALKKLGFAAVSETALGADFLSARIARDLAPLAASRAATGKPPLMISSACPAIVDYIQLYAPILAPYISPHASPLLTHARFLRSHYESEGGEKIAVVFIGPCIAKKHEADLRNTEIDAAITFTELRRWLDKEGVTPQTISFSMSHSAVADCKFEPRRSAKGAFFPLEGGEIKAFSAYVAEAAKAERGYIHTISASGFPAVRRILEGFDPAALDEPVFLELLACPSGCVTGPGMSGAVPGVIRHTRLWDYARSADDTLDADTLSRLPLVDADYPTSILMDAPHTEQEISEALLGVGKYSLAGRLNCSSCGYDTCRDFAIGLLDGRAEKSMCASYMRELANKTANGLIKAIPNGVVIVDRDLKSLIATYSSPASWGAKSKNCSPYRRDWRARTSEKYRLFRSIFRPSSTRRGRNSPRPTCGRAAKYST

SEQ ID NO: 57585 - DNA, 615 bp, Unknown
  Obtained from environmental sample
  misc_feature (1)..(615): n is a, c, g, or t
atgaacaagcacatccgccgcatggccgcagtatttgtggtcgcttttgcgtccatgatttccatcgtatcctacggtgggaacggcagtgccgctaacacgaatctggcacagcctatcgcacagaccgctggcatgacaatcgccaccggcgggttccacaccctcgccatcaggacggacggcagcctctgggcgtgggggaacaacaaatacggcgagctcggcctcggcgacagcggcactggcacagacaggagcacccccacacgcgtgggcacggacgccaactggaaggcagtgtcggctggctggtaccacaccctcgccatcaggacggacggcagcctctgggcgtggggggacaacgtctacggccagctcggcctcggcgacagcggcgatggcacaagcaggaacacccccacacgcgtgggcacggacgccaactgggcggccgtgtcggcgggcgacttcgggcacaccctcgccgtcaggaccgacggcagcctctgggcgtgggggtacaacggtgacggccagctcggcctcggcgacagcggctatggcactagcagcacagacagaaacacccccacacgcgtgggccgctag

SEQ ID NO: 57586 - protein, 204 aa, Unknown
  Obtained from environmental sample
  SIGNAL (1)...(26)
  misc_feature (1)..(204): Xaa is any amino acid
MNKHIRRMAAVFVVAFASMISIVSYGGNGSAANTNLAQPIAQTAGMTIATGGFHTLAIRTDGSLWAWGNNKYGELGLGDSGTGTDRSTPTRVGTDANWKAVSAGWYHTLAIRTDGSLWAWGDNVYGQLGLGDSGDGTSRNTPTRVGTDANWAAVSAGDFGHTLAVRTDGSLWAWGYNGDGQLGLGDSGYGTSSTDRNTPTRVGR

SEQ ID NO: 57587 - DNA, 438 bp, Unknown
  Obtained from environmental sample
  misc_feature (1)..(438): n is a, c, g, or t
atgatagcaaagagtgatatgccgaacattaacgagaaaacagccgaagggctgaaaccggagggtactccgtaccgggttctcgtggttgacgattccatgtttattgcaaagcaacttggtcaaattttcacttctgaaggttttgatgtcgcggcaactgccgctgacggggcgcaaggacttgaaaaatacaaagaactgcatccaaaccttgatctggttaccctggatattaccatgccggtaatggatggtgtttccgcgcttgaaaaaattcttgaatttgacaagaacgctaacatcattatggtcagcgccttgggtaaggaagatgtagttaagaagtgcctcttaatgggcgcaaaaagttacatcgtaaaaccccttgatcgcaagaaagttctcgaacgggttgtttctgtacttaaacggtaa

SEQ ID NO: 57588 - protein, 145 aa, Unknown
  Obtained from environmental sample
  DOMAIN (25)...(140): Response regulator receiver domain
  misc_feature (1)..(145): Xaa is any amino acid
MIAKSDMPNINEKTAEGLKPEGTPYRVLVVDDSMFIAKQLGQIFTSEGFDVAATAADGAQGLEKYKELHPNLDLVTLDITMPVMDGVSALEKILEFDKNANIIMVSALGKEDVVKKCLLMGAKSYIVKPLDRKKVLERVVSVLKR

SEQ ID NO: 57589 - DNA, 435 bp, Unknown
  Obtained from environmental sample
  misc_feature (1)..(435): n is a, c, g, or t
atgcagttcgtcgataaacagaattacctttccatcggaagcctgtacctcgcggatcagcgccttgaggcgttcctcaaattcgccgcggaattttgccccggcaaccaattcccccaaatccaaggcaaggagttttttgtctttcagcccttcgggcacatccccggcgacaatgcgccgcgcaagaccttccgcaatcgccgtcttgccgacgcccggctctcctatcaaaatggggttgtttttggtacggcgggacaagacctgcatacagcggcgtatttcttcatcgcgcccaatcacggggtcaattttttcctgccgcgccagggcagtcagatcgcggcaataacgatccagcatttcgtatttttgttcgtgttccataatgtatataagatacgagttggaaaaaaattatgtggagtataa

SEQ ID NO: 57590 - protein, 144 aa, Unknown
  Obtained from environmental sample
  misc_feature (1)..(144): Xaa is any amino acid
MQFVDKQNYLSIGSLYLADQRLEAFLKFAAEFCPGNQFPQIQGKEFFVFQPFGHIPGDNAPRKTFRNRRLADARLSYQNGVVFGTAGQDLHTAAYFFIAPNHGVNFFLPRQGSQIAAITIQHFVFLFVFHNVYKIRVGKKLCGV

SEQ ID NO: 57591 - DNA, 1050 bp, Unknown
  Obtained from environmental sample
  misc_feature (1)..(1050): n is a, c, g, or t
atggaacacgaacaaaaatacgaaatgctggatcgttattgccgcgatctgactgccctggcgcggcaggaaaaaattgaccccgtgattgggcgcgatgaagaaatacgccgctgtatgcaggtcttgtcccgccgtaccaaaaacaaccccattttgataggagagccgggcgtcggcaagacggcgattgcggaaggtcttgcgcggcgcattgtcgccggggatgtgcccgaagggctgaaagacaaaaaactccttgccttggatttgggggaattggttgccggggcaaaattccgcggcgaatttgaggaacgcctcaaggcgctgatccgcgaggtacaggcttccgatggaaaggtaattctgtttatcgacgaactgcataccctcgtgggagccggagcggctgagggcgcgaccgacgcttccaatctgctcaaaccggcgctggcgcggggcgaactgcgctgcataggggcgaccactctggacgagtaccgcaaatacatcgaaaaggacgccgccctggaacgccgttttcagcaggtgtataccgcggaaccttcggtggaggataccatcgctattctgcggggtttaaaagaacggtatgaggtacatcacggcgtacggataaaagacgaggcgctggtggcggcggcgacattatccaaccgttacataaccagccgttttttgccggacaaggccattgatctggttgatgaggcggcaagccgtctgaaaatagaattggacagccgccccacagaactggacaaactggaacgccggctcttgcagttgtccattgaaaagcaggcgctttcccgcgaggaagacgccgcttcaaaagaccgtttggcaaaactggaaaaagaaatcaccggcctcactgcggaacgcgacacgatgagagcccgctgggaagatgaaaagaaagacattcagggcatccgcgaactgaaacagcggattgaagacctaaaaagggaagaaacccgctatgagcgcgagggcaatctttcaaagcggcggaagtaa

SEQ ID NO: 57592 - protein, 349 aa, Unknown
  Obtained from environmental sample
  DOMAIN (50)...(244): ATPase family associated with various cellular activities (AAA)
  misc_feature (1)..(349): Xaa is any amino acid
MEHEQKYEMLDRYCRDLTALARQEKIDPVIGRDEEIRRCMQVLSRRTKNNPILIGEPGVGKTAIAEGLARRIVAGDVPEGLKDKKLLALDLGELVAGAKFRGEFEERLKALIREVQASDGKVILFIDELHTLVGAGAAEGATDASNLLKPALARGELRCIGATTLDEYRKYIEKDAALERRFQQVYTAEPSVEDTIAILRGLKERYEVHHGVRIKDEALVAAATLSNRYITSRFLPDKAIDLVDEAASRLKIELDSRPTELDKLERRLLQLSIEKQALSREEDAASKDRLAKLEKEITGLTAERDTMRARWEDEKKDIQGIRELKQRIEDLKREETRYEREGNLSKRRK

SEQ ID NO: 57593 - DNA, 480 bp, Unknown
  Obtained from environmental sample
  misc_feature (1)..(480): n is a, c, g, or t
atgtatttgcggtactcgtccagagtggtcgcccctatgcagcgcagttcgccccgcgccagcgccggtttgagcagattggaagcgtcggtcgcgccctcagccgctccggctcccacgagggtatgcagttcgtcgataaacagaattacctttccatcggaagcctgtacctcgcggatcagcgccttgaggcgttcctcaaattcgccgcggaattttgccccggcaaccaattcccccaaatccaaggcaaggagttttttgtctttcagcccttcgggcacatccccggcgacaatgcgccgcgcaagaccttccgcaatcgccgtcttgccgacgcccggctctcctatcaaaatggggttgtttttggtacggcgggacaagacctgcatacagcggcgtatttcttcatcgcgcccaatcacggggtcaattttttcctgccgcgccagggcagtcagatcgcggcaataa

SEQ ID NO: 57594 - protein, 159 aa, Unknown
  Obtained from environmental sample
  misc_feature (1)..(159): Xaa is any amino acid
MYLRYSSRVVAPMQRSSPRASAGLSRLEASVAPSAAPAPTRVCSSSINRITFPSEACTSRISALRRSSNSPRNFAPATNSPKSKARSFLSFSPSGTSPATMRRARPSAIAVLPTPGSPIKMGLFLVRRDKTCIQRRISSSRPITGSIFSCRARAVRSRQ

SEQ ID NO: 57595 - DNA, 1029 bp, Unknown
  Obtained from environmental sample
  misc_feature (1)..(1029): n is a, c, g, or t
atggaaaaaaagcgggaacacgccgcgctgttacgtgaagaagtgagcgaggaagatatcgccggagttgtttccgcgtggacggggatacccgtatcaaagatgctttcgggcgaactgcagaaataccttgatttggaaaaggttcttgaaaagcgcgttgtcgggcagagcgaagcccttgccgccgtcgccgacgcgatcaggcgcaacaaggcggggctttccgacgcggcgcgccctctggggtctttcctgtttttggggccgacaggcgtaggaaaaaccgagcttgcaaaaactctcgcagattttttgttcaatgacgaaaaagcccttacccgcatcgacatgagcgaatacggagaaaaacactcggtaagcagattaatcggcgcgccccccgggtatgtcggttacgagcagggtggccaattaacggaggcggtacggaggcggccttacagcgtgatcctctttgacgaaatagaaaaagcccatcaggaagttttcaatgttttcttgcagatactcgacgacggccgcctgacggacggacaggggcgggttgtagatttcaagaatgttattatcattatgacaagcaacctcggctcggacttgattctaagcgcgaaaaatccggaaactttgcgtaactcgcttttggatttactgaaacaaagtttcaggccggagttcttaaaccggatagacgagacagtcattttcaacaggctggagaaaaccgaaatcaacaaaatagtggatattcagctaacgcgcctttcgcgcaggcttgcggagcgcaagattacgctgaaggtaacggacgcggcaaagtccctgcttgccgaaagaggctatgatcccatgttcggggcacgtccgctgaagcgcacaatacagtccgatcttgaaaacccgctggcaaagcaggttattgcgggcgcaatccgcgacggggagacggtgacagcggacgtgtccggcggcgggatcgtgtttaagaagcctaaagctttgtaa

SEQ ID NO: 57596 - protein, 342 aa, Unknown
  Obtained from environmental sample
  DOMAIN (84)...(285): ATPase family associated with various cellular activities (AAA)
  misc_feature (1)..(342): Xaa is any amino acid
MEKKREHAALLREEVSEEDIAGVVSAWTGIPVSKMLSGELQKYLDLEKVLEKRVVGQSEALAAVADAIRRNKAGLSDAARPLGSFLFLGPTGVGKTELAKTLADFLFNDEKALTRIDMSEYGEKHSVSRLIGAPPGYVGYEQGGQLTEAVRRRPYSVILFDEIEKAHQEVFNVFLQILDDGRLTDGQGRVVDFKNVIIIMTSNLGSDLILSAKNPETLRNSLLDLLKQSFRPEFLNRIDETVIFNRLEKTEINKIVDIQLTRLSRRLAERKITLKVTDAAKSLLAERGYDPMFGARPLKRTIQSDLENPLAKQVIAGAIRDGETVTADVSGGGIVFKKPKAL

SEQ ID NO: 57597 - DNA, 1158 bp, Unknown
  Obtained from environmental sample
  misc_feature (1)..(1158): n is a, c, g, or t
ttgcggtttttagcaatcatcatcaaagagtacgggggtatggtagctcgtgaaacatctatcgtattatcaatgcttgcggtttttagaaaaacatggttttatttgttaatgaatgaattttacgccgcatttattccgggtttacagaacttaattgctgacgtaataaaagagcgtctttcagacataaagatccacaaactgcttgacggggcggttttgtttgagactgttacagattacgataaacttaactttttttgttttaacaatatctttgctgtaataagcgtaatggagcatgttaataatgatgttaatcctaagactgcgcttgaaaagcacataaaatcagtggtaaaaacaaatgccgcgagtgaagttgtcagtaataataacaaaaaatttcacactttcaggattgtcgcttcagctgagaatatacctgtggcgattgatgaaaaagcaagacnagatgcgganagatatatttccagtttttcaggcttgaaagtgaacagaagcctgcctgatactgaattttggtttttgtatagaagtgaaaaaaatcaaaataatttctcggtatttatgaaacgccttaccttgcgcccttcttgggaaaagacgcttcacaagggagaattgccgccgcctcttgtctggacattgtgccgccttgcgcgtcttgtccacagcgataccgttctggatccgttttgcggttacggttcaatcccagatgccgcgttaaaacattttcatataaaaaaattcattgcctgcgataatgacagggaagccgctttgtatacaaaggcaagatttaacaaacgcaagaaagacgactttattttttacgacagcgatttttcagcgttaccttctcttttcgctgaaaaaagcatagacgtgattgttacggatcctccgtggggagaataccgggagatcaataaaatctcattttataaggaaatgtttgatgtttttcagaaaatacttaaagaagacggaagggttgtattgttatgcgctaatatcgatgattttttgagcgatgcgctgaacaattttaaatttgaagccaaaactccaatattgctttcaggtaaaaaagcggctatttttcagtatgtctacaagctcccttga

SEQ ID NO: 57598 - protein, 385 aa, Unknown
  Obtained from environmental sample
  DOMAIN (206)...(376): Putative RNA methylase family UPF0020
  misc_feature (1)..(385): Xaa is any amino acid
MRFLAIIIKEYGGMVARETSIVLSMLAVFRKTWFYLLMNEFYAAFIPGLQNLIADVIKERLSDIKIHKLLDGAVLFETVTDYDKLNFFCFNNIFAVISVMEHVNNDVNPKTALEKHIKSVVKTNAASEVVSNNNKKFHTFRIVASAENIPVAIDEKARXDAXRYISSFSGLKVNRSLPDTEFWFLYRSEKNQNNFSVFMKRLTLRPSWEKTLHKGELPPPLVWTLCRLARLVHSDTVLDPFCGYGSIPDAALKHFHIKKFIACDNDREAALYTKARFNKRKKDDFIFYDSDFSALPSLFAEKSIDVIVTDPPWGEYREINKISFYKEMFDVFQKILKEDGRVVLLCANIDDFLSDALNNFKFEAKTPILLSGKKAAIFQYVYKLP

SEQ ID NO: 57599 - DNA, 876 bp, Unknown
  Obtained from environmental sample
  misc_feature (1)..(876): n is a, c, g, or t
ttggacattccggcttcctcgcccgaccgcaagaaattaaacgcgcgcggtttgcgcagggcattgcccaaccgcagaatgggttacactcagaaggcgaagatcggggggcactcgatttttatcaggacgggcgaatacgaggacggcaatcttggcgaaatattccttgatatgcacaaggaaggggcggctttcaggagcctgttaaacagtttcgccattacggtatctctcggtttgcaatacggcgtgcctcttgaagaatatgttgacgctttcactttcagcaggttcgagcctaacggttttgtgcaggggcacgattatgtgaagatggcgacaagcgttatcgattatattttccgcgatctcgcgatcagttatctgaaacgaagcgacttggcgcaggttaagccagaagaccttgaagcgacggggactaagagcgatttcggcgtgtccgacggcaaagacaggagtgacaagcatagcgcgggtttcaggccgagcgcgacggtttctgcgccgaagagcgcgtctgcgccgcaggtctcgcagcaagcagcggcgcctcaatcatcaacagggaaaaccattaaagggcagggcgcttctttggcggggaacagtatgtcgatagacgggggagctgttgcgggtaatgccgccaaagccggcatcgcttcttccggggcgcatacggcggtaatggaaggctcttaccctgaggagaacgaggttattaagattgtcaacgcaaggataaaaggttatgagggcgatccttgttctttgtgcgggtctttttctttggtcaggaacgggacttgtttgaagtgcgataattgcgggagtactacggggtgctcgtag

SEQ ID NO: 57600 - protein, 291 aa, Unknown
  Obtained from environmental sample
  misc_feature (1)..(291): Xaa is any amino acid
MDIPASSPDRKKLNARGLRRALPNRRMGYTQKAKIGGHSIFIRTGEYEDGNLGEIFLDMHKEGAAFRSLLNSFAITVSLGLQYGVPLEEYVDAFTFSRFEPNGFVQGHDYVKMATSVIDYIFRDLAISYLKRSDLAQVKPEDLEATGTKSDFGVSDGKDRSDKHSAGFRPSATVSAPKSASAPQVSQQAAAPQSSTGKTIKGQGASLAGNSMSIDGGAVAGNAAKAGIASSGAHTAVMEGSYPEENEVIKIVNARIKGYEGDPCSLCGSFSLVRNGTCLKCDNCGSTTGCS

SEQ ID NO: 57601 - DNA, 729 bp, Unknown
  Obtained from environmental sample
  misc_feature (1)..(729): n is a, c, g, or t
ttgatggactgcgacaccaccggcgttgaaccggatttctcccttgtaaaattcaaaaaactcgccggcggcgggtacttcaaaattatcaaccagtcggtgccccccgcgctggaagccctgggctattcgccgcaattaatagaagaaattatcgcgtatgccaccggctataaaacgcttaacggagcgccctatataaatcccgatacgcttaaggcaaaatcttttaccccggaggcgattgccaccgccgaggacgcggttaaaacagccctgaacctggaaggggtttttaccacatggactcttggcagggattttgttgaaaaggtccttcgcatcccggaatccacatggtcgctgccgggcttcagcctgcttaaacacattggctttagcgcggaggatatcgcggacgctgaactgtacgcctgcggaaccatggggcttgaaaacgcccccggcctgaaacaagagcattacgcggtttttgacaccgcgactccgtccggcaagaacggcaaacgttcgattccctggacggcccatatcggaatgatggcggctgtgcagccctttatttccggggctatttcaaagacgattaatatgcccaactcggcaaattacgaagacgtgaaaggcgcgtatatgctttcgtggaagaacgggcttaaagcggtttgctttataccgcgacggctccaagctttcacagccgcttaa

SEQ ID NO: 57602 - protein, 242 aa, Unknown
  Obtained from environmental sample
  misc_feature (1)..(242): Xaa is any amino acid
MMDCDTTGVEPDFSLVKFKKLAGGGYFKIINQSVPPALEALGYSPQLIEEIIAYATGYKTLNGAPYINPDTLKAKSFTPEAIATAEDAVKTALNLEGVFTTWTLGRDFVEKVLRIPESTWSLPGFSLLKHIGFSAEDIADAELYACGTMGLENAPGLKQEHYAVFDTATPSGKNGKRSIPWTAHIGMMAAVQPFISGAISKTINMPNSANYEDVKGAYMLSWKNGLKAVCFIPRRLQAFTAA

SEQ ID NO: 57603 - DNA, 1191 bp, Unknown
  Obtained from environmental sample
  misc_feature (1)..(1191): n is a, c, g, or t
gtggtaaacccactcggcaaagccgtggacggcaaaggcccgataaccgccgaagagtacctccccattgaatcgcccgccgcgcccgtgattgaccgcggcagcgtggacacgcctttgcagaccggcaccatttccgttgacgcgatgatcccaatagggcgcggccagagggaactgattatcggcgacagacagacaggaaagacggcgatctccatcgacacaatcatcaatcaaaagggaaagaacgttatctgcgtgtactgcgcgatagggcagaaatcttcctcgacagcggcgctaatcggaaaacttgaggaacacggcgcgatggactacacctttgttgtgttagcgtccgcctcggattcagccgctcttcaatacatagccccatacgccgccgtcgcgatggcggaacattttatgcgtcagggaaaagacgcgcttgtgatctacgacgatctttccaagcatgccgtcgcctaccgcacaatctccctgcttctgcgccgcccgcccggacgcgaagccttccccggcgatgtattttatctgcactcgcggcttttggaacgagcggtaaaactctcccccgaaaaaggcggcggttccatcacagcccttcccatagtcgaaactcaggcgggagacatttcgtcttacattcccactaacataatttcaattacggacggtcagatcttccttgattccgaattgttcaattcgggtttccgtcccgctatcgacgttggtctttcggtaagccgcgtcggaggctccgcccagacaaaagcgatacgaaagatttccggcagaataaggctggacctcgcccagtaccgcgagatggcggcgttcgcgcaattcggcagtgatttggacaaggccactcaggacaaactcgcgcagggcgagcggctgatggaagcgctcaaacagccgcagtttgcgccgttcgccatggaagaacaggcggcggttttgtttctcgccgtaaacggctatctcatggatgttaagacggaagatatttctttgtttatcaaaaattatctttcgtatatgaaaacgcaaaaagcggatttattgataagtatcgcggagaccggtgttatctctcccgaacaggagagcgatttacgcgccgcggtggaaagttttaagaagagcaagcaggtttaa

SEQ ID NO: 57604 - protein, 396 aa, Unknown
  Obtained from environmental sample
  DOMAIN (270)...(368): ATP synthase alpha/beta chain, C terminal domain
  misc_feature (1)..(396): Xaa is any amino acid
MVNPLGKAVDGKGPITAEEYLPIESPAAPVIDRGSVDTPLQTGTISVDAMIPIGRGQRELIIGDRQTGKTAISIDTIINQKGKNVICVYCAIGQKSSSTAALIGKLEEHGAMDYTFVVLASASDSAALQYIAPYAAVAMAEHFMRQGKDALVIYDDLSKHAVAYRTISLLLRRPPGREAFPGDVFYLHSRLLERAVKLSPEKGGGSITALPIVETQAGDISSYIPTNIISITDGQIFLDSELFNSGFRPAIDVGLSVSRVGGSAQTKAIRKISGRIRLDLAQYREMAAFAQFGSDLDKATQDKLAQGERLMEALKQPQFAPFAMEEQAAVLFLAVNGYLMDVKTEDISLFIKNYLSYMKTQKADLLISIAETGVISPEQESDLRAAVESFKKSKQV

SEQ ID NO: 57605 - DNA, 396 bp, Unknown
  Obtained from environmental sample
  misc_feature (1)..(396): n is a, c, g, or t
ttgcgttttcatatacgaaagataatttttgataaacaaagaaatatcttccgtcttaacatccatgagatagccgtttacggcgagaaacaaaaccgccgcctgttcttccatggcgaacggcgcaaactgcggctgtttgagcgcttccatcagccgctcgccctgcgcgagtttgtcctgagtggccttgtccaaatcactgccgaattgcgcgaacgccgccatctcgcggtactgggcgaggtccagccttattctgccggaaatctttcgtatcgcttttgtctgggcggagcctccgacgcggcttaccgaaagaccaacgtcgatagcgggacggaaacccgaattgaacaattcggaatcaaggaagatctgaccgtccgtaattga

SEQ ID NO: 57606 - protein, 131 aa, Unknown
  Obtained from environmental sample
  misc_feature (1)..(131): Xaa is any amino acid
MRFHIRKIIFDKQRNIFRLNIHEIAVYGEKQNRRLFFHGERRKLRLFERFHQPLALREFVLSGLVQITAELRERRHLAVLGEVQPYSAGNLSYRFCLGGASDAAYRKTNVDSGTETRIEQFGIKEDLTVRN

SEQ ID NO: 57607 - DNA, 1125 bp, Unknown
  Obtained from environmental sample
  misc_feature (1)..(1125): n is a, c, g, or t
gtggaagaaatgcaaaaagtaggctttgacgaggccggcatcgacaagatgggcaacgtcatcggctacatggggcacggcaagacgcttatctgttttgacggccacattgacactgtgggcataggcaacagggacaactggaagttcgatccctacgaaggctttgagagcgaaaccgagatcggcgggcggggcgcctcggatcagcttggcgggccggtgtccgccgtctatgccgcgaagatcatgaaagacttggggcttctcaacgacaaataccgcgtgatggtaagcggcacggtgcaggaggaagactgcgacggcctgtgctgggaatacattataaaagaagaaaagatcaaacccgagttcgtggtgatcaccgagccgaccaacggcaacatctaccggggccagcggggccgtatggagatccgcgtcgaggtaaagggcatttcctgccacggttccgcgccggaacgcggcgacaacgcgatctacaagatgggggaaataatcgccgaggttaaggcgctgaacaaaaagctgaaaaatgacaagttcctcggcaaggggacattggctgtttcgcagatctatttcagttcgccctcccgttgcgccgttgccgacatgtgcgccatttccattgaccgccgcctgactatgggcgaaacctacaaaagcgccctcgcggaaatcgccgccctgcccaaggtcaaagagtacaaggccaaagtcaccatgtacaagtatgacctgcccagttacaccggcgtggtttatcccatcgactgctacttcccgacatgggtcatcccggaagacgccaagccgacaaaggctatggtaaaagcctataagggaatgttcggcaagcccaaggttgacaagtggactttttcaactaacggcgtttcgatcatgggcaggaacaatatcccctgcataggcttcggccccggcaaggaagagcaggcccacgcccccaacgaaaagacctggaaagccgacctcgtccgctgcgccgcagtatacgcagcgttaccgagcatctatactggcgaagagttggaagaaaaaaatagcaaggaaaagaaagcgaagagcaaaaaaaaataa

SEQ ID NO: 57608 - protein, 374 aa, Unknown
  Obtained from environmental sample
  DOMAIN (138)...(247): Peptidase dimerisation domain
  misc_feature (1)..(374): Xaa is any amino acid
MEEMQKVGFDEAGIDKMGNVIGYMGHGKTLICFDGHIDTVGIGNRDNWKFDPYEGFESETEIGGRGASDQLGGPVSAVYAAKIMKDLGLLNDKYRVMVSGTVQEEDCDGLCWEYIIKEEKIKPEFVVITEPTNGNIYRGQRGRMEIRVEVKGISCHGSAPERGDNAIYKMGEIIAEVKALNKKLKNDKFLGKGTLAVSQIYFSSPSRCAVADMCAISIDRRLTMGETYKSALAEIAALPKVKEYKAKVTMYKYDLPSYTGVVYPIDCYFPTWVIPEDAKPTKAMVKAYKGMFGKPKVDKWTFSTNGVSIMGRNNIPCIGFGPGKEEQAHAPNEKTWKADLVRCAAVYAALPSIYTGEELEEKNSKEKKAKSKKK

SEQ ID NO: 57609 - DNA, 1194 bp, Unknown
  Obtained from environmental sample
  misc_feature (1)..(1194): n is a, c, g, or t
atggcttacattaatcagtacatgtccaggttggataaactcaactttaaggacatgttcggcggggatttcttcctgacctgggaaaaatcctacgatgaaattattgccaccttcacggtggctgacgccttgcgctggctgcgggagaacaatatatctacgcgggttttcgattcggggcttggcatttccctgttcagggacaactcgacccgcacacgtttcagttttgcctcggcatgtaatctgcttggccttgttgttcaggaccttgacgaggggaaatcccagatcgcccacggagagaccgtgcgagaaacggccaatatgatttcattcatggccgacgttatcggcatccgggacgacatgtacattggcaagggcaatgcttacatgcgcgaggtcgccaaagcggtgcgcgaggggcatattgacggaaacctggaacagtgcccaactctggtgaacctccagtgcgacatcgatcatcccacccagataatggccgacatgaaccacatcatccgccactttggcggaattgacaaactcaagggaaaaaaggtcgcgatgacctgggcatattccccctcttacggcaagcccctgtcggtgccgcagggtgtcatcggccttatgacccgttttggcatggaggtacatctcgcccaccccgaaggctacgaggttatgccagaggttgaggcggtggcgaagaagaacgctcaccttagcggcggcaaattctccaaatcaaattccatgcatgaggcttttcataacgccgatattgtgtatcccaagagctgggcgcccttcgccgcgatggagaaacgcaccaatctgtacggcaacaacgattttgaccagataaaggctctggaaaaagaactgctggcgcagaacgcgaaacacaaggactgggaatgtaccgaagccttgatgaaagtgaccaaagacggcaaggccctgtacctgcactgcctgcccgccgacatttcaggcgttagctgcaaagaaggggaggttgccgctacggtgttcgaccgttaccgcgtccccctttacaaggaagcgagccacaagccctacatcatcgccgcgatgatcttcctttccaagatcaagtgtccgcaggaaaccctgataaatatggtttcgcggaataccccccgtcatttcagctaa

SEQ ID NO: 57610 - protein, 397 aa, Unknown
  Obtained from environmental sample
  DOMAIN (186)...(375): Aspartate/ornithine carbamoyltransferase, Asp/Orn binding domain
  misc_feature (1)..(397): Xaa is any amino acid
MAYINQYMSRLDKLNFKDMFGGDFFLTWEKSYDEIIATFTVADALRWLRENNISTRVFDSGLGISLFRDNSTRTRFSFASACNLLGLVVQDLDEGKSQIAHGETVRETANMISFMADVIGIRDDMYIGKGNAYMREVAKAVREGHIDGNLEQCPTLVNLQCDIDHPTQIMADMNHIIRHFGGIDKLKGKKVAMTWAYSPSYGKPLSVPQGVIGLMTRFGMEVHLAHPEGYEVMPEVEAVAKKNAHLSGGKFSKSNSMHEAFHNADIVYPKSWAPFAAMEKRTNLYGNNDFDQIKALEKELLAQNAKHKDWECTEALMKVTKDGKALYLHCLPADISGVSCKEGEVAATVFDRYRVPLYKEASHKPYIIAAMIFLSKIKCPQETLINMVSRNTPRHFS

SEQ ID NO: 57611 - DNA, 1128 bp, Unknown
  Obtained from environmental sample
  misc_feature (1)..(1128): n is a, c, g, or t
gtggcttccaaatattctatcgcttgccatagggctggttttggctgtaatcaggatacgaaaatgatattggataaatatttactgcgtcaatttctacccattttttgcatcgctatttccatgtttgtttttattcttatgttaatcgatcttttctcgaatttggttcgttatctgaataatgaagttcctttgatgacaatattgaaaataagtttgtattttatcccgaaaagtttttcttatgcgcttccgatttctcttcttttcgccgccgcctatacgctgggtgatctttatgcaagaaacgagcttactacaattttttcatcgggagttcccttctggcgtttcagtatttcacttataatagtggggcttatagcttccgttttttctttctttcttgacgatactatcgtaatccccaccttaaaaataaaaaatgatctttccaggcgggcgttaaaacagcatgttacggaaaataattcggatgttgttataaaaacaaaaaacgggcgtcttgtttattccgttgattattttgatcatgaaaaaatagttttaaatgggatatgtatcgatgaaatggacgaaaacggaatatttatctcgcggataagagccccttctgccgtctggaatgaaactttctgggaatttaaaaacgccgttatttatcaatatgaagacgggttcctgcgggttaaccctttgccttacactgaatcgtatgacgaacctccggatatgttcagaagaggcgcggtaaatgtcgaagaactttcggcaaagcaggccggttttttaataaaagatctccgctcgacagggcagccgttttttcaggctcaggcaaactattaccatcgtttttcatttgccgccacttctttaattgttatgattctttctatatctatgggcggcaggttcagaaaaaacattttattaatgagtctttttgccagcctttccgtagcggttgtttattatatcgcggaaatgttaagcatgactatggccggattaaactatattcatccgattgtaggggcgtggtttcccgtttttatttttattattctgggatttattttattatggagcgcgaaaacatag

SEQ ID NO: 57612 - protein, 375 aa, Unknown
  Obtained from environmental sample
  DOMAIN (26)...(372): Predicted permease YjgP/YjgQ family
  misc_feature (1)..(375): Xaa is any amino acid
MASKYSIACHRAGFGCNQDTKMILDKYLLRQFLPIFCIAISMFVFILMLIDLFSNLVRYLNNEVPLMTILKISLYFIPKSFSYALPISLLFAAAYTLGDLYARNELTTIFSSGVPFWRFSISLIIVGLIASVFSFFLDDTIVIPTLKIKNDLSRRALKQHVTENNSDVVIKTKNGRLVYSVDYFDHEKIVLNGICIDEMDENGIFISRIRAPSAVWNETFWEFKNAVIYQYEDGFLRVNPLPYTESYDEPPDMFRRGAVNVEELSAKQAGFLIKDLRSTGQPFFQAQANYYHRFSFAATSLIVMILSISMGGRFRKNILLMSLFASLSVAVVYYIAEMLSMTMAGLNYIHPIVGAWFPVFIFIILGFILLWSAKT

SEQ ID NO: 57613 - DNA, 1131 bp, Unknown
  Obtained from environmental sample
  misc_feature (1)..(1131): n is a, c, g, or t
atgcactttacggaaacctgccgcgataaagaaacaaaggcaaggtgcggcgttttacatcttgtacacggggacgttccgactcccgtttttatgcctgtcgggacaaacgccgcggtaaaggcgcttacaacaggcgacataaaagaaataggttttaacctgattctttccaatacataccatttatatttaaggcccggcgaggaagtaattaaaggggccggagggcttcaccgttttatgaactgggaccgcaatatattaacggattccggcggatttcaggttttttcgctttcggccttacgcaaaattacggaagagggagcaaaatttcagtctcatatagacggttcaaggcattttttaaccccggaaaaagtagtgcaaatacaggcgcttttaggaagcgacattcaaatgcagttggattactgcacgccgtggggcgcgtcgcgcaaggaaagcgagaaagcgctcgctattacggaaaattggcttggcagagcggtaaaaacatgggaacaagaggccgcgaacggttattccggaagcctttacagcattgttcagggtaattttttccccgacctgcgaaaaaggagcgcgcaaacatgcgcccaatccggcacgcccggcatagccataggcgggctttccgtaggggagcccgcggaagtttttactgaaaccttggcgtacacaacagaggcgcttccggaggataaaccgcgttatgtaatgggaatcgggacgcctgaatacattttaagcgctattgagcatggaattgacatgtttgactgcgtgcttcttacaagagaggccagaaacggcagggtatacacgcgaaaagggccttttgcgcttaaaaaacgcgaaaacacccttgattttacgccgatagataaggagtgcggctgtaaagtttgcagggagtattcccgcgcctatttgcgccacctttttaagactaaggagattctttgttccatgttggcaagttaccataatttgtattttatcaatgatcttgttacaaactgccgtaacgctatcaaggaaggaaggtttttacaatataagaaggaattcttgtccgcctacacggaggaaggaaatgagtaa

SEQ ID NO: 57614 - protein, 376 aa, Unknown
  Obtained from environmental sample
  DOMAIN (127)...(368): Queuine tRNA-ribosyltransferase
  misc_feature (1)..(376): Xaa is any amino acid
MHFTETCRDKETKARCGVLHLVHGDVPTPVFMPVGTNAAVKALTTGDIKEIGFNLILSNTYHLYLRPGEEVIKGAGGLHRFMNWDRNILTDSGGFQVFSLSALRKITEEGAKFQSHIDGSRHFLTPEKVVQIQALLGSDIQMQLDYCTPWGASRKESEKALAITENWLGRAVKTWEQEAANGYSGSLYSIVQGNFFPDLRKRSAQTCAQSGTPGIAIGGLSVGEPAEVFTETLAYTTEALPEDKPRYVMGIGTPEYILSAIEHGIDMFDCVLLTREARNGRVYTRKGPFALKKRENTLDFTPIDKECGCKVCREYSRAYLRHLFKTKEILCSMLASYHNLYFINDLVTNCRNAIKEGRFLQYKKEFLSAYTEEGNE

SEQ ID NO: 57615 - DNA, 1437 bp, Unknown
  Obtained from environmental sample
  misc_feature (1)..(1437): n is a, c, g, or t
atgatcttgttacaaactgccgtaacgctatcaaggaaggaaggtttttacaatataagaaggaattcttgtccgcctacacggaggaaggaaatgagtaaatatatttttgtttttcttttttttatcagttttattatatacgcgcaggagattgaggcttcgaggctggctattattaagtacgggacggagacggaaattgccaatcttattcaatctctcaggaatgaaaacgcggattaccttgatgacgaacttattaaattaatagataacaccaaaaatcaaaaaatattaagcggcgttttcgcgtttttcggcgaaagggaaaagagcggccttgaagaaagggcgatcaaggcgttggatgagcgcgaggatgaggcaaatgaaacggtcctttccgctattgattaccttggcatgttaaaagtctcgaaagcggttccctcgcttatggaactcctggatacggaagaaaagcgttttatgaacaacgctttccgcgccctcggcagggcaagcagttcggacaaagaaaaggccgacgcggccgccgatttcctgattgaattttataatgaccgcaacgtcggcgaaaacgcgagagagataattatcgctatcggcgagacaaagtccccaaaagctgttccccttctcgcgggtatcgcgtccaacccggacgagcgcaccccattgcgtattgccgcattagacgccttatccagagtaggcgatcccgcggggcttgacgcggttctttcctgcataagcaccaacgaccccaatgtgcgttccgccgcggttgccgctttgggcccgttttcaggcgaaaaagtggacaaggccattttggacgctttccgcgattcatattaccgcacccgcatagcggctgcgcaggcaagccgcgagcgtaaacttgtttccgccgtcccttaccttcaattccgcgccgaacgcgatgacgttccgaatgtcaaggacgaagccgtaaaagcgttaggtgaaatcgccaacgatgaggcaatggcggttctggacaatttgtttaaggaaagaaaaaactctgaccgtatccgactgatttgcgcgcaaatgctgatgaaaaacgccggtcagaaaaatttaacacgcgtaatcatagaacttgacgaggcgaagcaaaaaaaccagaccgccctgtacaacggtttcttaaaaataataggagaggcaaagattgatggggacacaagcgagatggaaaaactaacgcggcgttttctgcaaaacggcggcatactggaaaaattgtacggtcttgacatggccgtaaacaacgagttaaaaggcctttccgcggaaataaaagccttaacagccgataaaaatgaaagcctcgccagaaaagcaaagcggactgccgaacgtcttggcattgaaatttaa

SEQ ID NO: 57616 - protein, 478 aa, Unknown
  Obtained from environmental sample
  misc_feature (1)..(478): Xaa is any amino acid
MILLQTAVTLSRKEGFYNIRRNSCPPTRRKEMSKYIFVFLFFISFIIYAQEIEASRLAIIKYGTETEIANLIQSLRNENADYLDDELIKLIDNTKNQKILSGVFAFFGEREKSGLEERAIKALDEREDEANETVLSAIDYLGMLKVSKAVPSLMELLDTEEKRFMNNAFRALGRASSSDKEKADAAADFLIEFYNDRNVGENAREIIIAIGETKSPKAVPLLAGIASNPDERTPLRIAALDALSRVGDPAGLDAVLSCISTNDPNVRSAAVAALGPFSGEKVDKAILDAFRDSYYRTRIAAAQASRERKLVSAVPYLQFRAERDDVPNVKDEAVKALGEIANDEAMAVLDNLFKERKNSDRIRLICAQMLMKNAGQKNLTRVIIELDEAKQKNQTALYNGFLKIIGEAKIDGDTSEMEKLTRRFLQNGGILEKLYGLDMAVNNELKGLSAEIKALTADKNESLARKAKRTAERLGIEI

SEQ ID NO: 57617 - DNA, 375 bp, Unknown
  Obtained from environmental sample
  misc_feature (1)..(375): n is a, c, g, or t
atgggtattatatcagggactgcagcaagcgatattttctcaaggataaatcacgaaatcttcaaagccttatggcggtgggcgtgccgcaggcatcccaataagggattacgctggataaaaaaccggtactggaaaaacgaaggaaacagaaggtgggttttcaaagacaatcttacgctcctgcaaacctgtgacacaaaaactgtacggcatacaaaactaaaattggatatgaacccgtatatagaccgggactatttctatttcagaaaactaaaaatgctcgctaaccgaaaccttgggacagcacggaaacacaatgcagacaaacccggtgaacatccgaaagatggtcacttatttgaggcttga

SEQ ID NO: 57618 - protein, 124 aa, Unknown
  Obtained from environmental sample
  misc_feature (1)..(124): Xaa is any amino acid
MGIISGTAASDIFSRINHEIFKALWRWACRRHPNKGLRWIKNRYWKNEGNRRWVFKDNLTLLQTCDTKTVRHTKLKLDMNPYIDRDYFYFRKLKMLANRNLGTARKHNADKPGEHPKDGHLFEA

SEQ ID NO: 57619 - DNA, 483 bp, Unknown
  Obtained from environmental sample
  misc_feature (1)..(483): n is a, c, g, or t
ttgagccgtatgagcgggaaactctcacgtacggttcttaggcaggaagggcggagcaatccgcccgacctagccgacgaagggtatatgttggactgcgaattgaggcccggcagccagcattgccagaacgggacggtagcattcatagaagggtttatggggcggctgaggagcatacagccaagcgggcgtctgctgttccgcatggatgccggaaacgacgcttttgagacgctgaaagcggtaaccgggaaaggcagttattgcatcctaaagcggaacaaacgccagcaaaacgatgaaaaatggctgcaaatagcaaaacggcgcgngaaacgggttgcatcaagaaaagggaaaaaagtctgggtaggaacggcgcgaatacacccgtgcaagaaaaatgaagttcttgaagatgtcacctgcgtatttgaggttatagacgcaagaaggacgcccaagggaaccggtatttaa

SEQ ID NO: 57620 - protein, 160 aa, Unknown
  Obtained from environmental sample
  misc_feature (1)..(160): Xaa is any amino acid
MSRMSGKLSRTVLRQEGRSNPPDLADEGYMLDCELRPGSQHCQNGTVAFIEGFMGRLRSIQPSGRLLFRMDAGNDAFETLKAVTGKGSYCILKRNKRQQNDEKWLQIAKRRXKRVASRKGKKVWVGTARIHPCKKNEVLEDVTCVFEVIDARRTPKGTGI

SEQ ID NO: 57621 - DNA, 348 bp, Unknown
  Obtained from environmental sample
  misc_feature (1)..(348): n is a, c, g, or t
gtgatagaactgtatcatggccatgcaaccagcgaacaatttcacagtgaattgaaaaacgacatggacattgagcgtctgccgtccgggaaacttgcggtaaacaagatactgcttgcggtggcgatgaatgcgtataacgcgctgaggctgcttggccaaagttctgtagagcaaaaaagtcctgtgaagcaccggcgcaaacggctgggaaaggtaatccgcgatttgatatgcgttgcgggaaaattgatacaacacggacgggaactgatattcaaaatgaatgagaatgacccggtatatccggtgtttttacggctgaatgccgcattgggctgtccatag

SEQ ID NO: 57622 - protein, 115 aa, Unknown
  Obtained from environmental sample
  misc_feature (1)..(115): Xaa is any amino acid
MIELYHGHATSEQFHSELKNDMDIERLPSGKLAVNKILLAVAMNAYNALRLLGQSSVEQKSPVKHRRKRLGKVIRDLICVAGKLIQHGRELIFKMNENDPVYPVFLRLNAALGCP

SEQ ID NO: 57623 - DNA, 552 bp, Unknown
  Obtained from environmental sample
  misc_feature (1)..(552): n is a, c, g, or t
ttgctgtacggatgcgggctgcgaatcggcgagacactggctttgcgaatgaaggatgccgatctggaaggcggcatactgacactgttgcataccaaaaatgacaagcgccgcctggtccccatgagcccgtcattaacagaaatagtacggcggtactgcctggcgatgggaattaccggtattcctgacgcgtttctgttcccgggcaaagatcgagccggaccgctgtcaatctgggccgtatggaatacattcgatgtcatcttgaaaaaccttggcattaaaaaaccaaataggaaaaggcacgagcgcgggccgtgcctgcattgctttcgtcatatgttcgtttttaaatcctttgcccaggcgcacaagaacggaagaagtattgatgacagcgtgcctttcctttcaacgtatctcgggcatgacagtttgaaggagactgaaaagtatttgaagtttagcagcgagctgtttccaaacgccctggaactctttgagggttacgcgggaacggtgtttccggaggctggctatgaaaaataa

SEQ ID NO: 57624 - protein, 183 aa, Unknown
  Obtained from environmental sample
  DOMAIN (1)...(163): Phage integrase family
  misc_feature (1)..(183): Xaa is any amino acid
MLYGCGLRIGETLALRMKDADLEGGILTLLHTKNDKRRLVPMSPSLTEIVRRYCLAMGITGIPDAFLFPGKDRAGPLSIWAVWNTFDVILKNLGIKKPNRKRHERGPCLHCFRHMFVFKSFAQAHKNGRSIDDSVPFLSTYLGHDSLKETEKYLKFSSELFPNALELFEGYAGTVFPEAGYEK

SEQ ID NO: 57625 - DNA, 753 bp, Unknown
  Obtained from environmental sample
  misc_feature (1)..(753): n is a, c, g, or t
gtgtatccgccggtgtttctgtctgtgtcagcccccaatacggttaaatcctataaagacgcttttcggcttttgctaagatatatgtacgaacaaaagcatataaatactgacaaagtatcttttactgacttggattacaaaaccatgcttgattttctttcctggcttgaaacagaacgatgttgcggcgtttcaaccagaaaccagaggctgtccgcgttatcatcattcgcacagtatgctcaaaacagaagttttgatgcggcaacaataatccggcgcgatacaaaaaagctgccagccaaaaaacgaccgaacagagcacgtgcaatctttacgctggaggagacggcgttttttctgaaccttcctaaaggtgacagcgcgacaggatttagaaataaaacccttttaagcgtcatgtatgccagcggggcacgggcgcaggaaatgtgcgatcttacactttgcgatttccggtccaataacgataccgcgtctctgacattaaccggtaagggcggcaagatacgaagggtcggaataccaaaagcatgcgccgcattgcttacacaatacatcgacaaactcaggctcgcggggaaaaacgaacaccatttattcaccagccaaacccatgagcatatgaccgtttcctgtgttgaggaaatatttaaaaagtatgtaaacctggctaaaaagaatatcccgcgcttttccgtgagaaatgctatactccccattccatga

SEQ ID NO: 57626 - protein, 250 aa, Unknown
  Obtained from environmental sample
  misc_feature (1)..(250): Xaa is any amino acid
MYPPVFLSVSAPNTVKSYKDAFRLLLRYMYEQKHINTDKVSFTDLDYKTMLDFLSWLETERCCGVSTRNQRLSALSSFAQYAQNRSFDAATIIRRDTKKLPAKKRPNRARAIFTLEETAFFLNLPKGDSATGFRNKTLLSVMYASGARAQEMCDLTLCDFRSNNDTASLTLTGKGGKIRRVGIPKACAALLTQYIDKLRLAGKNEHHLFTSQTHEHMTVSCVEEIFKKYVNLAKKNIPRFSVRNAILPIP

SEQ ID NO: 57627 - DNA, 528 bp, Unknown
  Obtained from environmental sample
  misc_feature (1)..(528): n is a, c, g, or t
ttgaaaagaacgatttattcggaacaattaaggaaagaaggtttacagcttataatcgcctcggaaaaaggcgatattgaagccgtaaaatcattgcttaaaaagggtgtttttatccatgcgcaggatagggaaggcaggtgcgcgcttgtagctgccgcttataagaattatcttgaaattgtcgatttactgattgccgccggcgcggatgtcaacatgaaagacaataccctgcaaagcgcttatttgatttcaacctccgacggatttacggagctgcttaagaagacactcaaagcaggagcggatgtctactgtacggacagttacaatgggacagggctaatccgcgccgccgatcgcgggcatgttgaaataataagagaactttttaagacagatatccgcgttaatcatattaacaaaatcgggtggactgcgttacttgaggcagtcatattgggggcggcgactggcggcatactgagtttgtccgcctatcagttgatgcaggcgcggatttaa

SEQ ID NO: 57628 - protein, 175 aa, Unknown
  Obtained from environmental sample
  DOMAIN (45)...(77): Ankyrin repeat
  misc_feature (1)..(175): Xaa is any amino acid
MKRTIYSEQLRKEGLQLIIASEKGDIEAVKSLLKKGVFIHAQDREGRCALVAAAYKNYLEIVDLLIAAGADVNMKDNTLQSAYLISTSDGFTELLKKTLKAGADVYCTDSYNGTGLIRAADRGHVEIIRELFKTDIRVNHINKIGWTALLEAVILGAATGGILSLSAYQLMQARI

SEQ ID NO: 57629 - DNA, 1218 bp, Unknown
  Obtained from environmental sample
  misc_feature (1)..(1218): n is a, c, g, or t
atgagaatttccggtcatgcacaggcgatcattgacgcagcatataatgaggcaaagctgcgaaatcatgaatatctgacgcctgaacatattctatatgcggctctgtcatttgaagaagttcaggggatattgttctcttgcggagcgaatttggagcagcttaagaacggaatggaaaatttctttgaacaaaaactgccgcttacaacaacgggtgaaccgaccaagactgtcggttttcacagtataattgaacgcgcccttatacaatgtcaatccgcacagaaaaacataattgacgttcccgatattattgtgtccctctatgatgaagaacgctgttacagcgcatattatctccgaaaagcgggcgtcaggcgtttggaacttttacaggtggtttctcagagttacggaaatgacaatacttatacttcggataaaaacggcaaatacgccggcattccggaggaagatcaatttgacagtcagagaaaagcaaataaaaagagcgctcttgaacgttatgcgatagaccttacggctcttgcgcgggaaaataaacttgaacccgttatcggcagggaagaagaactggatcgcacagtacaggtactttgccgcaggttaaaaaacaatcctatccatgtgggagattccggagtagggaagacggcaattaccgaagggcttgcgcagagaattatctccggtaaagtgcctcctacaataaaagatttcagtattttttcgcttgatatgggcgctcttgtggcgggaacaaaataccggggcgattttgaagagagagttaagcgcgttgtcgaagaaatgcttaaaaaagaaaaagcaattctttttattgacgagattcacactcttgtgggagccggttctgtttccggcagcgcgttagacgcatcgaatctgctgaaaccggcgcttacattgggcaagctccgctgtatcggctctacaacccacgaagagtacggcaaatattttgagaaagacagggcgctttcccgccgttttcaaaaaattgacattaacgaaccttccgaagaaatggcaatcgacatactcaaaggattgaaatcaagatacgaagattaccaccatgttcattacagcgatgaaattgtggaaacagcggtgcgtctttcatctcagtttataacagagcgccgtctgccggataagccattgatgtaa

SEQ ID NO: 57630 - protein, 405 aa, Unknown
  Obtained from environmental sample
  DOMAIN (14)...(64): Clp amino terminal domain
  misc_feature (1)..(405): Xaa is any amino acid
MRISGHAQAIIDAAYNEAKLRNHEYLTPEHILYAALSFEEVQGILFSCGANLEQLKNGMENFFEQKLPLTTTGEPTKTVGFHSIIERALIQCQSAQKNIIDVPDIIVSLYDEERCYSAYYLRKAGVRRLELLQVVSQSYGNDNTYTSDKNGKYAGIPEEDQFDSQRKANKKSALERYAIDLTALARENKLEPVIGREEELDRTVQVLCRRLKNNPIHVGDSGVGKTAITEGLAQRIISGKVPPTIKDFSIFSLDMGALVAGTKYRGDFEERVKRVVEEMLKKEKAILFIDEIHTLVGAGSVSGSALDASNLLKPALTLGKLRCIGSTTHEEYGKYFEKDRALSRRFQKIDINEPSEEMAIDILKGLKSRYEDYHHVHYSDEIVETAVRLSSQFITERRLPDKPLM

SEQ ID NO: 57631 - DNA, 756 bp, Unknown
  Obtained from environmental sample
  misc_feature (1)..(756): n is a, c, g, or t
atgcagaacagttacagtgaaagttataaagatgcgggagttgacgtaacttccggttatcgctctgttgagcttatgaaaaagcatgtgaggcggacaaaaacacaaggtgttatggaagaaatcggaggtttcggcggactcttcgctcttcctaaaacaggtttcaatgaaccagtgcttgtttcgggcacagacggcgtaggcacaaaacttaaaatagcgatgctcatggataagcacgatactgtcggaattgactgtgtagcgatgtgcgtaaatgacattatctgcgccggagcaaagccgcttttttttcttgattatattgctctcggaaaaaacattcctgaaaaagttgaaaaaattgtagcgggcgtcgctgaaggttgtgttcaatcaggctgcgctcttgtcggcggagaaaccgccgaacatccgggaatgatggcggaagatgaatatgaccttgcgggtttttcagtaggtatcgttgaaaaatcaaagataccggataaaaataacgtgaaagcgggcgacgtaattatcgctcttgcttcatcgggcgtccattccaacggtttctcgcttactcgcaaagtattcgggattgacgctgactgtaaagcgcttgagaagtattacaacgaattcggcaggacattaggtgaagaactgcttgtaccgacaagaatctacgttaaaccgcttcttgagcttttggaaaagtccccgtccgctctctgtgtcacataa

SEQ ID NO: 57632 - protein, 251 aa, Unknown
  Obtained from environmental sample
  DOMAIN (5)...(166): AIR synthase related protein, N-terminal domain
  misc_feature (1)..(251): Xaa is any amino acid
MQNSYSESYKDAGVDVTSGYRSVELMKKHVRRTKTQGVMEEIGGFGGLFALPKTGFNEPVLVSGTDGVGTKLKIAMLMDKHDTVGIDCVAMCVNDIICAGAKPLFFLDYIALGKNIPEKVEKIVAGVAEGCVQSGCALVGGETAEHPGMMAEDEYDLAGFSVGIVEKSKIPDKNNVKAGDVIIALASSGVHSNGFSLTRKVFGIDADCKALEKYYNEFGRTLGEELLVPTRIYVKPLLELLEKSPSALCVT

SEQ ID NO: 57633 - DNA, 1770 bp, Unknown
  Obtained from environmental sample
  misc_feature (1)..(1770): n is a, c, g, or t
ttggacgctttaaaacgcaatatcaatatttccgccgaaaatattttcccatttatatataccctgcggattagttttgtcagcattattccattcagcgttttctggtttatccttaattttgcgcatgtaaagatggttaaataccggcttgcccggctggcgctcagtatttttccggctttggatattatattaattataactaatccattgcatcatctaatgtttccgaattacgcgtatcccgttccttcgcggggaccattcttctggatgcacacagtcgtagatttttttgtggtatttctttgttttgttgttcttatacggtatgttttaaagcatgcccgggatgaacctctggtaataatcaccgtatttggcatgtcccttccctattttttaaatattttgtataccacggaaatacaacggttcattccttatgacataactcctctgggattttttattacttttatgctctttgccattacgtcctacaggtcccagcttttaaatataaaagctttaaccatgaacaatatttacgcgctaatcaaggaagtggttattgttattgatgaaaaaaatcgtataatggacgcaaacgcagccgcgatgtcggcctttccccatttttcatttgataccggtcaaaacacgctggaaatatttttcgcttatttacaggaacagaacacggaatgtacgccggatgatctttttgaaccgttaaaaaaagaaaatacggagcgaaacggagagatcaaagtgtaccggaaagacggacaaataaaaacttttatggtaaccataaaaacaataatggcgggaaaaaggcctaaggggtacatccttataatgtctgatgtaagcgtttaccattcaatgatttcggaaataaatattcaaaacacgcggctggcggaactgcgcaaagaagcggaagccgcgtcaaaagccaagagtacttttttggcgaacatgagccatgaaatacgcacccctcttaacgcggtaatcggtatggcgcttatcgcgcgtaaaaacgcggaaaacacaaaaacactgtcggcaattcaggagatagaaaacgcttccgtacatcttctgggactgttgaataacgtacttgatatatcaaagatcgagtccggcaaatttgagcttgtcaatgaagctttttccctgaaggccgccattgatgaagtagtaaaacttataagcctccgctgcgccgaaaaaaatatcattctggatactaattttgaaaatcttgataactacagcgttatgggggacaagctaaggctcaatcaaatactgttaaacctgttgggaaacgccgttaaattttccgctgtaaacggcgttattgttttttatattaacgtacaggaagaaaataaagataccgtaaaaattcaattcaaaattacagataacggcataggaatatcggaagaacagcagggaaaactttttcaatctttcagtcaggcggattccggtattttcaaactatacggcggaaccggtttaggcctttccatcagccggaatttggcggaaatgatgggcgggcatatcacggtaaaaagcaggattggcgaaggttcaacatttgaatttacgctgagtctatcaatggctgaaaagaaaaaagactccgctgccggagaaattatgcttgatctgcgcggtaagcgtatacttattgtggaggacatcgaaataaaccgcctcattatgaaagaactctag

SEQ ID NO: 57634 - protein, 589 aa, Unknown
  Obtained from environmental sample
  DOMAIN (323)...(388): His Kinase A (phosphoacceptor) domain
  misc_feature (1)..(589): Xaa is any amino acid
MDALKRNINISAENIFPFIYTLRISFVSIIPFSVFWFILNFAHVKMVKYRLARLALSIFPALDIILIITNPLHHLMFPNYAYPVPSRGPFFWMHTVVDFFVVFLCFVVLIRYVLKHARDEPLVIITVFGMSLPYFLNILYTTEIQRFIPYDITPLGFFITFMLFAITSYRSQLLNIKALTMNNIYALIKEVVIVIDEKNRIMDANAAAMSAFPHFSFDTGQNTLEIFFAYLQEQNTECTPDDLFEPLKKENTERNGEIKVYRKDGQIKTFMVTIKTIMAGKRPKGYILIMSDVSVYHSMISEINIQNTRLAELRKEAEAASKAKSTFLANMSHEIRTPLNAVIGMALIARKNAENTKTLSAIQEIENASVHLLGLLNNVLDISKIESGKFELVNEAFSLKAAIDEVVKLISLRCAEKNIILDTNFENLDNYSVMGDKLRLNQILLNLLGNAVKFSAVNGVIVFYINVQEENKDTVKIQFKITDNGIGISEEQQGKLFQSFSQADSGIFKLYGGTGLGLSISRNLAEMMGGHITVKSRIGEGSTFEFTLSLSMAEKKKDSAAGEIMLDLRGKRILIVEDIEINRLIMKEL

SEQ ID NO: 57635 - DNA, 471 bp, Unknown
  Obtained from environmental sample
  misc_feature (1)..(471): n is a, c, g, or t
atgtcgagaagaaggaacgcggaaaagcgcgaagtcacggcggatcccaagttcaacagcacgcttgtaacgcagtttataaacagtgttacgcgcagcgggaagaagcgcttggcggagaatattttttacagcgcggttgagatggccgggcagcgcgccgggcaggacgggctgacggtcttcaagaaggctgtggacaacgtaaaaccggtgcttgaggtgaagtcccgccgtataggcggcgccaactatcaggtgccgatcgaggtgtccccggagaggcgcacctctcttgccattcgttggcttataaattacgcgagggagcgaacggaaaagaacatggccgagaagttagccaacgagttcgtccaggcgttcaagaacgagggcggggccatacgtaagaagatagacacgcacaagatggcggaagcgaacaaggcgtttgcgcacttccgttactga

SEQ ID NO: 57636 - protein, 156 aa, Unknown
  Obtained from environmental sample
  DOMAIN (1)...(149): Ribosomal protein S7p/S5e
  misc_feature (1)..(156): Xaa is any amino acid
MSRRRNAEKREVTADPKFNSTLVTQFINSVTRSGKKRLAENIFYSAVEMAGQRAGQDGLTVFKKAVDNVKPVLEVKSRRIGGANYQVPIEVSPERRTSLAIRWLINYARERTEKNMAEKLANEFVQAFKNEGGAIRKKIDTHKMAEANKAFAHFRY

SEQ ID NO: 57637 - DNA, 1161 bp, Unknown
  Obtained from environmental sample
  misc_feature (1)..(1161): n is a, c, g, or t
gtgcctcttgttggagtgcatcctgaaaatcctagcagccttctccctcgactttatccgcggattgtaaagcacgctcttaaaacccgccttgccggaataaaccctcgcgtaagccaaccgcccgacatgctgatcggccgctatcttgaagacaagcgccgaaaaaggctgcctctccgcatcgggcaatctctccttaacctcaagcgtaacgggctcaacccccgcgaccgcccccctgtctataggggatggcaagtaagagaccaccgcgtcaagcaactgctgaattcccttattcttaaaagaggatccgcaaagcacggggcaaatcttattccgcaaaaccccgcacctgagagccgccctgatcaactcctcgtcgaccgcgacgccgtccagcaccttcgccatcaactcgtcgttgaaatcaaccgccgcctcaagcatcccctcgcgccgcgacgccgcctcttcggcgaacttcgcgggtatctcccccgcaattaccttggcgccaagcgcctcctcatcgtaccggtaagatttcatggacacgaggtctatcacaccctcgaacttatcctccgcccccatcggcatctgcaccgcaaccgctttcatagaagaaaacttgcgcgccatcgctccgaggcagccgtcgaaatccgctccgatacggtccatcttatttacataggctatccggggaacgtggtatttgtcggcctgcctccagacagtctccgactgaggttctacgcctcccacggaatcaaataccgcaaccgcgccatccaagactctcaaagaacgctccacctctatcgtgaaatccacgtggccgggcgtatctataatattgatacggtaaccgttccacatgcacgtggtggccgcggaggtaatcgtaatcccccgctccctctcctgcaccatccagtccatgacagtattgccgtcgtgaacctcgcccatacggtgcaaaatgcccgtataaaacagtatccgctccgttgtggtcgtctttccagcatcaatatgggccataatgccgatattgcgcacagacgtcagctcaattttttgttcctgatgcccgccgttcatgccaacgtccgtatgttaagtttttcgattacggacaccgtagcgtaa

SEQ ID NO: 57638 - protein, 386 aa, Unknown
  Obtained from environmental sample
  misc_feature (1)..(386): Xaa is any amino acid
MPLVGVHPENPSSLLPRLYPRIVKHALKTRLAGINPRVSQPPDMLIGRYLEDKRRKRLPLRIGQSLLNLKRNGLNPRDRPPVYRGWQVRDHRVKQLLNSLILKRGSAKHGANLIPQNPAPESRPDQLLVDRDAVQHLRHQLVVEINRRLKHPLAPRRRLFGELRGYLPRNYLGAKRLLIVPVRFHGHEVYHTLELILRPHRHLHRNRFHRRKLARHRSEAAVEIRSDTVHLIYIGYPGNVVFVGLPPDSLRLRFYASHGIKYRNRAIQDSQRTLHLYREIHVAGRIYNIDTVTVPHARGGRGGNRNPPLPLLHHPVHDSIAVVNLAHTVQNARIKQYPLRCGRLSSINMGHNADIAHRRQLNFLFLMPAVHANVRMLSFSITDTVA

SEQ ID NO: 57639 - DNA, 1764 bp, Unknown
  Obtained from environmental sample
  misc_feature (1)..(1764): n is a, c, g, or t
atgaacggcgggcatcaggaacaaaaaattgagctgacgtctgtgcgcaatatcggcattatggcccatattgatgctggaaagacgaccacaacggagcggatactgttttatacgggcattttgcaccgtatgggcgaggttcacgacggcaatactgtcatggactggatggtgcaggagagggagcgggggattacgattacctccgcggccaccacgtgcatgtggaacggttaccgtatcaatattatagatacgcccggccacgtggatttcacgatagaggtggagcgttctttgagagtcttggatggcgcggttgcggtatttgattccgtgggaggcgtagaacctcagtcggagactgtctggaggcaggccgacaaataccacgttccccggatagcctatgtaaataagatggaccgtatcggagcggatttcgacggctgcctcggagcgatggcgcgcaagttttcttctatgaaagcggttgcggtgcagatgccgatgggggcggaggataagttcgagggtgtgatagacctcgtgtccatgaaatcttaccggtacgatgaggaggcgcttggcgccaaggtaattgcgggggagatacccgcgaagttcgccgaagaggcggcgtcgcggcgcgaggggatgcttgaggcggcggttgatttcaacgacgagttgatggcgaaggtgctggacggcgtcgcggtcgacgaggagttgatcagggcggctctcaggtgcggggttttgcggaataagatttgccccgtgctttgcggatcctcttttaagaataagggaattcagcagttgcttgacgcggtggtctcttacttgccatcccctatagacaggggggcggtcgcgggggttgagcccgttacgcttgaggttaaggagagattgcccgatgcggagaggcagcctttttcggcgcttgtcttcaagatagcggccgatcagcatgtcgggcggttggcttacgcgagggtttattccggcaaggcgggttttaagagcgtgctttacaatccgcggataaagtcgagggagaaggctgctaggattttcaggatgcactccaacaagaggcacgcggagaacggtatggaggcgggggatatcgtcggtttggtggggcttaaagacgccgctaccggcgacacgatttgcgaccccgattttccgatcatctttgagaggatggcctttcccgatccggtgctttcgaggtcgatagagcccaagagcactgtggacgaggagaagctcaatttggcgctcgaaaggttggcggatgaagaccccacctgcagggtgcgggtagacgccgagacggggcagaggcttatctcaggtatgggcgagcttcatgtggagattttggtggaccgtttgacgacggagtttaatgtgggtgtgcacgtcggcaagccgcaggtctcctacaaggagacggtgacggcggcggcggttcaggagtacgaattcaatcagttggttggcggcagaaatcatcacggccacatcactttgggtgtggagcaggtggaggccgcggccggcgtggagtttataaacgaaatgtcggacggcgcgttgccggcggagtttgtcggcgcggttcgtcagggggtgctggaggccgcgggcggcggggcgctttcagggtttccggttgcgggagtgcgtgtcaaattatatcttcagtatataacgaaaacgactcaaccgagatcggtttaa

SEQ ID NO: 57640 - protein, 587 aa, Unknown
  Obtained from environmental sample
  DOMAIN (485)...(583): Elongation factor G, domain IV
  misc_feature (1)..(587): Xaa is any amino acid
MNGGHQEQKIELTSVRNIGIMAHIDAGKTTTTERILFYTGILHRMGEVHDGNTVMDWMVQERERGITITSAATTCMWNGYRINIIDTPGHVDFTIEVERSLRVLDGAVAVFDSVGGVEPQSETVWRQADKYHVPRIAYVNKMDRIGADFDGCLGAMARKFSSMKAVAVQMPMGAEDKFEGVIDLVSMKSYRYDEEALGAKVIAGEIPAKFAEEAASRREGMLEAAVDFNDELMAKVLDGVAVDEELIRAALRCGVLRNKICPVLCGSSFKNKGIQQLLDAVVSYLPSPIDRGAVAGVEPVTLEVKERLPDAERQPFSALVFKIAADQHVGRLAYARVYSGKAGFKSVLYNPRIKSREKAARIFRMHSNKRHAENGMEAGDIVGLVGLKDAATGDTICDPDFPIIFERMAFPDPVLSRSIEPKSTVDEEKLNLALERLADEDPTCRVRVDAETGQRLISGMGELHVEILVDRLTTEFNVGVHVGKPQVSYKETVTAAAVQEYEFNQLVGGRNHHGHITLGVEQVEAAAGVEFINEMSDGALPAEFVGAVRQGVLEAAGGGALSGFPVAGVRVKLYLQYITKTTQPRSV

SEQ ID NO: 57641 - DNA, 324 bp, Unknown
  Obtained from environmental sample
  misc_feature (1)..(324): n is a, c, g, or t
atggccttcaaagaagcgtgcgcganagcgtcgcntgcggtgctggagccggtgatgtcagtggagatagtcgtgccacccgagtacatgggcgcggtgataaacgacttcaacagccggcgcgggaaggttctggggatagaggcccgtaaagatgttcaagcggtgaacggctttgccccgctctccgagatgttcgggtacgctactgcgctgagatcgttaagccaaggccgcgcgtcttatacgatgcagctcgataagtacgaggtcgccggcaaggctgtgcaggagagtattttaaagaggatagggcgtctgtag

SEQ ID NO: 57642 - protein, 107 aa, Unknown
  Obtained from environmental sample
  DOMAIN (13)...(100): Elongation factor G C-terminus
  misc_feature (1)..(107): Xaa is any amino acid
MAFKEACAXASXAVLEPVMSVEIVVPPEYMGAVINDFNSRRGKVLGIEARKDVQAVNGFAPLSEMFGYATALRSLSQGRASYTMQLDKYEVAGKAVQESILKRIGRL

SEQ ID NO: 57643 - DNA, 309 bp, Unknown
  Obtained from environmental sample
  misc_feature (1)..(309): n is a, c, g, or t
atgccgggtgaaagaattcgtatcaggttgaagtcgtttgatcacaatatcctcgacaagtccgcgtcggatatcgtgcgtacggccaaaggcacgggcgcccgtatctccgggcctatacctttgcctacggagaagaccatatacacggtgctccgttcgccgcacgtgaacaagaagtcgcgcgagcagttcgagacacgcgtacacaagaggctgatagatatattggagtccacgccgcaaacggtcgattctttgatgaagcttgatctgccggccggcgttgatgtcgagattaaggtttga

SEQ ID NO: 57644 - protein, 102 aa, Unknown
  Obtained from environmental sample
  DOMAIN (5)...(100): Ribosomal protein S10p/S20e
  misc_feature (1)..(102): Xaa is any amino acid
MPGERIRIRLKSFDHNILDKSASDIVRTAKGTGARISGPIPLPTEKTIYTVLRSPHVNKKSREQFETRVHKRLIDILESTPQTVDSLMKLDLPAGVDVEIKV

SEQ ID NO: 57645 - DNA, 1023 bp, Unknown
  Obtained from environmental sample
  misc_feature (1)..(1023): n is a, c, g, or t
atgacggcaaggttgtctccctcgccgcccgccagatttttactcaggaagtcgaattcaggattgaagacgaatagtcctgtccttattcttttcgggccgaccgcttcgggtaaaaccggcatactccttgaactttttaattcctcaaacaaaccggattttatgtccgccgaagttatttccgcggactcaatgcaggtttaccggggaatggacatagggacggcgaagccttcggcgcgggagagggatagcctgcctcaccatttaattgatatcctgagcccggcgcagcaatttaacgcgggcgattttgtgcgccttgcggtcgaagcgtgcgaagaaatagcaagccggggaaaactgcccgtggtgtcgggcggaacgggtttctacctaaaaaattttatcatgggtttaagcgaagcgcctccctcagacgcaaaaatccgcgccgcccttaggaaagaattacaggaaaagggggcaggcgctctcatggaagaacttgccgcggccgaccccgtaagcgcgggacgcattcacattaacgacgagtaccgtcttttgcgcgcgcttgaagtatggcgcttctgcgggaaaccgctttcttcgtttgaaacaaattccgcaaaagcgcgctcagattttaactttatcacaatcggcctgtcccgcccgcgcgaggaactctaccgccgcataaacctgcgctgcgctgaaatgttccgtcagggccttgccgacgaggttcgctctttattcgaagccggctacacgccgaacgatcccggccttcacgccataggctaccgcgaatttttcatccgggacgaagaatcgggaaagtggcgcctgtcgcaggacattgacggggtgcaggctcttgtcgctcagaacagccgccgttacgcgaaaaggcagataacctttttcgcgggaattccgggcgtaaagtggatagagtgcaacaaaagcgaagcggaaattgcggaacttattagacgtgaactggaataa

SEQ ID NO: 57646 - protein, 340 aa, Unknown
  Obtained from environmental sample
  DOMAIN (66)...(325): IPP transferase
  misc_feature (1)..(340): Xaa is any amino acid
MTARLSPSPPARFLLRKSNSGLKTNSPVLILFGPTASGKTGILLELFNSSNKPDFMSAEVISADSMQVYRGMDIGTAKPSARERDSLPHHLIDILSPAQQFNAGDFVRLAVEACEEIASRGKLPVVSGGTGFYLKNFIMGLSEAPPSDAKIRAALRKELQEKGAGALMEELAAADPVSAGRIHINDEYRLLRALEVWRFCGKPLSSFETNSAKARSDFNFITIGLSRPREELYRRINLRCAEMFRQGLADEVRSLFEAGYTPNDPGLHAIGYREFFIRDEESGKWRLSQDIDGVQALVAQNSRRYAKRQITFFAGIPGVKWIECNKSEAEIAELIRRELE

SEQ ID NO: 57647 - DNA, 600 bp, Unknown
  Obtained from environmental sample
  misc_feature (1)..(600): n is a, c, g, or t
gtggattttggaacagatattgccagaagtttggggattcattttcaggtatacctgccggcgggcatttcgccggaaacgggaaaacgcgatattaaacaaaaatgggaagcgctgttaaccgaaaaagacgggccggacgtgcaaatgtacaaaagacatacgggcatagagccggtcataagagacctgaaaaacttagccgccctgccggacttggaagggtgcattaaagggatgtttatcgccgatccttccattcatgatgaaatcaggcaaaaatttaacgagcgattcggcggcagaataagcgtaatgcgcagtttcccgacttttttggagataatcaataagggcgtttccaagggcgaagggcttaaaatcgccatggactgcatggggcttaaacctgaagaagttatcgcttttggggatgaggaaaacgatgtacctatggccggcactgcgggctttttcgccgtgcccgaaaacgcgagggtaaacattcaggaagctgcggatttagtgtacggctccaacgccgaagaggggcttgcggtataccttgagaacacttttttatacagcgtcctcttttag

SEQ ID NO: 57648 - protein, 199 aa, Unknown
  Obtained from environmental sample
  DOMAIN (3)...(189): haloacid dehalogenase-like hydrolase
  misc_feature (1)..(199): Xaa is any amino acid
MDFGTDIARSLGIHFQVYLPAGISPETGKRDIKQKWEALLTEKDGPDVQMYKRHTGIEPVIRDLKNLAALPDLEGCIKGMFIADPSIHDEIRQKFNERFGGRISVMRSFPTFLEIINKGVSKGEGLKIAMDCMGLKPEEVIAFGDEENDVPMAGTAGFFAVPENARVNIQEAADLVYGSNAEEGLAVYLENTFLYSVLF

SEQ ID NO: 57649 - DNA, 939 bp, Unknown
  Obtained from environmental sample
  misc_feature (1)..(939): n is a, c, g, or t
gtgataatgaaagaagaaaatattgagcggaatattgattctctgtttatcatggatttcttatcctatatggaatccgtaaagggatgttccgagcggactgtggaagcctacagaaatgatcttctgcgttatgcgaattactgcgctaatcacgggattgctcccgaaaaagcttccgcttatgaagtgcagagttttatcgctgaattaacggctgaaaaaatggcggcggcaagcgtgaaccgctctctttctacaattcgcgggttttaccgctggatggcgcgttttaacaaaaggatcgataatccctgctgttctttgcgtaacattaaaactccggtaagactgcctgatgtcctatgggaggacgagatggcggattttgccgcgcttccggaggttacgggaattctctggccggagagggataaggcgcttattatggcgatgtactcgggaggattgcgcatatcggaagcggtgtctctgtccatggcgaatatatccgccgattttgacgaggcgaaaataacggggaagggcggaaaacagcgttatgtgtttttcagcgacgaggcggttgcggcgattcaggagtatcttccgcagagggcggagagattgaaaatggcggggattgacgggaaaaaatacgctttgtttataagcagaaaaggtcagccgatttccgttccgggagtgcgctggattatttcccgttatgcgctgcattccggcatcggaaaaaacattcatccgcacgcgcttcgccacagttttgccactcatcttgttaactcaggatgcgacgtgcgcgttgttcaggaaatgctgggacactcaaatatttcaaccacccagcgttacacgcatgttaattttgaaaaaatgaagaaagtatacgcggcttcgcatccgcatgcgggaggatga

SEQ ID NO: 57650 - protein, 312 aa, Unknown
  Obtained from environmental sample
  DOMAIN (17)...(99): Phage integrase, N-terminal SAM-like domain
  misc_feature (1)..(312): Xaa is any amino acid
MIMKEENIERNIDSLFIMDFLSYMESVKGCSERTVEAYRNDLLRYANYCANHGIAPEKASAYEVQSFIAELTAEKMAAASVNRSLSTIRGFYRWMARFNKRIDNPCCSLRNIKTPVRLPDVLWEDEMADFAALPEVTGILWPERDKALIMAMYSGGLRISEAVSLSMANISADFDEAKITGKGGKQRYVFFSDEAVAAIQEYLPQRAERLKMAGIDGKKYALFISRKGQPISVPGVRWIISRYALHSGIGKNIHPHALRHSFATHLVNSGCDVRVVQEMLGHSNISTTQRYTHVNFEKMKKVYAASHPHAGG

SEQ ID NO: 57651 - DNA, 927 bp, Unknown
  Obtained from environmental sample
  misc_feature (1)..(927): n is a, c, g, or t
ttgttcacatactcgaccgtaatggggactttagccggggcaatgtcgggagcttcaaatgaaagctcctcaagcagggcctccattatagtatgcagccgccgcgccccgatattttccagtttggaattaacttcggcggcaagggccgctagctgttcaatggcttcgggggcgaatttcagttctatgccctccgtggcgagaagctccgtatactgcctggtcagggcgtttttcggctcagtgagaatccgcagaaaatcatcctttccaagcgaatccaattccactcgcagagggaaacgcccctgcaattcgggtatcaaatccgaaggcttgctcacggtgaaagccccggcggcgataaaaaggatatggtcggtgttgaccggcccccatttcgtactgacggtcgccccctccacgatggggagtatgtcgcgctgcaccccttcgcgggaaacatcggggccgccgctcctttcgcccttgacggcaattttatcaatctcgtctataaaaataatgcctgtttcctcaacacgctggcgggcttcatcgcttaccctgtcgcggtcgatcagtttttccagttcctcggctttgattatttcccgcgcgcgggctattgttacgactttctttttcttgcccccgccaaaaaaattggcaaaaccggaaaggctcgattccatatcctccatgctgacacccatcatctcgaaaggcgggaactgggggttctggctgaccaaaagctcgacggtacgctcttcgagtttgccctcgcggagcatggccctgaatttttcccttgtccttgaagccacaggatcgcctgagctgtcagatggctggggatcctccggcttttcagcttcttccgtcccggccttttcctcctggccatcctggttcatgtaa

SEQ ID NO: 57652 - protein, 308 aa, Unknown
  Obtained from environmental sample
  SIGNAL (1)...(21)
  misc_feature (1)..(308): Xaa is any amino acid
MFTYSTVMGTLAGAMSGASNESSSSRASIIVCSRRAPIFSSLELTSAARAASCSMASGANFSSMPSVARSSVYCLVRAFFGSVRIRRKSSFPSESNSTRRGKRPCNSGIKSEGLLTVKAPAAIKRIWSVLTGPHFVLTVAPSTMGSMSRCTPSRETSGPPLLSPLTAILSISSIKIMPVSSTRWRASSLTLSRSISFSSSSALIISRARAIVTTFFFLPPPKKLAKPERLDSISSMLTPIISKGGNWGFWLTKSSTVRSSSLPSRSMALNFSLVLEATGSPELSDGWGSSGFSASSVPAFSSWPSWFM

SEQ ID NO: 57653 - DNA, 1347 bp, Unknown
  Obtained from environmental sample
  misc_feature (1)..(1347): n is a, c, g, or t
atgttaacagccgatcccgaacaggtaaagagcgctttcctcataaatgaaatctcttacaacgaagcgatggaaatttcccacttcggcgcaaggttgatttttccgccgtcggttaaacccgctctggaaaaaaatattcccatttttatacgcaatacttttaatccaaaaggagcgggcacaaaaattaccgccaatgccgcgccgggtaaattcccaatcaggggaataagctctataagcaaaaccgctcttgtaagaattcagggaacaggcatggttggggtagcgggtttttccgcccgtgtgttcggcgctctcgccagaaaaggaataagcgtcatgctgattacgcagagttccagcgagtactcgatttgtttcgccgttttacccgaagacgctcaaaaagccgaagcttcattaaaagaagaattcgctcatgaaatatataatcgttctttggaaaacccgattatcgaaaaaaatctttctatagtcgcagtggtaggctctgcgatgaaaagcacttccggcatttccggaaaattcttccatgctcttggcagaaatggaattaatatagtagctatcgcgcaaggctcgtcggaaacaaatatttcagccgttatctccgcctctgacgaaggcaaggctcttaacgcaattcacgacgctttctttttcgccaatcagcgttcagtcaatctgttcattatcggcactggtttgattggcggcactttattggatcaaatctccgagaaccgcgaaaaattggcggataacatgatcaaaattaatttgataggagccgccaattacgacaaaatgatcttttcgcttgacggacttgatccaaaagaaacaaaaaaaatactttcaaccgccggaaaagttgaaggtactcagccaatcgaaccgaatcaaaaaggcgcgtcggcgtttatcgagaaaatggcgtcgttcaatctccccaattcatgcttctgcgattgtactgcaagcgaagacatcgccgatctttacgaaaaaatccttcaatattccatacctattgttacgccgaataaaaaagcaaactcaggctcctttgactattacaaacgccttacgacatattcaagggaaagaggaattccgtatctttatgaatgcactgtcgccgccggactgcccgttatttctacgttacgcgaccttttccttgcaggcgataaagttattaaaattgaggcggtcttgtcgggaacattaagttttatctttaacagcttcgacggctcanaacctttttccgctcttgtgcgtgaggcgaaagcaaagggctacacggagccctga

SEQ ID NO: 57654 - protein, 448 aa, Unknown
  Obtained from environmental sample
  DOMAIN (242)...(386): Homoserine dehydrogenase, NAD binding domain
  misc_feature (1)..(448): Xaa is any amino acid
MLTADPEQVKSAFLINEISYNEAMEISHFGARLIFPPSVKPALEKNIPIFIRNTFNPKGAGTKITANAAPGKFPIRGISSISKTALVRIQGTGMVGVAGFSARVFGALARKGISVMLITQSSSEYSICFAVLPEDAQKAEASLKEEFAHEIYNRSLENPIIEKNLSIVAVVGSAMKSTSGISGKFFHALGRNGINIVAIAQGSSETNISAVISASDEGKALNAIHDAFFFANQRSVNLFIIGTGLIGGTLLDQISENREKLADNMIKINLIGAANYDKMIFSLDGLDPKETKKILSTAGKVEGTQPIEPNQKGASAFIEKMASFNLPNSCFCDCTASEDIADLYEKILQYSIPIVTPNKKANSGSFDYYKRLTTYSRERGIPYLYECTVAAGLPVISTLRDLFLAGDKVIKIEAVLSGTLSFIFNSFDGSXPFSALVREAKAKGYTEP

SEQ ID NO: 57655 - DNA, 489 bp, Unknown
  Obtained from environmental sample
  misc_feature (1)..(489): n is a, c, g, or t
ttgtgcgtgaggcgaaagcaaagggctacacggagccctgatccaagggatgatcttaacgcgatggacgccgcgcggaaagcgttgatccttgcccgcgaaatagggctttcaatggaattttccgacgtaaaaatagaatcaatacttccgccttcctgttttaaagcaaaagacgttgaggctttctttaaagaacttgaaaaatcagacgaagattttgaaaaaaaacgcgcgcaggcggcttcgcagggaaaagcgctgcgttacattgcggtagttgaagacggaaaagcaaaactttcccttcgttcggaagaagagggaagtcctttccgctctttaacggacagcgataacattgtggttataacgacggaacgttattcaaaactccctatggtgataaaaggccccggcgcgggcgctcaggtaactgccggagggattttcgccgacatagtgcgaaccgcccgcactcttgtatag

SEQ ID NO: 57656 - protein, 162 aa, Unknown
  Obtained from environmental sample
  DOMAIN (3)...(155): Homoserine dehydrogenase
  misc_feature (1)..(162): Xaa is any amino acid
MCVRRKQRATRSPDPRDDLNAMDAARKALILAREIGLSMEFSDVKIESILPPSCFKAKDVEAFFKELEKSDEDFEKKRAQAASQGKALRYIAVVEDGKAKLSLRSEEEGSPFRSLTDSDNIVVITTERYSKLPMVIKGPGAGAQVTAGGIFADIVRTARTLV

SEQ ID NO: 57657 - DNA, 309 bp, Unknown
  Obtained from environmental sample
  misc_feature (1)..(309): n is a, c, g, or t
atggccgagccgccgataatccaaacagaggaagctattgccgatttgcgcaaagctcttgaaagcggcgacattcagtcaatcaaggacaagactgaagccttaaagcaagcgtcttacaaaatagccgaggaaatttacaaacagcaagccgcaagcggtcagcagggcggcggtcaaggcgcaggtcccgacatgggcggcggatttaatcccaacatgggcggcggcgaaagccacggcggcggtatgggcggcgacacaaagagcgccgaagacgctgattatgaagtggtagatgacaaatag

SEQ ID NO: 57658 - protein, 102 aa, Unknown
  Obtained from environmental sample
  misc_feature (1)..(102): Xaa is any amino acid
MAEPPIIQTEEAIADLRKALESGDIQSIKDKTEALKQASYKIAEEIYKQQAASGQQGGGQGAGPDMGGGFNPNMGGGESHGGGMGGDTKSAEDADYEVVDDK

SEQ ID NO: 57659 - DNA, 660 bp, Unknown
  Obtained from environmental sample
  misc_feature (1)..(660): n is a, c, g, or t
ttgcaggtttcaaaaaatcgcggaaaatggtatagattatttataaataatataaaagcggagaatccgccgcttttattggagaatggtaaaatgaaaattgcagtttcgggaaagggcggagtaggcaagtccactgtcgccgcttctatcgctttaattctggcgcaaaggggcgtaagggttctcgccctcgacgccgatcctgacgctaaccttgcggcgtctttgggtattcccaaaactgtaaaaattacccctatctcaaaagagattgcgctcattgaggagagaacgggagcgaaggttgatcagtacgggcaaatttttaaacttaacccgaatgtcagcgatgtagcggagaagtttgcggtttcacataacggggtggagcttttggttctgggagccgcgaaaagaggcggaggaggctgcgcctgccctgaaaatgtttttataaaagcgttggttaacgatcttgttctgtataaaaatgaaactcttataatggatatggaagccggtattgaacatttaggacgcgctacttcaagcggcgtagatgtgatgatcattgtagttgagccgggtcagcgttcgcttgattgtgcggatacggttatcaagatgtcgaaggagatagggctggccgatttgtaa

SEQ ID NO: 57660 - protein, 219 aa, Unknown
  Obtained from environmental sample
  DOMAIN (33)...(216): CobQ/CobB/MinD/ParA nucleotide binding domain
  misc_feature (1)..(219): Xaa is any amino acid
MQVSKNRGKWYRLFINNIKAENPPLLLENGKMKIAVSGKGGVGKSTVAASIALILAQRGVRVLALDADPDANLAASLGIPKTVKITPISKEIALIEERTGAKVDQYGQIFKLNPNVSDVAEKFAVSHNGVELLVLGAAKRGGGGCACPENVFIKALVNDLVLYKNETLIMDMEAGIEHLGRATSSGVDVMIIVVEPGQRSLDCADTVIKMSKEIGLADL

SEQ ID NO: 57661 - DNA, 612 bp, Unknown
  Obtained from environmental sample
  misc_feature (1)..(612): n is a, c, g, or t
gtgggctttttctatttcgtcaaaaaggacaacgctgtagggccgcctgcgcacgacttcggtaagctggccgccctgttcgtagcccacatagcccggcggcgcgccgatcagacggctgacggaatgtttctcgccgtattcgctcatgtcgattctggcaagggctttctcgtcgttgaacaggaagtcggcaagggtttttgccagttcggttttgcccacgccggtgggccccaggaaaaggaaagagccaaaaggcttcgcggcatcggagaggccggccttgttccgcctgatcgcgtccgcgaccgcggcaagcgcctggtcctgtcccactacccgccgttccagcgctttttcaggtcgaggtacttctgcatttcgccggaaagcattttggaaacgggaatcccagtccaggcggataccacggcggcaatgtcttcctcgcttacctcttccctcagcagcgcggtcgtgcctgttcctccggctttatcccgcttcttttccataagagcagcgagcgcggcaagctgtttctgggcttcgggaatttttccgtgctttacctccgcggcttttaacagattaccctcgcgctcataa

SEQ ID NO: 57662 - protein, 203 aa, Unknown
  Obtained from environmental sample
  misc_feature (1)..(203): Xaa is any amino acid
MGFFYFVKKDNAVGPPAHDFGKLAALFVAHIARRRADQTADGMFLAVFAHVDSGKGFLVVEQEVGKGFCQFGFAHAGGPQEKERAKRLRGIGEAGLVPPDRVRDRGKRLVLSHYPPFQRFFRSRYFCISPESILETGIPVQADTTAAMSSSLTSSLSSAVVPVPPALSRFFSIRAASAASCFWASGIFPCFTSAAFNRLPSRS

SEQ ID NO: 57663 - DNA, 831 bp, Unknown
  Obtained from environmental sample
  misc_feature (1)..(831): n is a, c, g, or t
ttggctcgcggcgagctgcgctgcataggcgctaccacgcttgacgagtaccgcaagcacattgaaaaagacgcggcgcttgaacgccgcttccagcaggtgtacacggctgagccctcggttgaggatacaatcgcgatcctgcgcgggcttaaagaacgctacgaggtacaccacggcgtgcggattaaggacgaggctttggtcgccgcggcgacgctttccagccgttatataacaagccgctttatgcctgacaaggccatagaccttgtggatgaggcggcgagccgcctgaaaatggaactggacagccgccccactgaactggacaaacttgaacgcaagctgcttcaattttcaattgagaaacaggcgctttcccgcgaagaagatcccgcgtcaaaagaacgcctcgccaaactggaaaaggaaatcgccgacattacagcggaacgcgacgccatgaaagcccgctgggaagctgaaaaagttgacatccagggtatccgtgaattaaagcagaggattgaggaattaaaaatagaagagacccgttatgagcgcgagggtaatctgttaaaagccgcggaggtaaagcacggaaaaattcccgaagcccagaaacagcttgccgcgctcgctgctcttatggaaaagaagcgggataaagccggaggaacaggcacgaccgcgctgctgagggaagaggtaagcgaggaagacattgccgccgtggtatccgcctggactgggattcccgtttccaaaatgctttccggcgaaatgcagaagtacctcgacctgaaaaagcgctggaacggcgggtag

SEQ ID NO: 57664 - protein, 276 aa, Unknown
  Obtained from environmental sample
  misc_feature (1)..(276): Xaa is any amino acid
MARGELRCIGATTLDEYRKHIEKDAALERRFQQVYTAEPSVEDTIAILRGLKERYEVHHGVRIKDEALVAAATLSSRYITSRFMPDKAIDLVDEAASRLKMELDSRPTELDKLERKLLQFSIEKQALSREEDPASKERLAKLEKEIADITAERDAMKARWEAEKVDIQGIRELKQRIEELKIEETRYEREGNLLKAAEVKHGKIPEAQKQLAALAALMEKKRDKAGGTGTTALLREEVSEEDIAAVVSAWTGIPVSKMLSGEMQKYLDLKKRWNGG

SEQ ID NO: 57665 - DNA, 369 bp, Unknown
  Obtained from environmental sample
  misc_feature (1)..(369): n is a, c, g, or t
ttgaagcagcttgcgttcaagtttgtccagttcagtggggcggctgtccagttccattttcaggcggctcgccgcctcatccacaaggtctatggccttgtcaggcataaagcggcttgttatataacggctggaaagcgtcgccgcggcgaccaaagcctcgtccttaatccgcacgccgtggtgtacctcgtagcgttctttaagcccgcgcaggatcgcgattgtatcctcaaccgagggctcagccgtgtacacctgctggaagcggcgttcaagcgccgcgtctttttcaatgtgcttgcggtactcgtcaagcgtggtagcgcctatgcagcgcagctcgccgcgagccaaagccggctttag

SEQ ID NO: 57666 - protein, 122 aa, Unknown
  Obtained from environmental sample
  misc_feature (1)..(122): Xaa is any amino acid
MKQLAFKFVQFSGAAVQFHFQAARRLIHKVYGLVRHKAACYITAGKRRRGDQSLVLNPHAVVYLVAFFKPAQDRDCILNRGLSRVHLLEAAFKRRVFFNVLAVLVKRGSAYAAQLAASQSRL

SEQ ID NO: 57667 - DNA, 543 bp, Unknown
  Obtained from environmental sample
  misc_feature (1)..(543): n is a, c, g, or t
atgcagttcatcaatgaagaggattatcttcccttcggcngcctgtacttcgtgaaatcacgctttcaggcgttcctcaaattccccccggaacttggcgcccgccaccaacgcgccgatgtccagggccagaagccgtttgcccttgagcccctcgggaacgtccccggccacgatcctgcgggcaaggccctccacaatggcggtcttcccgacccccggctcgccgatgagcaccgggttattcttggtacgccgggacagcacctgcatacagcgccggatttcctcgtccctgccgatcacagggtcgagcttttcctgccgggcaagggccgtaaggtcccggcagtatttatccagaacccggtacttctcttcggggctctggtctgtaacccttgcgttgccccgcacctgtttgagggcgcccaggatggcgttcttggtaacccccgcttttttgagggtttccgcggttttaccctctccggccgccaaggcaatgaggatgtgctcggtggagacaaactcgtcttttaa

SEQ ID NO: 57668 - protein, 180 aa, Unknown
  Obtained from environmental sample
  misc_feature (1)..(180): Xaa is any amino acid
MQFINEEDYLPFGXLYFVKSRFQAFLKFPPELGARHQRADVQGQKPFALEPLGNVPGHDPAGKALHNGGLPDPRLADEHRVILGTPGQHLHTAPDFLVPADHRVELFLPGKGRKVPAVFIQNPVLLFGALVCNPCVAPHLFEGAQDGVLGNPRFFEGFRGFTLSGRQGNEDVLGGDKLVF

SEQ ID NO: 57669 - DNA, 651 bp, Unknown
  Obtained from environmental sample
  misc_feature (1)..(651): n is a, c, g, or t
gtgccccccatcgtggaaaaagtaggggcggatcctcacaggctcattgccgctgccgaggggcttatggcttcccagcccaagatctttggggaggcggcccaggtgtacttgtcttccgccgcgtcaaaggttctggccaaggcggaaaacgaggccgcgtccttaaaagacgagtttgtctccaccgagcacatcctcattgccttggcggccggagagggtaaaaccgcggaaaccctcaaaaaagcgggggttaccaagaacgccatcctgggcgccctcaaacaggtgcggggcaacgcaagggttacagaccagagccccgaagagaagtaccgggttctggataaatactgccgggaccttacggcccttgcccggcaggaaaagctcgaccctgtgatcggcagggacgaggaaatccggcgctgtatgcaggtgctgtcccggcgtaccaagaataacccggtgctcatcggcgagccgggggtcgggaagaccgccattgtggagggccttgcccgcaggatcgtggccggggacgttcccgaggggctcaagggcaaacggcttctggccctggacatcggcgcgttggtggcgggcgccaagttccggggggaatttgaggaacgcctgaaagcgtga

SEQ ID NO: 57670 - protein, 216 aa, Unknown
  Obtained from environmental sample
  DOMAIN (49)...(100): Clp amino terminal domain
  misc_feature (1)..(216): Xaa is any amino acid
MPPIVEKVGADPHRLIAAAEGLMASQPKIFGEAAQVYLSSAASKVLAKAENEAASLKDEFVSTEHILIALAAGEGKTAETLKKAGVTKNAILGALKQVRGNARVTDQSPEEKYRVLDKYCRDLTALARQEKLDPVIGRDEEIRRCMQVLSRRTKNNPVLIGEPGVGKTAIVEGLARRIVAGDVPEGLKGKRLLALDIGALVAGAKFRGEFEERLKA

SEQ ID NO: 57671 - DNA, 579 bp, Unknown
  Obtained from environmental sample
  misc_feature (1)..(579): n is a, c, g, or t
ttggcgcccgccaccaacgcgccgatgtccagggccagaagccgtttgcccttgagcccctcgggaacgtccccggccacgatcctgcgggcaaggccctccacaatggcggtcttcccgacccccggctcgccgatgagcaccgggttattcttggtacgccgggacagcacctgcatacagcgccggatttcctcgtccctgccgatcacagggtcgagcttttcctgccgggcaagggccgtaaggtcccggcagtatttatccagaacccggtacttctcttcggggctctggtctgtaacccttgcgttgccccgcacctgtttgagggcgcccaggatggcgttcttggtaacccccgcttttttgagggtttccgcggttttaccctctccggccgccaaggcaatgaggatgtgctcggtggagacaaactcgtcttttaaggacgcggcctcgttttccgccttggccagaacctttgacgcggcggaagacaagtacacctgggccgcctccccaaagatcttgggctgggaagccataagcccctcggcagcggcaatgagcctgtga

SEQ ID NO: 57672 - protein, 192 aa, Unknown
  Obtained from environmental sample
  misc_feature (1)..(192): Xaa is any amino acid
MAPATNAPMSRARSRLPLSPSGTSPATILRARPSTMAVFPTPGSPMSTGLFLVRRDSTCIQRRISSSLPITGSSFSCRARAVRSRQYLSRTRYFSSGLWSVTLALPRTCLRAPRMAFLVTPAFLRVSAVLPSPAAKAMRMCSVETNSSFKDAASFSALARTFDAAEDKYTWAASPKILGWEAISPSAAAMSL

SEQ ID NO: 57673 - DNA, 441 bp, Unknown
  Obtained from environmental sample
  misc_feature (1)..(441): n is a, c, g, or t
atgtcatttagagacttacaaataaaaaaagaatatcgttctcttcacgataatattgcatgcgatttttatatccctatcctaaaacacgctacttcatataaacgagctgttggctttttttcatcttctgcattaatagaaatttcaaaaggaatcagttatcttgtacaaaataatggcattgtgcaaatagtcgcatctcctcatctttctgatgaagatattgaagcaattagaaaaggttataatttacgtaacgaaattattaaaaattcaataataaaaaatctaactaatacagataattattttgaacaggaacgtctaaatctattagcaaatttaatagctgatagcaaacttgatataaaaattgctttaactgaagaagcaagtaattttggtatgtatcatgaaaagagtggggattttttctga

SEQ ID NO: 57674 - protein, 146 aa, Unknown
  Obtained from environmental sample
  misc_feature (1)..(146): Xaa is any amino acid
MSFRDLQIKKEYRSLHDNIACDFYIPILKHATSYKRAVGFFSSSALIEISKGISYLVQNNGIVQIVASPHLSDEDIEAIRKGYNLRNEIIKNSIIKNLTNTDNYFEQERLNLLANLIADSKLDIKIALTEEASNFGMYHEKSGDFF

SEQ ID NO: 57675 - DNA, 315 bp, Unknown
  Obtained from environmental sample
  misc_feature (1)..(315): n is a, c, g, or t
atgaacaagccctatatttcgcatgaggaagccactatcgaaagttttcggaataacccggactatgccgccgagtatctgaatgccgtgcttgaggacggcgatcaagaagaattgatgctcgccctgcgtcgcgtggcctccgcattcggcatgaaagaagtggcggaaagctcgaagctcaaccccaaaaccctttaccgcaccttgtcgtcctccgggaatcccgaattacggagtttccaggccattctcggagctatgggtatgcgcctcgcagtaacaccgctggcacgggagcattcaatgaactag

SEQ ID NO: 57676 - protein, 104 aa, Unknown
  Obtained from environmental sample
  misc_feature (1)..(104): Xaa is any amino acid
MNKPYISHEEATIESFRNNPDYAAEYLNAVLEDGDQEELMLALRRVASAFGMKEVAESSKLNPKTLYRTLSSSGNPELRSFQAILGAMGMRLAVTPLAREHSMN

SEQ ID NO: 57677 - DNA, 639 bp, Unknown
  Obtained from environmental sample
  misc_feature (1)..(639): n is a, c, g, or t
atggaacggtttattgttgcggccgtatgtttagcgctatttctcattgttgaaggcgtgatatatattgtattgaggcatatcacgaaacgacaaccgcgctttctcataaccgtatcgacggtgtgcctcgccgttttacccacgggcgcgacgctcttgtcgtcggggtgctcaaagacgacgacgcctgtacccgaaacacccggcacgctcatagacgagagagacggcaagaaatacaaaacggtgaaaatagccgacgaaacgtggatggctgaaaatctgaattatcaaacgccgagcggttcttggtgttacggcgacgatacctcttactgcgcaaagttcggcaggctctacgattgggggacagcgcgagaggcttgccccgccggatggcgtttgccgacccgctacgagtggaacgagttggtaaaggcggcgggcggaggtaaagcggcggataaaaatcttaaatcgacctccggttggaagcgggccggcaacggctccgacgtttacggtttttcggcgctgccgggcggctcctacgacgatcataatataaagtttgaggatatcggcgatgatggctattggtggacggccacggaagagaagcgtatagttccatag

SEQ ID NO: 57678 - protein, 212 aa, Unknown
  Obtained from environmental sample
  misc_feature (1)..(212): Xaa is any amino acid
MERFIVAAVCLALFLIVEGVIYIVLRHITKRQPRFLITVSTVCLAVLPTGATLLSSGCSKTTTPVPETPGTLIDERDGKKYKTVKIADETWMAENLNYQTPSGSWCYGDDTSYCAKFGRLYDWGTAREACPAGWRLPTRYEWNELVKAAGGGKAADKNLKSTSGWKRAGNGSDVYGFSALPGGSYDDHNIKFEDIGDDGYWWTATEEKRIVP

SEQ ID NO: 57679 - DNA, 540 bp, Unknown
  Obtained from environmental sample
  misc_feature (1)..(540): n is a, c, g, or t
gtgctcacaaataacttttcggaaagtatcatctacgatagccgaggaatagaagaaatcgtaattatggaaataaatcacttgatcgctcataacgcgaatctggataaatcgaaaatcgacaaacgcctgataatggactttcccgtcgatattcgcgtggttataaactggaatatgaacaacaccgacattgatttgcacgtaaaagacccaaacaacgaagattgttattaccgtaatcacgaaaccgatataggcggacgtataagctacgacaatacaagcggttacggacccgaacaattccttctgaaaaaagcggtaaagggaaaataccgcgtccttgtcaattactaccgcgaccgccaattcaccggcgcaggaccgtctaccgttatggccgaaatctacacaaaatacgccggtaaaaccgaacagcgcagaatcgtgtgcttgcaattgtcgaaagtaatgggaaatgacggtaagaatgatgatgagaaaaagtatgcggaggtggcggaatttgatttttga

SEQ ID NO: 57680 - protein, 179 aa, Unknown
  Obtained from environmental sample
  misc_feature (1)..(179): Xaa is any amino acid
MLTNNFSESIIYDSRGIEEIVIMEINHLIAHNANLDKSKIDKRLIMDFPVDIRVVINWNMNNTDIDLHVKDPNNEDCYYRNHETDIGGRISYDNTSGYGPEQFLLKKAVKGKYRVLVNYYRDRQFTGAGPSTVMAEIYTKYAGKTEQRRIVCLQLSKVMGNDGKNDDEKKYAEVAEFDF

SEQ ID NO: 57681 - DNA, 717 bp, Unknown
  Obtained from environmental sample
  misc_feature (1)..(717): n is a, c, g, or t
atgaaaagcgatcttattgatgaatatgccgcgcaagtccttgcggcaaaagagcgctggcggggcaaattaaacgtttttctggggttagaagtggattatataaagggaaaacgctccccactggacagcgatatagtcaaattaaacctcgattatataatcggaagcgtgcattatcttttcccggaaaacggagcaaaggggtttacggttgacggatcacaggaagagtttgataccgggctaaaagacggattcggcggagatgcacaaaaactaatgcattcttactatgacgcggtcgccgaaatgattaaaattggcggttttgacataatcggacacgccgatttgcttaaaaaaaatactcttggaaagaatttgtggccgccggaagcggaagccgaaagacagaaagaaattacaaatattgcaaaaaaagccaaattggtttttgaagtaaatacgggcgggataaataggaataaaatacaagaaacttatccttcgctgtcctttcttaaaattatcaaaaagtttaacgtccctgtaactattaccgcggacgcccaccgcgcaagggacgttaacggaaattatactattgcgttaaacacccttaaagaagccggtataaaaaaacattttatttttaaagaaaaaacaaataaaaagaaatccgtttggttaaaagaaataatcataaataattaa

SEQ ID NO: 57682 - protein, 238 aa, Unknown
  Obtained from environmental sample
  misc_feature (1)..(238): Xaa is any amino acid
MKSDLIDEYAAQVLAAKERWRGKLNVFLGLEVDYIKGKRSPLDSDIVKLNLDYIIGSVHYLFPENGAKGFTVDGSQEEFDTGLKDGFGGDAQKLMHSYYDAVAEMIKIGGFDIIGHADLLKKNTLGKNLWPPEAEAERQKEITNIAKKAKLVFEVNTGGINRNKIQETYPSLSFLKIIKKFNVPVTITADAHRARDVNGNYTIALNTLKEAGIKKHFIFKEKTNKKKSVWLKEIIINN

SEQ ID NO: 57683 - DNA, 684 bp, Unknown
  Obtained from environmental sample
  misc_feature (1)..(684): n is a, c, g, or t
atgagcaaatccaaaccaaaatgggatgaaattttttccgctcttgaaaaatggcgcaaggaaattattaccgagaaaggaacggaagatccttccgtaaccactgtagcgcagcagtatcgccgcgatccgtgggctgtgctggtttctacaattttaagtttgcgtacaaaagatgaagttacaattgtcgcgtcaaaacggcttttggaaaaagcaggcgctcctgaagaattaaaatcattaaggcaggaaaaaatagaaaaattaatttatcctgtaggtttttaccggaacaaagcggcttcgttaaaaaaaatcgctactattctgcttgaacagcacaacggcaaagtgcccgcttcaatggatgcgctgcttgcgcttccgggcgtcggcagaaaaacagcgaaccttgtgcttaacgaagcctttgatcttgacggtttatgcgttgatatacatgttcaccgcatttcaaaccgctgcggctggcttaagttcaaaaacccggaagaaaccgaaatgatattaagagaaatactgccgcgtaactattggaaaaggatcaaccgccttcttgttctttacggacagaaactatgcaggcctgtaagtccgttttgctctcaatgcgtaataaagaagcattgttcacataacggcatagttaagtccagatag

SEQ ID NO: 57684 - protein, 227 aa, Unknown
  Obtained from environmental sample
  DOMAIN (114)...(143): Helix-hairpin-helix motif
  misc_feature (1)..(227): Xaa is any amino acid
MSKSKPKWDEIFSALEKWRKEIITEKGTEDPSVTTVAQQYRRDPWAVLVSTILSLRTKDEVTIVASKRLLEKAGAPEELKSLRQEKIEKLIYPVGFYRNKAASLKKIATILLEQHNGKVPASMDALLALPGVGRKTANLVLNEAFDLDGLCVDIHVHRISNRCGWLKFKNPEETEMILREILPRNYWKRINRLLVLYGQKLCRPVSPFCSQCVIKKHCSHNGIVKSR

SEQ ID NO: 57685 - DNA, 477 bp, Unknown
  Obtained from environmental sample
  misc_feature (1)..(477): n is a, c, g, or t
atgataaagacaggtcttggcttcgacatacatcgattaaaaaaaggacgccgctttcttttaggcggcgttgagattcccttttcaaaaggagaggacggtcactcggacggagacgcgctcgcccacgcggtatgcgacgccttgcttggagcctgcgctctgggcgacatcggcgaattatttccgccttccgatcccgcgtttaaagacgccgattccatgaaacttttgcgtaacgtttttgcgcatgtaaaaaattccggctggaaactggttaaccttgactgcgtaataatctgtgaaaaaccgaaggttcttcccttccgcgagcttatccgtgactcgctcgcaaagacgctggaagttccccttgattgtgtttttgttaaaggtaaaacagcggaaggacttgattccgcgggcaagggaaaagcggttgtagttttggctcaatgtcttgttgagaaaaattaa

SEQ ID NO: 57686 - protein, 158 aa, Unknown
  Obtained from environmental sample
  DOMAIN (2)...(158): YgbB family
  misc_feature (1)..(158): Xaa is any amino acid
MIKTGLGFDIHRLKKGRRFLLGGVEIPFSKGEDGHSDGDALAHAVCDALLGACALGDIGELFPPSDPAFKDADSMKLLRNVFAHVKNSGWKLVNLDCVIICEKPKVLPFRELIRDSLAKTLEVPLDCVFVKGKTAEGLDSAGKGKAVVVLAQCLVEKN

SEQ ID NO: 57687 - DNA, 1803 bp, Unknown
  Obtained from environmental sample
  misc_feature (1)..(1803): n is a, c, g, or t
atgtcaaaagcaaaacagcgccaaaaaggacaggaagatattgccacgcaaaaattcagagcgggatgccaaatggttaatgatcacccgttgttctatcagttatggcatggcacaactttgcagcgtagcgagaacattaattacccggcggaaggactgtgttttgttacaagcgaagggtatatcctttgcaatcccaaactccgggctgaaccggagcaatgggcgcgggcactggctcattgcctgttgcatttaggcatggatcattttaaagaaagagaaaatccggtgttatggaacatagcctgtgattgtgttgttgaaaaattcctggctgatttgaaatttggaaagtcgttacttgacaggtcgctaccggggggaatcaacgacgaggagcggctttaccgtcgtctgctggaatcacctaataatatggaatatggcggctatggcacggcgggggtttccgtgccggatatgctgttcgaaaaaaaaacgcgataccgctactttaataaaccgccactgtggacaaaattgtttgctgccgggttatccgccgccgtgcgctgcgcagttcgagtagcttccggcgaacaggaaactctttctgccaatccggatgaatccgtaaacagcgccgcctaccgcgccaaacaatggtttatttcaagttatccattattgggggccattgcttccaattttaaagtgatcgaaaacttttccgtatgtcagcgtatggaaatcaccgttgctgcggtttctcccgctttgtcggaaatatatattaatccctcataccctttagatgcggaagagatccgttttgtaatggcgcatgagtttcttcacgccgccctgcgccacgatgtccgcaaggaatggcgggacgcgtatctttggaatgtggcctgcgattatgtgataaatttgtggctgaccgagatgggcgtaggcgaacgtccgagtagcgtgttatatgacgaacagttcaaaggcatgaacgccgaagctatatatgaccgtatagttagcgatatgcgcacataccgtaaacttgccaccctgcgaggcgtaggcttgggtgatataatacccggcgaacgcagtcagtctgcggatattgatttggatgctttttatcgctggtcgctgtcacaggggctttattatcatcaggaacaggggcgcgggtatttgccggaaggcttgattgaagaaatccgggcgttatcccacccgcccattccgtgggatgtggagctcgcccgttggtttgacgaacactttattcctgtcgaaaagatccgttcatatgcccgcccaagccgccgtcagtcatccacacccgacattccgcgcccgaattgggtcatctcgcgcatggcgatggacggcagaacttttggtgttgtgcttgacacatccgggtcaatggagcgggaattgctggcaacggccttaggcgctatagccagttacagcgccgtgcgggacgtaccggcggcgcgtgtggtgttctgtgacgccgaagcctatgacgcgggctatatgaagccggaagacatcgccggaaccgttaaggtgaaagggcgcggaggcacagtgcttcagcccggcattgatttgcttaacaaatcggaagattttccgaaagaagcgccaattttgataataaccgacggctattgcgataaagtaattcttcatggcagagaacacgcgtttctggttccgcaaggcgcgaatcttccctttgaaccaaagggaaaagtattcaggttaaaataa

SEQ ID NO: 57688 - protein, 600 aa, Unknown
  Obtained from environmental sample
  misc_feature (1)..(600): Xaa is any amino acid
MSKAKQRQKGQEDIATQKFRAGCQMVNDHPLFYQLWHGTTLQRSENINYPAEGLCFVTSEGYILCNPKLRAEPEQWARALAHCLLHLGMDHFKERENPVLWNIACDCVVEKFLADLKFGKSLLDRSLPGGINDEERLYRRLLESPNNMEYGGYGTAGVSVPDMLFEKKTRYRYFNKPPLWTKLFAAGLSAAVRCAVRVASGEQETLSANPDESVNSAAYRAKQWFISSYPLLGAIASNFKVIENFSVCQRMEITVAAVSPALSEIYINPSYPLDAEEIRFVMAHEFLHAALRHDVRKEWRDAYLWNVACDYVINLWLTEMGVGERPSSVLYDEQFKGMNAEAIYDRIVSDMRTYRKLATLRGVGLGDIIPGERSQSADIDLDAFYRWSLSQGLYYHQEQGRGYLPEGLIEEIRALSHPPIPWDVELARWFDEHFIPVEKIRSYARPSRRQSSTPDIPRPNWVISRMAMDGRTFGVVLDTSGSMERELLATALGAIASYSAVRDVPAARVVFCDAEAYDAGYMKPEDIAGTVKVKGRGGTVLQPGIDLLNKSEDFPKEAPILIITDGYCDKVILHGREHAFLVPQGANLPFEPKGKVFRLK

SEQ ID NO: 57689 - DNA, 615 bp, Unknown
  Obtained from environmental sample
  misc_feature (1)..(615): n is a, c, g, or t
ttgcctccgcgtttgtctattttgttgacagcgacaatgattggaaccccggcttcctttgcgtggttgatcgcctcgatggtctggggcatgactccgtcatccgccgctacaaccagcaccacgatgtcagttacctgtgcgccccgcgccctcatgcgcgtgaaagcctcgtggccgggcgtgtcaaggaaggtgattctgccgtgcggtgtttctaccatgtacgcgccgatgtgttgggttatcccgccaaactcacccgacactacgtccgctttccggatcgcgtccagtagcttggttttgccgtggtcaacatgtcccataacggtaacaacaggcggcctgggcagcatatccgcgccttcgtccgtgccggtgtcaataatggtctcgtcatacaggctgataatttttacgtcggctccgaattcagcggctagtatcgtcgcggtatcggcatctatctgctggtttatggtgaccatcatgccaagtttcatcagcttttggattaagtccgacgctttgagattcatttttcttgccagttccgaaactgaaatattttccatgatttcgattgacttgggaaccgggttggcaacataa

SEQ ID NO: 57690 - protein, 204 aa, Unknown
  Obtained from environmental sample
  SIGNAL (1)...(30)
  misc_feature (1)..(204): Xaa is any amino acid
MPPRLSILLTATMIGTPASFAWLIASMVWGMTPSSAATTSTTMSVTCAPRALMRVKASWPGVSRKVILPCGVSTMYAPMCWVIPPNSPDTTSAFRIASSSLVLPWSTCPITVTTGGLGSISAPSSVPVSIMVSSYRLIIFTSAPNSAASIVAVSASICWFMVTIMPSFISFWIKSDALRFIFLASSETEIFSMISIDLGTGLAT

SEQ ID NO: 57691 - DNA, 807 bp, Unknown
  Obtained from environmental sample
  misc_feature (1)..(807): n is a, c, g, or t
gtgtactcaaaccgtgacgacgttgatcctgtcggcgcctgcgtgggtctcaagggcgttaggatacaggcggtaataaaagagcttgagggagagaaaatcgacatactaaaatacgatcccgatccacgacactttataaaaaacgccctttctccggccgaggtcagggatgtgatcattctcagcgagaaatcgaaaaaagcccttgccgtagtgagcgattcacttttatcgcttgccataggcaagcagggtcttaatgtgcgccttgcaaacaaattgaccgactggatgatagacgtgaagaccgacgcccagtttgccgagatggatattgccgccgaatccaaacgggcggtcaaagagctttttggagaaggcgaaacagaagagttctccagaatttcagaacttcccggagtggatcccgccgtcgccaaagcattgcttgacaatggcattgactatatcgtcgacttccttgatctcagcaaggaacagcttgacgcgatggaaaatatttccgatgagcaaattgcggttttacgcagtctgattgacgactctgttgaaatactggaagaagaggcggaagattccgccggaacggaatttgccggagatgaatccgccgccgttgccgcaggcgaccatgtgagtgaagaaaacgcggaagagattgaatgtccggaatgtcatgaaaaattcgtccttgatatggatggcttttcaggaggcaccatcgattgtccccactgcggcgcggagcttgaattgagctttgagaaagaggaaggggattaa

SEQ ID NO: 57692 - protein, 268 aa, Unknown
  Obtained from environmental sample
  misc_feature (1)..(268): Xaa is any amino acid
MYSNRDDVDPVGACVGLKGVRIQAVIKELEGEKIDILKYDPDPRHFIKNALSPAEVRDVIILSEKSKKALAVVSDSLLSLAIGKQGLNVRLANKLTDWMIDVKTDAQFAEMDIAAESKRAVKELFGEGETEEFSRISELPGVDPAVAKALLDNGIDYIVDFLDLSKEQLDAMENISDEQIAVLRSLIDDSVEILEEEAEDSAGTEFAGDESAAVAAGDHVSEENAEEIECPECHEKFVLDMDGFSGGTIDCPHCGAELELSFEKEEGD

SEQ ID NO: 57693 - DNA, 870 bp, Unknown
  Obtained from environmental sample
  misc_feature (1)..(870): n is a, c, g, or t
atgataaacgccggccatgaggctttggtgttgtctcgtaatccggacaaatatccgtcattatcacaaaaagcgaaattgctaaacggcgatatcaacgaccactggttaatgaccgaatacgttaaagggtgcgacgcggtgatacacattgcgctcggatggggcgacgaacctatgtcgatgctcataaacgacaccgccgctacggtacatctgcttgaggccgctgaaaaagccggggtgaaaaagttcatctacacgagcagtacagccgctatgggacgtatgcggcaaacaatggaagagtctatggcgaatctgccgatcgacctatacggcagcacgaaagcggcgtctgaggcgtatgttctgggattcaggaaatactacggcgacagagggcgggaggtatcaatgaaacgcaacgttatccgccccggatacacctattctacgccgccctatccggacggctcgacgcagcccgacgcccgcttcagggacattgcggaggcggtggtcaacagcaagccggtagtgctgacaaagcacgacggcacgcagtttatatcggcgtgcgagatagcgcagctttatttgaagttagttgaaagcgataaaaacgaggaggtctatttggcgcttgccgacacatttacatcgtgggaacagatcgctaaaatcgccatagagtactatccgacctctaagtcggaaattgtgttgaatgacctggggtggagtgagaatcctatgctgttcgacgttagcgggatgcgaaaggatttcgggctgtcgtttggcgatagagataagttaatcgagcatattaagtggaatgtcgatcgggcgaggggcgtactttaa

SEQ ID NO: 57694 - protein, 289 aa, Unknown
  Obtained from environmental sample
  DOMAIN (9)...(198): 3-beta hydroxysteroid dehydrogenase/isomerase family
  misc_feature (1)..(289): Xaa is any amino acid
MINAGHEALVLSRNPDKYPSLSQKAKLLNGDINDHWLMTEYVKGCDAVIHIALGWGDEPMSMLINDTAATVHLLEAAEKAGVKKFIYTSSTAAMGRMRQTMEESMANLPIDLYGSTKAASEAYVLGFRKYYGDRGREVSMKRNVIRPGYTYSTPPYPDGSTQPDARFRDIAEAVVNSKPVVLTKHDGTQFISACEIAQLYLKLVESDKNEEVYLALADTFTSWEQIAKIAIEYYPTSKSEIVLNDLGWSENPMLFDVSGMRKDFGLSFGDRDKLIEHIKWNVDRARGVL

SEQ ID NO: 57695 - DNA, 507 bp, Unknown
  Obtained from environmental sample
  misc_feature (1)..(507): n is a, c, g, or t
atggaacttgattttgaaatagataaaataaccgaatcaatagaaagcgcggaaaccggcaagcgctttgaaacacgtgtgttgccgataaaagaatctgatttgaatgaaataacggggtcaagcgggtggaggtttgattggagattcgagttttatcaacctaatcggcaagtttataaattagtaaccgaagaaaggtcggacgttattcagggtttggcgtcatttgaaaagcgtgaagatttcgtgtatatgcatcttatagagtcttcgccgtttaatataggaaagggcaagaaatatcttggagtatcttgcaatttagtcgcgtatgggtgtaatttatcaaaaaagtttggatttggcggagttttatcttttgattctaaaacgacgcttgttgctcactatgaaaaaatattgggagcggtgcgtataagtgagcgaagaatggtaatttttgaagaagatgcggagatattgataggcaaatatttttcataa

SEQ ID NO: 57696 - protein, 168 aa, Unknown
  Obtained from environmental sample
  misc_feature (1)..(168): Xaa is any amino acid
MELDFEIDKITESIESAETGKRFETRVLPIKESDLNEITGSSGWRFDWRFEFYQPNRQVYKLVTEERSDVIQGLASFEKREDFVYMHLIESSPFNIGKGKKYLGVSCNLVAYGCNLSKKFGFGGVLSFDSKTTLVAHYEKILGAVRISERRMVIFEEDAEILIGKYFS

SEQ ID NO: 57697 - DNA, 564 bp, Unknown
  Obtained from environmental sample
  misc_feature (1)..(564): n is a, c, g, or t
gtggacggtgaggacgcaggacgggtcgctctccgcccagttcgagcataccctcgcggtgaccgagagcggcgcggaggtgctgacgctcaccccgtcgcagaaggcggcgggtgtcaggctcatcgtagacggggaggggtaccggtgaccggacagccgctgttccgcaaagagctcaaagacgtcggcacggtggtggtcaagaccggcagccgcatcctcacagccgccggccacgagaggcgcgtagaacatctggccgcggatctgtccgcattgcgaaaatccggcgtgcgggtggtgcttgtctcctcaggcgccattgcccacggcatgaaagcgctcggcttggacaaacggccgaccgaaatcccaatgcagcaagcctgcgccggtatcgggcagaatcggctcatggccatctatcaaaaacattttgacaaacacgacacgctgatagggcaggtactgctgacgtgggacgaccttcgcagcaaaaaacgttacctcaacctgcgtaatacattattcaaattgttgactgcggcgcgatacctatag

SEQ ID NO: 57698 - protein, 187 aa, Unknown
  Obtained from environmental sample
  misc_feature (1)..(187): Xaa is any amino acid
MDGEDAGRVALRPVRAYPRGDRERRGGADAHPVAEGGGCQAHRRRGGVPVTGQPLFRKELKDVGTVVVKTGSRILTAAGHERRVEHLAADLSALRKSGVRVVLVSSGAIAHGMKALGLDKRPTEIPMQQACAGIGQNRLMAIYQKHFDKHDTLIGQVLLTWDDLRSKKRYLNLRNTLFKLLTAARYL

SEQ ID NO: 57699 - DNA, 435 bp, Unknown
  Obtained from environmental sample
  misc_feature (1)..(435): n is a, c, g, or t
gtggcgcccaaggccctcatcatcggcatagacgcggtgaagccgggagcgcccctacgcgccatcggcaacgccatagaaccatacgttaacgcccaagggtgctcggtggtacagcagtacaccggtcacgggatcggcttgaagttccacgagtttttctccgtctaccaccacatagagccgcgcggcgaggacataataatgctgccgggaatgaccttcaccatagagccgatgataaacctcggcggctatgaggtggttacggacagagcggacgggtggacggtgaggacgcaggacgggtcgctctccgcccagttcgagcataccctcgcggtgaccgagagcggcgcggaggtgctgacgctcaccccgtcgcagaaggcggcgggtgtcaggctcatcgtagacggggaggggtaccggtga

SEQ ID NO: 57700 - protein, 144 aa, Unknown
  Obtained from environmental sample
  DOMAIN (1)...(125): metallopeptidase family M24
  misc_feature (1)..(144): Xaa is any amino acid
MAPKALIIGIDAVKPGAPLRAIGNAIEPYVNAQGCSVVQQYTGHGIGLKFHEFFSVYHHIEPRGEDIIMLPGMTFTIEPMINLGGYEVVTDRADGWTVRTQDGSLSAQFEHTLAVTESGAEVLTLTPSQKAAGVRLIVDGEGYR

SEQ ID NO: 57701 - DNA, 561 bp, Unknown
  Obtained from environmental sample
  misc_feature (1)..(561): n is a, c, g, or t
ttgtcaaagacagaaggatacggtaacggtatgttagaacgaaatgatccttgttggtgcggtagcgggaagaaatacaagaagtgccatctcgcgagtgatgaagagaagcgcgtgcctccccgtgcgggcgctccggcgcgcgccgccgttaggggtaggagtgcggcggcgcagaaggggcgccagaagactccggcgcagatcgacgggatgcgccgtagcggggtgttcaacgggcagcttatggactacatacgtccgcacgtcttggcaggtatagccacggatgagctcaatacgctcatacaccgctataccgtcggtaacggccacatcccggcctgtctcggttacaaggggcacagagccgctttccctaaatcgtgctgcatatcacggaacaacgtggtctgccacggcatcccgtccgtggacgagcgtgttgaggagggcgacatcgtcaacattgatttgacgacgattgtcgacggcttccacggcgactcctccgagaccttcatgataggcgcgggagcaaggaggcgcggcatctcgtag

SEQ ID NO: 57702 - protein, 186 aa, Unknown
  Obtained from environmental sample
  DOMAIN (14)...(34): SEC-C motif
  misc_feature (1)..(186): Xaa is any amino acid
MSKTEGYGNGMLERNDPCWCGSGKKYKKCHLASDEEKRVPPRAGAPARAAVRGRSAAAQKGRQKTPAQIDGMRRSGVFNGQLMDYIRPHVLAGIATDELNTLIHRYTVGNGHIPACLGYKGHRAAFPKSCCISRNNVVCHGIPSVDERVEEGDIVNIDLTTIVDGFHGDSSETFMIGAGARRRGIS

SEQ ID NO: 57703 - DNA, 804 bp, Unknown
  Obtained from environmental sample
  misc_feature (1)..(804): n is a, c, g, or t
ttgtttttaaacggggcgttgcggggcgggacaacagcgccccactggggcgcgtcctccagcagggtgggtagcggaaaacaaaaaacgggcaaagcccgttttttggtggagcgagggggagacttcccccccttatatgaatttgattttgattttaaatattttgattttaatgattttgactttattacaagaaaggcaacacccacaatgtcattagtccccatggtaatcgaacaaaccggccgcggcgagcggtcgtacgacatctactcgcgcctcctcaaagagcgcataatcttcctcggctcggacatagacgacacgaccgccgacctggtcatggcgcagcttatcttcttggagtacgaagacgccgacaaggacatcacgctttacatcaactcgccgggcggcatagtcagttcgggactcgccatctacgacaccatacagtacataaagccggacgtctccacaatctgcataggccaagcggccagcatgggagcggtgctcttagccgccggcacgaaaggcaagcgctacgccctgccgcactcccgcataatgctgcaccagcccataggcggcgcgggcggacaagcagcggatatcgccatccacgccaaggaaatcatccgcataaagcagacgctgaacgatatcctgtgcaaccacacagggcaagatagagaggtcatagccaaggacaccgacaggaacttctacatgtcggcggaggaggccaaggcctacgggctgatagacgaaatctttacgtcaagggagagcaaataa

SEQ ID NO: 57704 - protein, 267 aa, Unknown
  Obtained from environmental sample
  DOMAIN (83)...(264): Clp protease
  misc_feature (1)..(267): Xaa is any amino acid
MFLNGALRGGTTAPHWGASSSRVGSGKQKTGKARFLVERGGDFPPLYEFDFDFKYFDFNDFDFITRKATPTMSLVPMVIEQTGRGERSYDIYSRLLKERIIFLGSDIDDTTADLVMAQLIFLEYEDADKDITLYINSPGGIVSSGLAIYDTIQYIKPDVSTICIGQAASMGAVLLAAGTKGKRYALPHSRIMLHQPIGGAGGQAADIAIHAKEIIRIKQTLNDILCNHTGQDREVIAKDTDRNFYMSAEEAKAYGLIDEIFTSRESK

SEQ ID NO: 57705 - DNA, 846 bp, Unknown
  Obtained from environmental sample
  misc_feature (1)..(846): n is a, c, g, or t
gtggacaacatatcgcgacccaggtttccggagattaagtgctccttctgcggcaaaggcccggaagacggcaaggcgctcatcacgggcatttccgcctttatatgccacgactgcgtaggtctgtgcaacgaaatggtgcgtgaaagaacccacggcagcggacttgagggcatcgacatcaacaagctcccaacgccgcaagagatgatgggttttttggatcagtacgtcataggtcaaaacgaggtcaagatggccgtgtgcgtcgccgcatacaaccacttcaagcgccttttctccagagggctgggcgacgacgacgtggagattgacaagtctaatatgctcatgataggccccacgggcaccggcaaaacgctgatcgcgcaaacgctcgcgaaatttctgaaggtgccgttcaccattgtggacgcaaccatcttcacggaggccggttatgtaggcgacgacgttgagaatatgctcgtcaggcttctgcaaacggcgaactacgacgtgcccaaggcggagaagggcatcatctatatagacgagttcgacaaaatatcaaggaagtcggcaaatccttcaataacacgcgacgtctccggcgagggcgtccagcaagccatgttaaaaatattggagggcaccgtggccggcgttccgcccaaaggcgggcgcaaacatccggagcagagcctcatccaaataaatacgagggatatactctttatctgcggcggagcgtttgaggggcttgacaaaataatagaggcgaggatagaccaaagccgtatgggcttcacgccgacgttagggagcagagtcagaagaagatag

SEQ ID NO: 57706 - protein, 281 aa, Unknown
  Obtained from environmental sample
  DOMAIN (11)...(50): ClpX C4-type zinc finger
  misc_feature (1)..(281): Xaa is any amino acid
MDNISRPRFPEIKCSFCGKGPEDGKALITGISAFICHDCVGLCNEMVRERTHGSGLEGIDINKLPTPQEMMGFLDQYVIGQNEVKMAVCVAAYNHFKRLFSRGLGDDDVEIDKSNMLMIGPTGTGKTLIAQTLAKFLKVPFTIVDATIFTEAGYVGDDVENMLVRLLQTANYDVPKAEKGIIYIDEFDKISRKSANPSITRDVSGEGVQQAMLKILEGTVAGVPPKGGRKHPEQSLIQINTRDILFICGGAFEGLDKIIEARIDQSRMGFTPTLGSRVRRR

SEQ ID NO: 57707 - DNA, 1335 bp, Unknown
  Obtained from environmental sample
  misc_feature (1)..(1335): n is a, c, g, or t
gtgagaattgaaatggcgtctttcaagataggcaactcaacaaacaactggagcgtgatgatcgcgtctacagaaaaatatattatgagagacgtcgtcgcgatgagaaattttgtcattgttatggcgttggttgcgattgcggcggcggttgtaatcatatacttcgctctgaacagcgctatcaagccaatcgtcaatgtggcggacacgctcaaagaaatatccgaaggcgaaggcgatctgactcgaaccgttgacatccattcgcaagacgaggtaggcgaccttgccaactactttaacaagacattgaaaaaaataagagagcttataagcgcgataaagtacaaaatcaacggtcttgcccataccagctatgagctttccgtcaatacgggcaaaacttctacagccgtgcgggatatttcatcgaatcttgacaacatgaaatctctcatggtcaagcaggaaaccagtacaaacgaagccggcaaagcggtaaacaatattaaagaaaacattgacagccttaaaaaaatgatagaagaacagaccgaaagcgtaaacgtatcgtcctcagccatcgaggaaatgacggcaaacatcaactcggtaacaaaaacccttgtggacaacagcagaaatgtcgcggccttaaccgaagcttcggaaaacggcaaagcgggcgttcagacagtggcgcaggagatacaggaaatatcacgggactccgaaggtcttttggaaataaacgccgtaatggacaatatcgccagcgagaccaacctgctttcgatgaacgccgcgattgaagcggcgcacgcgggggaagcgggcaaaggtttctcggtagttgccgaagaaatccgcaaactcgccgaaagctcaagcgatcaatccaaaacgattggcaatgttttgaagaagataaaagaatcaattgacaagataaccaaatccgccgagaccgtaacaacgaggtttgaggcgatagattcaagcgtcagaacggtggcggatcaggaagaaaacatcctcaacgctatggaagaacagggagaaagaagcgatacgagcaacgccagtttgacccaaattacacatcttgtaaaaaccggttccgaagagatgcttgagggcagtcaagaagtaatgaaggaaagccagaatcttgaaaaggtaacgcaggaaataacaggcggtatgaacgaaatggcaagcggagcggatcagataaacttagcggtaaacaacgtcaatgatatgactgtcaaaaaccgcgacgccatagacagtttaataaaggaagtttcaagatttaaggtcgaatga

SEQ ID NO: 57708 - protein, 444 aa, Unknown
  Obtained from environmental sample
  DOMAIN (183)...(409): Methyl-accepting chemotaxis protein (MCP) signaling domain
  misc_feature (1)..(444): Xaa is any amino acid
MRIEMASFKIGNSTNNWSVMIASTEKYIMRDVVAMRNFVIVMALVAIAAAVVIIYFALNSAIKPIVNVADTLKEISEGEGDLTRTVDIHSQDEVGDLANYFNKTLKKIRELISAIKYKINGLAHTSYELSVNTGKTSTAVRDISSNLDNMKSLMVKQETSTNEAGKAVNNIKENIDSLKKMIEEQTESVNVSSSAIEEMTANINSVTKTLVDNSRNVAALTEASENGKAGVQTVAQEIQEISRDSEGLLEINAVMDNIASETNLLSMNAAIEAAHAGEAGKGFSVVAEEIRKLAESSSDQSKTIGNVLKKIKESIDKITKSAETVTTRFEAIDSSVRTVADQEENILNAMEEQGERSDTSNASLTQITHLVKTGSEEMLEGSQEVMKESQNLEKVTQEITGGMNEMASGADQINLAVNNVNDMTVKNRDAIDSLIKEVSRFKVE

SEQ ID NO: 57709 - DNA, 948 bp, Unknown
  Obtained from environmental sample
  misc_feature (1)..(948): n is a, c, g, or t
ttgcgcgcagatctcacggcatggatgccgcggcgtttaaactgtcatagggacagaaagcgccgaaaaagccaaaggagtgagtatatgataatcaatcacaacttaagtgcaatgtttgccgacaggtccctcaaggttacccaggtgttcctggataagaatatggagaaattgtcgagcggacttcgcatcaaccgcgcaggtgatgatgcatccggtcttgcagtatcagaaaaaatgcgttcgcagattcgtggtttgaatcaagcgtcaacaaacgcccagaatggtatttcattcattcaaacagcggaaggttatctgcaagaatccgaagacatcttacagcgtttacgcgaattagcaatccagtcttcgaacggtatctattccgacgaagacagaatgtacatccaggttgaagtttctcagctcgttgacgaagtagacagaattgcgtcacacgcacagttcaacggcatgaacctattgacaggtcgtttcggccgcccggtaggcgagaacgtggttacagcgtccatctggttccatatcggcgccaacatggatcagcgcgaacaagtttatatcggcacaatgacaacgaagggtctcgggatccgcaatgtcggtgacgatacctttatttcactggccgatccggacagtgccaaccgtgccattggaaccatcgacaaggcgttaaagctcatcaacaaacaaagagccgatcttggcgcctatcagaatcgccttgagcacgcagtacgcggtctcgatgtaggagcagaaaacatgcaagcatccgagtcccgcatccgcgacgccaacatggcgaacgagacggtaggttacaccaagaacatgatcttgacccaagctggaacagcaatgctggcgcaagccaatcagagaggtcaatcggttctacagcttctgcagtaa

SEQ ID NO: 57710 - protein, 315 aa, Unknown
  Obtained from environmental sample
  DOMAIN (222)...(293): Bacterial flagellin C-terminus
  misc_feature (1)..(315): Xaa is any amino acid
MRADLTAWMPRRLNCHRDRKRRKSQRSEYMIINHNLSAMFADRSLKVTQVFLDKNMEKLSSGLRINRAGDDASGLAVSEKMRSQIRGLNQASTNAQNGISFIQTAEGYLQESEDILQRLRELAIQSSNGIYSDEDRMYIQVEVSQLVDEVDRIASHAQFNGMNLLTGRFGRPVGENVVTASIWFHIGANMDQREQVYIGTMTTKGLGIRNVGDDTFISLADPDSANRAIGTIDKALKLINKQRADLGAYQNRLEHAVRGLDVGAENMQASESRIRDANMANETVGYTKNMILTQAGTAMLAQANQRGQSVLQLLQ

SEQ ID NO: 57711 - DNA, 519 bp, Unknown
  Obtained from environmental sample
  misc_feature (1)..(519): n is a, c, g, or t
atgcaaaaggatatttttattttattcgcgaagtacaacaaaactgtaaaccaaaaaatgaatgaggtaataaaaaccctctcgaaagaagaatgggataaaaatctgggcgggttttttaattccgtcaggagcctttgttcccatctttacatctgcgatttcaactggctgaaacgcttttcccgcttcagggaatttgatgcttttaagggagccttttttgcgagagaaccgtatccattcaaagaagtacttttcgcggatatgaatgaatacctgaccagccgacctctgttagacgaaaggatcatcgcttttgtaaatgaagcagacgaaaaagatttaaactctgttttaaaatattccgattctgaagggaatacctacgaacggaattttggcagccttgtcatgcatagcttcaatcacgatactcatcaccggggaatgatttcactttatctggaaatgctgggccgtgaaaatgattttggttctttaagcgccatactctaa

SEQ ID NO: 57712 - protein, 172 aa, Unknown
  Obtained from environmental sample
  DOMAIN (1)...(166): DinB family
  misc_feature (1)..(172): Xaa is any amino acid
MQKDIFILFAKYNKTVNQKMNEVIKTLSKEEWDKNLGGFFNSVRSLCSHLYICDFNWLKRFSRFREFDAFKGAFFAREPYPFKEVLFADMNEYLTSRPLLDERIIAFVNEADEKDLNSVLKYSDSEGNTYERNFGSLVMHSFNHDTHHRGMISLYLEMLGRENDFGSLSAIL

SEQ ID NO: 57713 - DNA, 1686 bp, Unknown
  Obtained from environmental sample
  misc_feature (1)..(1686): n is a, c, g, or t
gtgattgaacacccntacattatggaaacggttaccacaaccggctccgtggacaaagattcgggaagcgaaggcattattattccctcatntgcggataacggggtgggcagcctttcagtaattctggacgctacgcgcctgagcttgctggattcagccatcacttaccttttccgctatccttacggatgtatggaacaacgcagcgcggcgatcatgccgctggtaattttcggcgaataccttgacgctctgggcctgaaaagcgaggtttccaatccccggcaggtggtggagaacgaacttaagtcatgggcgaaagtacagctttccggcgggggctttccctactggccttccggtacagaagccaacttctatgtcagtttgcggatagcccatattatcgccatcgcgcaatcaaagaaaatcaaggttccttcctcgctgaatacagcggaccttaacgcgtaccttacccgtgaatatcaggaattacagggttggcgcgtcaattcatcgtcatattattatcaatcgtatttacagtcgtatatgctgtatgtccaggctctgctcggcgaaaaagtcgatccgtcccggttagctgaaatcttgagccgcgataatgtagacccgtcaacgcttgcctttgcgggcatgacataccgcgccctgggccggagcgccgatgccgcgactaccgcgcagcgcctgcgcaaccttgtccgcatgactgccagaggcgcggacattaccgatcctctggataaacaccgttacaattattacggcggcatggttgaacaacttgccctgaccttgcaattttttgtggctcagtatccgggggatgaaatcaatacgcggctgctcttttcactgttggagaataagcgttccggcagggaatattgggaaagcacggcggtaacggtgcgggttctttcggcggtggacgctttaatccgggcggagaaccttaccaaccttgacgtaaacggaacggtgacattggcgggaacggaactcctcaagggcgcgttcaaaggcctgggggcaaagcccgttacgggaacatttgattttaaagaatcggttttaacgggccttccgcgggacagtctgcaacccctgaattttacccgcaaaggcaggggtactctctattacaccgcttctcttcgttatgcgataccgtttgagattcaatctttccgcgatgagggcatcggggtttttatgagcatctacgatataaataccggcgaagaaatcaagggaaccgccctgcacaacggaaaaacctaccgcgccagagtaagagtgtcctcaaaccgggaccgtacttaccttgccctgcgcgtccccgttccttccggcgcggagattctggacgcggcgtttgttaccaccgcttcatatcaggataaaggcggcgccgatggcggcgcaaacagagacgaaaagatacgcccaagttcatggataagccaccagcttatcatggacaatgagattcaatatttctgggatcagtttaacaaaggggagtcaacggtcaattttcttttccgttcggcgagaaggggcgtataccccacgccgccggttcaggccgagtgtatgtatgaagcggaaattttcggacgcggtacggggcttctttatactattgaatag

SEQ ID NO: 57714 - protein, 561 aa, Unknown
  Obtained from environmental sample
  misc_feature (1)..(561): Xaa is any amino acid
MIEHPYIMETVTTTGSVDKDSGSEGIIIPSXADNGVGSLSVILDATRLSLLDSAITYLFRYPYGCMEQRSAAIMPLVIFGEYLDALGLKSEVSNPRQVVENELKSWAKVQLSGGGFPYWPSGTEANFYVSLRIAHIIAIAQSKKIKVPSSLNTADLNAYLTREYQELQGWRVNSSSYYYQSYLQSYMLYVQALLGEKVDPSRLAEILSRDNVDPSTLAFAGMTYRALGRSADAATTAQRLRNLVRMTARGADITDPLDKHRYNYYGGMVEQLALTLQFFVAQYPGDEINTRLLFSLLENKRSGREYWESTAVTVRVLSAVDALIRAENLTNLDVNGTVTLAGTELLKGAFKGLGAKPVTGTFDFKESVLTGLPRDSLQPLNFTRKGRGTLYYTASLRYAIPFEIQSFRDEGIGVFMSIYDINTGEEIKGTALHNGKTYRARVRVSSNRDRTYLALRVPVPSGAEILDAAFVTTASYQDKGGADGGANRDEKIRPSSWISHQLIMDNEIQYFWDQFNKGESTVNFLFRSARRGVYPTPPVQAECMYEAEIFGRGTGLLYTIE

SEQ ID NO: 57715 - DNA, 972 bp, Unknown
  Obtained from environmental sample
  misc_feature (1)..(972): n is a, c, g, or t
gtgattgacattcccattgcgcgtaactatgtgccggtggtttatgtggcggtttcgtcctattctgtgcgctccggcccacccacccatgaatacggcagccccgacctggacaagcccaaaggttatttcggcgtaacgcggctcagtgtgaatccccgggcgcgggcattttcggttaaggtggaaagcaacaagaaaacctaccgtcccggagaagaagttaccatgacccttaccgcgagcaaggacggcaaagccctgcctaacgcggaacttaccctgatggctgtagaccggggcgtattggatcttatcaattaccatgtgcccgacccgataaagtatttttatgccgaagaccgctttcccctcatggtggcgggcggcgattcccgttcatggcttatggatcctgttacctacagcgtcaaaaacctcgccggcggcgacgcggaaggcgagagtaaaattgaggaacgcaaggactttaaccccaccgcggtatttgagcctatgctgataaccgatgattcgggcaaggttacctgcaaattcaaactccccgataatcttaccacatatcgcgtaacggtattcggggtgcggggcgatattttcgcccttaaagaaagcgagattgccgcccagaacaaaataaacgtacatgaagttctgccccggcgcacacgggaaagggataccgccgaagcgggggtgcttatcaccaacctcgactcgtcgtcccataccctgtctgtcaggcttgatataggcccgcccctgcccaatgatgaatcaagcggaatgaaaaaaattaccggtcaggcttttgttgacggaattttcgagcgccgcgtaacggtaaaaagcggcgagaacgccgtggtgtattttgacgtggctgcggtaaggaaggaaatgttacgcttaactttaccatcaattcggatattctcaatgaaaggctga

SEQ ID NO: 57716 - protein, 323 aa, Unknown
  Obtained from environmental sample
  DOMAIN (167)...(262): Alpha-2-macroglobulin family
  misc_feature (1)..(323): Xaa is any amino acid
MIDIPIARNYVPVVYVAVSSYSVRSGPPTHEYGSPDLDKPKGYFGVTRLSVNPRARAFSVKVESNKKTYRPGEEVTMTLTASKDGKALPNAELTLMAVDRGVLDLINYHVPDPIKYFYAEDRFPLMVAGGDSRSWLMDPVTYSVKNLAGGDAEGESKIEERKDFNPTAVFEPMLITDDSGKVTCKFKLPDNLTTYRVTVFGVRGDIFALKESEIAAQNKINVHEVLPRRTRERDTAEAGVLITNLDSSSHTLSVRLDIGPPLPNDESSGMKKITGQAFVDGIFERRVTVKSGENAVVYFDVAAVRKEMLRLTLPSIRIFSMKG

SEQ ID NO: 57717 - DNA, 2115 bp, Unknown
  Obtained from environmental sample
  misc_feature (1)..(2115): n is a, c, g, or t
ttgacgctgaccttcagccaggctatcaccgggcttaccgcaagtgatatcagtctgagcggcgtgtccggagtaagcaagggaactctcagcggttcagggtcaacctacaccctgccaatcagcggatttacctcgggcggaagtttgaatgtatcggtatcgaaaacaggctacaacataagtgattcgcagaaaacggtaacgatttatttctctcccattcctgtttctttcaacagcataagtgcgaatggctccagcacagagactacaacacagttgacgctgaccttcagccaggcaattaccgggcttaccgcaaacgatatctattttatcggagtatcaccaagcgtaaccaagggaacactcagtggttcaggaccgacatacacattgcctatcactgttactacgggtggaacattgacagtagaagttgataaattgggttataccataaacgaaccgcaaaaaacagtaactattttttactatacgcctccaatccctgttactttctacaacgtaagcgcgaacggttccgattcctcggcaacaacgcagttgacgctaacctttagccagagaattaccggacttagcgctgacgacatagccctgagtggagtatcagatgtaactaaagggacacttagcggatcaggaccaacctacacattaccgataaccgttactgaaggcggaacattgaatgtagcggtatcgaaaacaggctatgatataaacagttcacctcaacaggtaactatttactatgtcgttattcctacaaacgcagggctatacttgaaagctgataatgtatatacctctgttaatgtagattatgctaaccttaatactgtaataaattacgtaaataacaacgccgcaagcggcgcatatctacttgttgtcggcgagaacattacagccccgagcacagtacaagcgcttaatcagaataacgccaaccttaccataatcgggacaggtgcgacaagaacaatcagtcttccctccagcggctcgttgtttactgtaggctccggcgctacccttatactggacaataacattaccctggttgggcgatcgggtggtacaaataacaacaataccagtcttgttaaggtaaactccggtggtaaactggagatgtgggaaggatcgcttgttaccggtaataccatccgtccattatccctaaacgacggcaacacctccaacggtggaggggtttatgtgtccagcggcggaacctttaccatgaacggcgggaaaatttccggtaatactactaatgctgtctctcttaccagttccatttcaaaaggcggcggggtgtataataagggaaccttcaccatgagcagcggggaaatttcaggtaatacatcatcctctagtacccaaaatggcggtctctgcagatcctacggtggcggcgtatatgtgtccagcaacggaaccttcaccatgagcggcggggaaatttccagcaatacagccacgcaagccttcggcggtggggtgtctgtcactcaaaatggaactttcaccaaatcaacagaaggcgggattatttacggatatatcgcaggagatgataaaagtaacgtggtaaaagaagaagattccgacaatgtgttgaataactccggtcatgcagtggatgtacgagttggatattatgaagaaaatagccgccacagggatagcactgtttatccttatgaagagttgtcttatgacggcaatggaacttttaccggaaactgggatgcagtatctccgccgatcattgacagtaccctgaacgtaacatttaccggccccaccgataaagttatcactgtcgaaaaaaccattaccaataatttatcaaaaagcggcggaggttctgttaccctgaacatcaccgagcattttgataaatacgcatggtatatcgggggaaccaaagttggcgaatcaacaacggcaagcaatgttaccttgcaggctggtaatcccgcttttaatccgggcataaactggataaccgcggtggtttataccggcacaacgccctggtcggggaaaattgcggtaatagtcaacgagtag

SEQ ID NO: 57718 - protein, 704 aa, Unknown
  Obtained from environmental sample
  misc_feature (1)..(704): Xaa is any amino acid
MTLTFSQAITGLTASDISLSGVSGVSKGTLSGSGSTYTLPISGFTSGGSLNVSVSKTGYNISDSQKTVTIYFSPIPVSFNSISANGSSTETTTQLTLTFSQAITGLTANDIYFIGVSPSVTKGTLSGSGPTYTLPITVTTGGTLTVEVDKLGYTINEPQKTVTIFYYTPPIPVTFYNVSANGSDSSATTQLTLTFSQRITGLSADDIALSGVSDVTKGTLSGSGPTYTLPITVTEGGTLNVAVSKTGYDINSSPQQVTIYYVVIPTNAGLYLKADNVYTSVNVDYANLNTVINYVNNNAASGAYLLVVGENITAPSTVQALNQNNANLTIIGTGATRTISLPSSGSLFTVGSGATLILDNNITLVGRSGGTNNNNTSLVKVNSGGKLEMWEGSLVTGNTIRPLSLNDGNTSNGGGVYVSSGGTFTMNGGKISGNTTNAVSLTSSISKGGGVYNKGTFTMSSGEISGNTSSSSTQNGGLCRSYGGGVYVSSNGTFTMSGGEISSNTATQAFGGGVSVTQNGTFTKSTEGGIIYGYIAGDDKSNVVKEEDSDNVLNNSGHAVDVRVGYYEENSRHRDSTVYPYEELSYDGNGTFTGNWDAVSPPIIDSTLNVTFTGPTDKVITVEKTITNNLSKSGGGSVTLNITEHFDKYAWYIGGTKVGESTTASNVTLQAGNPAFNPGINWITAVVYTGTTPWSGKIAVIVNE

SEQ ID NO: 57719 - DNA, 732 bp, Unknown
  Obtained from environmental sample
  misc_feature (1)..(732): n is a, c, g, or t
atgggatcagaaatcggcacgagcttgaggaaaataccgggcgaagaagccttccccgcgtatcttgaatcaacgattgccagtttctatgaaagggcgggtatcgtaaggctcaaggacggcaaccttggatcggtaactatcggcggtacggtcagcccggcgggtggtaactttgaagagcctgtaacccaggccaccctgaaagtcgtcggagccttccacggcctttcccgcgaacgctctgacgctcgtaagttccccgcaatacacccgatggactcatggtcaaaatacaagggcatcataagcgccgagaaagtcggttacgcccacggatttatgcgccgcggaaccgaggttgagcagatgatgaaggttgtcggcgaggaaggaaccagcatagaagactatgtagtatacctgaaaggcgaccttatcgactccgtgtacttccagcaaaactcgtttgacgaagtagacgcggcggtaaagccggatcggcagatatacacctttaataaactgcttacgatactcgcttcgcagttcagtttccccgataaaaacgaggcccgtgtctggttcaacaggctaaggcaaaaattcctggactacaacggttcgcattggcaggacgcccgctttaaggaactggaaaaggaaatcgaggacgctgttaagaaacagtcaaaaggcctggacaaggccgcccagcatattttggcatag

SEQ ID NO: 57720 - protein, 243 aa, Unknown
  Obtained from environmental sample
  DOMAIN (1)...(97): ATP synthase alpha/beta family, nucleotide-binding domain
  misc_feature (1)..(243): Xaa is any amino acid
MGSEIGTSLRKIPGEEAFPAYLESTIASFYERAGIVRLKDGNLGSVTIGGTVSPAGGNFEEPVTQATLKVVGAFHGLSRERSDARKFPAIHPMDSWSKYKGIISAEKVGYAHGFMRRGTEVEQMMKVVGEEGTSIEDYVVYLKGDLIDSVYFQQNSFDEVDAAVKPDRQIYTFNKLLTILASQFSFPDKNEARVWFNRLRQKFLDYNGSHWQDARFKELEKEIEDAVKKQSKGLDKAAQHILA

SEQ ID NO: 57721 - DNA, 618 bp, Unknown
  Obtained from environmental sample
  misc_feature (1)..(618): n is a, c, g, or t
gtgttggttatctcgccgctttgcgccgaaagttcgccgaaagtattgattattccggtcatggtttcggcaaaactgctgatttcttttgccattgcggtaatccgcgttccggtgtcaccggattgtttctcggtaacagttactccgttgatgatgcttttcagcgtcttggcaatgttcaccgaattttcacgggtgctgtcggaaaggcggcgtatttctccggcaaccaccgcaaagcccctgcccgcctctcccgcgtgcgcggattcaatagcggcgttcatggacaataaattggtgttagccgctatcgcgctgattattttaatcgcctccgatatgccttcaactgattttgaaatttcttcaatcgactgtattgtctcgcgcatggatgtctggcttttggctgtgtcttctatcaatcctttaatggccacttgtttttttcgggaaatttccgaagtttccctgagtgagtctatcattttttcggttgccgccgaagattgggcgattgtatccgcctgtgaaatgatggcggcgttcagtttattaattaatttgttaattccttcgataaggccggacgccatggcgatgtgttcctga

SEQ ID NO: 57722 - protein, 205 aa, Unknown
  Obtained from environmental sample
  misc_feature (1)..(205): Xaa is any amino acid
MLVISPLCAESSPKVLIIPVMVSAKLLISFAIAVIRVPVSPDCFSVTVTPLMMLFSVLAMFTEFSRVLSERRRISPATTAKPLPASPACADSIAAFMDNKLVLAAIALIILIASDMPSTDFEISSIDCIVSRMDVWLLAVSSINPLMATCFFREISEVSLSESIIFSVAAEDWAIVSACEMMAAFSLLINLLIPSIRPDAMAMCS

SEQ ID NO: 57723 - DNA, 1179 bp, Unknown
  Obtained from environmental sample
  misc_feature (1)..(1179): n is a, c, g, or t
gtggcgttatggcttgttgacatggaaaatagaaaagttatcacttcacataacgcatataacggtcaaattgagtgcggtttggacgtgatcagccgaattaattacgctagaaaattccttcccgaattaaaatcacggatattaaaaacaattaatgaattattatccgccgcctgtaaagagacgggaatcgaaacaaatcaaattctttacgtatccgcggcaggaaatacaacaatgattcacttgctgttaggcgtaatccctgaatacatccgtctttccccatatactcccgccgttttcctaccgcaatgttatacggcgggtcagatagggatcaatgtgtgtgaaaacgcacccgtacttatcgcccccgccgtgggaagctatgttgggggagacataacagcgggaatactttgtaccgctcttgccgcgccgcaaaaatattcaggcggacttattttatttatagacattggcactaacggagaaattgttcttggaaatgaagattttatttttgcctgcgcctgttccgccggccccgctttcgagggcggtggaattaaacacggagtacgcgcatgttcaggcgcgatagaaagagtagtgattgatgaaaacggtaaaccgcaaatcttcacaatcggcggcgcggaccctatcggtatttgcggatcgggggtaatttccgccatcgcggaacttttcaggaaggggattattgactccgccgggaagttttcgcaaaaaaaaggcgagttttttctttgcgatggaatttcgcttaatgaaagcgacattaataattttatccgcgcaaagggcgctattttttccgcatgccaaacaatgcttgacaacgctggaatgtcgtttaacaatgtggaaaaattttatgtagcgggcggttttggaagatttctcgatcttgaagacgcaagaacaatcggcttactgccgcgccttccaaatgaaaagtttgccttcctcggtaacacctcagttttgggcgcgtaccttactctagttagcgaagagagaagggaaaaaatgcttgagcttgccaataaaataacgtacatggatttaagcagtgaggctaattatatggatagatatacgggggctctttttttaccgcatacggataggaaattgtttgagtga

SEQ ID NO: 57724 - protein, 392 aa, Unknown
  Obtained from environmental sample
  misc_feature (1)..(392): Xaa is any amino acid
MALWLVDMENRKVITSHNAYNGQIECGLDVISRINYARKFLPELKSRILKTINELLSAACKETGIETNQILYVSAAGNTTMIHLLLGVIPEYIRLSPYTPAVFLPQCYTAGQIGINVCENAPVLIAPAVGSYVGGDITAGILCTALAAPQKYSGGLILFIDIGTNGEIVLGNEDFIFACACSAGPAFEGGGIKHGVRACSGAIERVVIDENGKPQIFTIGGADPIGICGSGVISAIAELFRKGIIDSAGKFSQKKGEFFLCDGISLNESDINNFIRAKGAIFSACQTMLDNAGMSFNNVEKFYVAGGFGRFLDLEDARTIGLLPRLPNEKFAFLGNTSVLGAYLTLVSEERREKMLELANKITYMDLSSEANYMDRYTGALFLPHTDRKLFE

SEQ ID NO: 57725 - DNA, 309 bp, Unknown
  Obtained from environmental sample
  misc_feature (1)..(309): n is a, c, g, or t
gtgcctatttttttgacaatagatgattatggcaaagaaatcactttgaatgattttatttcatactttgaaaagggaccttattcatataaaagcggtttggattatgtcgggcaaacaaattatgaagccaaagaatgttattggtatatgcataaattttccgacataataaattcaatcgtaagtaatggtttggaaatagaagaaattaaagaatataacctaaaaactccaaataatgcggaaccgccaaagaacatgaaaaagtttccgttaaattatatgttatattgtagaaaaaggtaa

SEQ ID NO: 57726 - protein, 102 aa, Unknown
  Obtained from environmental sample
  misc_feature (1)..(102): Xaa is any amino acid
MPIFLTIDDYGKEITLNDFISYFEKGPYSYKSGLDYVGQTNYEAKECYWYMHKFSDIINSIVSNGLEIEEIKEYNLKTPNNAEPPKNMKKFPLNYMLYCRKR

SEQ ID NO: 57727 - DNA, 2427 bp, Unknown
  Obtained from environmental sample
  misc_feature (1)..(2427): n is a, c, g, or t
ttggccacggctacttgtagctggtcgggcagcggcgcaaaagatgcggcgcggtcacgaaaaagcctagcggtcgaagaccgccattgctacaataacaaattcgacgcgaatggacctgcgatgcttgacaacctgctgaagaaacttattggctccaagaacgacagggagctgaggcgcctctgggccaaggtggtgctgatcaacgcgctggagcctgaaatccaggtccttaccgaccaggagcttaaggccaagaccccgcactttcgtgagaggctagccgccggggagtcgctggaggacatactgcccgaggccttcgccgtggtgcgcgaggcatcgctccgcgtcctcaagatgcgccacttcgatgtccagctcataggcggcatggcactccacgagggcaaggtggcagaaatgaggacaggcgagggcaagacgctcaccgccacgctgccgctgtaccttaacgcgctggcgggcaggggggcgcacctggtgacggtgaacgactacctggcaaggcgcgacgccgagtggatgggccgcatatacaacttcctgggcatgacggtggggatcatccagcacggcctttcggacgcgcagcgcagggaggcctacgccgccgacattaccttcggcaccaacaacgaattcggcttcgactacctgcgcgacaatatgtccggcgcgccggagcagtgcgtgcagagggagttgaacttcgccatcgtcgacgaggttgacaacatactgatagacgaggcgcgcacgccgcttatcatatcggggcctgtcacgaaatcaaaccgcgagtacgaggagctcaaaccccgggttgtcaagttggtcaacgcccaagccgcactgacgcagaaggttgtggacgaggccgaggagttgctgaagcaggacggcaaggagttcgaggccggattcaaactcatggtcatgcacaagggcgcgcccagaaacaagcgcttcctgaaacttataaaagaacagggcgcggcgaagtacatgaagatggtggaaacggagtttctgcgtgacaagaaattgcacgagattgacgaggaactttactacacgatagacgagtcgggccatagcgccgatctcaccgagaaggggcgtactctggtgggcgggaataaccccgagttcttcaccgtgcccgacttggccgtaacgctaggcaagatagaccacgacgaggcgctctccgttcaggagaaggcggagcacaaagaggcggcgcatcgcgagtacgcggagatatcggagcgcatccacagcgtcgggcagttgcttcgcgcctactcgctttttgaaaaggacgtcaactacgtggtgcaggatgggcagatactcattgtggacgagttcaccggccgcatactgcacgggcgccgctacagcgaggggctccaccaagcgctggaggcgaaggagggggtgaaggtcgcgggggagaaccaaacgctcgccaccatcaccttccagaatttcttcaagatgtacaacaagctcgccggtatgacgggcacagccgtcacggaggcggcggagttccaagagatatacaagctcgacgtggtgaccatacccaccaaccgcgggttgaagaggatggactacgacgacgagatatacaagacgcaccgcgagaagtacaatgccatagtgcaggacataaagacgatgaacgaactcggccgcccgtgtctggtcggcacgacgtctatagagaaatcggagcttctgagccggatgctgttgcgggcgggcgttcagcacgaggtgttgaacgcgaaacagcacgcgaaagaggcggcgattgtcgcccaagccggccgcctcagcgcggtgacgatcgccactaacatggctggccgcggtacggacatagttctcggcggcaacttcgaggctatggcgaaccacgatctgcacaaggagggcgtagaccccgaaacgctgacgctcgaggaaaagcgccaaaagttcgccaaactcttcgcgcaggtagcggaggagcacgacaaagtgctgagcctcggcgggctgcacataataggtaccgagcgccacgagagccgccgcatagacaaccagctgcgcgggcgcgccggacgccagggcgaccccggatcgtcaaagtttttcctgtcgatagacgacgacctgatgcgcatattcggcgccgagagaatcaggatggttatggacaaactcggcacgccgggaggcgaggcgataagcccccgtgggtctccactcgatagccggcgcccaaaaacgcgtggagggccgcaacttcgacatccgcaaacatttgaaagagtacgacgacgtgatgaacctgcagcgtcgcgagatatacggcctgcgccagcgcatattgcgcggtga

SEQ ID NO: 57728 - protein, 808 aa, Unknown
  Obtained from environmental sample
  DOMAIN (336)...(486): SecA preprotein cross-linking domain
  misc_feature (1)..(808): Xaa is any amino acid
MATATCSWSGSGAKDAARSRKSLAVEDRHCYNNKFDANGPAMLDNLLKKLIGSKNDRELRRLWAKVVLINALEPEIQVLTDQELKAKTPHFRERLAAGESLEDILPEAFAVVREASLRVLKMRHFDVQLIGGMALHEGKVAEMRTGEGKTLTATLPLYLNALAGRGAHLVTVNDYLARRDAEWMGRIYNFLGMTVGIIQHGLSDAQRREAYAADITFGTNNEFGFDYLRDNMSGAPEQCVQRELNFAIVDEVDNILIDEARTPLIISGPVTKSNREYEELKPRVVKLVNAQAALTQKVVDEAEELLKQDGKEFEAGFKLMVMHKGAPRNKRFLKLIKEQGAAKYMKMVETEFLRDKKLHEIDEELYYTIDESGHSADLTEKGRTLVGGNNPEFFTVPDLAVTLGKIDHDEALSVQEKAEHKEAAHREYAEISERIHSVGQLLRAYSLFEKDVNYVVQDGQILIVDEFTGRILHGRRYSEGLHQALEAKEGVKVAGENQTLATITFQNFFKMYNKLAGMTGTAVTEAAEFQEIYKLDVVTIPTNRGLKRMDYDDEIYKTHREKYNAIVQDIKTMNELGRPCLVGTTSIEKSELLSRMLLRAGVQHEVLNAKQHAKEAAIVAQAGRLSAVTIATNMAGRGTDIVLGGNFEAMANHDLHKEGVDPETLTLEEKRQKFAKLFAQVAEEHDKVLSLGGLHIIGTERHESRRIDNQLRGRAGRQGDPGSSKFFLSIDDDLMRIFGAERIRMVMDKLGTPGGEAISPRGSPLDSRRPKTRGGPQLRHPQTFERVRRRDEPAASRDIRPAPAHIAR

SEQ ID NO: 57729 - DNA, 900 bp, Unknown
  Obtained from environmental sample
  misc_feature (1)..(900): n is a, c, g, or t
gtggcgctcggtacctattatgtgcagcccgccgaggctcagcactttgtcgtgctcctccgctacctgcgcgaagagtttggcgaacttttggcgcttttcctcgagcgtcagcgtttcggggtctacgccctccttgtgcagatcgtggttcgccatagcctcgaagttgccgccgagaactatgtccgtaccgcggccagccatgttagtggcgatcgtcaccgcgctgaggcggccggcttgggcgacaatcgccgcctctttcgcgtgctgtttcgcgttcaacacctcgtgctgaacgcccgcccgcaacagcatccggctcagaagctccgatttctctatagacgtcgtgccgaccagacacgggcggccgagttcgttcatcgtctttatgtcctgcactatggcattgtacttctcgcggtgcgtcttgtatatctcgtcgtcgtagtccatcctcttcaacccgcggttggtgggtatggtcaccacgtcgagcttgtatatctcttggaactccgccgcctccgtgacggctgtgcccgtcataccggcgagcttgttgtacatcttgaagaaattctggaaggtgatggtggcgagcgtttggttctcccccgcgaccttcaccccctccttcgcctccagcgcttggtggagcccctcgctgtagcggcgcccgtgcagtatgcggccggtgaactcgtccacaatgagtatctgcccatcctgcaccacgtagttgacgtccttttcaaaaagcgagtaggcgcgaagcaactgcccgacgctgtggatgcgctccgatatctccgcgtactcgcgatgcgccgcctctttgtgctccgccttctcctgaacggagagcgcctcgtcgtggtctatcttgcctag

SEQ ID NO: 57730 - protein, 299 aa, Unknown
  Obtained from environmental sample
  misc_feature (1)..(299): Xaa is any amino acid
MALGTYYVQPAEAQHFVVLLRYLREEFGELLALFLERQRFGVYALLVQIVVRHSLEVAAENYVRTAASHVSGDRHRAEAAGLGDNRRLFRVLFRVQHLVLNARPQQHPAQKLRFLYRRRADQTRAAEFVHRLYVLHYGIVLLAVRLVYLVVVVHPLQPAVGGYGHHVELVYLLELRRLRDGCARHTGELVVHLEEILEGDGGERLVLPRDLHPLLRLQRLVEPLAVAAPVQYAAGELVHNEYLPILHHVVDVLFKKRVGAKQLPDAVDALRYLRVLAMRRLFVLRLLLNGERLVVVYLA

SEQ ID NO: 57731 - DNA, 897 bp, Unknown
  Obtained from environmental sample
  misc_feature (1)..(897): n is a, c, g, or t
gtgggtctccactcgatagccggcgcccaaaaacgcgtggagggccgcaacttcgacatccgcaaacatttgaaagagtacgacgacgtgatgaacctgcagcgtcgcgagatatacggcctgcgccagcgcatattgcgcggtgagaatttgaaagacgagatactcgaccaaatagccaacgccgttgaagacattgtgatgaaatatgcccccgaacgcgtctactcggaagagacatggagcataagcggtttgcgcgacgaggtgcagaccatgttcggcgtgctgtacagcccggaacaggtgaaagttgagtcgatgaaccaaaaggagttgtttgacgatgtgtgggaactcgttgagaaacgctatacggagaaagaggagcgtttcggcgcggaatctatgcgccgctttgagcgcggcgtttttctcatggtgatagacgacctgtggaaggatcacctcttcgagatggatcacctgaaaggcggagtgcagttccgggctttcggtcagaagaacccgctcttcgagtaccagcgcgaggggctgcagatgtttaaggagttgcgcgccaacatttcgaaggagatatcgaactacatcttccgtttggaaaacgttgagcgcaagccgtcgtcgagcgcgttcgccggggcgagggcggtgcacgacgccgcgcagacactgttcggcggcgcgacgtctacgtcgtcgggcggcgcggagggggcgtcgataaatgttcgccccaggggaatgtccggggccactatgacgaccaataggggaggggaggacgggcgtccggttcagcagcagccgatacgggtggggccgaaaggggggaggaacgatccctgtcctttgcgggagcgggaagaagtataa

SEQ ID NO: 57732 - protein, 298 aa, Unknown
  Obtained from environmental sample
  DOMAIN (5)...(209): SecA Wing and Scaffold domain
  misc_feature (1)..(298): Xaa is any amino acid
MGLHSIAGAQKRVEGRNFDIRKHLKEYDDVMNLQRREIYGLRQRILRGENLKDEILDQIANAVEDIVMKYAPERVYSEETWSISGLRDEVQTMFGVLYSPEQVKVESMNQKELFDDVWELVEKRYTEKEERFGAESMRRFERGVFLMVIDDLWKDHLFEMDHLKGGVQFRAFGQKNPLFEYQREGLQMFKELRANISKEISNYIFRLENVERKPSSSAFAGARAVHDAAQTLFGGATSTSSGGAEGASINVRPRGMSGATMTTNRGGEDGRPVQQQPIRVGPKGGRNDPCPLREREEV

SEQ ID NO: 57733 - DNA, 480 bp, Unknown
  Obtained from environmental sample
  misc_feature (1)..(480): n is a, c, g, or t
atgagaaaacagcttgtatgttgtaccattaacggcaaggccatggaaaccatggtggacatccgcgcgtcgctgacggatatgctgcgtaatgagtaccgcttgaccagcgttaaaaaaggctgcgaggtgggcgaatgtggcgcctgcaacgtgatcatcaacggggagtgtttcaattcctgcatttacctcgcaatctgggccgaaggcaaggagattaccaccaccgaagggctattaagcgccgacggggaactctccgcaatccagcaggcgttcatcgacgagggcgcggtgcagtgcggtttttgcacgccgggctttttgatgagcgccactgagatcatacgctccggaaaaacctacagcgacgcggaactgcggaaactgctgtccgggcatctttgccgctgcacgggctatgagaacatattccgcgccgtaagaaaacttgctggtcaaaaatcgaaaagctaa

SEQ ID NO: 57734 - protein, 159 aa, Unknown
  Obtained from environmental sample
  DOMAIN (76)...(151): [2Fe-2S] binding domain
  misc_feature (1)..(159): Xaa is any amino acid
MRKQLVCCTINGKAMETMVDIRASLTDMLRNEYRLTSVKKGCEVGECGACNVIINGECFNSCIYLAIWAEGKEITTTEGLLSADGELSAIQQAFIDEGAVQCGFCTPGFLMSATEIIRSGKTYSDAELRKLLSGHLCRCTGYENIFRAVRKLAGQKSKS

SEQ ID NO: 57735 - DNA, 882 bp, Unknown
  Obtained from environmental sample
  misc_feature (1)..(882): n is a, c, g, or t
atgtatgatatagaagaaatattcgaggctgaaagccctgcccatgccgttgagttgctgcaacagcatcctgacgcgaaaattatcgcggggggcagcgatgtgttaattgaaatccgcgagggcaggcttgccggccgcacattgatgagcattcagaaacttgactgtttgagaggagtttcaatcgactctaggggcgctatccgcattggcgcgctgacgagcttttcccatgtagcgcaagacccggtcatacagaaatacgtccctgtgcttgccgatgcggtgctgaccatcggcgggccgcaattgcgtaacatcggcactataggcggaaacgtctgcaacggggtgacatctgcggacagcgcctcaacactgttggcctatgacgtggtaatggaataccttggtcccaacggcctgcggcaggttccaatttccgcccattatataagcgccggtaaaacttccctggcacatgatgagattttacaggctattcttattccaaaggatagttatgaaaattgttttggcaattatatcaaatacgccatgagggaggctctggacatcgctaccctgggatgttcggcgaatgtccggctttcaaaagatcgtaaaactattgacaggctccgtttggcttatggcgtcgccgggcccgtccccatgcgagttcccacagcggaacaagccgcggccggaaaacccgcaaacgccgaaaccgcagccgcaattgccaaactggtgttaaacgacattaacccgcgctcaagctggcgggccagcaaggaattccgactgcacctggcggaagagcttgccaaacgggcgattaccgaatcgcttaaacgcgcgggggtatcgttatga

SEQ ID NO: 57736 - protein, 293 aa, Unknown
  Obtained from environmental sample
  DOMAIN (182)...(290): CO dehydrogenase flavoprotein C-terminal domain
  misc_feature (1)..(293): Xaa is any amino acid
MYDIEEIFEAESPAHAVELLQQHPDAKIIAGGSDVLIEIREGRLAGRTLMSIQKLDCLRGVSIDSRGAIRIGALTSFSHVAQDPVIQKYVPVLADAVLTIGGPQLRNIGTIGGNVCNGVTSADSASTLLAYDVVMEYLGPNGLRQVPISAHYISAGKTSLAHDEILQAILIPKDSYENCFGNYIKYAMREALDIATLGCSANVRLSKDRKTIDRLRLAYGVAGPVPMRVPTAEQAAAGKPANAETAAAIAKLVLNDINPRSSWRASKEFRLHLAEELAKRAITESLKRAGVSL

SEQ ID NO: 57737 - DNA, 1044 bp, Unknown
  Obtained from environmental sample
  misc_feature (1)..(1044): n is a, c, g, or t
gtgcgtggaggcgggcaaaaacggatcaaatgggacgagaaacggacgcgttatgcgaatcaaagcggtccggtcaggcgcggcattggaatgtccctgttttggtataacaccgccgtctggcccatttcaatagaaatttcatcctgcagaatggtgatgaaccaggacggcagcgtgcagatacagcttggagaaaccgaaatagggcagggggcggacacggctttttcccagatgaccgcccagaccctggggataccctggcagatggttcatgtcatcagcacgcaagacacggacattacgccttttggattaggcgcatacggttcccggcaaacctatgtcggcggcgcaggcgtacacaaggccgcccttctgctaaaggaaaaaattctgaaggccgcgtccctgtacacaaatttacccgccgccgagcttgacattgttaacagcgatattgttaatacatcgcttaacggtaaaaagatttgcagccttgaagaacttgtcattgataccctgtaccataccgaacatgccgagcattttaccgctgaggctaccgcccaggttaaaagcaacgcctttagctttggctgcgcctttgccgaggtggaagtagacatacccttctgtaaaatcaagctgctggaaatggttaattgccatgactgcggcaccctgatcaacccaaaaaccgccgaagcgcaggttcacggcggcatgagcatggctattggttatggtttgtacgagaagatgttatacgattccaaaacgggaaagctccttaacggcaacctgcttgattacaaactgcctacgatgatggatcacccgcggcttgaagcagaatttatcgaaaaccacgagccgaccagcccttacgggacaaaggctctgggcgaaccgccgaccgtaccgggcgcttcggctattcgtaatgccgtgcttcacgcaacgggcattgggatcaacaccattccgcttacgccccatgtgctttttacggaattcaaaaaagcgggactgttataa

SEQ ID NO: 57738 - protein, 347 aa, Unknown
  Obtained from environmental sample
  DOMAIN (1)...(282): Aldehyde oxidase and xanthine dehydrogenase, molybdopterin binding domain
  misc_feature (1)..(347): Xaa is any amino acid
MRGGGQKRIKWDEKRTRYANQSGPVRRGIGMSLFWYNTAVWPISIEISSCRMVMNQDGSVQIQLGETEIGQGADTAFSQMTAQTLGIPWQMVHVISTQDTDITPFGLGAYGSRQTYVGGAGVHKAALLLKEKILKAASLYTNLPAAELDIVNSDIVNTSLNGKKICSLEELVIDTLYHTEHAEHFTAEATAQVKSNAFSFGCAFAEVEVDIPFCKIKLLEMVNCHDCGTLINPKTAEAQVHGGMSMAIGYGLYEKMLYDSKTGKLLNGNLLDYKLPTMMDHPRLEAEFIENHEPTSPYGTKALGEPPTVPGASAIRNAVLHATGIGINTIPLTPHVLFTEFKKAGLL

SEQ ID NO: 57739 - DNA, 1302 bp, Unknown
  Obtained from environmental sample
  misc_feature (1)..(1302): n is a, c, g, or t
atgcttgatatgacgactaaagatgtaaaggtgcgcgaagctctgcgcgtgaacccgtgtaagacttgccagcccgtgggcgctatgtatgccgcgctcggcgtggctaaatgcatgccgcacagccacggttcgcagggttgctgttcgtatcacagaacggtgctgtcgcgccactttaaggaaccggcgatcgcgtcgtcgtcgtcgtttacagagggcgcgtcggtgttcggcggcaagagcaacctcaccacgtcggcgaagaacatattcgatatgtacaaccccgatgtaatcgcggtgcataccacctgcctctcggagacgataggcgacgatctgacgtcgtttatcatggacttggaagtgccggaaggcaaactcgtcgtgcacacgaacacgccgagctatgtcgggtcgcacataaacggcttcttcaacatgatgatcggcttcataaattacctgacaaagaagacgggtacgtccaccggcaagaccgcggtcttccccggatgggtgaaccccggcgacatacgcgaactcaagcgcatagccgctatgatgaacgtgccgacggtcttcttccccgatcagagcggcgtcctagacgcgcccatgaccggcaggtacgagttctacccagaaggcggcacgacgctcgacgagatccgcaccctcggcgacagcgacggtttgatcgcgcttggggaaataatcggcgttgaacccgccgaggtgctcaacaaaaagttcaaagtgccgtacacgctgctgccgctgcccgtgggcgtggccttcaccgaccaatacgtgctcgcgctgcggaagcagtcgcgcacggaggttcccgacgcgttagaggcggagcgcggccggctcgttgacttgatgctcgactcctcgcaatatacaaccggaagaaaggtcgcgatattcggcgatcccgatgttgtcataggcctcacgtcgctcgtgcttgagatgggcatgattcccaagtacgtcatcaccggaacgccaaaagatgagtttacgcgcaaggttacggaactcttcgacaagtacggcgtaacggactgcaaagcgaaagcgaacgccgacctcttcgagctgcaccagtggataaagaacgagccggtagatttgctgatcggttcgacctacggcaagcagatagcgcgcgccgaggatatccctttcatccgcgccggtttcccggtgctcgacagatacggcggcccattgccagccgattgtgggctacgccggggcaattccgccttgttgaacaaataa

SEQ ID NO: 57740 - protein, 433 aa, Unknown
  Obtained from environmental sample
  DOMAIN (15)...(419): Nitrogenase component 1 type Oxidoreductase
  misc_feature (1)..(433): Xaa is any amino acid
MLDMTTKDVKVREALRVNPCKTCQPVGAMYAALGVAKCMPHSHGSQGCCSYHRTVLSRHFKEPAIASSSSFTEGASVFGGKSNLTTSAKNIFDMYNPDVIAVHTTCLSETIGDDLTSFIMDLEVPEGKLVVHTNTPSYVGSHINGFFNMMIGFINYLTKKTGTSTGKTAVFPGWVNPGDIRELKRIAAMMNVPTVFFPDQSGVLDAPMTGRYEFYPEGGTTLDEIRTLGDSDGLIALGEIIGVEPAEVLNKKFKVPYTLLPLPVGVAFTDQYVLALRKQSRTEVPDALEAERGRLVDLMLDSSQYTTGRKVAIFGDPDVVIGLTSLVLEMGMIPKYVITGTPKDEFTRKVTELFDKYGVTDCKAKANADLFELHQWIKNEPVDLLIGSTYGKQIARAEDIPFIRAGFPVLDRYGGPLPADCGLRRGNSALLNK

SEQ ID NO: 57741 - DNA, 456 bp, Unknown
  Obtained from environmental sample
  misc_feature (1)..(456): n is a, c, g, or t
gtgcgacccgacatagctcggcgtgttcgtgtgcacgacgagtttgccttccggcacttccaagtccatgataaacgacgtcagatcgtcgcctatcgtctccgagaggcaggtggtatgcaccgcgattacatcggggttgtacatatcgaatatgttcttcgccgacgtggtgaggttgctcttgccgccgaacaccgacgcgccctctgtaaacgacgacgacgacgcgatcgccggttccttaaagtggcgcgacagcaccgttctgtgatacgaacagcaaccctgcgaaccgtggctgtgcggcatgcatttagccacgccgagcgcggcatacatagcgcccacgggctggcaagtcttacacgggttcacgcgcagagcttcgcgcacctttacatctttagtcgtcatatcaagcattttttccctcctccgcgattttgccggtaa

SEQ ID NO: 57742 - protein, 151 aa, Unknown
  Obtained from environmental sample
  misc_feature (1)..(151): Xaa is any amino acid
MRPDIARRVRVHDEFAFRHFQVHDKRRQIVAYRLREAGGMHRDYIGVVHIEYVLRRRGEVALAAEHRRALCKRRRRRDRRFLKVARQHRSVIRTATLRTVAVRHAFSHAERGIHSAHGLASLTRVHAQSFAHLYIFSRHIKHFFPPPRFCR

SEQ ID NO: 57743 - DNA, 558 bp, Unknown
  Obtained from environmental sample
  misc_feature (1)..(558): n is a, c, g, or t
atgtatgagaagcagccctggctaaaacattttggcgaaactcccgcaagtctgaattaccccgatctttccatgtacgcgagcatcagggaaaaaagcgaacagtaccccgatgttgacagcttcatctttttcgggagaagaacgagcagggcgaatcttgacaagcggattgtgttcatgagccggaagttcgcccaaatcggcataaaaaaaggcgatgccgtcatcgtctgcctgccgaatattcctcaggcggtggtgtcgttttacgcgcttaacaggcttggcgcaatcaccgctcccatacacccgctttcggcggcaccggaaatagaatccttcgcgaaacaagtttccgcaagagcggccataacccttgacggtttttatccccgttttgccgaaattatcccaagcgcaggattcaacaaagtaatagtatgctcgctaaagacagagatggggcctctcacaagaaccgtatttgccctcggacctggccgcaagatcaaacctgttccttactcagatccgtccttgactgggcaaacttga

SEQ ID NO: 57744 - protein, 185 aa, Unknown
  Obtained from environmental sample
  misc_feature (1)..(185): Xaa is any amino acid
MYEKQPWLKHFGETPASLNYPDLSMYASIREKSEQYPDVDSFIFFGRRTSRANLDKRIVFMSRKFAQIGIKKGDAVIVCLPNIPQAVVSFYALNRLGAITAPIHPLSAAPEIESFAKQVSARAAITLDGFYPRFAEIIPSAGFNKVIVCSLKTEMGPLTRTVFALGPGRKIKPVPYSDPSLTGQT

SEQ ID NO: 57745 - DNA, 1095 bp, Unknown
  Obtained from environmental sample
  misc_feature (1)..(1095): n is a, c, g, or t
atggccctcatatttttttcaggcggcagtatggctttgcccaaggccgtaatgctttccagcagaaactttaacgcgcttgcgatgcaggtgaacgcggtggccggccccgtcgtgccgggcgataaaatgctttcgattcttccttttttccacggctttggctttgccgtaggcgttcacgcgttgctgatacactcaggaacctgcatccttgttcccaaattcaacgcggataccctgtccgctctaataaagaaatacaggccccaatacatggcgggcgttcccactttgtacgccgctcttgccgccaacaaaaagttcaacaagctcaagctcgattcctttaagggcatattcagcggcggcgattccctcagcccggaaataaaaaaccgctttgaaaaggttttaagaaaaggcggctccagtatcatgctgatcgaaggatacgggcttacagaaacggtaaccgcctgctgtatcgtgccgcgtaacgaataccgtgaatggacaataggcgtcccctgtcccgatgactggcttaagattgtaaaaccgggaaccgaggaagaatgtgcgcccatggaagacggcgaaatatgcgtctcgggtcccacggtaatgctgggatattacaacgatccggccgggactgccgaagttctgaaaaagcataaagacggaaagctctggatacacactggggacatcggctatatggacgcggacggtttctcttacttcaaacagcgcgccaaacgcatcatcaaatcgtcgggcattgccgtgtatccttcccacattgaggacgttcttaataagcacccggccgtccgcatatcctgcgtcataggcgttcggcatgaaagccagggcgaagtacccaaggcgtacatcatgctcaacgaggggcataaaggcacggatagtctaaagcaggatattggcgagatctgcaaaaaccagcttatgccgtactcgcgcccgcgcagcattgagttcatagatgaaatgcccataacgcgcgtcggaaaggtagcgttccgcgagctggaagaacgcgagcgcggcatgagaaaaagcgactga

SEQ ID NO: 57746 - protein, 364 aa, Unknown
  Obtained from environmental sample
  SIGNAL (1)...(28)
  DOMAIN (1)...(285): AMP-binding enzyme
  misc_feature (1)..(364): Xaa is any amino acid
MALIFFSGGSMALPKAVMLSSRNFNALAMQVNAVAGPVVPGDKMLSILPFFHGFGFAVGVHALLIHSGTCILVPKFNADTLSALIKKYRPQYMAGVPTLYAALAANKKFNKLKLDSFKGIFSGGDSLSPEIKNRFEKVLRKGGSSIMLIEGYGLTETVTACCIVPRNEYREWTIGVPCPDDWLKIVKPGTEEECAPMEDGEICVSGPTVMLGYYNDPAGTAEVLKKHKDGKLWIHTGDIGYMDADGFSYFKQRAKRIIKSSGIAVYPSHIEDVLNKHPAVRISCVIGVRHESQGEVPKAYIMLNEGHKGTDSLKQDIGEICKNQLMPYSRPRSIEFIDEMPITRVGKVAFRELEERERGMRKSD

SEQ ID NO: 57747 - DNA, 819 bp, Unknown
  Obtained from environmental sample
  misc_feature (1)..(819): n is a, c, g, or t
atgtacgggcagtggctcggggaatccgccgtccttacttatgactttgaaaaatttaacgcgcgcgagattttaaaagttcttgaaaaatataaagtaacaactttctgcgctccgcccaccatgtaccgcttcataatgaacgaggacgtgccgtcttacgatctttccagccttaaacactgcaccgccgccggcgaggctttaagccaggacctgttcaaaaaatgggaaaccatgacggggcttaacatatacgaaggtttcgggcaaacggaaacaacgctctgctgcggaacgctgtacccgttcaccgaaccgcacgccagctcgatgggcatgggaatccccggttacggagtgacgcttcttgacgccgacggcaacaaagttcccacgggagcgacgggtgaaatttgcatgaaggccgaacattcaaagccgggcgtaccccgccgtcccgtcggcctgtttatgggttatcacaaaaacgacgaagcgacggataaatcgtggcatgacgggtatttccataccggcgatctcgcttattacgatgaacacggttatctgtggtatgtgggacgcaacgacgacgttattaaatcatcgggttaccgcatagggccattcgaagtggaaagcgtcctgcttaaacatcccgccgtcgcggaaacagcggtaacaggtatacccgacccaatccgcggctttaacgtcaaggcgacaatcgtgcttgcgaaagattaccagggctccgcaggagaccaggcatcagaagcgctgttaaagaactgcaggacttctcggccgatctga

SEQ ID NO: 57748 - protein, 272 aa, Unknown
  Obtained from environmental sample
  DOMAIN (1)...(228): AMP-binding enzyme
  misc_feature (1)..(272): Xaa is any amino acid
MYGQWLGESAVLTYDFEKFNAREILKVLEKYKVTTFCAPPTMYRFIMNEDVPSYDLSSLKHCTAAGEALSQDLFKKWETMTGLNIYEGFGQTETTLCCGTLYPFTEPHASSMGMGIPGYGVTLLDADGNKVPTGATGEICMKAEHSKPGVPRRPVGLFMGYHKNDEATDKSWHDGYFHTGDLAYYDEHGYLWYVGRNDDVIKSSGYRIGPFEVESVLLKHPAVAETAVTGIPDPIRGFNVKATIVLAKDYQGSAGDQASEALLKNCRTSRPI

SEQ ID NO: 57749 - DNA, 819 bp, Unknown
  Obtained from environmental sample
  misc_feature (1)..(819): n is a, c, g, or t
atgccgttatatgaaaaatttacaggccgccatcgtgacgatttcgccacacttgaagatttgcaaaaaaattataagctaaccgtgcccaataattttaattatgcctttgactgccttgatgtgctggcctcggaaaacccaaacgcgctggcgcttttgtgggtttcaaacgaaggcaaggaaaggcggtttacctatgaagatatccggcgtttgtcggtaaaagccgccaatttcttcatcgcgcagggaattgaaaagggcgacatggtaatgcttacaatgtcccgtgactggcgttattggcctgttctgatggggcttcatcggatgggagccgttgccgtccccgcaacatatcttttaaccaagaaagattttgaataccggataaacgccgcctcaattaaaatgctggtgacaacaccccgcttcggagtagtccaggcgatggaagacgcactgtcggaatgtcctacgataaagaagttagccgtatttggcggtaaagtgccgaacaaccgctggatagactttgacgccgaatgggaagccgcgccggaaacaccggttaagcgcaacaatatcaaaaccgacatgatgctgatggctttttcatcaggtactaccggctatcccaaaatggtctggcatgattatacctatccgcttggtcatgttttgacagagctgtttttggcatcgctgcgaagaaggcggcctgcattttaccatttccgacacaggctggcttanatcgctgtggggcaaaatgtacgggcagtggctcggggaatccgccgtccttacttatga

SEQ ID NO: 57750 - protein, 272 aa, Unknown
  Obtained from environmental sample
  misc_feature (1)..(272): Xaa is any amino acid
MPLYEKFTGRHRDDFATLEDLQKNYKLTVPNNFNYAFDCLDVLASENPNALALLWVSNEGKERRFTYEDIRRLSVKAANFFIAQGIEKGDMVMLTMSRDWRYWPVLMGLHRMGAVAVPATYLLTKKDFEYRINAASIKMLVTTPRFGVVQAMEDALSECPTIKKLAVFGGKVPNNRWIDFDAEWEAAPETPVKRNNIKTDMMLMAFSSGTTGYPKMVWHDYTYPLGHVLTELFLASLRRRRPAFYHFRHRLAXIAVGQNVRAVARGIRRPYL

SEQ ID NO: 57751 - DNA, 552 bp, Unknown
  Obtained from environmental sample
  misc_feature (1)..(552): n is a, c, g, or t
atgacagaacaactgattgaaattggcggcaggcttagagggctcagaagcctcatgggcatatcgacggagaaaatggccgaagaccttaagcttgaaatcggggagtacctggcgtttgaacgcggcgagcacgatttttcgtttagctttctttttaatgcggcaaacattttaggcgtggacattgtggatattatcagcggagaaacgccaaaattgaccacatgctgtcttgtaagaaaaggtgaggggtttgatataaggcgccgcgaagcctacgactacaagcatcttgcttttacattcagaaagaaaaaagccgaaccctttttagtaacggtggagcccaacagcgacgaagtagaattgcacacacatgaaggtcaggaattcaactacatgatttctggcagtatggaatttcacattgacaatatggtatacgagcttaacgaaggcgacagcgtgtattttgattcaagcataccgcatgcgatgaaagctacaggcaaacatccggcggaattcatagccgttgtaataaaataa

SEQ ID NO: 57752 - protein, 183 aa, Unknown
  Obtained from environmental sample
  DOMAIN (111)...(181): Cupin domain
  misc_feature (1)..(183): Xaa is any amino acid
MTEQLIEIGGRLRGLRSLMGISTEKMAEDLKLEIGEYLAFERGEHDFSFSFLFNAANILGVDIVDIISGETPKLTTCCLVRKGEGFDIRRREAYDYKHLAFTFRKKKAEPFLVTVEPNSDEVELHTHEGQEFNYMISGSMEFHIDNMVYELNEGDSVYFDSSIPHAMKATGKHPAEFIAVVIK

SEQ ID NO: 57753 - DNA, 558 bp, Unknown
  Obtained from environmental sample
  misc_feature (1)..(558): n is a, c, g, or t
ttggctaaagtagataccgacgtacaatctttttacatgaacccatccgcgtatacccatgtaaaagatgaaagtaaaaaaacaaaagtttccaggaccatgcccggcgccaagacggggttttcgcggatctttgatgagatccggggcagaacggccggagaaataggccccctgcaggaaatgcccgtgtcggaagaaaccgtcaatttattgatcgatgaagtccgcagcacaggcgacgccctgcgtgaaaggccttttccggatgaaattctccgttacaaacaggccgtgcgtaattttatgcattacattgtcgagaacgcctacggcaaaagcgttgaagcggggattcccaacttcctcaaaccgggcttcaaaggcccgcgcggcacgcctgaagcgatgaagcagaaagctcacacaaagatacaggttatagatacaaagctggaagagctcgctaagcgccttctaaccagccaaatgccgcagatggagattgcttcgcgtcttgaggaaataaagggacttctgatagacttaatgcagtaa

SEQ ID NO: 57754 - protein, 185 aa, Unknown
  Obtained from environmental sample
  DOMAIN (11)...(185): Protein of unknown function (DUF327)
  misc_feature (1)..(185): Xaa is any amino acid
MAKVDTDVQSFYMNPSAYTHVKDESKKTKVSRTMPGAKTGFSRIFDEIRGRTAGEIGPLQEMPVSEETVNLLIDEVRSTGDALRERPFPDEILRYKQAVRNFMHYIVENAYGKSVEAGIPNFLKPGFKGPRGTPEAMKQKAHTKIQVIDTKLEELAKRLLTSQMPQMEIASRLEEIKGLLIDLMQ

SEQ ID NO: 57755 - DNA, 939 bp, Unknown
  Obtained from environmental sample
  misc_feature (1)..(939): n is a, c, g, or t
atgagcgattttgatgatgatgatgatatttcccttcttgaggacagaccggaggaaagggaggcggcttcaagcgtcagcgaggtggttaaatcttccgggattgaatccatcgcgccggatacgcccattttcaggctgcggctttcctattcccatgaaacttttctcgccatctaccgcgacgattcgttgtatccgggttcaatggttattgttcccacccgttatggtaaggaccttgcacaggtaatagggcccgtgcgctgtaagcacgacgtttctgatattgtctggattgagcgtgtcgcggtaaaggaagacatggacaaggcgaatcataaccacgcgcttgaacaggaagcgtttaatatctgcaaagagaaaattataaaccaccagcttgaaatgaagctggttcatgtccactatctgctggaagaacccaagatactgtttttcttcacggcggaaaaccgcgttgacttccgcgaacttgtgaaggatcttgtcagcgtttttaagacccgtattgagctgcgccagatcggcgtccgcgatgaagccagggtagtaagcgggcttggtatttgcgggcgcggttactgctgccattctgtttccgacaagctgaaacccgtgtcaataaaaatggcaaaagaccagaacctttcgtttaactcgatgaaaatatcagggccctgcggaaggctgctctgctgcctttcttatgaacacggcttttattgcgagcagatccgccgtataccgcaggaaggctcaaaggtaagccatgacaatgagacatgggctgttacggaaacgaatatgattatcggccaggtaaaactctccaacaacgacggccggctgataaccctgcccgccgaccgttttgaaaaagttgacaaccactggagaactaaagggaaagggtag

SEQ ID NO: 57756 - protein, 312 aa, Unknown
  Obtained from environmental sample
  DOMAIN (96)...(183): PSP1 C-terminal conserved region
  misc_feature (1)..(312): Xaa is any amino acid
MSDFDDDDDISLLEDRPEEREAASSVSEVVKSSGIESIAPDTPIFRLRLSYSHETFLAIYRDDSLYPGSMVIVPTRYGKDLAQVIGPVRCKHDVSDIVWIERVAVKEDMDKANHNHALEQEAFNICKEKIINHQLEMKLVHVHYLLEEPKILFFFTAENRVDFRELVKDLVSVFKTRIELRQIGVRDEARVVSGLGICGRGYCCHSVSDKLKPVSIKMAKDQNLSFNSMKISGPCGRLLCCLSYEHGFYCEQIRRIPQEGSKVSHDNETWAVTETNMIIGQVKLSNNDGRLITLPADRFEKVDNHWRTKGKG

SEQ ID NO: 57757 - DNA, 1284 bp, Unknown
  Obtained from environmental sample
  misc_feature (1)..(1284): n is a, c, g, or t
atgcggcctttccgtgattcccgtcaggcggattcaggggcgatgggaggctcaggctcggaagaatttatggtggaaagcgagataggcgacaataccctgctcctctgtaaaaaatgcgactacgccgccaatgtggaaaaagccggatgcaaacccgattatacaagcccgccaccagcgacaaatactccgccatacgaaaaaatcgacacgcccaatgttaaaaccattgaggaacttggcgcgtttctgaaaaacagcgacggctccccgatgaattcaaaacagttcatcaaaacccttatctaccgcgcaattaacgtagagctcgatctttcccaggcgcccggatgtaaaaacctggagcggaaaaatctcgcccctgacggcgccaaaggcggcattgaaatatatccccaggccttcttcgccgtggcgattcgcggtgacctcgacgtaaacgagacaaagcttgccgccatggtaaaagccggcgaggtcgcccttgccgcggataccgatgtcgttcgcctgaccaacgcgcccgtgggctttgccggccccgtggggcttaccacgctgccagtcatcgtcgatcacacggttactggtatgaacgacgcggttacaggcgcgctggcaaaagacctgcactataagcatgtcgcatacggccgggatttcacaccatggatgacaggcgatctgcgtaccgtcaaggccggcgacctctgccccctttgtggcggagagttatacgaaaagaaaggcaacgagctgggccatattttcaagctggggtacaagtacacgcgcagcatgaacgtacattatctggacgagaacggcaaaagccagaccccaaccatgggcagttacggtatcggcgtagaccgcgcccttgcctcggtcatagaagaacaccatgacgaagcgggcattatctggcctgtctcgatagcgccctatcatgtcataatcgttcccattaagtatgacggagaagtaaaggccgcggccgacctgtttgccgccgaacttgagaaagccggcgttgaagtcctgctggatgaccggaacgagcgtcccggcgtcaagttcaacgacgccgatcttaccggcattccctggcgcgtggtgttaggcgacaaaggccttgcacaggcccaggttgagatcaagcgccgcggcgagaaagaaagccgcatggcgtctctggatacggcgacaaaggaactggcgcaaaaaatacgggaagagctctctaccctttccctttag

SEQ ID NO: 57758 - protein, 427 aa, Unknown
  Obtained from environmental sample
  DOMAIN (61)...(229): YbaK / prolyl-tRNA synthetases associated domain
  misc_feature (1)..(427): Xaa is any amino acid
MRPFRDSRQADSGAMGGSGSEEFMVESEIGDNTLLLCKKCDYAANVEKAGCKPDYTSPPPATNTPPYEKIDTPNVKTIEELGAFLKNSDGSPMNSKQFIKTLIYRAINVELDLSQAPGCKNLERKNLAPDGAKGGIEIYPQAFFAVAIRGDLDVNETKLAAMVKAGEVALAADTDVVRLTNAPVGFAGPVGLTTLPVIVDHTVTGMNDAVTGALAKDLHYKHVAYGRDFTPWMTGDLRTVKAGDLCPLCGGELYEKKGNELGHIFKLGYKYTRSMNVHYLDENGKSQTPTMGSYGIGVDRALASVIEEHHDEAGIIWPVSIAPYHVIIVPIKYDGEVKAAADLFAAELEKAGVEVLLDDRNERPGVKFNDADLTGIPWRVVLGDKGLAQAQVEIKRRGEKESRMASLDTATKELAQKIREELSTLSL

SEQ ID NO: 57759 - DNA, 1422 bp, Unknown
  Obtained from environmental sample
  misc_feature (1)..(1422): n is a, c, g, or t
atggacgaaaacgcagacataaacgcaagcgcgaacccaaagcaaaaaaaattcggcaaggacctgaccgagggcaatatcccgcggcacctgctcagcctcgccgtgcccatgcttctcgctaacctcctcggcacgagctacagtctcgtagacgccatctggataggccgcttcgtgggcaaggacgccataggcgcggtggcggtcagctttccggttatgttcatattcataggcgtggcggtcggcgcgaccatggcgaccacggtgctggtctcgcagttctacggcgcccgcaaccaagccatgctgagcaagaccgtcggcacctctttcttcctgacgctcatactaggcgttatctccgccgccggcgggatactcactgcggaacgggtactggccgctctcggaacgccggaaacggtcgtcccgctggccgagtcgtacctgaaaatcacactgctgagcttgccggtcatgttcatgcacttcttgatcagttccgtccttcgcggcatgggggacaccaagacgccgctctacttcatgcttgtcggcgttacgctcaacgccatcctcgacccgctgatgatcatcggcataggccccttccccaagatggggctgaacggcgcggcgtgggcgtcgctcatctgcccgataatagggctggtgctgttagtcggctacctgcggcgcaaaggcggcgccctcacaaccggagtcaaatttttctccatagacgccggaatcgccaaactcatcgccaagatcggcttcccgtctatgatacagcagacgtcgatatccttcgggatagccgccgtcacatcaatagtgaactctttcggcgcggcggcgatagcgggcttcggggcgggcgggcggatagacgccgtggccttcctgccggcgcagtcgataggccttgccgtttccaccctaagcggccagaacatcggggccgggcgctacgacagaattcccctcatattcaaatggggcgtgataatgacctgctgcataacggtctctttcgcgataatattcctgtccatacctgagattctgatgttgccgttcacgaccgacccggaggtgatagagatcggcaagggctacctgaggatagcggcgccggccatatcgttcttcgcggtgatgttcgtctcaaacggcgtgataaacggcgcggggcatacgctgaccacgctcgtctttacgctgatagcggtctggggcataagaataccgtttgcgacgattttgtcgcggactagtttgggggtcaagggcgtttgggtttcgtacgtgattggattcagcttcacgatgtgcattagtttgctttggtatcggtcggggcggtggaagagggcggttgtcaagcatggagcgcctgacgccgtgccgtga

SEQ ID NO: 57760 - protein, 473 aa, Unknown
  Obtained from environmental sample
  DOMAIN (263)...(424): MatE
  misc_feature (1)..(473): Xaa is any amino acid
MDENADINASANPKQKKFGKDLTEGNIPRHLLSLAVPMLLANLLGTSYSLVDAIWIGRFVGKDAIGAVAVSFPVMFIFIGVAVGATMATTVLVSQFYGARNQAMLSKTVGTSFFLTLILGVISAAGGILTAERVLAALGTPETVVPLAESYLKITLLSLPVMFMHFLISSVLRGMGDTKTPLYFMLVGVTLNAILDPLMIIGIGPFPKMGLNGAAWASLICPIIGLVLLVGYLRRKGGALTTGVKFFSIDAGIAKLIAKIGFPSMIQQTSISFGIAAVTSIVNSFGAAAIAGFGAGGRIDAVAFLPAQSIGLAVSTLSGQNIGAGRYDRIPLIFKWGVIMTCCITVSFAIIFLSIPEILMLPFTTDPEVIEIGKGYLRIAAPAISFFAVMFVSNGVINGAGHTLTTLVFTLIAVWGIRIPFATILSRTSLGVKGVWVSYVIGFSFTMCISLLWYRSGRWKRAVVKHGAPDAVP

SEQ ID NO: 57761 - DNA, 3234 bp, Unknown
  Obtained from environmental sample
  misc_feature (1)..(3234): n is a, c, g, or t
atgccggaagcgccgctgactttgtacttccggaagacggagccgagcacgatgtccgccagggtttttcatcggctggcctatacctggatggattgggggcgaaaaaacaagtacttcgacagccaggacgatgaaaaggctttttacgatgaaacctgctatatgctcgcgcaccagattgcggctcccaacagcccccagtggtttaacaccggcctttacgcggtctacggcatcgaggggccggctcaggggcactattactttgatcccgccgatggcgcggtgagaaaatcggatagcgcttacaaacgaccacagccatctgcgtgtttcatcctctccgtcaacgacgacctggtaaactcaggcgggatcatggatctggtaacgcgtgaggcgaggcttttcaagtacggatcggggacaggctccaacttttcaaggctcagggcgcaaaacgaaaaactctccgggggcggcgtgtcgtctggcctgctttcgtttttgaagataggcgaccgttccgcctcggcaataaaaagcggaggcacaacgcgacgggcagccaagatggttaccctggacgcggatcatcccgacatagaagactacatcgcgtggaaggccaaagaagagcacaaggtcgcttcgatggttaccggctctcanattgtcaacaaaaatctttcagaaataaaaaaagccctcctcgccttcagaggcccggatggggacaggtttaacatccagaaaaaccatgaacttgaaacggctctgcgaaacgcccttggagataagattccaccttcttacctgtaccagcttttaaggcagctccagcagggcgataaagatgtaaaccctgcggttttttccaccgcctgggacgacgaagcatacaacaccgtgtcaggccagtcgtccaacaacagcgtaaggcttgccgatgattttatgaaagccgttcttgacggcaaagaatggaaactcacaagcagggtaaaaggggaaaccgaaaagatcgtcagcgccgggaaaatctgggaagacattgcccgttctacctgggcctgcgccgacccggggcttcagttccacacaacgattaacgactggcatacctgtccttcaggcggcgagatcagagcgtcaaatccatgctcggaatatatgttccttgacgatacggcctgcaaccttgcctcgattaacctgtcccgcttttacgataaaaccgccagaacttttaacgttgaaaaataccttcacgcgataagaatatggacaaccattcttgaaatttccgttgtaatggcccaattcccttccccggagatcgccgagctttcctacaaataccggacactggggctgggctatgccagccttgggagcctcctcatgatcatgggcctggcctacgactcccccgagggccgtacggttgccggcaccctttcggcgatccttacaggcgaagcctacgcccagtccgccaggatggcagcggaattcgggccctttgcgcaatacgcggaaaactccgccgccatgctccgcgttatacgcaaccaccgtagggcggcatacaacgcccctccttcgcagtacgaggggcttcacacaattccccagggtataatagatccgtccaagtgtcatgcaaaattcgattttacttatcttctggacgcggcaaaacatagctgggatgacgccctggcccttggggaaaagcacggcttccgtaacgcccaggtgacggcgatcgccctcactggaacaataggtcttttaatggactgcgacactaccggggttgagccggattttgctctggttaaattcaaaaaacttaccggcggcggctatttcaagatcataaaccagtcggttcctccggcgctggcggcactgggctacaatgaaaaagagattgaagccataaccgcctacgccaccgggcataaaactttaaaaggctgccctgccatcaatgccgaaagcctggcggaaaaaggctttactgccggaattattggcgtagcggaagaagcgctaaaaaacgctcccagcctggaatccgtatttagcccatggacgcttggcaaagattttgtcgaaaagaaactaaaaatccctgaggctgctttttcgcaaaatggcttcagccttttaaagcgccttgggttttcatcagctgaaatcgaagaagcggagcaatacgcttgcgggacgatgtgcattgaaggggcgcccggactcaaaaaggagcattacagcgtcttcgacactgccaccccttcgggaaagcacggcaggcgttccataccctggacagcccatgtggaaatgattgccgcctgccagccttttatttcaggcgcaatttccaaaaccatcaatatgccaaacgccgcaaattatgaggatgtaaaaggcgcttatatgcttgcctggaaaagggcgctaaaagcagtcgccctttaccgcgacggttcaaaactgtcccagccgctctcttcgagtgccagaggtaacacctcaggcacagacccgatagcggacgcaatcctgggagtggaaaaatcccttgccaccggtatccccggcgaagacaaaacagacagaaagaaaagcggagggaaatcccggggcatgcggaagtccctgcccaacaggaggagcggctacacccaaaaatcaaaaatagctgggcattccattttcatacgcacaggtgaatacgacgacggcagcctcggagaaatttttcttgacatgcataaggaaggcgccgcgttccggagcttattaaacagtttcgccattgccgtctcgctcggcctgcaatacggcgtacccctggaagaatatgttgacgcgtttacattcagccgttttgagcctaacggcattgtcaaaggccacgactatgtaaaaatggcaaccagcgtcatcgattttattttccgggatctggcaataagctatctaaagcgggtagagcttggccaggtaaagccggaagatctccttgccacagggacaaaaaccgacaatagaatcgacagtaccgggctttggaacaacggggatgtagcttcccaggccagaattaaaggctacgaaggggatgcctgcccttcatgcggcagttttaccctgatacggaacggtacctgtatgaagtgcgacacctgcggagaaacaacaggctgtagttga

SEQ ID NO: 57762 - protein, 1077 aa, Unknown
  Obtained from environmental sample
  DOMAIN (3)...(60): Class II vitamin B12-dependent ribonucleotide reductase
  misc_feature (1)..(1077): Xaa is any amino acid
MPEAPLTLYFRKTEPSTMSARVFHRLAYTWMDWGRKNKYFDSQDDEKAFYDETCYMLAHQIAAPNSPQWFNTGLYAVYGIEGPAQGHYYFDPADGAVRKSDSAYKRPQPSACFILSVNDDLVNSGGIMDLVTREARLFKYGSGTGSNFSRLRAQNEKLSGGGVSSGLLSFLKIGDRSASAIKSGGTTRRAAKMVTLDADHPDIEDYIAWKAKEEHKVASMVTGSXIVNKNLSEIKKALLAFRGPDGDRFNIQKNHELETALRNALGDKIPPSYLYQLLRQLQQGDKDVNPAVFSTAWDDEAYNTVSGQSSNNSVRLADDFMKAVLDGKEWKLTSRVKGETEKIVSAGKIWEDIARSTWACADPGLQFHTTINDWHTCPSGGEIRASNPCSEYMFLDDTACNLASINLSRFYDKTARTFNVEKYLHAIRIWTTILEISVVMAQFPSPEIAELSYKYRTLGLGYASLGSLLMIMGLAYDSPEGRTVAGTLSAILTGEAYAQSARMAAEFGPFAQYAENSAAMLRVIRNHRRAAYNAPPSQYEGLHTIPQGIIDPSKCHAKFDFTYLLDAAKHSWDDALALGEKHGFRNAQVTAIALTGTIGLLMDCDTTGVEPDFALVKFKKLTGGGYFKIINQSVPPALAALGYNEKEIEAITAYATGHKTLKGCPAINAESLAEKGFTAGIIGVAEEALKNAPSLESVFSPWTLGKDFVEKKLKIPEAAFSQNGFSLLKRLGFSSAEIEEAEQYACGTMCIEGAPGLKKEHYSVFDTATPSGKHGRRSIPWTAHVEMIAACQPFISGAISKTINMPNAANYEDVKGAYMLAWKRALKAVALYRDGSKLSQPLSSSARGNTSGTDPIADAILGVEKSLATGIPGEDKTDRKKSGGKSRGMRKSLPNRRSGYTQKSKIAGHSIFIRTGEYDDGSLGEIFLDMHKEGAAFRSLLNSFAIAVSLGLQYGVPLEEYVDAFTFSRFEPNGIVKGHDYVKMATSVIDFIFRDLAISYLKRVELGQVKPEDLLATGTKTDNRIDSTGLWNNGDVASQARIKGYEGDACPSCGSFTLIRNGTCMKCDTCGETTGCS

SEQ ID NO: 57763 - DNA, 492 bp, Unknown
  Obtained from environmental sample
  misc_feature (1)..(492): n is a, c, g, or t
ttgtgtctggaagaggacgattttcgcctttttttgacgtgttgtttttctattataggggccatattaggtttatcgacaaaaaaagcgataaggattatatatgatattatgatgaaaagaacaaaacccgttttattcgctttatcagccgcgcttgttttaaagctgttcttttttgattttatcatcgcccagggacattcgatggaacccgcgattcgtgacggtgctgttttggttgtcagccgtataagttatggattgcagttaccgtcaaataagtacctgttacgctgggggcagccaaaaaaaggggaagttgtggttttttacacgccttccggggagttagcggtaaaacgctgcacaatgtcggtggaaagcggtatgttttatgccgaaggagacaacagcattgtatcttatgattcgcgttcttatggtcctgttcttaccgataatattattgggaaggttttggggtattag

SEQ ID NO: 57764 - protein, 163 aa, Unknown
  Obtained from environmental sample
  DOMAIN (64)...(137): Peptidase S24-like
  misc_feature (1)..(163): Xaa is any amino acid
MCLEEDDFRLFLTCCFSIIGAILGLSTKKAIRIIYDIMMKRTKPVLFALSAALVLKLFFFDFIIAQGHSMEPAIRDGAVLVVSRISYGLQLPSNKYLLRWGQPKKGEVVVFYTPSGELAVKRCTMSVESGMFYAEGDNSIVSYDSRSYGPVLTDNIIGKVLGY

SEQ ID NO: 57765 - DNA, 1815 bp, Unknown
  Obtained from environmental sample
  misc_feature (1)..(1815): n is a, c, g, or t
atgcacgtagacgagttgtgggttggggtggacgtaggctccaccacagttaaaattgccgttgtagaaccggaaacggggaaattgttgcacagccgttatcaaaggcataacgctatgcaggcaaaaacagtccgcgaattgctggaagaagcccataaattatttgaaaacaaacatttcacagtctctttttgcggctccggcgggcagcccttcgcagagaaaacaggggccttttttgtgcaggaagttgtcgcaaattccctagcggtacgcgaaatgtacccagaaacccgcgttgccatagaactcggcgggcaagacgccaaggttatattttttgaaaaagacaagaccaccgggaaactcctggcaagcgatatgcgaatgaacggcgtttgtgcaggcggaaccggagcgttcatagaccaggttgcggagcttttgcgcataaaaacagaggattttgaggattttgcctcaaggggcgaaaaggtatatgaaatttctggcaggtgcggggtttttgccaaaacagatattcagccccttttgaaccagggtgtttccaaagaggatattgcgctttccagctttcacgccatagcaaaacagaccattggcgggcttgctcagggaatggagataaagccccccgtgctttttgagggtggccctttgacttttaacccttcgctggtgagcgtgtttcagcaacgtttggggcttttgagcgcgcaggttttggttccccagcactccgaggttttggtggcatggggagccgcactctccgctggcacgatgtacaaaggcaaaaaatgcggctatagcaaagaaaaaagcctccgtgcgcttgagaatttttccgctggcaacgagaacaaaagcgaggaaatgcctccttttttcaaaaacgaaaaagaaaaacacgattttattcgcaaacatcccctttttggtggcaattatccagtgcctaaaaaaggctcggtcatcaaagcgtatttgggaatagatgcgggcagcacaaccacaaaattcgtgctcctaaacgaaaacgaggaagttatagacagcttttactccggcaaccagggcgaccctcttgttgttctgaaaagcgcactgatacagatgaacgatcgctacaaagaagcggatgccaaactcgaaattttgggtgttggaacaacgggctacggcgaactcctgttctaccgtgcgctccacgccgactaccacaccgtagaaacagtcgcgcacgcaaaagccgcgcaaaaagtatgccccgatgtaagttttattctagacataggcgggcaagacatgaaagccatctcggtggcaaacggcgtggtcacgggcataatcctcaacgaggcctgttcaagcggttgcggctcttttatagaaacctacgcccgcagtctgggcataaaaatggagcaaatcgcagacatggcattccgctcaaaaaacccatcaaagctgggcagccgctgcacggtatttatgaacagttccataataacggagcagagagacggcaaaaaacccgaagacataatagccggaatttgccgctccataatagacaacgttttcacaaaagttatccgcttgcgcaacttagacaccctgggcaaaaaaattgttgtacagggcggcacattcaaaaacgatgccgtgttgcgctcctttgagcaacatacgggcttaacgcccatacgccccgaccgccccggagaaatgggggccataggcattgcgcttttgaccaaagaacgcatggaaaagggagacaaatga

SEQ ID NO: 57766 - protein, 604 aa, Unknown
  Obtained from environmental sample
  DOMAIN (8)...(267): BadF/BadG/BcrA/BcrD ATPase family
  misc_feature (1)..(604): Xaa is any amino acid
MHVDELWVGVDVGSTTVKIAVVEPETGKLLHSRYQRHNAMQAKTVRELLEEAHKLFENKHFTVSFCGSGGQPFAEKTGAFFVQEVVANSLAVREMYPETRVAIELGGQDAKVIFFEKDKTTGKLLASDMRMNGVCAGGTGAFIDQVAELLRIKTEDFEDFASRGEKVYEISGRCGVFAKTDIQPLLNQGVSKEDIALSSFHAIAKQTIGGLAQGMEIKPPVLFEGGPLTFNPSLVSVFQQRLGLLSAQVLVPQHSEVLVAWGAALSAGTMYKGKKCGYSKEKSLRALENFSAGNENKSEEMPPFFKNEKEKHDFIRKHPLFGGNYPVPKKGSVIKAYLGIDAGSTTTKFVLLNENEEVIDSFYSGNQGDPLVVLKSALIQMNDRYKEADAKLEILGVGTTGYGELLFYRALHADYHTVETVAHAKAAQKVCPDVSFILDIGGQDMKAISVANGVVTGIILNEACSSGCGSFIETYARSLGIKMEQIADMAFRSKNPSKLGSRCTVFMNSSIITEQRDGKKPEDIIAGICRSIIDNVFTKVIRLRNLDTLGKKIVVQGGTFKNDAVLRSFEQHTGLTPIRPDRPGEMGAIGIALLTKERMEKGDK

SEQ ID NO: 57767 - DNA, 555 bp, Unknown
  Obtained from environmental sample
  misc_feature (1)..(555): n is a, c, g, or t
gtgtctaatccgaatttaaaacctgagcagggcgagcaggcggaggcgggaattggctacaaatcaaaaaagagcaggctctctgccacgctttttgcaaacagcataagagaccgcataatttattacactagcggcatggtcacaaagccaataaatgcggaagagggcaaggtgtatggagttgagaccgagcttgggagcgaacttttcagctggctgaaagtgagtgcaaacgcaactttccaaaacccagaaaatttgccaagcgaaccggagcagcaatattacatctcaatgctctttatgcttccattttcctttgaattaacactagacggcgaagcccacagcgagctttaccgcgacaaagcacagagaaaagctattccggcaaaatcattttaccacgctgggcttggctacaagccaactcaaaacacaaaactattcttttacgcaagaaacataaatggcggcgaataccagaatatttacgatgcttatcccacgccagggcgggtattcagcttgagttattcgcatagtttttag

SEQ ID NO: 57768 - protein, 184 aa, Unknown
  Obtained from environmental sample
  misc_feature (1)..(184): Xaa is any amino acid
MSNPNLKPEQGEQAEAGIGYKSKKSRLSATLFANSIRDRIIYYTSGMVTKPINAEEGKVYGVETELGSELFSWLKVSANATFQNPENLPSEPEQQYYISMLFMLPFSFELTLDGEAHSELYRDKAQRKAIPAKSFYHAGLGYKPTQNTKLFFYARNINGGEYQNIYDAYPTPGRVFSLSYSHSF

SEQ ID NO: 57769 - DNA, 336 bp, Unknown
  Obtained from environmental sample
  misc_feature (1)..(336): n is a, c, g, or t
ttgccggaaattccactctcggaatttcaaatgccgctttacataaaactttacgaggagcttgccgccagaaaagaagaagctccgcgcaaagtacagggcgcttttttttacagcgtgaacggcagaaggatcaaggccgtggtgggagagacggcgggcggaagaagcaaagccccaaaccgcgatgaatacgaacctttcctggaagctgcggaaaaacaaattgaagaattcgggcggaaggtgaaagcccttgacttcacccctcgcgaaatacggatcggggattgcctgggctgcgcgtacaaaaccgtatgcagaacggtgtattag

SEQ ID NO: 57770 - protein, 111 aa, Unknown
  Obtained from environmental sample
  misc_feature (1)..(111): Xaa is any amino acid
MPEIPLSEFQMPLYIKLYEELAARKEEAPRKVQGAFFYSVNGRRIKAVVGETAGGRSKAPNRDEYEPFLEAAEKQIEEFGRKVKALDFTPREIRIGDCLGCAYKTVCRTVY

SEQ ID NO: 57771 - DNA, 486 bp, Unknown
  Obtained from environmental sample
  misc_feature (1)..(486): n is a, c, g, or t
atggcccttctggaaaacaaaccccggggcgctacagcagtggcttacgatgattgtgaagttacgatgataaaccgggctaactttgagcatatgattaaaacgcagccccagcttataactaaggttaccacccttcttgctgatcgggtctggctcatatataaacagttggccaataccctcattgccaatcccctgggccgtatgtacgattccctgcttatccagctggaaaaaaaccgggttccgcttgacggttcaaatccctattattttagttttggtttgcaggaactgaccaatatggtaggactttccgacagagatgcccgtcaaatgcagggggaaatactgaaaaacaagaaccttcaggtaataaatgacaaacttatggtttcctcatcgggggaaatagttaaacaagttgagtatttccggaaaatggaccgaatagaaaaatcccgcaaggaaacgcagtcttaa

SEQ ID NO: 57772 - protein, 161 aa, Unknown
  Obtained from environmental sample
  misc_feature (1)..(161): Xaa is any amino acid
MALLENKPRGATAVAYDDCEVTMINRANFEHMIKTQPQLITKVTTLLADRVWLIYKQLANTLIANPLGRMYDSLLIQLEKNRVPLDGSNPYYFSFGLQELTNMVGLSDRDARQMQGEILKNKNLQVINDKLMVSSSGEIVKQVEYFRKMDRIEKSRKETQS

SEQ ID NO: 57773 - DNA, 1032 bp, Unknown
  Obtained from environmental sample
  misc_feature (1)..(1032): n is a, c, g, or t
atgacagaagtactgtcccaggatgagatagaccagttattaactgccataaatgccggggacacggaaccggaagattttaagtctactgcggacagccggaaaatcaaaatatacgacttcaagcgtcctgataagttctcaaaagagcaaattcggacgatttccatgatgcacgagacttttgcccgcctttctacgaccagcctttccgcccaactccgttccgttgtccatgtccatgtcgcttcggtagaccagcttacctacgaagagtttatacgctcaatacctacgccgacgaccctggcgatcatcaatatggatcccctaaagggcaacgcgattttagagatagatcctgccgttaccttttcaattattgaccgcctttttggcggctcaggagaaggaacgaaagcccagcatgagcttacggatatagaaagcgcggtaatggaaggaatcattgtccgcatactgggaaacatgcgcgaggcctggactcaggtaattgacctcaggccccggcttggccagatcgacacgaacccccaattcgcccagattgtgcccccaacggacatggtggtgcttgtaacccttgaaaccaaggtcggggacgtggaagggatgataaacttctgcattccttaccttaccatcgagcccataatcggcaagctttccacccagttctggttttctacggtacaccgtggcacaactaccgagaaccttaccgtgctgaaggataaattggcaacgatagacgttgatgtagttgccgagataggaaaaataaatattcccgtaagggaagttctctcgctccatgtaggggatgtagtcagactttacaatactcgtgtaggggatccgtattccctgaatattggcaataaaaagaaatttttgtgcaggcccggtgttatcgggaaaaaaatagcggtgcaggtactaaagaaaaccgcagagcttgaacaggaagaatttgaagagcttgctactgagaaggaggagttattatga

SEQ ID NO: 57774 - protein, 343 aa, Unknown
  Obtained from environmental sample
  DOMAIN (250)...(327): Surface presentation of antigens (SPOA) protein
  misc_feature (1)..(343): Xaa is any amino acid
MTEVLSQDEIDQLLTAINAGDTEPEDFKSTADSRKIKIYDFKRPDKFSKEQIRTISMMHETFARLSTTSLSAQLRSVVHVHVASVDQLTYEEFIRSIPTPTTLAIINMDPLKGNAILEIDPAVTFSIIDRLFGGSGEGTKAQHELTDIESAVMEGIIVRILGNMREAWTQVIDLRPRLGQIDTNPQFAQIVPPTDMVVLVTLETKVGDVEGMINFCIPYLTIEPIIGKLSTQFWFSTVHRGTTTENLTVLKDKLATIDVDVVAEIGKINIPVREVLSLHVGDVVRLYNTRVGDPYSLNIGNKKKFLCRPGVIGKKIAVQVLKKTAELEQEEFEELATEKEELL

SEQ ID NO: 57775 - DNA, 918 bp, Unknown
  Obtained from environmental sample
  misc_feature (1)..(918): n is a, c, g, or t
atgctgattttcagcttaggagttttgctatgcaaaactccaggaatttatcacagccgacatccatgtcggcaggagattattgtaatgactgtaattaaatacccaggttcaaaaaattctatcgcacattggattatacagcactttccggcggggtatgaaagcatgacatatttagagccgtttttcggttcggggtgcgtgttcttctccaaaaacccatcgcaaattgaaacgataaacgacatagacaatgaagtatctaacctgtttttccagataagggagaacacggataaattggttttccttgtcgagaatacggcatggagccggaatgaatatttgctggcttttgagaaatgcgactgccaaacagaaatggctaggcggtttctagttcgggcgtggtttgccatcggttcggcatatagggataaaagcagtatacggatgaacatagacagagcaaccggggggcatgattattttcataaaaaattgcctgacacactgcgggaaacaagcaaaaggcttaaatgcgggccgggtcattatgttcaaattgaaaataaaaacgcactggagctaatacaaagctatgaccgtaaaaatgtgttgatgtaccttgatccgccgtatgtaagcgaaactaggaaacacaagaaaatatacacctatgaaatgagcaatgacgaccacaggcaattacttgaaataattataaacctaaaagcggatgttttagtttcaggatatgaaaatgaattatatagcaagtatctagggaaatggaataaaagccttaacgtatcgactgacgaagcggaaaacaaacgtactgaatgcttgtggtttaactataacctacgtcaaactgatttatttgcgcaaggggatggcaatgctagttaa

SEQ ID NO: 57776 - protein, 305 aa, Unknown
  Obtained from environmental sample
  DOMAIN (35)...(270): D12 class N6 adenine-specific DNA methyltransferase
  misc_feature (1)..(305): Xaa is any amino acid
MLIFSLGVLLCKTPGIYHSRHPCRQEIIVMTVIKYPGSKNSIAHWIIQHFPAGYESMTYLEPFFGSGCVFFSKNPSQIETINDIDNEVSNLFFQIRENTDKLVFLVENTAWSRNEYLLAFEKCDCQTEMARRFLVRAWFAIGSAYRDKSSIRMNIDRATGGHDYFHKKLPDTLRETSKRLKCGPGHYVQIENKNALELIQSYDRKNVLMYLDPPYVSETRKHKKIYTYEMSNDDHRQLLEIIINLKADVLVSGYENELYSKYLGKWNKSLNVSTDEAENKRTECLWFNYNLRQTDLFAQGDGNAS

SEQ ID NO: 57777 - DNA, 960 bp, Unknown
  Obtained from environmental sample
  misc_feature (1)..(960): n is a, c, g, or t
gtgctctacgggacatatgggaactgttcgattttcatgcgggaaattattagcgcccctaatcaggggatgatgggttttctggttcccgagtttaatctcagcgaagaattgcaagcattgttccagtccgttagtcctgcaaccatcgaccggaaactcagaaaggcaaaaaagcggtatcgtctgaaaggcgtatccaccaccaaggcggggacgctgctgaaaagccagatccccatacgggtttgttttgaccggaacgagaagcgcccggggtttttcgagacggataccgtcagccactgcggggtgaacgcatccggccagttttgccagaccttgacgctcaccgacgtgggttcagggtggaccgaagagtgcgccctgctcaacagcgcccaccgctgggtcaaggaacagatcgcccgcgccaaggatacactgccgttccccatgctcggcatcgacagcgataacggcggggagttcatcaaccaccagctccttgactggtgcctccacaacgacatcaagttcaccagaggccgcccctaccggaaaaacgacaattgcttcgtcgagcagaaaaacggcgatgtggtacgaaaaactgtcggatatgcccgttttgagggtcaaaacgcgttcgatgccctgactgatgtataccgttatttgaacccgcttctaaattatttttatccgacgctccgcctcatcgccaaggaaaaactcccctcgggcaggtacaaaaaaatttacgagaaagaacccaagacgccttgccagcggcttcttgagtcctctgatctgagtgacgtgtgcaaggaggaactccgtcgcagaaaggctgctctgaatcctgttgagttgaaacgtgctatggatgaggcacgggacaggctcttgaaactttccgtcatagagtccagtattccttccagtaaggtttcttga

SEQ ID NO: 57778 - protein, 319 aa, Unknown
  Obtained from environmental sample
  DOMAIN (87)...(267): Integrase core domain
  misc_feature (1)..(319): Xaa is any amino acid
MLYGTYGNCSIFMREIISAPNQGMMGFLVPEFNLSEELQALFQSVSPATIDRKLRKAKKRYRLKGVSTTKAGTLLKSQIPIRVCFDRNEKRPGFFETDTVSHCGVNASGQFCQTLTLTDVGSGWTEECALLNSAHRWVKEQIARAKDTLPFPMLGIDSDNGGEFINHQLLDWCLHNDIKFTRGRPYRKNDNCFVEQKNGDVVRKTVGYARFEGQNAFDALTDVYRYLNPLLNYFYPTLRLIAKEKLPSGRYKKIYEKEPKTPCQRLLESSDLSDVCKEELRRRKAALNPVELKRAMDEARDRLLKLSVIESSIPSSKVS

SEQ ID NO: 57779 - DNA, 1362 bp, Unknown
  Obtained from environmental sample
  misc_feature (1)..(1362): n is a, c, g, or t
atgaaagagggcgcagtaatatcccgtaatagcgctgacggggtacatatttgggagagcggtggaaagtttatcatgaatggcgggacaatttcaggcagtaatggcagcggggtatatgtgaatatcagcggcgcagactttaccatgaacggcgggacaatttcaggcagtaaaggcagcggcggcggggtatatatttatagcggaaagtttaccatgaacggcgggacaatctccggcaataccgccaccagtggcggcggcggggtgtgtgtaaaaactaacggaacttttatcaaaaacccacaaggcacgattgttccagactggcctattccaggcaagccgggcgagcctattccgggcgggactatttacggctacagcgcaagcgatcccaataatcccctttggaataaggttgagaacagttccggcattcaaaacaaccggggccacgcggtgtatgtggataccagtcccgcaaagcgcagggaaagcacggcggggccggaggtgggtttgagttattcatctgcgggatcgtccggggggtggcagataattgaaatggtatgggtgcccggcggcagtttcgagatggggaaggaactgggaaccgccgggacaggcgacgtaactcctgtacatacggtaacgctgaccagcggtttttacatgggcaaataccaagtaacgcaggcgcagtatcaggcggtgatagggaacaacccgagtaactttaaatcaaatcctgcagcgggggagttacaggggaatcgtccggtggagtgtgtaaactggtatgacgcgatagagttttgcaatgcattgagcaaaaaggaagggttaagcccatactacactatagacaaggtaaacaaagacccgaatatcactaacagttatgactcgtataaatggacggtaacacgcaacagcgcggcgaacggctaccggctgccgactgcggcgcagtgggagtacgcggctaaggggggaaacggcacgcctgggaattatacgtattcagggagcaatacagttggagatgttgcatggtatagggataatagtggcagcaagacgcatgaagtagggaagaaggctcctaatggacttggtatttacgacatgagcgggaacgtgcaggagtggtgctgggactggtatggaagctatacgagcggggcgcagactgatccgcagggtgcggcttctggcgactcccgggtgcaacgtggcggttgttggaacgacaatgattcgcactttgcttcggtgcgttcggtatctccaaacggcaactatccgcacgactattacatcgggctcggtttccgtttagtgcgcccatga

SEQ ID NO: 57780 - protein, 453 aa, Unknown
  Obtained from environmental sample
  DOMAIN (188)...(452): Domain of unknown function (DUF323)
  misc_feature (1)..(453): Xaa is any amino acid
MKEGAVISRNSADGVHIWESGGKFIMNGGTISGSNGSGVYVNISGADFTMNGGTISGSKGSGGGVYIYSGKFTMNGGTISGNTATSGGGGVCVKTNGTFIKNPQGTIVPDWPIPGKPGEPIPGGTIYGYSASDPNNPLWNKVENSSGIQNNRGHAVYVDTSPAKRRESTAGPEVGLSYSSAGSSGGWQIIEMVWVPGGSFEMGKELGTAGTGDVTPVHTVTLTSGFYMGKYQVTQAQYQAVIGNNPSNFKSNPAAGELQGNRPVECVNWYDAIEFCNALSKKEGLSPYYTIDKVNKDPNITNSYDSYKWTVTRNSAANGYRLPTAAQWEYAAKGGNGTPGNYTYSGSNTVGDVAWYRDNSGSKTHEVGKKAPNGLGIYDMSGNVQEWCWDWYGSYTSGAQTDPQGAASGDSRVQRGGCWNDNDSHFASVRSVSPNGNYPHDYYIGLGFRLVRP

SEQ ID NO: 57781 - DNA, 423 bp, Unknown
  Obtained from environmental sample
  misc_feature (1)..(423): n is a, c, g, or t
atgaaaaagagaatgtatttattatgcggcatattcgccgcggtaatgattatcgcggcggtgtttacctcttgtgttacccctgcagaaaattcattagacaccccttcagttcccgttcactcacaccagtggggtgaatggacagtaacaaaagacgcaacctgtgcggaaaaaggtgaagaaacaagaatttgtacacttgatgcaacacacaaagaaacacaggaaataaccataaaccccgacgcgcatgactggcaacagttgagcggaaccgcgccgacttgtacaacaacaggaaacgggacaagaaagtgtagcctctgcggcaaagaagaaagcggtgttctgcccgcgcttggtcacaacttcgttaactggacattgacaaccgcgccgactgttccgacgaaggcatga

SEQ ID NO: 57782 - protein, 140 aa, Unknown
  Obtained from environmental sample
  SIGNAL (1)...(29)
  misc_feature (1)..(140): Xaa is any amino acid
MKKRMYLLCGIFAAVMIIAAVFTSCVTPAENSLDTPSVPVHSHQWGEWTVTKDATCAEKGEETRICTLDATHKETQEITINPDAHDWQQLSGTAPTCTTTGNGTRKCSLCGKEESGVLPALGHNFVNWTLTTAPTVPTKA

SEQ ID NO: 57783 - DNA, 1548 bp, Unknown
  Obtained from environmental sample
  misc_feature (1)..(1548): n is a, c, g, or t
atggattacaggtctttttttgctgtcatgtttgccgttttatcaactcttataacgcccacagcggctcaagctaaagaagatcgattttatattgacttacagaaatttccgctgtacataaaaaccgattttaacctttccgacgccgcctctcccgatttgcgggacggctcatggcaggttaaggaccaatggtacggcgcggttgttcgcaggctgggtctgcccggattgccgaaacgtgtttttttgtcgcccaggggcaggccggaacaggaatggacttttgtgattccctttacaaatgacacgtctttggacgcgtccgttaacggcgacagagcccctattattccgtgtttgtatttggcgactataggcatcaactgggagatatacctgaacgggtccaagataaggaaggaaatgcatttatccggcgggcatatcatggaacagcactacgagcgttatgtaaccgttcccataaacagcagcctgttgcaaaaagggaaaaattttctcgcgttccgcattgtaggggatccgacggattatacaaccggctttacatataaatttccttattatattgctgactttgattatataacgcgtaaacataacgggattatccaggcaattattatttcgatacttgtgatgctggggatattccactttttgttttccgccattttccgcgaataccgctataactttgcctgcggagtttttacctttggcatgggtctgtattatttactgcggaccagttggattcatcagattatccctgataccgccgttgtgatgaagctggaatactttacgctttattttatgatactggcccttatggcttatacggacaaactttgcaacgagcgttattttattgtaacaaaaatttacggcgttttttgtctggttctgggagtgtcccagttgtttttttcaagaacttacggaagcgaagccgcgggcgtctggcaggttgcgggaattatggcaatggtatggatttatatttataacataattattccgtttaagcgcgaattgaaaaaaggcaaaaaaaccgccgccgctctggttaatacttatccgggaaacctgttaattttttttaccattttcggcctgaccgtagtctttgatcttattgattctcttgccatgcattactctctggatttagccagatacggcatggtattaatttcactggcggttacatttttgttattccgcatatcagtcattaaagacagggaacttaaaataaaaagcgccctgcttgaaaaagcggctaatcccgtgtccgcgcgtgaaaagttatttaattcattcggtttaacggaacgcgagaaggaaattgcccggttaatggtagaagggcaggacaatacggatataggagagcggctttttttatccaacagcaccatcgcgtttcatgtgacgaatattttccgtaaattcgggattattgacgggaagaataaggggagagcgatgtttttggcgaaactgctgaattag

SEQ ID NO: 57784 - protein, 515 aa, Unknown
  Obtained from environmental sample
  SIGNAL (1)...(25)
  DOMAIN (451)...(511): Bacterial regulatory proteins, luxR family
  misc_feature (1)..(515): Xaa is any amino acid
MDYRSFFAVMFAVLSTLITPTAAQAKEDRFYIDLQKFPLYIKTDFNLSDAASPDLRDGSWQVKDQWYGAVVRRLGLPGLPKRVFLSPRGRPEQEWTFVIPFTNDTSLDASVNGDRAPIIPCLYLATIGINWEIYLNGSKIRKEMHLSGGHIMEQHYERYVTVPINSSLLQKGKNFLAFRIVGDPTDYTTGFTYKFPYYIADFDYITRKHNGIIQAIIISILVMLGIFHFLFSAIFREYRYNFACGVFTFGMGLYYLLRTSWIHQIIPDTAVVMKLEYFTLYFMILALMAYTDKLCNERYFIVTKIYGVFCLVLGVSQLFFSRTYGSEAAGVWQVAGIMAMVWIYIYNIIIPFKRELKKGKKTAAALVNTYPGNLLIFFTIFGLTVVFDLIDSLAMHYSLDLARYGMVLISLAVTFLLFRISVIKDRELKIKSALLEKAANPVSAREKLFNSFGLTEREKEIARLMVEGQDNTDIGERLFLSNSTIAFHVTNIFRKFGIIDGKNKGRAMFLAKLLN

SEQ ID NO: 57785 - DNA, 471 bp, Unknown
  Obtained from environmental sample
  misc_feature (1)..(471): n is a, c, g, or t
atgggaacttcggtagtttttaagcctacggcggtacaaaaacaagctcttgcgcttataaagagcggggctatacatatattgctttatggcggttcccgttccggcaaaactaccgtactggttatggtgataattttccgcgctttgatgtatgccggttcccgccatttgatttgccgttaccgcgctaaagacgctcgttcatcggttctgcgtgaaactttaataccgtggcttgataataccattggcaaaaacggatacacttatttagcccatgaaagtatgattactttatataacggttctgaaatttggattggcggtttaggcgatagagaacaagcggataaaatacttgggcatgaatactgcactatttactttaatgaaatttcacaattaagttatattgccgttactaccgctattccaggctgcaatgcgggtaaaggtgctcgccgataa

SEQ ID NO: 57786 - protein, 156 aa, Unknown
  Obtained from environmental sample
  misc_feature (1)..(156): Xaa is any amino acid
MGTSVVFKPTAVQKQALALIKSGAIHILLYGGSRSGKTTVLVMVIIFRALMYAGSRHLICRYRAKDARSSVLRETLIPWLDNTIGKNGYTYLAHESMITLYNGSEIWIGGLGDREQADKILGHEYCTIYFNEISQLSYIAVTTAIPGCNAGKGARR

SEQ ID NO: 57787 - DNA, 732 bp, Unknown
  Obtained from environmental sample
  misc_feature (1)..(732): n is a, c, g, or t
atggccgagcattccgatattttggagcttgccgaagaattggatgttcaagggctttcgattacagttccttataaagaagcggttttgcctatgcttacaagacgttcggcggtggtacattctatcggagcatgtaatgtcatgtttcgttccgttgacggctggtttggcgataataccgactgtaccggtttttcggcatcaattcttgcttttctgggcaaaaaaaatcttaaatggaaaaaagttaccataattggggcaggcggcattgcccgttctgtggccgccgaagtatttcgtatgggtggcaaagcccttattttgaaccgtaccattcacaaagccaaagatatcgcgtcactgtacaatttccgctggggaggactggacgaacatggcgttgaattaatagataaatattcggatataattatacaggccacatcagttggaatgggaggatacgaggctttcgatcctttggagctatatagttttaccggaaaagaagccgtgatggatttggtatattatccggcgcaaacgccgtttttaacacgggccgccgccgccggatgcaaaaccataaacggttacgatatgataatacatcaggcgtgtcttcaatataaacaaattatgggaagggacatctctcaacagcttttatcgcgggttataaatataacgggagcaagttcatggaacaagattctaacagattaa

SEQ ID NO: 57788 - protein, 243 aa, Unknown
  Obtained from environmental sample
  DOMAIN (1)...(49): Shikimate dehydrogenase substrate binding domain
  misc_feature (1)..(243): Xaa is any amino acid
MAEHSDILELAEELDVQGLSITVPYKEAVLPMLTRRSAVVHSIGACNVMFRSVDGWFGDNTDCTGFSASILAFLGKKNLKWKKVTIIGAGGIARSVAAEVFRMGGKALILNRTIHKAKDIASLYNFRWGGLDEHGVELIDKYSDIIIQATSVGMGGYEAFDPLELYSFTGKEAVMDLVYYPAQTPFLTRAAAAGCKTINGYDMIIHQACLQYKQIMGRDISQQLLSRVINITGASSWNKILTD

SEQ ID NO: 57789 - DNA, 411 bp, Unknown
  Obtained from environmental sample
  misc_feature (1)..(411): n is a, c, g, or t
gtgattaagggcgggggaggggcgatgttaattgaaaagttagccgcgtattcttcagcgttattcgccgttattgtggacgagtcaaagatcgtacaaagcatagggacagtttttccgatacctgttgaggttgttccttccgccagagttcaggcggcgagagtccttgaaaaactaggcgcgtctgtttttcttcgggaggcgctgaggaaagcgggccctgtcatcacagagcacgggaatttaattcttgacattcgtttcagctcccctgttgatcctgtgtttatggagaccgagattaataaaacccccggcgttgcggaaaacggcctttttacgcaaaatatcccggtagtctatatcgcgcgttcaaacggaacaatagaaacaagaggtgtaaaatga

SEQ ID NO: 57790 - protein, 136 aa, Unknown
  Obtained from environmental sample
  DOMAIN (1)...(130): Ribose 5-phosphate isomerase A (phosphoriboisomerase A)
  misc_feature (1)..(136): Xaa is any amino acid
MIKGGGGAMLIEKLAAYSSALFAVIVDESKIVQSIGTVFPIPVEVVPSARVQAARVLEKLGASVFLREALRKAGPVITEHGNLILDIRFSSPVDPVFMETEINKTPGVAENGLFTQNIPVVYIARSNGTIETRGVK

SEQ ID NO: 57791 - DNA, 555 bp, Unknown
  Obtained from environmental sample
  misc_feature (1)..(555): n is a, c, g, or t
atgaaagaagacataaaagaaatcgccgcccgcgtaaaggtcttgcgggaaattgaagaaatttcagatgaagctctcgcaaaagaattgggctttgagttatcggattatcgggcgtgggaatccgcgcagaaagattttcccgtaggcgctcttgttgaaattgccgcgcgctttaaggttgacctttcagagcttataagcggggccgcttccaaacttaaaacattttgcgtaacgcgcgcgggacaggccccagaagtgagccgccgccccatgtacggctactggaaccttgcttttaattttcaccgaaagaaagcggagccgtttttggtggaagcgtctcccgagacggagaacaaacccatcagtcttaacacccatcccggtcaggaatttgattatgtgctggaggggaaactgctggtttcaatcagcggccatgaaattgaacttggccccggcgactgtgtatattacgattccaacgagccccacggaatgaaggcaatgggcggaaagaccgcgcgttttctggcgttcgttttttag

SEQ ID NO: 57792 - protein, 184 aa, Unknown
  Obtained from environmental sample
  DOMAIN (12)...(66): Helix-turn-helix
  misc_feature (1)..(184): Xaa is any amino acid
MKEDIKEIAARVKVLREIEEISDEALAKELGFELSDYRAWESAQKDFPVGALVEIAARFKVDLSELISGAASKLKTFCVTRAGQAPEVSRRPMYGYWNLAFNFHRKKAEPFLVEASPETENKPISLNTHPGQEFDYVLEGKLLVSISGHEIELGPGDCVYYDSNEPHGMKAMGGKTARFLAFVF

SEQ ID NO: 57793 - DNA, 1854 bp, Unknown
  Obtained from environmental sample
  misc_feature (1)..(1854): n is a, c, g, or t
atggcgttgattgacaaatatttacctaagacagagtttgactcttacgaagatttttataaaaatttcgacattacatatcccgataactttaattttgcctacgatgtggtagatgtgcttgccaaagaaaagggcggcgagcgggcgcttcagtggtgcgatgaaaaaggcgcggatgccgcttttacatttaacgaaatgaaggagtattccaataaggcggcaaatgtgttacgcgaagccggaataggcaggggcgatactgttatgctgatactgaagcgccgctgggaatactggccggtaattctcgccctgcacaaacttggggcaatcgccattcccgcgactcatctgcttaccaccaaggacattgtttacaggtgcaatgccgccgacatcaagggaattatctgcgtagacgatcttgatcttatgtaccgcatagacgaagccgaggcgatcatggaacgcagttccgaaagcgacggacttgccagtcttcgttacaaagcttttgtccgctcggttcacaccccaaaggacagcaatcccgccgaaatcgccgccgcgcgccttgccgaaaaaagaaaaaaaccgcacccgaaagatgaaccgttttcaggcagcgtaacagacgggccagttgaagttttcggggtagatcacgaggcggaaagaaatttgtcattaacggaaaaattatcatggatcgatttcagcgtactttttaacgccgcttcttctgattttataaggccggaaaaaccaaattccaacgatgatattatgctgctgtattttacatccggcacaaccggaatgcccaagatggtgcgccacaattatacttatcccctggggcatatcgccaccgcgaaatactggcatcaggttgtccccgaaggcttgcacctaacggttgcggacacaggctgggcaaaagccgcgtggggctgcatatacggacagtggctctgcggcgcgggtatttttgtgtacgattatgaccgttttgtgcccgccgatatgcttagtgttatcagcaaatatcgtctgacaagtttttgcgctcctcccacgatataccgcttctttataaaggaagatttaaagaggttcgatttttccgcgctaaaaacatgcactgtcgccggcgagccgcttaaccccgaaattttcgataaatttttggagggtacggggcttaaactgcgcgaatgttacgggcaaacggagctgaccgtaacgctttgcacctacccgtggctgaaaccgaaacccggctccatgggaaaacccgcgcccggttacgacatagatcttgtgctggaagacggaacttcctgcaaaatgggcgaggaaggagagatcgtagtacgcaccgacaaacgcaaaccgtggggaatgttcagcggctattaccgcgacgacgcccttacctcgagcgtatggcatgacgatatctattacacgggcgatgtcgcgtggaaagacgaagacggctacttctggtttgtcggccgcaatgacgacgtaatcaaaagctccggctaccgcatcggtcccttcgaggtggaaagcgctcttatggaacatcccgccgtgcttgaatgcgcgataaccggcgttcctgatgaggatcgcggagcggtagtaaaagcgacagtaatactcgcaaaaggatttgaagcttccgaagagcttaaagttgaattgcagaatcatgtgaagaagacgacagcgccttacaagtatccgcgtattattgaatttgtagacgagcttcccaaaacaataagcgggaaaatcccgcgcgtgcagattcgggatgaagataaaacccaatga

SEQ ID NO: 57794 - protein, 617 aa, Unknown
  Obtained from environmental sample
  DOMAIN (64)...(542): AMP-binding enzyme
  misc_feature (1)..(617): Xaa is any amino acid
MALIDKYLPKTEFDSYEDFYKNFDITYPDNFNFAYDVVDVLAKEKGGERALQWCDEKGADAAFTFNEMKEYSNKAANVLREAGIGRGDTVMLILKRRWEYWPVILALHKLGAIAIPATHLLTTKDIVYRCNAADIKGIICVDDLDLMYRIDEAEAIMERSSESDGLASLRYKAFVRSVHTPKDSNPAEIAAARLAEKRKKPHPKDEPFSGSVTDGPVEVFGVDHEAERNLSLTEKLSWIDFSVLFNAASSDFIRPEKPNSNDDIMLLYFTSGTTGMPKMVRHNYTYPLGHIATAKYWHQVVPEGLHLTVADTGWAKAAWGCIYGQWLCGAGIFVYDYDRFVPADMLSVISKYRLTSFCAPPTIYRFFIKEDLKRFDFSALKTCTVAGEPLNPEIFDKFLEGTGLKLRECYGQTELTVTLCTYPWLKPKPGSMGKPAPGYDIDLVLEDGTSCKMGEEGEIVVRTDKRKPWGMFSGYYRDDALTSSVWHDDIYYTGDVAWKDEDGYFWFVGRNDDVIKSSGYRIGPFEVESALMEHPAVLECAITGVPDEDRGAVVKATVILAKGFEASEELKVELQNHVKKTTAPYKYPRIIEFVDELPKTISGKIPRVQIRDEDKTQ

SEQ ID NO: 57795 - DNA, 1215 bp, Unknown
  Obtained from environmental sample
  misc_feature (1)..(1215): n is a, c, g, or t
atgttaaagttgaaatttatcggtttgttatcatgtttattactgctggcgttaggcgcttgcggaagttcgccgcaatctgataacggcgcttccgccgcggaagcccaagccgcggcgcaggcggcgcttgaaaggcttgacgggcaggttgggcggccgaaagacgcgtcaaacgtctcttcgcgacagccgtcagacgggcagagtgtttcttcctcgacgcaacaacaacaaacaaccgcgaataacagtaaaacaaaacccgcttgggtggattccgttgaatccgtatacaaaagatcgcagtatgtagccgccgtggggcacgcctccgaccgcgagatggcggagaaaaacgggtttgccaatcttgccggttttttcgggcagtcgattcacgcggatcaaaccataacaaatacttaccgcgaggctgtaaaaaatggcgtaacgtccggctggaccgacgacattaacatggaaaacacaattaggactacggcctctatggaaactcttgcggcggcgcagataagagaagtttggcatgataccagaaacaatgttttttacgcggccgccgtcatggaaaaatcaaaagccgccgtaatatacacggatatgataaccgcaaatcagaacatgataaaaaatcttattaccatgaatcagaccgaaaaaaattcaatggaaggattttcgcggtatcaatttgcggcggctgtggcggatatcaatgttacttacgggaatgtgttaaaattaattgacgctcccgttcccgcaggccttgttaaaggcgacgaatacaggctggaagcgcagaatatagcaaagacaattcctgtcggcataaacgtaaagaatgacaaagccggaagaattcagggcgcgtttgccaaagcgctttccgatattggtttcagaagcggcggcaataattcgcgctatgttctggacgttaatatatccgtctctcccgttgatcttccaaataatacaaataaatttgcccgtatagaacttggcgcgaatcttaccgacacaagcgtaaaatccgtattgctgccgtacaattttaactcgcgcgaagggcacgcgactgccgcggaagcggaaaatcgcgcatataccgcggcggaacgaaagataagccaagaatataaagacatattgtttacttatctttctcaacttctgccaaaaaagtaa

SEQ ID NO: 57796 - protein, 404 aa, Unknown
  Obtained from environmental sample
  SIGNAL (1)...(27)
  misc_feature (1)..(404): Xaa is any amino acid
MLKLKFIGLLSCLLLLALGACGSSPQSDNGASAAEAQAAAQAALERLDGQVGRPKDASNVSSRQPSDGQSVSSSTQQQQTTANNSKTKPAWVDSVESVYKRSQYVAAVGHASDREMAEKNGFANLAGFFGQSIHADQTITNTYREAVKNGVTSGWTDDINMENTIRTTASMETLAAAQIREVWHDTRNNVFYAAAVMEKSKAAVIYTDMITANQNMIKNLITMNQTEKNSMEGFSRYQFAAAVADINVTYGNVLKLIDAPVPAGLVKGDEYRLEAQNIAKTIPVGINVKNDKAGRIQGAFAKALSDIGFRSGGNNSRYVLDVNISVSPVDLPNNTNKFARIELGANLTDTSVKSVLLPYNFNSREGHATAAEAENRAYTAAERKISQEYKDILFTYLSQLLPKK

SEQ ID NO: 57797 - DNA, 1230 bp, Unknown
  Obtained from environmental sample
  misc_feature (1)..(1230): n is a, c, g, or t
ttgggagggggtatgcaaaaagaagggtacatattaagaaacaacgaatatatcagaatattgccggcgtgggcgcaggaacttgcggcaaaatacggctctaaaacggcgaatctttacatattgcacggcaacatccgggacctgcttccgcacagaaaaaaagaagatgaatttgtttttacaagggtacaggagtacatctctgaaattttattcggcaacagggatataatcgcttactatgaccgttcaggcggaatatcattctgcgaaccgcaaatggaaagcgactatcttgccgccgctccaaagtttgcggtaagccccgacattgataaaagtgattttgtttcaagcgatcccgaaaaaagttttccgtatctggaaaaatattttctttcgtgtattcccgtggacagacgcgaaaaatgccgcatggtgtttattatagattatgccgaacatatagttcctgcgggggacttaatccgcctttccgataccgaccggtattgtatggtaacatttaacagatgggcgaccgatcccaaatttattaacggcgacatttcaattatcctgttaactgaaaatcttgccgatatttcttcccgtcttacgggttctccttcaactgtaaaaataagcgtgccttttcccagcatacaggtaagggaaagttttttgcgctcaagggaaaaagaaggaaaacttctgcttgaacgcgggttgactcccgataaactggctatggttacatcgggcgttaatcttatgaatctgaaccgccttgccgctgaaagttttgaagaaaacaaacccatatcgcttgattttatgcggatgaaaaaaaaggagataatcgaaaccgaagcggcggggcttttggaatttatggaaacttcttttaatctgtctcatgtttcaggtcacgactttgttaaaaagcggtttaagaacgcggcaaaggcaataaagatgggtcgccccgacgtactgccgatgggttatctgattgccggtcctgtcggaacaggtaaaagttttatggttaacgcgtttgccggagagataggaatcccgatggtaaaattccgcaacttccgcaccaagtggcagggcgagaccgaagcaaatctggagaaagttcttaatatacttatcgcgatggctcctgtcggagtaatgatagacgaagcggacgcattctggctcggccgattctga

SEQ ID NO: 57798 - protein, 409 aa, Unknown
  Obtained from environmental sample
  misc_feature (1)..(409): Xaa is any amino acid
MGGGMQKEGYILRNNEYIRILPAWAQELAAKYGSKTANLYILHGNIRDLLPHRKKEDEFVFTRVQEYISEILFGNRDIIAYYDRSGGISFCEPQMESDYLAAAPKFAVSPDIDKSDFVSSDPEKSFPYLEKYFLSCIPVDRREKCRMVFIIDYAEHIVPAGDLIRLSDTDRYCMVTFNRWATDPKFINGDISIILLTENLADISSRLTGSPSTVKISVPFPSIQVRESFLRSREKEGKLLLERGLTPDKLAMVTSGVNLMNLNRLAAESFEENKPISLDFMRMKKKEIIETEAAGLLEFMETSFNLSHVSGHDFVKKRFKNAAKAIKMGRPDVLPMGYLIAGPVGTGKSFMVNAFAGEIGIPMVKFRNFRTKWQGETEANLEKVLNILIAMAPVGVMIDEADAFWLGRF

SEQ ID NO: 57799 - DNA, 924 bp, Unknown
  Obtained from environmental sample
  misc_feature (1)..(924): n is a, c, g, or t
atggaaaagcaggatcagatcagcgcgaaaagcgcgccgaagcaggatcaccccagcctgttgcgtataacgcagagcttccggcaaaacgaattttcggaacgctatatcaacggccttttggacagggcgcgcaaggagctgcccctggaaacgctggatgattataccgcggttcagaatcagttccttgtctggattggggaaagtattaaaattttcaatatgccgcagaaagatgagagcgccatttccgccgcgggccgggttttggttctggtcggccccacgggggtaggcaagaccaccactatcgccaaactggccgtggtttacggcatcggcagcgtgaacaggccggcgctttcagtccgggtatacaccattgacacgttcaagatcggcggaaccgaacagcttgagaaatactgcgaaataatggaggtagtgcctttcggcattattaacaatcagacggagctcagaaaacagattgacttgtaccgcgaagagaccgatctgattctgattgataccattggaagcagtccgaacgatcccaaaaaactgggggagatgcaggcgcttcttaacgcctgcggctcaaaagccgaggtttaccttgtgctttccgcgagcaccaagaccaacgatattgaacatattctaaggcagtttgaaccgtttaactatcaggcggttttgcttaccaagatggatgaaaccaggaccgtgggcaatataatttccgcgcttgcggaaaagggaaaaccgatatcattcattaccaacgggcagcagattcacaaggatattaaaaaggcgaacatagtcgggttcctcatcaacctgcaagggttcaccaatgttgacagggatgaaatggagaagcgtttccccgccgcgcaggcggatataatttaa

SEQ ID NO: 57800 - protein, 307 aa, Unknown
  Obtained from environmental sample
  DOMAIN (87)...(286): SRP54-type protein, GTPase domain
  misc_feature (1)..(307): Xaa is any amino acid
MEKQDQISAKSAPKQDHPSLLRITQSFRQNEFSERYINGLLDRARKELPLETLDDYTAVQNQFLVWIGESIKIFNMPQKDESAISAAGRVLVLVGPTGVGKTTTIAKLAVVYGIGSVNRPALSVRVYTIDTFKIGGTEQLEKYCEIMEVVPFGIINNQTELRKQIDLYREETDLILIDTIGSSPNDPKKLGEMQALLNACGSKAEVYLVLSASTKTNDIEHILRQFEPFNYQAVLLTKMDETRTVGNIISALAEKGKPISFITNGQQIHKDIKKANIVGFLINLQGFTNVDRDEMEKRFPAAQADII

SEQ ID NO: 57801 - DNA, 1686 bp, Unknown
  Obtained from environmental sample
  misc_feature (1)..(1686): n is a, c, g, or t
atgccggtcaggtacatggctattgatacggagtattccgccggatccatcaccgaggaagaggcccaaaggcgcaaggccgagattcaaaaagaatcgcagttttacggagcgatggacggcgccagtaaattcatttcgggaaacgtcaagataggaatcctcattaccgccattaatattttaggcgggataatagtcggtactaccattcatcatgaggatataacggaggcgttaaaaacttacatccgtttttcagtcggcgacggactgctttcacaaattcccgccctgctcatctccaccgcaatgggtattgtggttacccgggccgcggccacgggcaacctctccgaacaggtggcggagcaatttactatctcttcgagaatctattggatttccgccgccgtactgatgtgttttgccctccttcccagcgctcccatttccctccgtgtggtattgatttttttggcggctctgatggcttttgccggttacagtgtcggccgcaaaaagaagaaggcggaaagctttaacgagatgatggcgaagtccaaagatcccaaaaaaagcaaggaagacggctctgatatatccccgattgtcccccttgacgccctttgtctggaaatcggctacggccttataccgctggttgacaaggaaaaaggcgctgaactgctggaacgggtgcagggggtcaggcgtcagtcagcgctggaactcggccttgttatccccaaagtgcggatcattgacaatatgatgcttgatccttcggaggactgttttaagatcgagggagttgacgtaggcaggagcaagatacgcatgggatttttcctctgcatcaatcctggtacggttacggaggaacttcccggtgataaaacagttgacccctcttatgggattccggcccaatggatcagcgaggacaggcgggacgaggctgaacgggcgggctatactgtggttgatccgcctacgatcatcgccacccacctgacggagattatcaagcggcacgcggcggagctcctcggcctgcaggacacacagtcgattctggatacgctccgcaaggaataccctgctgtggtggacgaggttcaacggcctgatctgaaagtgccggtcgttaagattcaaagaatactcctcgggcttttgaaggagagggtatcaatccgcaacatggtgacgatactggaggcgattgccgaatacgcgccgcttacaggcaatgtccagtttcttacggaaaaagtccgccaggcgctgggtagtcagatttgccatcagtacaccgatgaaaaccacaaattgcgcgtgcttacaatcgcgccggaactggaacagaaaatcattgagagcaagtacgagacctcttccggcatagtgtgcgccatggaaccgcccttgcagtcggcgtggatcagggccgttaaaaaatccgagtcggcggtaataaacaggggcttccagcccgttatactctgttccgaagaggcgcgttacctggttaagaattcaacggaaagggagcttcccaaactggctgtaatttccgtgaaggaaattacgccggatattattcctgaagctctgggtattataaggctggaaggcgcgccttccagagaaggcgcgccttctaaagaaggcggggagtag

SEQ ID NO: 57802 - protein, 561 aa, Unknown
  Obtained from environmental sample
  DOMAIN (5)...(536): FHIPEP family
  misc_feature (1)..(561): Xaa is any amino acid
MPVRYMAIDTEYSAGSITEEEAQRRKAEIQKESQFYGAMDGASKFISGNVKIGILITAINILGGIIVGTTIHHEDITEALKTYIRFSVGDGLLSQIPALLISTAMGIVVTRAAATGNLSEQVAEQFTISSRIYWISAAVLMCFALLPSAPISLRVVLIFLAALMAFAGYSVGRKKKKAESFNEMMAKSKDPKKSKEDGSDISPIVPLDALCLEIGYGLIPLVDKEKGAELLERVQGVRRQSALELGLVIPKVRIIDNMMLDPSEDCFKIEGVDVGRSKIRMGFFLCINPGTVTEELPGDKTVDPSYGIPAQWISEDRRDEAERAGYTVVDPPTIIATHLTEIIKRHAAELLGLQDTQSILDTLRKEYPAVVDEVQRPDLKVPVVKIQRILLGLLKERVSIRNMVTILEAIAEYAPLTGNVQFLTEKVRQALGSQICHQYTDENHKLRVLTIAPELEQKIIESKYETSSGIVCAMEPPLQSAWIRAVKKSESAVINRGFQPVILCSEEARYLVKNSTERELPKLAVISVKEITPDIIPEALGIIRLEGAPSREGAPSKEGGE

SEQ ID NO: 57803 - DNA, 780 bp, Unknown
  Obtained from environmental sample
  misc_feature (1)..(780): n is a, c, g, or t
gtggcctgggaaaaaatcgccgttccttacggatacggaaaaccctggcattgttcctggttccgcgcttccttcatctccccggctcaaagcaggtatccgctttatattcgagcgatcccgaacgcggattctttggtttttattgacggcaaaccggccggggcttttaacccggcgcataaaaaagtcatggttaaggcggacggccaaaaccatacccttcacatcgagtcctacgcgggccattactatccaggatgccaccccttccagggccgtcaggtaatccttacgctgggccggcacatcgacgactatcccaatacctttgtcggcggcgcattggtagaacggatcgaacctgtctatgccctgtactacgatgttctctgcctttttaaccttgccaaaaccctggacgacaattcgctgagaaaagccagaattataagcgggctgtacgatgccctaatggacattcatttttcttccacagggacagttctcgaagaagaagctatcgcggccaggaagaagattctcccgcttcttgaagccaaaaacggttccaccgttccggagatttacctcataggccacgcgcacatcgatcacgcctggctatggcacataggcgagactgaacggaagatcgcccgcacgtatatcaacatggctaagctcgctgaagaataccccgaattcatttttatccaaacccagagcgcacagctcgaaattgtcaaacgtgaataccctgaaatttttaggccgtga

SEQ ID NO: 57804 - protein, 259 aa, Unknown
  Obtained from environmental sample
  misc_feature (1)..(259): Xaa is any amino acid
MAWEKIAVPYGYGKPWHCSWFRASFISPAQSRYPLYIRAIPNADSLVFIDGKPAGAFNPAHKKVMVKADGQNHTLHIESYAGHYYPGCHPFQGRQVILTLGRHIDDYPNTFVGGALVERIEPVYALYYDVLCLFNLAKTLDDNSLRKARIISGLYDALMDIHFSSTGTVLEEEAIAARKKILPLLEAKNGSTVPEIYLIGHAHIDHAWLWHIGETERKIARTYINMAKLAEEYPEFIFIQTQSAQLEIVKREYPEIFRP

SEQ ID NO: 57805 - DNA, 2169 bp, Unknown
  Obtained from environmental sample
  misc_feature (1)..(2169): n is a, c, g, or t
gtgaaagagcctaccgcagggaaactgggaacccacggcggcatgtgggtagaggccgactgcaatatttctggcggtgaatctctggtgcgccagtttctggtgggtaaaaaggcggttaaggaaatactcggctacgaaggggacaccctctggctgcctgatgtttttggttacgccgcaaccctgcctcagatactttccctctgcggaatcgaatatttcgtcaccagcaaaattaactggaacgatacaacccgcttcccctacaacacgtttatttggagggggatcgatggaacgggcgtaaagacccactacatcaactcttgggtgaccggctacaacggcaaggttaatcccgccgagcttgccgaaacctggaacaatgtgcagcacaaagagttacagtccgcttcgattaagccaatcggcgaaggtgatggcggcggcggaaccgcccgtggagacctggaggcagcccgccgtctcgccaatctggaaggcgctccaaaagcgggctggaaaaaagtctccaacgccctggaaagcatattcgccgaaagccctcattggccggaatggcggggagagctttacctggaacttcaccgcggtacctacactacccagggagcggttaagcgctacaaccgcaaactggaatttgccctgcggaacgcggagttcctctcaagccttgatatgctggaaaacggaacgccctatccccacgaaaggcttttatcgaactggaagctcctccttaccaaccagtttcatgacataattcccggttcttccatcggcagggtttacgacgaagcgaaagaaacctaccggaatatcgaagcggatctgactgagctctcaaaagccgcattgcaaaaactttccggctgcgcagacgccgctgtttcaggcgggctcaggttttacaacgatcttggctgggagcgggatgacccgatcagttttcaggctgacttaattaaaggggccgccgcactaaaggtgcttggagacgacagcgaaacagtatttcctcttcaacgctacatcgaccttgacggtaaggagaccgccgtgtgctgtccccgcctgcccccacttggctggattacgttaagtctcgcaaagtttactgcaagttcctgttttactttccgtgggaatagccttaaaaccccgttttatgaagtgggttttgacgaggcgggcaggatcacaagcctttttgatattatagggggacagggaattggtcgcgccccggcggcgcttataaacggttttgtcagcgctcaggatgtgcctgttctctgggatgcatgggacattgacgccgactggaccagatacctcaccgaagaaacccgccttctatcaacggagatcgccgcgtccgggcctgtctgtttcagaatcaggcgcaagtataaaatcgccgaggcgtctattntgagccaggacacggttttctacgcggcacaccccaggatagattttgaaactctggttgactggcgggaaaaacagcggctcctcaaagtacaatttgataccgccgtaaacaccgcacagatacgctgcgaggttcagttcggccaccttttacgaagcacgcacaagaaccttccgcaagaccgtgcccgttttgaattctgcgctcacaagtgggtcagccttgaggaagagggcggcggcctcgcccttctcaatgactgcaaatacggccacgatgccgaaggtggccgcgtacggctgaccctgctccgctctccaatagcgcccgatcccgacgcggacacgggggagcatcgctttacctatgccctactcccctttaccggtccttttggcaaatccgcccttgtccgttcaggctacgaacttaacgatcccgcccgtgtggaacctgccttcggttcttcggtcgctttggactctgcggattcatcagaatccgctgggccggcagaatattcgcttttcataacagaaggaaaaagcgtcataaccgaaacgattaaagcgcccgaagcttccgctgcggataacgtggagaagcgtcttgtgatccgtctttacgaaagcctcggcgggccggcaaagaccgttttgcgcttaacaggcctctcctgtcagccgtcgaaacagacatgctga

SEQ ID NO: 57806 - protein, 722 aa, Unknown
  Obtained from environmental sample
  DOMAIN (2)...(197): Glycosyl hydrolases family 38 N-terminal domain
  misc_feature (1)..(722): Xaa is any amino acid
MKEPTAGKLGTHGGMWVEADCNISGGESLVRQFLVGKKAVKEILGYEGDTLWLPDVFGYAATLPQILSLCGIEYFVTSKINWNDTTRFPYNTFIWRGIDGTGVKTHYINSWVTGYNGKVNPAELAETWNNVQHKELQSASIKPIGEGDGGGGTARGDLEAARRLANLEGAPKAGWKKVSNALESIFAESPHWPEWRGELYLELHRGTYTTQGAVKRYNRKLEFALRNAEFLSSLDMLENGTPYPHERLLSNWKLLLTNQFHDIIPGSSIGRVYDEAKETYRNIEADLTELSKAALQKLSGCADAAVSGGLRFYNDLGWERDDPISFQADLIKGAAALKVLGDDSETVFPLQRYIDLDGKETAVCCPRLPPLGWITLSLAKFTASSCFTFRGNSLKTPFYEVGFDEAGRITSLFDIIGGQGIGRAPAALINGFVSAQDVPVLWDAWDIDADWTRYLTEETRLLSTEIAASGPVCFRIRRKYKIAEASIXSQDTVFYAAHPRIDFETLVDWREKQRLLKVQFDTAVNTAQIRCEVQFGHLLRSTHKNLPQDRARFEFCAHKWVSLEEEGGGLALLNDCKYGHDAEGGRVRLTLLRSPIAPDPDADTGEHRFTYALLPFTGPFGKSALVRSGYELNDPARVEPAFGSSVALDSADSSESAGPAEYSLFITEGKSVITETIKAPEASAADNVEKRLVIRLYESLGGPAKTVLRLTGLSCQPSKQTC

SEQ ID NO: 57807 - DNA, 654 bp, Unknown
  Obtained from environmental sample
  misc_feature (1)..(654): n is a, c, g, or t
ttggcgcaagtctgggaagacaaccgcatctgttgtaccgtgaacaagctggcggcgctgtcgggcatgagggtgtccgagattctggggcttaaagggagttgtttgttcgacgaccacatttacgtctgtatgcagcatgacgcatacggctacaggccgacaaaaacgaaagacaagcataacataccgcttccggcttccctgatcggcgatttgaagctgctgaaagaaaagagcggggacggctatctgttttcaactgacggcgggggcagccccatttgcaggaaaacggttttgatgaatttgcgaagggcgctggtaaacatcggcattaccgccacagagattaaagagcgcaatttgcatatacacgcatggaggcattttttcaatacggagatgttaaagggcgggatgaccacggaacaggcgcaggcgataaccacgcataagagcgaaaggatgacggaacggtacacgcattttgacccgcttgagtttgtaaaggcgaaagaaattcaggaagccttgttacagcctgttgatgaaaaaccgcaagggcgggaagcggaaaaaaaggaactgccgccgaacgtgttttctttccccgtacaaagcataccgcaagaagaacggaaacaggcgtaa

SEQ ID NO: 57808 - protein, 217 aa, Unknown
  Obtained from environmental sample
  DOMAIN (1)...(171): Phage integrase family
  misc_feature (1)..(217): Xaa is any amino acid
MAQVWEDNRICCTVNKLAALSGMRVSEILGLKGSCLFDDHIYVCMQHDAYGYRPTKTKDKHNIPLPASLIGDLKLLKEKSGDGYLFSTDGGGSPICRKTVLMNLRRALVNIGITATEIKERNLHIHAWRHFFNTEMLKGGMTTEQAQAITTHKSERMTERYTHFDPLEFVKAKEIQEALLQPVDEKPQGREAEKKELPPNVFSFPVQSIPQEERKQA

SEQ ID NO: 57809 - DNA, 1041 bp, Unknown
  Obtained from environmental sample
  misc_feature (1)..(1041): n is a, c, g, or t
ttgcaaacgctctccacaatagcggctgccggttgcaaaacgctttatgttagcggcgaagaaagcgctgcgcaggttaagttaagggcagagaggcttggagcggctggcagcgatatgatgcttttttgcgaaacgtcgcttggtaaaattttggcatgtgcagagaaaataaaaccgcaggttatggttatagattccattcaaacagtgtatagcgaagatttgcccggcacgcccggcagtgtttcgcagcttagggagtgcgcgctgaagctgatggtttatgcgaagagcagcggaacagtcaccatattggtaggccacgttacaaaagacggtcaaatagcaggtccaagaatattggaacacatggttgacaccgttgcatattttgagggcgataaaaaagggcagtatcgaattttgagaacggttaaaaaccgctttggcgcaacagacgaaataggcgtttttgaaatgagctcgcttgggcttattcccgtgcaaaacccctcaaaagtttttttgcaagaaggggagctttcgcccggcagcgcagttagctgcaccatagaaggcagtcgcgcaatgctgtttgaaattcaggccttggttggcaaaacgagctatgccatgcctcaaagagtttctgccggagtggaggcaaaaaagctgacgattatactcgctcttttggagagattcgcaaaacttcaggtgagcaattccgatgtttttgtttctgttgtgggtggcttgaaattagaagaccccggcatagatttgcctcttgcgcttgcgatagttggcaatgcgcgcaacgtcagtttgccacctcatagcattgttattggcgaacttggtctctctggggaaattcgccctgttagttctttggatttgcgaattaaagaagcgcaccgccttggctttgaaaaaattgtggtgcntgcaagcggaaaaattcctgccgtgaagggaatagagataataaaatttgccaggctagaacaagcagttcagtggctgttggggtag

SEQ ID NO: 57810 - protein, 346 aa, Unknown
  Obtained from environmental sample
  SIGNAL (1)...(19)
  misc_feature (1)..(346): Xaa is any amino acid
MQTLSTIAAAGCKTLYVSGEESAAQVKLRAERLGAAGSDMMLFCETSLGKILACAEKIKPQVMVIDSIQTVYSEDLPGTPGSVSQLRECALKLMVYAKSSGTVTILVGHVTKDGQIAGPRILEHMVDTVAYFEGDKKGQYRILRTVKNRFGATDEIGVFEMSSLGLIPVQNPSKVFLQEGELSPGSAVSCTIEGSRAMLFEIQALVGKTSYAMPQRVSAGVEAKKLTIILALLERFAKLQVSNSDVFVSVVGGLKLEDPGIDLPLALAIVGNARNVSLPPHSIVIGELGLSGEIRPVSSLDLRIKEAHRLGFEKIVVXASGKIPAVKGIEIIKFARLEQAVQWLLG

SEQ ID NO: 57811 - DNA, 468 bp, Unknown
  Obtained from environmental sample
  misc_feature (1)..(468): n is a, c, g, or t
ttgcaaaaatactataaacgcccctatttttattttagagcgcctgtccgaaagcatcacaaaatattccaacaccttttctataaacattttcaaagcaatatagaaattaatcttatcccatatcccttgtcccaaagagagttagcattttatatattcttttctctagtggcatcaaaaaaaaacattcaatatatctgcgaggaatgtggaagcatatttccgcataaggtttcaaaatgcccagaatgtggagtttctggtttatttgtggtggaaacagaaattgaaaaagagagcagaggcataggggttacatcaatgccgcaaggggtggcatctacatctgaacccgtgcncatatcggaggtgccaactaaacattncaatagactaaccaccgccaaccaagaatttgaccgaactttgggagggggcatggccacaggctcccttatactatag

SEQ ID NO: 57812 - protein, 155 aa, Unknown
  Obtained from environmental sample
  misc_feature (1)..(155): Xaa is any amino acid
MQKYYKRPYFYFRAPVRKHHKIFQHLFYKHFQSNIEINLIPYPLSQRELAFYIFFSLVASKKNIQYICEECGSIFPHKVSKCPECGVSGLFVVETEIEKESRGIGVTSMPQGVASTSEPVXISEVPTKHXNRLTTANQEFDRTLGGGMATGSLIL

SEQ ID NO: 57813 - DNA, 1269 bp, Unknown
  Obtained from environmental sample
  misc_feature (1)..(1269): n is a, c, g, or t
ttgggacaagggatatgggataagattaatttctatattgctttgaaaatgtttatagaaaaggtgttggaatattttgtgatgctttcggacaggcgctctaaaataaaaataggggcgtttatagtatttttgcaatttttagttttttttctgattgccggttcccaaaatccagaattttcgcacctcagccttataccgattattctattctcttttgtttttggcgaactgggggggatttgctttgcaacaataataaccatgtgctttagcccctttggaatggatttgagcaaagacgattctgcattttgggtgcttagaacattcggttatgccgccgttgcatacaccactggagttttgggtggctctcttatcaattttgcaatttacaagaaaaaagtgtatttcacagacatattcacgcaattaccaaataggcaggctctttgcaaaaaacttctagaatgttcaaaatcgcaaccaactgggcattttgcaatagtcatagtcaccgtgtctaacagcaaaacactaacagaaatatttggaaacaaggtgctaaaaagcatattctatcaattcaaagatagatattcggatattgcaaggagaatgtcttctaaaatggaaacttattcgctgggcacaaaccaaatatctttcttttttgaaaaaaacgaagaagaaactatggactcaaaggaaaaatttgaaggcagcattataaatgcggcaaaaaagaattttttgcacgatggtttttttgtacactgcgattcccatatagggctttaccgatttaccgatttttcagaaataaactctggagaactgccaattagctatgcagaagaagctgttgataccgctgtgaagcagatgaaagatttagttgtgtacaacccatcaagccttgtgcaaaaatcaaaatactcaaaagcaacagaccttttgggagacatagaccttgcaataagaagccgctggatgtttctcgtttatcaaccaaaaatagatatagcaacaggaaaaatccaatctgtggaagcccttataagatggaaccaccctgtgaaaggttttgtgccacctggtatgtttattcctcaggctgaacagagtactttaatagaaaacataaccgattttgttattaagcaagcaattttgcagttaaagctgtggcagagaagcggcatagatgtggacattgccgttaatgtttctacctataatctgttgcaaccaaatttgtga

SEQ ID NO: 57814 - protein, 422 aa, Unknown
  Obtained from environmental sample
  DOMAIN (317)...(422): EAL domain
  misc_feature (1)..(422): Xaa is any amino acid
MGQGIWDKINFYIALKMFIEKVLEYFVMLSDRRSKIKIGAFIVFLQFLVFFLIAGSQNPEFSHLSLIPIILFSFVFGELGGICFATIITMCFSPFGMDLSKDDSAFWVLRTFGYAAVAYTTGVLGGSLINFAIYKKKVYFTDIFTQLPNRQALCKKLLECSKSQPTGHFAIVIVTVSNSKTLTEIFGNKVLKSIFYQFKDRYSDIARRMSSKMETYSLGTNQISFFFEKNEEETMDSKEKFEGSIINAAKKNFLHDGFFVHCDSHIGLYRFTDFSEINSGELPISYAEEAVDTAVKQMKDLVVYNPSSLVQKSKYSKATDLLGDIDLAIRSRWMFLVYQPKIDIATGKIQSVEALIRWNHPVKGFVPPGMFIPQAEQSTLIENITDFVIKQAILQLKLWQRSGIDVDIAVNVSTYNLLQPNL

SEQ ID NO: 57815 - DNA, 597 bp, Unknown
  Obtained from environmental sample
  misc_feature (1)..(597): n is a, c, g, or t
gtgaatatcaatgaatgccttcttagcgacggaaatgattatccggtcggcgcgtcgacaataggcgctatgatcgcgtcgtccggaaaggagcatctttgggacgagcgtaagggcggtgttgatagtgttgataccgttgtaatccactacatgagcgctgtggccgtcgccccggacgacccgtacaatctcggtcaactcctgaaaatattctgtgattgcggcgtaagcagccactatttgatctccagagagggggaagttcatcgcttggtccccgaggagaagaaggcctggcacgccgggatcagcataatgcccgagccggacgaccgcacgggcgtcaacgaattttccatagggatcgagctcgcggccacggaagagtccggtttcacgcccgcccaatacgagtcgcttcgccggctgtgcgttgatattgaggggcgccgccgcaaaaagatggcgtacgtgggtcacgacatgatcgcgggggagcgggcggttgcgttagggttgcgcaaagagccgaaagtcgatccgggacggttgtttgattggggcgttattacgaaaatttgttgtagggcttaa

SEQ ID NO: 57816 - protein, 198 aa, Unknown
  Obtained from environmental sample
  DOMAIN (34)...(194): N-acetylmuramoyl-L-alanine amidase
  misc_feature (1)..(198): Xaa is any amino acid
MNINECLLSDGNDYPVGASTIGAMIASSGKEHLWDERKGGVDSVDTVVIHYMSAVAVAPDDPYNLGQLLKIFCDCGVSSHYLISREGEVHRLVPEEKKAWHAGISIMPEPDDRTGVNEFSIGIELAATEESGFTPAQYESLRRLCVDIEGRRRKKMAYVGHDMIAGERAVALGLRKEPKVDPGRLFDWGVITKICCRA

SEQ ID NO: 57817 - DNA, 894 bp, Unknown
  Obtained from environmental sample
  misc_feature (1)..(894): n is a, c, g, or t
atgagcgaccaccagcacaaccacaaccgttacatgaacgggacccctccgtcgtggtgccccggatgcagttacttctcggtgctggccgccctcacggagtgctttgacgagcgcggcatcacggaggacgggatatgcgtgatctccgggatcggctgctcgtcgcggctgcccctattcctaaacacgcacggtatgcacaccctgcacggtaggccgctgccggccgccataggcgcgaggctggcgcaacccgatatcccggtggtcgtggcgaccggcgacggagacctcctatccatcggcgcggcgcacttcgtccacgccgcaaggaaaaatttcgatatcaccgtaatctgcctagacaaccgtatgtacgcaatgaccaaaaaccaagcctcccccacctcgcccgttggatacaacggaacgcttaccccatacggcaaactaagcgcgccgctcaacatcaccgaactcgccatcagcagcggggcctctatggtcagcaggagttgcgcctacgacaaagcgcacgtaaagaagatgatcgacgccgccatgaaccaccgcggcttctcgcttgtagatatcatagccccatgccgcactttcggtgatccgcagaaagatatcactaaacggctatacgacctgcaagttaacgggcacaaagttgacgacagggaaagcgccttgcgcgtagcggcgcgggtactcgactacgacaacaatgagagcgcgaacattcccgtgggaatagtctggaagagagacgacatactttgcttcgacgaccaagtcaagcgggtcgtggcggaaaacaagggcaaatactcttcattaaacgatatctttgacgagtttaagccctacaacaaattttcgtaa

SEQ ID NO: 57818 - protein, 297 aa, Unknown
  Obtained from environmental sample
  DOMAIN (51)...(199): Thiamine pyrophosphate enzyme, C-terminal TPP binding domain
  misc_feature (1)..(297): Xaa is any amino acid
MSDHQHNHNRYMNGTPPSWCPGCSYFSVLAALTECFDERGITEDGICVISGIGCSSRLPLFLNTHGMHTLHGRPLPAAIGARLAQPDIPVVVATGDGDLLSIGAAHFVHAARKNFDITVICLDNRMYAMTKNQASPTSPVGYNGTLTPYGKLSAPLNITELAISSGASMVSRSCAYDKAHVKKMIDAAMNHRGFSLVDIIAPCRTFGDPQKDITKRLYDLQVNGHKVDDRESALRVAARVLDYDNNESANIPVGIVWKRDDILCFDDQVKRVVAENKGKYSSLNDIFDEFKPYNKFS

SEQ ID NO: 57819 - DNA, 417 bp, Unknown
  Obtained from environmental sample
  misc_feature (1)..(417): n is a, c, g, or t
atggcgagttcggtgatgttgagcggcgcgcttagtttgccgtatggggtaagcgttccgttgtatccaacgggcgaggtgggggaggcttggtttttggtcattgcgtacatacggttgtctaggcagattacggtgatatcgaaatttttccttgcggcgtggacgaagtgcgccgcgccgatggataggaggtctccgtcgccggtcgccacgaccaccgggatatcgggttgcgccagcctcgcgcctatggcggccggcagcggcctaccgtgcagggtgtgcataccgtgcgtgtttaggaataggggcagccgcgacgagcagccgatcccggagatcacgcatatcccgtcctccgtgatgccgcgctcgtcaaagcactccgtgagggcggccagcaccgagaagtaa

SEQ ID NO: 57820 - protein, 138 aa, Unknown
  Obtained from environmental sample
  misc_feature (1)..(138): Xaa is any amino acid
MASSVMLSGALSLPYGVSVPLYPTGEVGEAWFLVIAYIRLSRQITVISKFFLAAWTKCAAPMDRRSPSPVATTTGISGCASLAPMAAGSGLPCRVCIPCVFRNRGSRDEQPIPEITHIPSSVMPRSSKHSVRAASTEK

SEQ ID NO: 57821 - DNA, 669 bp, Unknown
  Obtained from environmental sample
  misc_feature (1)..(669): n is a, c, g, or t
ttgcaagcggccggatccaaccgtggacgtcaacgggcatcccctgctcgccgccccggtgacgggcgcggtcgccgagtcccgcaaggcggtccgccgcataaccggactggagcacgacgccggagggataccgagcaacaccgcgaaaaccgcgtccggcaacaatacaagcgcttcagcaagatggataagatcgaggcttactataattatatgcaaacgctagacatcggcgacctcaaaccgcccctgcctaagtcgcggttttccgccagaatgatggtagacagcccccccgccgacctttgcgtcatatcttggggcttcagcgcgacaatgacgcgtaaagcggtggacgctctacgcaaacgcggcctgagaatcgcgtgcctatatccgcgcctccttttcccatttatcaacgggcattactttgaactactcagtttttgcccgcgcatagcggttgtggagtcgaactacacgggacaactggcctcgctgatacggatgaacacggggatcaacaccatctccgtgaaaaaatacaacggcgagccgttcacacccgaagagattgagacggaactaaacagtatcattgagatgcaaaagtttatatcggacatcgaccacacaaacgacagcggagcggcaaaacaatga

SEQ ID NO: 57822 - protein, 222 aa, Unknown
  Obtained from environmental sample
  misc_feature (1)..(222): Xaa is any amino acid
MQAAGSNRGRQRASPARRPGDGRGRRVPQGGPPHNRTGARRRRDTEQHRENRVRQQYKRFSKMDKIEAYYNYMQTLDIGDLKPPLPKSRFSARMMVDSPPADLCVISWGFSATMTRKAVDALRKRGLRIACLYPRLLFPFINGHYFELLSFCPRIAVVESNYTGQLASLIRMNTGINTISVKKYNGEPFTPEEIETELNSIIEMQKFISDIDHTNDSGAAKQ

SEQ ID NO: 57823 - DNA, 648 bp, Unknown
  Obtained from environmental sample
  misc_feature (1)..(648): n is a, c, g, or t
atggcggagtacctgcccgctttcggtgggttcgcgtaccaagccgaagacgaaatgtcggcgctgggcgcggtggccggcgcttggtttttcgacacccccgcgatgaccgcgaccagcggccccgggctgtcgctcatgcaggagtttttgggctactgctctatgaccgagacccccgccgtcgtgatcgacgttcagcgggcggggccgtccacaggcatgcccaccaagcacagccaggacgacatgatggcggctatattcggcggccacggggaggggcagcggatcgttttgtccgcggccaccatagacgagtgcttccacatgactatagaggcgttcaacatggcgcggcgcttccgctgtccggtgatactccttactgacagcgccctgggcaaccttcagatgacttgcaagcggccggatccaaccgtggacgtcaacgggcatcccctgctcgccgccccggtgacgggcgcggtcgccgagtcccgcaaggcggtccgccgcataaccggactggagcacgacgccggagggataccgagcaacaccgcgaaaaccgcgtccggcaacaatacaagcgcttcagcaagatggataagatcgaggcttactataattatatgcaaacgctag

SEQ ID NO: 57824 - protein, 215 aa, Unknown
  Obtained from environmental sample
  DOMAIN (1)...(198): Pyruvate flavodoxin/ferredoxin oxidoreductase, thiamine diP-binding domain
  misc_feature (1)..(215): Xaa is any amino acid
MAEYLPAFGGFAYQAEDEMSALGAVAGAWFFDTPAMTATSGPGLSLMQEFLGYCSMTETPAVVIDVQRAGPSTGMPTKHSQDDMMAAIFGGHGEGQRIVLSAATIDECFHMTIEAFNMARRFRCPVILLTDSALGNLQMTCKRPDPTVDVNGHPLLAAPVTGAVAESRKAVRRITGLEHDAGGIPSNTAKTASGNNTSASARWIRSRLTIIICKR

SEQ ID NO: 57825 - DNA, 1227 bp, Unknown
  Obtained from environmental sample
  misc_feature (1)..(1227): n is a, c, g, or t
atggataccatgatattggaaagaaaccttacgcttgttgataccggcggctttaagctggatcgaaagcgggattccaccgccggggagcttgaaaaggtcgtggtggaacgcaccctcgaagtgttgaaagaagtggacttgattatacttatttttgcggctggggaaatcacctccgaggacgaggagttcatcgaccttttaaggccctaccagcacaagttaatcgcagcggtgaacaagaccgaaggcggaaggcgcgaggcggatgcgtggaacctgctttcgtacggctttgaaaaggtctacatgatttccgccgaacacggcgacaacatccgggagctggaagaagcaatcgtcagccgcctggacttaagcaaaatggcagaagagactcctcccacaccttcgatagggcaggatgaaacaccgatacgaatcgcacttttgggcaaaccaaacacggggaagtccacgctttcaaacaggctcacatcttcctccgattccattgtcagcgatattccaggcacgacccgggatgttgtggaaggaacgttcgtctggaaaaaacgcagcttccaggttctggacacagccggtatcaggcggaaggcaaaggtatacgaaagcattgagtactattcggtgaaccgggccattaaaacaatcgacgatacggacattgtttttcttatcatcgacgccaacgaaggcctgacggatcaggacaagaaaatcgccgcgctcgcccatgacaagggcagggggataattatggcgctcaacaaatgggatacaatgccccagcaaaaaaatacttttaaagacgctgaaggaaaaatacactttcaattcgggcaaatggaatacgcgccgattatccccgtaagcgcaaaagacggctccggcgttgataaactgctgaatacagcgataaaaatgtacggacagcttaatctgcaaataggaacatcacagcttaatcagtctttggaaaagtggctgcaggaatatccgccgcctacgggaccaagaacgtacttcaaaattaagtacgccgtgcaaaaatccgcaaatcccgtacacttcattttttttgtttcccgtattcatgttgtaagcgactcttatattgcgtatttaaggaacaaaatacgcaaagatttaggattttctcttatacccgttttaatcgacgtaaaaagctcttccaagtaa

SEQ ID NO: 57826 - protein, 408 aa, Unknown
  Obtained from environmental sample
  DOMAIN (144)...(345): Elongation factor Tu GTP binding domain
  misc_feature (1)..(408): Xaa is any amino acid
MDTMILERNLTLVDTGGFKLDRKRDSTAGELEKVVVERTLEVLKEVDLIILIFAAGEITSEDEEFIDLLRPYQHKLIAAVNKTEGGRREADAWNLLSYGFEKVYMISAEHGDNIRELEEAIVSRLDLSKMAEETPPTPSIGQDETPIRIALLGKPNTGKSTLSNRLTSSSDSIVSDIPGTTRDVVEGTFVWKKRSFQVLDTAGIRRKAKVYESIEYYSVNRAIKTIDDTDIVFLIIDANEGLTDQDKKIAALAHDKGRGIIMALNKWDTMPQQKNTFKDAEGKIHFQFGQMEYAPIIPVSAKDGSGVDKLLNTAIKMYGQLNLQIGTSQLNQSLEKWLQEYPPPTGPRTYFKIKYAVQKSANPVHFIFFVSRIHVVSDSYIAYLRNKIRKDLGFSLIPVLIDVKSSSK

SEQ ID NO: 57827 - DNA, 612 bp, Unknown
  Obtained from environmental sample
  misc_feature (1)..(612): n is a, c, g, or t
atgaaccttgcaaataaattatcatttttccgtataatcctcgcccccttgttttttgtcatttatcttatgcctcgcttttttccttcgctattcttgaacggaacggcatggacagtgccggtactttggggcatttctgtcgtctctgaagtaacagattatttcgacggttttgccgcccgcaaactcaacctgacaagcgactttggaaaacttttagacccattcgccgacacacttacgcaaatcacttttttcctttgttttataattgacggtacttttcccggcggtatttttccggtaattttatttttaatagttgtttaccgcgagttcgctatcatgttcctccgcaacttaatggcgaaaaaaggcgttgttatgggcgcgcgaatgggcggaaaaataaaaaccgtcgcgtatatcacctcggcggcaatcgctctcttaacctcaagttttgaacgattggaagtattaacatcgattttaccgtacattaaaatcggcgcgcttattgcctttactatttccgtaattatctcgatagtttcgttttttgattatttgataatctataaaaaaacggcggacataaaagcgtaa

SEQ ID NO: 57828 - protein, 203 aa, Unknown
  Obtained from environmental sample
  DOMAIN (44)...(194): CDP-alcohol phosphatidyltransferase
  misc_feature (1)..(203): Xaa is any amino acid
MNLANKLSFFRIILAPLFFVIYLMPRFFPSLFLNGTAWTVPVLWGISVVSEVTDYFDGFAARKLNLTSDFGKLLDPFADTLTQITFFLCFIIDGTFPGGIFPVILFLIVVYREFAIMFLRNLMAKKGVVMGARMGGKIKTVAYITSAAIALLTSSFERLEVLTSILPYIKIGALIAFTISVIISIVSFFDYLIIYKKTADIKA

SEQ ID NO: 57829 - DNA, 2451 bp, Unknown
  Obtained from environmental sample
  misc_feature (1)..(2451): n is a, c, g, or t
atgaaagacgccgcgtcacccgctactttcggccgcttcgacgactccgcccgcgagtacgtcatcacgaatccacaaacgccgtacccttggatcaactacctcgggaaccaagacttcttctccctcatctccaacaccgccggcggatactgcttctacaaggacgcgaggctgcgccgcataacgcgataccgctacaacagcgttcccatagacaccaacgggcgctacttctacataaacgacggcggcgacctctggtcgccctcatggaaacccgtaaaggccgacgtagacggctactcctgccgccacggcatggggtacaccgtcataagcggcgcccgcaacggcatcaccgcggaggcgctcttcttcgtccccctgaacttcaacggcgaggtgcacaaggtcaaactggccaacacctccaaaaacgccaaaaaattcacactcttctccatggtcgagttctgcctatggaacgcccaagacgactccacgaactaccagcgcaacctaaacaccggcgaggtggagatagacggggccacaatctaccacaaaaccgaataccgggagaggcgtaaccactacgctttctacaccgtaaacaggcccgtcgccggattcgacagcgacagggactctttcacagggcgctacggcggctttgagcggcccgacgcggccgccgagggcaagtcccgcaactccgtcgcggacggctggtgcccgatagcctcccacagcatagacatcagcctcggcgcgggggagtcgacggaactggtcttcgttctgggctacgttgaggtggacgacaaggagaagtgggcggccccgggcgtcataaacaaaaagagcgcccaggagatgatcaagaaattctcaacttcggaggcggtcgacaaatctatggcggaactgcgggcgttctgggacgacctgctctcccgctacacggtgaagagcggcgacgagaagctcgaccggatggtcaacatttggaaccagtaccagtgcatcgtcacatacaatatgtctcgcagcgcctcctacttcgagtcggggatcgggcggggcatgggcttccgcgactcaaaccaagacatcgccggtttcgtgcaccagctgccggacagggcgcgccagcgtatcatagacatagcctccacgcagttcgagaacggcggcgcctaccaccagtaccagccgctcaccaaaaaaggcaacaacgagatcggcggcaacttcaacgacgatcccctgtggctcatctactccgtggcctcctatataaaggagaccggcgactgggatatcctggaggagaacacgccgttcgacaacaatccggtcgcggcgaggccgctgctcgtccacctgacggcctccttttcccgtcgtcacaacctaggcccccacggcctgccgctgataggacgggcggactggaacgactgcctcaacctcaactgcttctccacgacgccagacgagtcattccagacctgcacgagcaaagacggcaagacggcggagtcggtgctgatagcgggcatgttcgtctgcataggcagggagtacgtgaggatattggaaaaactgggcaagaaagacgaggccgcgaaagcggtggggcatatagccgcaatggagaagacgatcctcaccgccggctgggacggcgagtggttcgtacgggcctacgacgactctaaacagaagatcggcggcaaggagtgcgacgagggcaagatattcatagagtcccagggcttctgcgtgatggccgaagtgggtgtaaaagagggctatgcggccaaagcgcttgagtccgcgagaaagcatcttgacaccgaccacggccttgtgctgctgaatccgccgtacacgaaatatcacgtggagctgggcgaggtcagctcctatccgcccggttataaggaaaacgccggcatcttctgccacaacaacccgtggataatcatagccgagacggtgctggggcaggggaacgaggccttcggtcactataggaagattgccccggcgtaccgcgaggggataagcggtctgcatcgtatggagccgtatgtatattcgcagatgatagccggcaaggacgcgaaacggcacggcgaggcgaagaactcgtggctgacggggacggcggcttggaactttgttgcggtttcgcagtggatacttggcatccgccccgattacaacgggttggcgatcgacccgtgcataccgtcggactggcagggtttcacggcgacgcggaaattcaggggagctacgctgaagataacggttaagaacgagagccgttcttgcaagggggtcaaggtgctgacggtggacgggaaggcgattgcggggaatgtggtgccggtgtttacggacgggggggagcatgaggttgtggcggtgatgtga

SEQ ID NO: 57830 - protein, 816 aa, Unknown
  Obtained from environmental sample
  DOMAIN (8)...(71): Putative carbohydrate binding domain
  misc_feature (1)..(816): Xaa is any amino acid
MKDAASPATFGRFDDSAREYVITNPQTPYPWINYLGNQDFFSLISNTAGGYCFYKDARLRRITRYRYNSVPIDTNGRYFYINDGGDLWSPSWKPVKADVDGYSCRHGMGYTVISGARNGITAEALFFVPLNFNGEVHKVKLANTSKNAKKFTLFSMVEFCLWNAQDDSTNYQRNLNTGEVEIDGATIYHKTEYRERRNHYAFYTVNRPVAGFDSDRDSFTGRYGGFERPDAAAEGKSRNSVADGWCPIASHSIDISLGAGESTELVFVLGYVEVDDKEKWAAPGVINKKSAQEMIKKFSTSEAVDKSMAELRAFWDDLLSRYTVKSGDEKLDRMVNIWNQYQCIVTYNMSRSASYFESGIGRGMGFRDSNQDIAGFVHQLPDRARQRIIDIASTQFENGGAYHQYQPLTKKGNNEIGGNFNDDPLWLIYSVASYIKETGDWDILEENTPFDNNPVAARPLLVHLTASFSRRHNLGPHGLPLIGRADWNDCLNLNCFSTTPDESFQTCTSKDGKTAESVLIAGMFVCIGREYVRILEKLGKKDEAAKAVGHIAAMEKTILTAGWDGEWFVRAYDDSKQKIGGKECDEGKIFIESQGFCVMAEVGVKEGYAAKALESARKHLDTDHGLVLLNPPYTKYHVELGEVSSYPPGYKENAGIFCHNNPWIIIAETVLGQGNEAFGHYRKIAPAYREGISGLHRMEPYVYSQMIAGKDAKRHGEAKNSWLTGTAAWNFVAVSQWILGIRPDYNGLAIDPCIPSDWQGFTATRKFRGATLKITVKNESRSCKGVKVLTVDGKAIAGNVVPVFTDGGEHEVVAVM

SEQ ID NO: 57831 - DNA, 891 bp, Unknown
  Obtained from environmental sample
  misc_feature (1)..(891): n is a, c, g, or t
gtgggcggccccgggcgtcataaacaaaaagagcgcccaggagatgatcaagaaattctcaacttcggaggcggtcgacaaatctatggcggaactgcgggcgttctgggacgacctgctctcccgctacacggtgaagagcggcgacgagaagctcgaccggatggtcaacatttggaaccagtaccagtgcatcgtcacatacaatatgtctcgcagcgcctcctacttcgagtcggggatcgggcggggcatgggcttccgcgactcaaaccaagacatcgccggtttcgtgcaccagctgccggacagggcgcgccagcgtatcatagacatagcctccacgcagttcgagaacggcggcgcctaccaccagtaccagccgctcaccaaaaaaggcaacaacgagatcggcggcaacttcaacgacgatcccctgtggctcatctactccgtggcctcctatataaaggagaccggcgactgggatatcctggaggagaacacgccgttcgacaacaatccggtcgcggcgaggccgctgctcgtccacctgacggcctccttttcccgtcgtcacaacctaggcccccacggcctgccgctgataggacgggcggactggaacgactgcctcaacctcaactgcttctccacgacgccagacgagtcattccagacctgcacgagcaaagacggcaagacggcggagtcggtgctgatagcgggcatgttcgtctgcataggcagggagtacgtgaggatattggaaaaactgggcaagaaagacgaggccgcgaaagcggtggggcatatagccgcaatggagaagacgatcctcaccgccggctgggacggcgagtggttcgtacgggcctacgacgactctaa

SEQ ID NO: 57832 - protein, 296 aa, Unknown
  Obtained from environmental sample
  misc_feature (1)..(296): Xaa is any amino acid
MGGPGRHKQKERPGDDQEILNFGGGRQIYGGTAGVLGRPALPLHGEERRREARPDGQHLEPVPVHRHIQYVSQRLLLRVGDRAGHGLPRLKPRHRRFRAPAAGQGAPAYHRHSLHAVRERRRLPPVPAAHQKRQQRDRRQLQRRSPVAHLLRGLLYKGDRRLGYPGGEHAVRQQSGRGEAAARPPDGLLFPSSQPRPPRPAADRTGGLERLPQPQLLLHDARRVIPDLHEQRRQDGGVGADSGHVRLHRQGVREDIGKTGQERRGRESGGAYSRNGEDDPHRRLGRRVVRTGLRRL

SEQ ID NO: 57833 - DNA, 336 bp, Unknown
  Obtained from environmental sample
  misc_feature (1)..(336): n is a, c, g, or t
atgtacagaatgtttctaaatagcaaactgcgagatgttcggataaccggcgtcaaccttgagtatgaaggcagtataacaatagacgcggactaccttgaacgcgccgggatactgcctgatgaagaggtgcacgtccttaacgtgaacaccggtgtccggctgaccacatacgtcataaaaggcgagcgcggctccgggatcatggagctgaacgggccggcggcgcggttggggatggtgggcgaccgtataatggtgctgacctacgcaatgctgagcccggaggagatcgcggggcataagccgaccattatcagcgtaggggtgaagtaa

SEQ ID NO: 57834 - protein, 111 aa, Unknown
  Obtained from environmental sample
  DOMAIN (1)...(111): Aspartate decarboxylase
  misc_feature (1)..(111): Xaa is any amino acid
MYRMFLNSKLRDVRITGVNLEYEGSITIDADYLERAGILPDEEVHVLNVNTGVRLTTYVIKGERGSGIMELNGPAARLGMVGDRIMVLTYAMLSPEEIAGHKPTIISVGVK

SEQ ID NO: 57835 - DNA, 813 bp, Unknown
  Obtained from environmental sample
  misc_feature (1)..(813): n is a, c, g, or t
atgggtcagaatttcggcacgaggtacgccttttggcataaaagcgcgggacttttaaagaaaattcagccaaaagtagtaaaaatcgcttcgccggaactgaattataccagtttgctcgaagaagttgccggttggggcttgcctgtcttgctttcttcgggagtttcccggctgtccgacattgaaactgccgtagaaattctaaaaccttcttcgcggttgtgtcttttacactgtgttacaagttatcccgcccctgaaaccgactataatttgaaagttctccccaaccttgctgcgattttcggcgttcctgtcggtgtgagcgaccacagcgccgacccggaacttgtcccggcgctgtcggtaagcatgggagccgccgtcgtagaaaagcacttttgcctttcaaaaaccgatcccggccttgacgacccgattgccctgccgccgcaggaattttcccaaatggtacgcgccgtccgtcgcgccgcagagacaggaacggaagagacaattgctttttacaaccgcgaaaggggcgaagaccttgtacgacaaattttaggaagcggcgtaaaagagcttgccccgtctgaaaaagccaattaccgccttacaaaccgttctattcatgcgctgcgggatattcaaaaaggcgaaatactgaaaaagggcgattacgctgtattaaggacggaaaaaatactgcgtcccggtcttgaaccctgccgggaaaaatttattgaagggcgcacagcaaaaaactttatccccgccggagaaggcataaggtttgaggatatttaa

SEQ ID NO: 57836 - protein, 270 aa, Unknown
  Obtained from environmental sample
  DOMAIN (211)...(270): Antifreeze-like domain
  misc_feature (1)..(270): Xaa is any amino acid
MGQNFGTRYAFWHKSAGLLKKIQPKVVKIASPELNYTSLLEEVAGWGLPVLLSSGVSRLSDIETAVEILKPSSRLCLLHCVTSYPAPETDYNLKVLPNLAAIFGVPVGVSDHSADPELVPALSVSMGAAVVEKHFCLSKTDPGLDDPIALPPQEFSQMVRAVRRAAETGTEETIAFYNRERGEDLVRQILGSGVKELAPSEKANYRLTNRSIHALRDIQKGEILKKGDYAVLRTEKILRPGLEPCREKFIEGRTAKNFIPAGEGIRFEDI

SEQ ID NO: 57837 - DNA, 879 bp, Unknown
  Obtained from environmental sample
  misc_feature (1)..(879): n is a, c, g, or t
atgaaaataagaagaatccgtatcaggaagacgccgcagaaaaggacagccgtaaaaagagtgccggtaaaaatttttacaagagaagaattaaagaaaggcatttatattatcccttcgctttttacgtgcggaaatatgagctgcggagtgctttcggtaattatgtctatcggcggtcattttattcccgccgcatggtttttaatcggagctcttttctgcgacatcttggacggcagaatagcgaggatgaccaagacaaccagcatgttcggaatggaactggattcattaagcgatcttgtttcgtttggaatagcgcctgcgattatgatgtacatgcttgtactgcataccatgggaaagataggagtcgctattgcggtgctttatgttttatgctgtgccctgcgtcttgcgcgttttaatgttcttgcgcactcaggcgaagttcacaagcactttgtggggcttccaaccccggcttcggcgggagtcattatttcgtttgtattaagctattcgcttttggctcctgaaggcattaaccttaattccaagacaatcccggtgttgatggagtttatgccgaaatttttcaggataatgcccatcgttattgtcgttctttcattcctgatggtttccaatattccgtatctgtcgtttaaaaaaataaaattgaccaagatttcaacgatagaactttttgccgtattaatcgtacttatcattttaatcgttatctttccgcagaatacaatatttatcattttctcaatttacgccttgtcggggattttagtttatgtgcccagccttattttcagaaagaaaaaaccaccggagaaacaggcggaagaaaatgaagtgtaa

SEQ ID NO: 57838 - protein, 292 aa, Unknown
  Obtained from environmental sample
  DOMAIN (66)...(222): CDP-alcohol phosphatidyltransferase
  misc_feature (1)..(292): Xaa is any amino acid
MKIRRIRIRKTPQKRTAVKRVPVKIFTREELKKGIYIIPSLFTCGNMSCGVLSVIMSIGGHFIPAAWFLIGALFCDILDGRIARMTKTTSMFGMELDSLSDLVSFGIAPAIMMYMLVLHTMGKIGVAIAVLYVLCCALRLARFNVLAHSGEVHKHFVGLPTPASAGVIISFVLSYSLLAPEGINLNSKTIPVLMEFMPKFFRIMPIVIVVLSFLMVSNIPYLSFKKIKLTKISTIELFAVLIVLIILIVIFPQNTIFIIFSIYALSGILVYVPSLIFRKKKPPEKQAEENEV

SEQ ID NO: 57839 - DNA, 897 bp, Unknown
  Obtained from environmental sample
  misc_feature (1)..(897): n is a, c, g, or t
gtggtcgtgggtttgctcgtgtcgctatgcgccgcgttgctcggggtcagtctggtattgaagcgatactcaatgatcggcgacggtctctcccacgtaggtttcggcgcgttggcaatcgccaccgcgctccacaccgcgccgctcgtcgtgtcgattcccatagttgtattggcggcgtttctattgttacgtataagcgaaaacagcaaaatcaaaggcgatgccgctattgcgttgatatcaacaagctcgctcgccataggcgtattggtcgtgtcgctcacgacggggatgaataccgacgtctgtaactatatgttcggcagtattttggtaatgagtcatggagacgtaattctctccataatcctagcggcggtcgtcctgacgatgttcgtcttcttctacaacaagatattcgcggtgaccttcgacgagaatttcgccaaggccaccggcgtaaagaccggcttgtacaatatgatgattgctttcctcaccgcgattaccatcgtattgggaatgaggatgatgggagcgctgttgatttccagcctgataatcttcccggcgctcacgtcaatgcgtctatgcaagaaattcagatctgtaactatatgctcggcgatagtatcggtgatctgttttctaacaggtgtaataatatcgtacgtcaaggcaacgccgaccggggcgagcgtggtaatcgtaaacatcatcgcgtttgtgattttctggttgataaatatttttataaggatgaaaacgggttcgttaaaattcggtgtgattgtttttaccggcatccgtaccaagcgtctaaaatggcggaatcgccttaccacgtggcaaggatcttccacttggcgggttcatttccccaaaagattttaa

SEQ ID NO: 57840 - protein, 298 aa, Unknown
  Obtained from environmental sample
  DOMAIN (1)...(249): ABC 3 transport family
  misc_feature (1)..(298): Xaa is any amino acid
MVVGLLVSLCAALLGVSLVLKRYSMIGDGLSHVGFGALAIATALHTAPLVVSIPIVVLAAFLLLRISENSKIKGDAAIALISTSSLAIGVLVVSLTTGMNTDVCNYMFGSILVMSHGDVILSIILAAVVLTMFVFFYNKIFAVTFDENFAKATGVKTGLYNMMIAFLTAITIVLGMRMMGALLISSLIIFPALTSMRLCKKFRSVTICSAIVSVICFLTGVIISYVKATPTGASVVIVNIIAFVIFWLINIFIRMKTGSLKFGVIVFTGIRTKRLKWRNRLTTWQGSSTWRVHFPKRF

SEQ ID NO: 57841 - DNA, 1713 bp, Unknown
  Obtained from environmental sample
  misc_feature (1)..(1713): n is a, c, g, or t
gtgatcgatgatgaatttgactggcagggtgatcttcccctcaattacccactgcgattcagtgtactttacgaaacccatgtagggggactcacaaaacacccaagttcaggcgtttcggcgcccggaacctacaaaggggtgatcgaaaaaattccctactttaaagaccttggcattaccagcctggaattccttcctatccaggaatttaacgagaatgaacttaattcaacaaatccgcagacaggaaagaaactggtaaactactggggctattctaccatcgcttttttcgcccctaaaggttcttatgcctatgatcgcagccccggaggccaggtgcgggaattcaaggagatggtaagggaacttcacaaggcggggatcgaagtaattttggatattgtctttaaccacacagcggaaggcaacgaatgggggcccacaatttctttcaggggcttggacaatacgatttattacatgctgaacgaaaacaaaaggtactatcaaaattattcaggctgcggaaatacggtaaattgcaaccaccccgttgttcgcacttttattatggactgcctgcgttactgggtgatggaaatgcacattgacggcttccgcttcgaccttggttctattcttggccgggacgaacatggcaacctgatggaaaacccgccggttttgcagcgcattgccgaagaccctgttttgagcagcaccaaaataatcgcggaagcctgggacgcgggcggggcataccaggtgggctggttcccaggcggacgctgggcggaatggaacgaccgctttagggacgatatgcgccggtattggcgaggggactcaaaactaaccaggcatcttgcgacaaggctttcaggaagctccgacttatatttacgagacggccgcaagcctttccattcggttaattttattacaagccacgatggttttacgttaaaagatctggtttcgtatgaaagaaaacacaacgaagaaaacggcgaanacaaccgcgacggcggggacaacaacaacagcgccaataatggcgttgagggccaaagcccgaatggaaaaatcgaaacccttcgttttaagcaaatgaaaaattttatcgcaagcatgatggtttcccagggtacccccatgattctggggggagacgaaatgggccgtacccagaacggcaacaacaacgcctactgccaggacaacgagatttcctggtacgactggtctttgcccaaaaagaacgccagcttttaccgcttcgtgaaggagatgataaaattccgccgccggcatccgggttttatgaggccggagttctataccggcagagagggaaggtatgacgctatccccgatataagctggtttgacgaacagggggagacgcctgactgggacaagatcggcccatgccttgccctgaggatggacggaagcaaggcggatattctcgcggacagggacgacaatgacttcttcatcatgttcaacggcggggacaagcacaagaaattccatgtctgcgaaccgatggccgggaagaaatgggtcagggcgatagacacggggcttccttcacctgacgacattctcgctcccggaagcgaagaggtgttaaaaaatcccgccgtatatgaggttaaggatcacagcatggtggtactcatatcaaggttgttgtattaa

SEQ ID NO: 57842 - protein, 570 aa, Unknown
  Obtained from environmental sample
  DOMAIN (25)...(437): Alpha amylase, catalytic domain
  misc_feature (1)..(570): Xaa is any amino acid
MIDDEFDWQGDLPLNYPLRFSVLYETHVGGLTKHPSSGVSAPGTYKGVIEKIPYFKDLGITSLEFLPIQEFNENELNSTNPQTGKKLVNYWGYSTIAFFAPKGSYAYDRSPGGQVREFKEMVRELHKAGIEVILDIVFNHTAEGNEWGPTISFRGLDNTIYYMLNENKRYYQNYSGCGNTVNCNHPVVRTFIMDCLRYWVMEMHIDGFRFDLGSILGRDEHGNLMENPPVLQRIAEDPVLSSTKIIAEAWDAGGAYQVGWFPGGRWAEWNDRFRDDMRRYWRGDSKLTRHLATRLSGSSDLYLRDGRKPFHSVNFITSHDGFTLKDLVSYERKHNEENGEXNRDGGDNNNSANNGVEGQSPNGKIETLRFKQMKNFIASMMVSQGTPMILGGDEMGRTQNGNNNAYCQDNEISWYDWSLPKKNASFYRFVKEMIKFRRRHPGFMRPEFYTGREGRYDAIPDISWFDEQGETPDWDKIGPCLALRMDGSKADILADRDDNDFFIMFNGGDKHKKFHVCEPMAGKKWVRAIDTGLPSPDDILAPGSEEVLKNPAVYEVKDHSMVVLISRLLY

SEQ ID NO: 57843 - DNA, 357 bp, Unknown
  Obtained from environmental sample
  misc_feature (1)..(357): n is a, c, g, or t
atggacgcagacagtttcatttttggagtcgatctggatggggttgtgggtgatttttacggcgccatgcgaaagatcgccgcggagtggctcgacaggccccttgagtccctgacaacggaagtcggctatggccttgaggaatggggcatcgccgaattcggcggctacgagaggctgcaccgtttcgccgtaacccagcggaacatctttcgggacatggaacccatcanagacgcaccgtctgttttacgcaagctttcgggcagggatatcagaatccgtatcattacccaccggctttttctcaaatattcccatcgcacgaccatcaccccagaccgtggaatggcttga

SEQ ID NO: 57844 - protein, 118 aa, Unknown
  Obtained from environmental sample
  misc_feature (1)..(118): Xaa is any amino acid
MDADSFIFGVDLDGVVGDFYGAMRKIAAEWLDRPLESLTTEVGYGLEEWGIAEFGGYERLHRFAVTQRNIFRDMEPIXDAPSVLRKLSGRDIRIRIITHRLFLKYSHRTTITPDRGMA

SEQ ID NO: 57845 - DNA, 954 bp, Unknown
  Obtained from environmental sample
  misc_feature (1)..(954): n is a, c, g, or t
atgagccttgcggacattgaagcaaagtacggttcttctgcttctgtgcgctatttttttgaaaaaggcgatatttgcgaccgctctttagttgaatcgctgtttgcaaaatacgagatagacactgtggtgcattttgccgccgaaagccatgtagaccgctcgattttaggccccgaagcctttgtaaaaaccaacgtgatgggaactttcaccctgcttgatgttgcgcgtaacgcatggaaaaatgaagaaaacgcgctctttcatcacatcagcaccgatgaagtttacggctctttaggcgaaaccggctattttactgagacaacgccttacgatccgcgctctccctattcggcaagcaaagccgcaagcgatcaccttgcgatggcgtacaaccacacttacggcttgccggtaacgctttccaactgttcaaataattacggcccctaccagttcccggaaaaacttatcccattaatgatattgaatatgcttgaaggaaagcccctgccggtatacggcgacgggaaaaacatccgcgactggctgtttgtagaagaccataattcggcggtttggacgattatgcgtaacggcaaagccggggaaacatacaacattggcggcgaaaacgagtgggagaatatcaaactgctcaatgtattaattgacattgtctgcgccaaagccaaattggaacccgccaaagtccgcagtaccgtaacttatgttaaagaccgcccgggccacgaccgccgttacgcgatagactgctccaggctaaagcgcgaacttggctggaaacaggcagtaaattttgaagaagggctttcccgcactgtagactggtatctggcgaatcggcaatggacagagagcatacgcagcggagaataccaacaatgggtagagaagaattattatgaaagacttaaaaatatttga

SEQ ID NO: 57846 - protein, 317 aa, Unknown
  Obtained from environmental sample
  DOMAIN (2)...(235): 3-beta hydroxysteroid dehydrogenase/isomerase family
  misc_feature (1)..(317): Xaa is any amino acid
MSLADIEAKYGSSASVRYFFEKGDICDRSLVESLFAKYEIDTVVHFAAESHVDRSILGPEAFVKTNVMGTFTLLDVARNAWKNEENALFHHISTDEVYGSLGETGYFTETTPYDPRSPYSASKAASDHLAMAYNHTYGLPVTLSNCSNNYGPYQFPEKLIPLMILNMLEGKPLPVYGDGKNIRDWLFVEDHNSAVWTIMRNGKAGETYNIGGENEWENIKLLNVLIDIVCAKAKLEPAKVRSTVTYVKDRPGHDRRYAIDCSRLKRELGWKQAVNFEEGLSRTVDWYLANRQWTESIRSGEYQQWVEKNYYERLKNI

SEQ ID NO: 57847 - DNA, 2766 bp, Unknown
  Obtained from environmental sample
  misc_feature (1)..(2766): n is a, c, g, or t
atgtggggagggctgggcaagccctccgatccggttccggttatggaaaaactcagaaccggagttttgccaagcggccttagttactttattcttgagaactccatgccggaaaaccgcgcgtatcttacactagcggtaaaggccggctctgtgcttgaggaggatgacgaacggggacttgcgcattttgtagaacatttggcgtttaacggcactgaacgctttccggaatcgaaactggtaagttaccttcgctctcttggaatgcgttttggcccggaggtaaacgcctatacttcctttgaccagaccgtgtacggtatcgaggtgccggttgaaagcgacgattcaggcgtccggcgtatcccggaaacggcgcttgccgttattgacgactggacgcgggcgataacttttacccctgcggatgtggacgatgaacggcctgtaataatagaagaataccgcacgcggcttggcgcgtgggaaaggctaaggcagaaatggctgccggtgctgttcaggggatcgccttacgcaaaccgtatgcctatcgggctgccggagatcatcgaagaggccccggcgtccaggctggagagtttttacaaaaaatggtacagggcggataacatggcccttatcctcgtgggcgattttgacggggcggcgcttgaggcttcgttagtcgatcattttttaatagaaaaacctgcggagccgacaaaccggcccctgtacgatctgccccttccccaaaaagggaacgtggaagtccttacccttaccgattctgaactgaccgccgcctatatcaggatttattataagcgcgccccgcaggcgaggcgtaatgatctgtcgtattaccgcagtgaaattattgactaccttatcgacaccatgctggaactgcgttttgaagaggcgctcctgaaacctgaaaccccccatgtaagcgttaatacgggaaccgccagttatgcggcatcttcgcggttttatgttttgacgtcccaggcaaaaactggcagcgccgaggcaagccttgaggatctattgaaaataaaagaggcgatactccgttacggctttaccgattcggagatggcaaccgcggctgacatactggtctcggaactgcagaggctggttcaggaaaaggacaagcagcaatcacaaacatacattgactcgctgactgattattatcttgaaggcggaaattacgcggatgctgaatgggaactgaacgccgttacgcggatgcttccgcatatcaaggcgaaagacattaacgccgcggttaaagattattttgcatccggtgatcttcaggtgtttatcttcgcgccggattccgagcaggcgagtctgccggatgaggcgcgtgtcaggcagatgatagcggacagcggaaaaatgaatattgccgcgcccagatacggggccgtaggaagcgggcttttatcgtccatgcctgaacgcggcgcgatagtttcagaatctaccgatgccgaaacaagcgctatagtctgggaactggggcacgggccgcgcgtgatcctcaaatcgactaaaaataaaaacgacgaaattgttgtgcacgcaatggccctcggcggaacaagcagtgttcctctggaagacgacgtatccgcaagtctcgccattgaaatgacccaggtttccggccttggcccctggtcgcgtccggatctgacactaaaactcgccggaaaacaggtatccctttcgcagttcatttacagttattatcggggtttcaggggttcctccaacacggtcgatctgaaaactttttttgaaatgatatacctcggcttcacagatcagcgcatagacaacgaggccgtagaggccatgctggatcaatacaggacatccctcgccctcagaagcgaagacccgcactcggttttttcctatgagatcaacagaacgatctacagcggacacccgcattttaaaccgcttgaactggacgatcttcccaaagcagatattgataccgcccttgcctttatccgcaagggccaaaaccccgccgattataaatttatatttacggggaacctggatttaaaaacaatgaaggaatatgtagagacataccttgcctcgattcccagaggaaaaacatggaataccctgacggatcttaatgttacgcgcccgggaaaagttgaaaacatcgtttacaaaggaaaggaagagcaaagcaccgtttacatggtatggttttccaaaaccccgtacagcgacgaactcagcgcggcatgccangtgctaaatgaatatcttgatataaaactggatgatgagatacgtgaaaaactcggaggcgtatattcaatttcatcaggcgtttctgtctcgccggttccgcagggcgagctttccatatatgtatattttagctgcgatccaaagcgggtaggggaactccaggccgccgttatcgcggtattgaaccaggcggcgagtgttacagacagcgacacttttacaaaggccgtggaagctctcaagaaagagtgggaagtctcgatgcagagcaattcctatatcgcccagagctacgccaattcgtcggtactgcttaatcttccgctgtcgcggctggacaggcggccaaaattgtttgaggccgtaacccatgccgacattcagagggtatgcagacagctattacaaagcaatgggccggcgattgtggtgctactaccagagagcaaatag

SEQ ID NO: 57848 - protein, 921 aa, Unknown
  Obtained from environmental sample
  DOMAIN (29)...(177): Insulinase (Peptidase family M16)
  misc_feature (1)..(921): Xaa is any amino acid
MWGGLGKPSDPVPVMEKLRTGVLPSGLSYFILENSMPENRAYLTLAVKAGSVLEEDDERGLAHFVEHLAFNGTERFPESKLVSYLRSLGMRFGPEVNAYTSFDQTVYGIEVPVESDDSGVRRIPETALAVIDDWTRAITFTPADVDDERPVIIEEYRTRLGAWERLRQKWLPVLFRGSPYANRMPIGLPEIIEEAPASRLESFYKKWYRADNMALILVGDFDGAALEASLVDHFLIEKPAEPTNRPLYDLPLPQKGNVEVLTLTDSELTAAYIRIYYKRAPQARRNDLSYYRSEIIDYLIDTMLELRFEEALLKPETPHVSVNTGTASYAASSRFYVLTSQAKTGSAEASLEDLLKIKEAILRYGFTDSEMATAADILVSELQRLVQEKDKQQSQTYIDSLTDYYLEGGNYADAEWELNAVTRMLPHIKAKDINAAVKDYFASGDLQVFIFAPDSEQASLPDEARVRQMIADSGKMNIAAPRYGAVGSGLLSSMPERGAIVSESTDAETSAIVWELGHGPRVILKSTKNKNDEIVVHAMALGGTSSVPLEDDVSASLAIEMTQVSGLGPWSRPDLTLKLAGKQVSLSQFIYSYYRGFRGSSNTVDLKTFFEMIYLGFTDQRIDNEAVEAMLDQYRTSLALRSEDPHSVFSYEINRTIYSGHPHFKPLELDDLPKADIDTALAFIRKGQNPADYKFIFTGNLDLKTMKEYVETYLASIPRGKTWNTLTDLNVTRPGKVENIVYKGKEEQSTVYMVWFSKTPYSDELSAACXVLNEYLDIKLDDEIREKLGGVYSISSGVSVSPVPQGELSIYVYFSCDPKRVGELQAAVIAVLNQAASVTDSDTFTKAVEALKKEWEVSMQSNSYIAQSYANSSVLLNLPLSRLDRRPKLFEAVTHADIQRVCRQLLQSNGPAIVVLLPESK

SEQ ID NO: 57849 - DNA, 1059 bp, Unknown
  Obtained from environmental sample
  misc_feature (1)..(1059): n is a, c, g, or t
atgcagcttactaatatcaccgattccatgattcccgttgagcaggcaaagaaaataagggcttcgatattgttcgccggcccgcttctggcgcagaccggcaaggtgatgctgccgccccccggcggggacgttatcggcagacggcggctggacacccactttctcgcgcttacggaactgggggcaaaggtaaaaacaaaagatacttttacctttaccgcaaaatcgctgaaaggggccgacatttttctggacgaggcgtccgttaccggaactgaaaatgcgattatggcggccgcgcttgcggatgggaagacgatactcaccaacgcggccggcgagccgcatgtgcaggatctctgccgaatgcttgtttctatgggtgcgcagatcgaaggcatcggttcaaacatactgactatcacaggtgtaaaaaaactttccggctgcgactttacaataggggctgattatatggaggtaggttcctttatagggcttgccgccgtcaccggaggggatcttcacatagaagggacgcggccccaggatctgcgtccggcgaaaatcgcctttggcaagctgggcatttcctgggcgcatgagggaacgactatccatgtcccgcaaaaacagccgttggaggttaactgcgacttagggggcatgataccaaaaatcgacgacgcgccctggcccggcttccctcccgaccttaccagcattatcaccgttgtggccacgcaggtaaaaggaacggtgttaatccacgaaaaaatgtttgaatcgcggatgttctttgtggacaagctcattggcatgggcgcgcggatagtgttatgcgatccccaccgggccgttgtttccggtcccgcgaagctgcacggctctgaacttaccagccccgatgtccgcgccggcatggcaatgctcatagccgctctctgcgccgagggcaggagcgttatacgcaatgtctaccagattgaacgcggctacgagcgcctcgtggaaaggctttccgccctgggagcccttgtaacaaagagcaattag

SEQ ID NO: 57850 - protein, 352 aa, Unknown
  Obtained from environmental sample
  DOMAIN (3)...(341): EPSP synthase (3-phosphoshikimate 1-carboxyvinyltransferase)
  misc_feature (1)..(352): Xaa is any amino acid
MQLTNITDSMIPVEQAKKIRASILFAGPLLAQTGKVMLPPPGGDVIGRRRLDTHFLALTELGAKVKTKDTFTFTAKSLKGADIFLDEASVTGTENAIMAAALADGKTILTNAAGEPHVQDLCRMLVSMGAQIEGIGSNILTITGVKKLSGCDFTIGADYMEVGSFIGLAAVTGGDLHIEGTRPQDLRPAKIAFGKLGISWAHEGTTIHVPQKQPLEVNCDLGGMIPKIDDAPWPGFPPDLTSIITVVATQVKGTVLIHEKMFESRMFFVDKLIGMGARIVLCDPHRAVVSGPAKLHGSELTSPDVRAGMAMLIAALCAEGRSVIRNVYQIERGYERLVERLSALGALVTKSN

SEQ ID NO: 57851 - DNA, 1386 bp, Unknown
  Obtained from environmental sample
  misc_feature (1)..(1386): n is a, c, g, or t
atgagaggcattgaatacaagggactttcccgtatagaaggcccggtggtaatcactacccgcagccgtaatgtaggctataacgaggttgttgccgtttacggccgcgacggcgacagacggcttggcagggttgttgacttaagcgaagactgggccgcgattcaggttttcggcagcagtaccggtctttccgcgagtgactccagggtcgaatttttggagaaacccatggaactgcgggtcggcactgacctgctggggcgtatcttcaacggccttggagagccaatcgacggttacggcgacattttttcctcaacaacgattgatgtgaacggtttgccgatcaacccctacgcccgcacatatccccgcgactttatccagaccggcgtttccgccattgacggcatgaacacccttatccgcgggcagaaactcccgattttttcaggcagcggacttccccataaccgccttgccgcgcaaatagtccggcaggcaaaaattatcagcaaaggaagttccggacagtttgtagttgttttctgcgctatgggtgtaaagaacgatgtggcgcgtttctttctggatgactttgagcgatccggcgtattgtcaaatgtggtgattttcctctcgcttgccgacgccccttcccttgagcgcctgattgccccccgctgcgccctcaccgctgccgaataccttgcctacgaaaaagatatgcacgtccttgtggtaatgacggacatgaccaactactgcgaagcgctgcgtgaagtttcatcaatacggggcgaagttcccagcagaaaaggttatcccggctacctgtactcggatctcgcggcgttgtacgagcgggcggggaagataaaggacagggaaggttccattacccaactgccgattctgaccatgcccaatgatgatatcagccatcctatccctgacctttccggctatataaccgagggccagatagtccttgaccgcgagcttttccagagggggatttacccgccggtcgcgggactgcccagcctctcgcggcttatgaaggacggcataggccccggcatgacccgcgaggatcacaaggatgtggccagccagctttttgccgcctattcaaaggtaaagcaggttcgcaacctcgtgtcgatcataggcgaggaagagctgtccgaaaccgacaaatgttatctgaaatatggggaggattttgagcgtatgttccttatccagggcgataatgaaaaccgtacgattgcccaaacactggatctcggctggaaggttttaggaactctgccgcgtgacgaactgctgcggataaatcaggaatttatcaaaaagtacttggataaaaatgaataa

SEQ ID NO: 57852 - protein, 461 aa, Unknown
  Obtained from environmental sample
  DOMAIN (9)...(75): ATP synthase alpha/beta family, beta-barrel domain
  misc_feature (1)..(461): Xaa is any amino acid
MRGIEYKGLSRIEGPVVITTRSRNVGYNEVVAVYGRDGDRRLGRVVDLSEDWAAIQVFGSSTGLSASDSRVEFLEKPMELRVGTDLLGRIFNGLGEPIDGYGDIFSSTTIDVNGLPINPYARTYPRDFIQTGVSAIDGMNTLIRGQKLPIFSGSGLPHNRLAAQIVRQAKIISKGSSGQFVVVFCAMGVKNDVARFFLDDFERSGVLSNVVIFLSLADAPSLERLIAPRCALTAAEYLAYEKDMHVLVVMTDMTNYCEALREVSSIRGEVPSRKGYPGYLYSDLAALYERAGKIKDREGSITQLPILTMPNDDISHPIPDLSGYITEGQIVLDRELFQRGIYPPVAGLPSLSRLMKDGIGPGMTREDHKDVASQLFAAYSKVKQVRNLVSIIGEEELSETDKCYLKYGEDFERMFLIQGDNENRTIAQTLDLGWKVLGTLPRDELLRINQEFIKKYLDKNE

SEQ ID NO: 57853 - DNA, 342 bp, Unknown
  Obtained from environmental sample
  misc_feature (1)..(342): n is a, c, g, or t
gtgagggcgcagcggggggcaatcaggcgctcaagggaaggggcgtcggcaagcgagaggaaaatcaccacatttgacaatacgccggatcgctcaaagtcatccagaaagaaacgcgccacatcgttctttacacccatagcgcagaaaacaactacaaactgtccggaacttcctttgctgataatttttgcctgccggactatttgcgcggcaaggcggttatggggaagtccgctgcctgaaaaaatcgggagtttctgcccgcggataagggtgttcatgccgtcaatggcggaaacgccggtctggataaagtcgcggggatatgtgcgggcgtag

SEQ ID NO: 57854 - protein, 113 aa, Unknown
  Obtained from environmental sample
  misc_feature (1)..(113): Xaa is any amino acid
MRAQRGAIRRSREGASASERKITTFDNTPDRSKSSRKKRATSFFTPIAQKTTTNCPELPLLIIFACRTICAARRLWGSPLPEKIGSFCPRIRVFMPSMAETPVWIKSRGYVRA

SEQ ID NO: 57855 - DNA, 312 bp, Unknown
  Obtained from environmental sample
  misc_feature (1)..(312): n is a, c, g, or t
gtgatcctcgcgggtcatgccggggcctatgccgtccttcataagccgcgagaggctgggcagtcccgcgaccggcgggtaaatccccctctggaaaagctcgcggtcaaggactatctggccctcggttatatagccggaaaggtcagggataggatggctgatatcatcattgggcatggtcagaatcggcagttgggtaatggaaccttccctgtcctttatcttccccgcccgctcgtacaacgccgcgagatccgagtacaggtagccgggataaccttttctgctgggaacttcgccccgtattga

SEQ ID NO: 57856 - protein, 103 aa, Unknown
  Obtained from environmental sample
  misc_feature (1)..(103): Xaa is any amino acid
MILAGHAGAYAVLHKPREAGQSRDRRVNPPLEKLAVKDYLALGYIAGKVRDRMADIIIGHGQNRQLGNGTFPVLYLPRPLVQRREIRVQVAGITFSAGNFAPY

SEQ ID NO: 57857 - DNA, 1137 bp, Unknown
  Obtained from environmental sample
  misc_feature (1)..(1137): n is a, c, g, or t
atgaataaagaattatcaaaattttccgaattgcggaaaagcgcgaacgggtttgattttgaaaaactcagggaagcggcaaggatagcgattgaggtttccctcaaggtgaagacaggcgagcaggtactgataatcagtaaccccagaccggaagttgccgtcattgcggaggcattatacgacgcaagccttgatgccggcggcaggccggtgctactgtaccagccggtaaaggcgcagatcgcgtttgccgagcctgcgacgctcgccgcctttaacgcaaaaccggaagtggttatttccctgagcgatgaaaagctcggcaaagaccccacgggtatcgcttcgccgtatgaatacaacggggtaaaatacgatcatatttttcatcttcagcaatacggggaaagaagctgccgcgcgttctggtcgccttcaaccacggttgaatcctttatccgcactgttcccatcgactacgccgaattgcaacgtcgttgcgcggctatcaagcgggtattggacagggccgtggaagtccatgtcagcgcgcccggaggaacagacattaccattggactgcggggcagagacgcaaaatccgatgacggcaatttttcaacgccgggctcgggcggcaaccttcccgccggagaaactttcatcagcccggaaaacctcaccgcaaagggccggatttgctatgacggctccatcagcgtcaacgagggagaactaatcatcgataccccgattgaatgtctggtggaagacggctatgtgaataaaattctgggcgctggggaagcggtctgcctgttgaagaccattgaggcggcggaacgcaacgcccgcgaatttgagcggggcggaaaactgccctccggcagcggggaaacgtatgcccgcaacgcgcgcaacatcggcgaattgggcatcggcctgaaccccgcggcccgcatcaccggaaaaatgcttgaagacgaaaaagcgttcaacacctgccattttgcaatcggcatgaactacgacgaagacgccccctgccttatccaccttgacggcctggtgaagaacccggttatcactgcggttttcggcggcggaagcgaagagattattgggtgggcttga

SEQ ID NO: 57858 - protein, 378 aa, Unknown
  Obtained from environmental sample
  misc_feature (1)..(378): Xaa is any amino acid
MNKELSKFSELRKSANGFDFEKLREAARIAIEVSLKVKTGEQVLIISNPRPEVAVIAEALYDASLDAGGRPVLLYQPVKAQIAFAEPATLAAFNAKPEVVISLSDEKLGKDPTGIASPYEYNGVKYDHIFHLQQYGERSCRAFWSPSTTVESFIRTVPIDYAELQRRCAAIKRVLDRAVEVHVSAPGGTDITIGLRGRDAKSDDGNFSTPGSGGNLPAGETFISPENLTAKGRICYDGSISVNEGELIIDTPIECLVEDGYVNKILGAGEAVCLLKTIEAAERNAREFERGGKLPSGSGETYARNARNIGELGIGLNPAARITGKMLEDEKAFNTCHFAIGMNYDEDAPCLIHLDGLVKNPVITAVFGGGSEEIIGWA

SEQ ID NO: 57859 - DNA, 759 bp, Unknown
  Obtained from environmental sample
  misc_feature (1)..(759): n is a, c, g, or t
atgaaaaggattaagttttttcttcttttaacgctgattttctcttttatgccggttaccgtaggggctgaaaattgggagtcttacgagcttattgaacgcttattggccatacctagccccggaaaaccgttaatttacaaagattttataatttttaccgccgatacaaacctgcgaaaggtaggaattgcctttgcccatgagaattttgcctatacatactggtttaagcaacttcttgtccctcaagacctcctaaatgcgccaattccgcccggtaaaaaagtccccgatccttacatagattcgggtattcaattccatgtatttgaggttcccgaaggtttaaatgaagttggatacaggcttgtaattaacggcctgtggacgacagacccgaataaccccctaacccgcagagaccttgtttccggcttgattttatcggtggtaagtatgccgtccagacccataaaactcgaccctctaaaaggactgcccgaaggactaacctttacctttaacggccccccgggagagaccgtcaccgtagccggcagttttaacagttgggatccatttatgtacgaacttaaagaaaacccggcaggtgtttataccctcacgctcccactgccgccaggcacataccaatacgtttttttctgtcagggtaagcgttttgtagatttgaataatccgcgcagaagttactcacgggaaggaaaagccgcatcggagattacggttccgtag

SEQ ID NO: 57860 - protein, 252 aa, Unknown
  Obtained from environmental sample
  SIGNAL (1)...(22)
  misc_feature (1)..(252): Xaa is any amino acid
MKRIKFFLLLTLIFSFMPVTVGAENWESYELIERLLAIPSPGKPLIYKDFIIFTADTNLRKVGIAFAHENFAYTYWFKQLLVPQDLLNAPIPPGKKVPDPYIDSGIQFHVFEVPEGLNEVGYRLVINGLWTTDPNNPLTRRDLVSGLILSVVSMPSRPIKLDPLKGLPEGLTFTFNGPPGETVTVAGSFNSWDPFMYELKENPAGVYTLTLPLPPGTYQYVFFCQGKRFVDLNNPRRSYSREGKAASEITVP

SEQ ID NO: 57861 - DNA, 1647 bp, Unknown
  Obtained from environmental sample
  misc_feature (1)..(1647): n is a, c, g, or t
gtgtgcagtaattatcacatcggctgcttaacgctattcatcaatattgtcttccgctttacaactcctcttcttttctttgcgtttttnctgccgaataatcttttcttttccacaggtttcggagcgctgacttttgttttatttaaaatgtcatcaagaccggtaagcgagaaatcatcgccgccgaaaatatcgccgccgtctgaaaaaccgccgctgcttgaatcgccttcttgggtttcgcctgtgccgccggtttcaatatcaattgaatcggacgcaaaatcggaacctaagtctcccatgtcaaacgctgtttcggttgtcgcatcagcggtgtcggctcctgtatccgcgccgaaatctgcgcctaaaccggcatccgcgtcctcgccgaaatctgtacctaaatcggcatccgcatctccgccgaagctgacatctgcgtccgcgccggaaaagtccgcttccgaagaagagatatcaaaatccgtacccgaaagagaagcatcatcgccggatgaatcagtgctaaaatcgggtaaatcggctgaagaaaaatcatcgcttgcgggcggcgtaatgtccggggactcgccgccgaggtcgatattccaagattccggcgtatctattgaatcgggcgcagaatcggctggtgcggattcctgttcggcgacaggagcttcgccgccaaggtctatgccgtttagatcgggcatttcaaatgtttcgtccggggcatccgcgctttcagcgtcagcgccggcagtgtcgctaccggtatcgccgattgaatcaacattaaagtcatcaagaccgaaatcggcggaagcgtcttccggctcagccggcgcggtttctatgctttcaccgccaaggtctataccgcccaaatcgtcttcgttttcctccggcggaggcggaggcggcgcggcgggttcttccgcagagaaatcttcagttccaaagtcggggatttcctcgtcagccggagccgattccatctggtcggaaaaaccggctaaaagatcgtcgggtatagcgccttcatcggcgagagtatccgcaggggtgtccgcaaggacatcagccggaatatccgctgcggcttcgtcttgtccgcccaagaaagacgataaatcatcgtctgccgccggaacgtcaggcgctgcttcatcttgcatactgtccgtgaaagacgacagatcgtctgccggaggtacatcagccggagcgtctgcgctcatgtccatgccgctcaataagtctgataaatcacctgtgctatccgattccggttccgccggcggcgaaccgagttcttttaaaaaactatcaagcgcatctacggcgctttcagggggtgcttcagcaggcggagcttcgccgcctgttaaattatttaagaaagaattaaggtctacattagcgccgccatcgtcaagccccatgtcatcaagagcgggtacgtccgtagcggcaggggcttcatgccttataaactggaaaggaggcgcttctgtcgttggaaggtcaaaatcgttaaaaggcagacctagggactcaatatcttccttctctttggcgatattattaaacgagtatttaaactgtcccagcgcgttaaagacggcatattaa

SEQ ID NO: 57862 - protein, 548 aa, Unknown
  Obtained from environmental sample
  misc_feature (1)..(548): Xaa is any amino acid
MCSNYHIGCLTLFINIVFRFTTPLLFFAFXLPNNLFFSTGFGALTFVLFKMSSRPVSEKSSPPKISPPSEKPPLLESPSWVSPVPPVSISIESDAKSEPKSPMSNAVSVVASAVSAPVSAPKSAPKPASASSPKSVPKSASASPPKLTSASAPEKSASEEEISKSVPEREASSPDESVLKSGKSAEEKSSLAGGVMSGDSPPRSIFQDSGVSIESGAESAGADSCSATGASPPRSMPFRSGISNVSSGASALSASAPAVSLPVSPIESTLKSSRPKSAEASSGSAGAVSMLSPPRSIPPKSSSFSSGGGGGGAAGSSAEKSSVPKSGISSSAGADSIWSEKPAKRSSGIAPSSARVSAGVSARTSAGISAAASSCPPKKDDKSSSAAGTSGAASSCILSVKDDRSSAGGTSAGASALMSMPLNKSDKSPVLSDSGSAGGEPSSFKKLSSASTALSGGASAGGASPPVKLFKKELRSTLAPPSSSPMSSRAGTSVAAGASCLINWKGGASVVGRSKSLKGRPRDSISSFSLAILLNEYLNCPSALKTAY

SEQ ID NO: 57863 - DNA, 1443 bp, Unknown
  Obtained from environmental sample
  misc_feature (1)..(1443): n is a, c, g, or t
atggggcttgacgatggcggcgctaatgtagaccttaattctttcttaaataatttaacaggcggcgaagctccgcctgctgaagcaccccctgaaagcgccgtagatgcgcttgatagttttttaaaagaactcggttcgccgccggcggaaccggaatcggatagcacaggtgatttatcagacttattgagcggcatggacatgagcgcagacgctccggctgatgtacctccggcagacgatctgtcgtctttcacggacagtatgcaagatgaagcagcgcctgacgttccggcggcagacgatgatttatcgtctttcttgggcggacaagacgaagccgcagcggatattccggctgatgtccttgcggacacccctgcggatactctcgccgatgaaggcgctatacccgacgatcttttagccggtttttccgaccagatggaatcggctccggctgacgaggaaatccccgactttggaactgaagatttctctgcggaagaacccgccgcgccgcctccgcctccgccggaggaaaacgaagacgatttgggcggtatagaccttggcggtgaaagcatagaaaccgcgccggctgagccggaagacgcttccgccgatttcggtcttgatgactttaatgttgattcaatcggcgataccggtagcgacactgccggcgctgacgctgaaagcgcggatgccccggacgaaacatttgaaatgcccgatctaaacggcatagaccttggcggcgaagctcctgtcgccgaacaggaatccgcaccagccgattctgcgcccgattcaatagatacgccggaatcttggaatatcgacctcggcggcgagtccccggacattacgccgcccgcaagcgatgatttttcttcagccgatttacccgattttagcactgattcatccggcgatgatgcttctctttcgggtacggattttgatatctcttcttcggaagcggacttttccggcgcggacgcagatgtcagcttcggcggagatgcggatgccgatttaggtacagatttcggcgaggacgcggatgccggtttaggcgcagatttcggcgcggatacaggagccgacaccgctgatgcgacaaccgaaacagcgtttgacatgggagacttaggttccgattttgcgtccgattcaattgatattgaaaccggcggcacaggcgaaacccaagaaggcgattcaagcagcggcggtttttcagacggcggcgatattttcggcggcgatgatttctcgcttaccggtcttgatgacattttaaataaaacaaaagtcagcgctccgaaacctgtggaaaagaaaagattattcggcagnaaaaacgcaaagaaaagaagaggagttgtaaagcggaagacaatattgatgaatagcgttaagcagccgatgtga

SEQ ID NO: 57864 - protein, 480 aa, Unknown
  Obtained from environmental sample
  misc_feature (1)..(480): Xaa is any amino acid
MGLDDGGANVDLNSFLNNLTGGEAPPAEAPPESAVDALDSFLKELGSPPAEPESDSTGDLSDLLSGMDMSADAPADVPPADDLSSFTDSMQDEAAPDVPAADDDLSSFLGGQDEAAADIPADVLADTPADTLADEGAIPDDLLAGFSDQMESAPADEEIPDFGTEDFSAEEPAAPPPPPPEENEDDLGGIDLGGESIETAPAEPEDASADFGLDDFNVDSIGDTGSDTAGADAESADAPDETFEMPDLNGIDLGGEAPVAEQESAPADSAPDSIDTPESWNIDLGGESPDITPPASDDFSSADLPDFSTDSSGDDASLSGTDFDISSSEADFSGADADVSFGGDADADLGTDFGEDADAGLGADFGADTGADTADATTETAFDMGDLGSDFASDSIDIETGGTGETQEGDSSSGGFSDGGDIFGGDDFSLTGLDDILNKTKVSAPKPVEKKRLFGXKNAKKRRGVVKRKTILMNSVKQPM

SEQ ID NO: 57865 - DNA, 2340 bp, Unknown
  Obtained from environmental sample
  misc_feature (1)..(2340): n is a, c, g, or t
gtggatgatttatcctcacttttgggcgatagccaggatgaagccgcacccgctgatacaggcgcagatgatttttcctcacttatgggcggcgctcaggatgaaagcccgtctctcgaaaatgaaggtgccataccggatgatcttttatcgggcttttctgacgagatggaatctgctcccaccgattcaggacttcccgattttagcaaagaagattttaacgctgatgcgggtcaagatgatactgaagatttgggagccatagacttaggcggagaaagccaggacggcacacttagctcatcaaccggacctgataccggttttgatgctgatgattcaagtcttgatagtactgcgtttgataccgcagcttttgacacaggcgcgactgataatcaatctgcagacacttcggatttaaacgaaggatttgatctcggcggtgaatctgctgattttactcctaaaactgcggatgatgatttttcttcagacactttaccggatattgattttccggggggggacgattcaggatttaatactgatttatccggtggggatgactctggtcaagacgcgggctttgactctactttaccggacatagatttttcaagcgcagacagtaccgcaggtacagacgccactgcgggtgattccggcgctgtacatgattatggagatttaggcgctgatttttcgtctgattcagttgaattggacactagtgacggtggaagcgaacttgcggctcaagagcaacatgacatgggtttttcaagtgaagcttttggtgacgattcattttcactttccggtcttgatgatattttaaataagtcaaaagccagtgagccaaaaccaccgccgccgaagaaaggcttcttcggtagaaaaaagccaataatagaagaagagaaaaaagaagaagaaaatatagatgaaatctcgttaagtcaggaaaatgttgacagtttattgcatactctttcatcctatccgttaaatttaaaagtcatctgtgaagaattgatagccgaacaggttcttctgcccgagcaattatcaaaattaatacgtcttcttgtaaacggcgcgtctgtcaaagaaaccgccgctttagccgagcaaattacaggtaagccgattgttattcccagaagttttgaaaaaagcactggtgcggattttgaagcggagcagtcaagttttgcgtatatctttgtacacaatttacttccggtaataaggttgtttgccttcatcatagcaatggctggttccatcatataccttagttacaaatttatttacatacctataaaagccgaatccctgtacaaacgcggttatgaacgtattcccgccggagaataccaacgggcaaatgaattattccatgatgcgtttgtaaagcacagaaagaaaaaatggttttacgcatacgccgaagcattcagggatcaacgccgctatatgcttgcggaaaataaatacgacgagcttttaagatactatcctagggacaaaaaaggcgttttagattatgcggctttaaacacttattatttaatgaactacgaaaaggcaaacaagctgttacagcgggaacttcttgattacgctcccgatgattttgaaggacttctcgcggcgggagacaacttccttgattgggctgattccaatcccgcaaaattctatgatagatacgaagacgctcgtttctcttacgcaaggctcattgaaaaatacggatggctgcctcctgttattgaaagaatgttgaagtactttatccgcacagacaaccttaaagagacgcttcagttaagagcatggtttgaaaacgatccgaagcagcgaaaactttccactccgactcttgccgagcttggcggctatctgttggacaaacagcttataaagaaaccgggcgtacccgatccgtatattgaaagcatagaaagcgtacgggatatgcttttgcaagcggtcatggaagatcagtatctgcccgaaccgcattatcatcttgcccgctattatcatagtcttggcaatactcacgaagaacgtttaactttggaaaacgctatccgcgcgtttgatctggctaaacaggagtctgtaaaacgccgcctttaccgtgtggatactcattatcgttacgcaaatctgcttatcaacaataaagaattcttccctgccgacgaacaggcggtaagaggcatagaattgtttgaggatttctaccacagaaatttgatacccgctactcctcaggctggtcattatattctttgcgaggagaccttgagtactttgtga

SEQ ID NO: 57866 - protein, 779 aa, Unknown
  Obtained from environmental sample
  misc_feature (1)..(779): Xaa is any amino acid
MDDLSSLLGDSQDEAAPADTGADDFSSLMGGAQDESPSLENEGAIPDDLLSGFSDEMESAPTDSGLPDFSKEDFNADAGQDDTEDLGAIDLGGESQDGTLSSSTGPDTGFDADDSSLDSTAFDTAAFDTGATDNQSADTSDLNEGFDLGGESADFTPKTADDDFSSDTLPDIDFPGGDDSGFNTDLSGGDDSGQDAGFDSTLPDIDFSSADSTAGTDATAGDSGAVHDYGDLGADFSSDSVELDTSDGGSELAAQEQHDMGFSSEAFGDDSFSLSGLDDILNKSKASEPKPPPPKKGFFGRKKPIIEEEKKEEENIDEISLSQENVDSLLHTLSSYPLNLKVICEELIAEQVLLPEQLSKLIRLLVNGASVKETAALAEQITGKPIVIPRSFEKSTGADFEAEQSSFAYIFVHNLLPVIRLFAFIIAMAGSIIYLSYKFIYIPIKAESLYKRGYERIPAGEYQRANELFHDAFVKHRKKKWFYAYAEAFRDQRRYMLAENKYDELLRYYPRDKKGVLDYAALNTYYLMNYEKANKLLQRELLDYAPDDFEGLLAAGDNFLDWADSNPAKFYDRYEDARFSYARLIEKYGWLPPVIERMLKYFIRTDNLKETLQLRAWFENDPKQRKLSTPTLAELGGYLLDKQLIKKPGVPDPYIESIESVRDMLLQAVMEDQYLPEPHYHLARYYHSLGNTHEERLTLENAIRAFDLAKQESVKRRLYRVDTHYRYANLLINNKEFFPADEQAVRGIELFEDFYHRNLIPATPQAGHYILCEETLSTL

SEQ ID NO: 57867 - DNA, 345 bp, Unknown
  Obtained from environmental sample
  misc_feature (1)..(345): n is a, c, g, or t
atggccgagagtgaacaggccatgcagggacaggggaacgggctgatcaacgaaggacagcaggcgtataacgaggaaattcccaaaaccaggggcgaagccgagcggcttatacaggtggctcagggttatgcgacagaaagggtgaacagggcgaacggcgacgtggcgcgttttaacgcggtgtacaacgagtaccgacgttcccccgacgttacgcggcagcggctgtattatgaaatgatggaggaagtattcaaggacgagaaaggcacggcgctcattgaccgcagcctgaggaatttcctgcccatgatgaacctcggcccgcagggaggcagataa

SEQ ID NO: 57868 - protein, 114 aa, Unknown
  Obtained from environmental sample
  misc_feature (1)..(114): Xaa is any amino acid
MAESEQAMQGQGNGLINEGQQAYNEEIPKTRGEAERLIQVAQGYATERVNRANGDVARFNAVYNEYRRSPDVTRQRLYYEMMEEVFKDEKGTALIDRSLRNFLPMMNLGPQGGR

SEQ ID NO: 57869 - DNA, 804 bp, Unknown
  Obtained from environmental sample
  misc_feature (1)..(804): n is a, c, g, or t
ttgatgagatttaccgttaccccaaaagatatggcctgggacggcgaggcgaggatagtgcccactgcggaaaggcagtttatctttgtcgatgttatcgcccgctggcgcatttccgatccaaaaagattctacgaggccattaacaccgtggacgcggcgtattccaaacttgccgagattatcgactccgaggtgcgtaccgtggtggcggaaaattttctgcgtgagtccgtgcgtaattcaaacatcattatggaacgcacattgagtaccgacgaccccggcctgggggaggatatcagggccgagatactaagcacggtacagcccggttcggggtatgagccaattacaaaggggcgccgccgccttgccgaggaagtgcttagccgctcgcggcgcatggttcccgaatacggcatagagcttatcgacgtggtaacgcggcagatacgctattccgatgagcttacccccagcgtctacgcccgcatgatacgggaacggaaccagatagcccaggcctaccggtccgccggcgaaggcagcaaggcggaatggctgggcaagatggacaacgaaaagcgctccattctttccgccgcttacgagcaggctgagacaatcaggggaagggctgacgcgacggcgacgcggatttacgccgaggcttataatcaggacagggacttttttaatttctggcgtggcgtggaatcttaccggagcaccctgccgaggtttaacaaaacattgtctacggatatggaatatttccgttatctgtataccccccgatga

SEQ ID NO: 57870 - protein, 267 aa, Unknown
  Obtained from environmental sample
  DOMAIN (2)...(183): SPFH domain / Band 7 family
  misc_feature (1)..(267): Xaa is any amino acid
MMRFTVTPKDMAWDGEARIVPTAERQFIFVDVIARWRISDPKRFYEAINTVDAAYSKLAEIIDSEVRTVVAENFLRESVRNSNIIMERTLSTDDPGLGEDIRAEILSTVQPGSGYEPITKGRRRLAEEVLSRSRRMVPEYGIELIDVVTRQIRYSDELTPSVYARMIRERNQIAQAYRSAGEGSKAEWLGKMDNEKRSILSAAYEQAETIRGRADATATRIYAEAYNQDRDFFNFWRGVESYRSTLPRFNKTLSTDMEYFRYLYTPR

SEQ ID NO: 57871 - DNA, 960 bp, Unknown
  Obtained from environmental sample
  misc_feature (1)..(960): n is a, c, g, or t
ttgtttttggcggagacggcgtctccaaaggagccggaattgtataatatcgacagactatttgaagcggtcagcgcgaagggccatgtgtgcgtgggtcttgatacggcggcggaatatgtcccagccgcggaacggaagcgggccgcttccgacgccgaagctgtactggtttttaacaaggcccttgttgactctacttttgacgcctgcgcttgttacaaggtacagatcgcctattatgaggagatggggctggaggggctggcttgttacgcgaagaccctgcgttacatacgcgacaaaggcggcctggttatagccgacataaaacgcggcgatattgccgataccgccctgcgttacgcgaaagcccattttaccggggactttgaggctgattttgtcacgctttccccctacatgggtatggactcaatcgagccctggctttcttacgccgcgcatagcggcaaaggcgcttttgtactgatgaggacgagcaacaagggcatgagggattttgaatacctcgaattatcgtccggtaaaaaacgcctgtaccacgcggttggcgacaagcttgccgaactggctgacgctcataaagggattcacggctacggggtctttggagccgttgtcggctgtacagaaagggatgaggcagccgaaatccgcaaaaattattccaatctttttttccttattcccggctacggcgcgcagggcggagcggctgatgacgcggcgttacttttgcgcgaaggaaacggcggggtagtgaatgcctcgcgatccatacttaaggcctgggaagcagaactgaaaaaatcgggcggggatgtgtcggctgcatcaaattcctttgccgcggaagcggcgcgcagggcggcgattgagatgcgcgacgcgattcggacggcgatttgcgttaggcgttcttgcccttgctcctga

SEQ ID NO: 57872 - protein, 319 aa, Unknown
  Obtained from environmental sample
  DOMAIN (28)...(279): Orotidine 5'-phosphate decarboxylase / HUMPS family
  misc_feature (1)..(319): Xaa is any amino acid
MFLAETASPKEPELYNIDRLFEAVSAKGHVCVGLDTAAEYVPAAERKRAASDAEAVLVFNKALVDSTFDACACYKVQIAYYEEMGLEGLACYAKTLRYIRDKGGLVIADIKRGDIADTALRYAKAHFTGDFEADFVTLSPYMGMDSIEPWLSYAAHSGKGAFVLMRTSNKGMRDFEYLELSSGKKRLYHAVGDKLAELADAHKGIHGYGVFGAVVGCTERDEAAEIRKNYSNLFFLIPGYGAQGGAADDAALLLREGNGGVVNASRSILKAWEAELKKSGGDVSAASNSFAAEAARRAAIEMRDAIRTAICVRRSCPCS

SEQ ID NO: 57873 - DNA, 336 bp, Unknown
  Obtained from environmental sample
  misc_feature (1)..(336): n is a, c, g, or t
atgccgggctttacgggactggaaacagcgtttgcggtaagtttgtcgtatttacctgacattggattacagcggctttccgcgcttatgagcgccaacccggcgcgtataattagccttgaggacaggggccgtatagaaaaaggtttaagggcggatcttgtcatcgcggatacgggagcggaatggaaggttgagcctgaaaaatttaaatcacgggggaagtgcagcccctttgccggaaaaacattgcgcggaaagatattaatgacgcttaacgctgggaaaattgtttttggcggagacggcgtctccaaaggagccggaattgtataa

SEQ ID NO: 57874 - protein, 111 aa, Unknown
  Obtained from environmental sample
  misc_feature (1)..(111): Xaa is any amino acid
MPGFTGLETAFAVSLSYLPDIGLQRLSALMSANPARIISLEDRGRIEKGLRADLVIADTGAEWKVEPEKFKSRGKCSPFAGKTLRGKILMTLNAGKIVFGGDGVSKGAGIV

SEQ ID NO: 57875 - DNA, 552 bp, Unknown
  Obtained from environmental sample
  misc_feature (1)..(552): n is a, c, g, or t
atgtttcacgcggagcgttgggcgggggcgtttttaaccgtttcaggcgcgaacgcggatgaggcgttcgtatgcctcaaggcgcttgccgcgaatgttaaaacccttcgcgggctgctcttcgggcacagcgcctctgcaaaactggaaaaaatactgagggaaagcgcggccgccacacacgcggacgctgccgccacagagtacgccatacgcctcctgtgcctgttagttgaaaagaactgcttcaggcacgtcgatctgcttttacagaagattgaacaggatcttaacgcgcgaaacgggctccttgacgtcacccttgaaacggcggccgccgtggacggcaactttgaaaaagaacttgaacagcggataaaagaaaagaccggggccgcgggcgttaaaatgaaaacgcgcgtaaggcccgaactgctgggcggttaccttctgcgaattggcagtctctttattgacgctagcctgaaagggcagttggaaaatatggcggcccaattaacaggcgcgaatacaggaggccgtaatggctaa

SEQ ID NO: 57876 - protein, 183 aa, Unknown
  Obtained from environmental sample
  SIGNAL (1)...(19)
  DOMAIN (4)...(173): ATP synthase delta (OSCP) subunit
  misc_feature (1)..(183): Xaa is any amino acid
MFHAERWAGAFLTVSGANADEAFVCLKALAANVKTLRGLLFGHSASAKLEKILRESAAATHADAAATEYAIRLLCLLVEKNCFRHVDLLLQKIEQDLNARNGLLDVTLETAAAVDGNFEKELEQRIKEKTGAAGVKMKTRVRPELLGGYLLRIGSLFIDASLKGQLENMAAQLTGANTGGRNG

SEQ ID NO: 57877 - DNA, 999 bp, Unknown
  Obtained from environmental sample
  misc_feature (1)..(999): n is a, c, g, or t
atggctaattacgatgatctgaccaaggtattaaaagagcgtattgaaaactggaagggcggcgcggtgtccggaagctcgggctttgttgtccaggtgggcgattccgtcgccacggtctacggccttaacgacgcggtttacggcgagttagtcgattttgcctcgggtgcccatgggatcgttttcaaccttgaggaagaaaacgcgggctgcgtaattttaaccggcgagtcccttgttaaagacggcgaggaagtaaaaagaaccggcaaggtcgtgtccattccctctggcagctcacttttcggcagggtggtaaaccccctcggagagccgcttgacggcaaggggccgattacggcggaagcctatatgcccatggagtccccggccgcgcctgttatcgaccggggaagcgtggacaccccgcttcagacaggctgcgtttcaatagacgcgatgatccccatagggcgcggccagcgcgagctgataatcggcgaccgccagaccggaaagacatcgatcgccattgacacgataatcaaccagaaagggaagaacgttatctgcatatactgcgccatcgggcagaagtcttcttcgatagtcgccatattgaataaccttgagaaacacagcgcgatggattatacctttgtggtgctcgcctcggcctccgattcggcggcccttcaatatatctcgccctattccgcggtcgccatggccgaatattttttgcgccagggaaaagacgtgctggtggtttacgacgatctgtcgaagcacgccgtggcttaccgcgcggtcagcctgcttctgcggcggcctcccgggcgcgaggctttccccggcgacgtgttctaccttcactcgcggcttctggaacgcgccgtaaaactttcgccttcaaaaggcggcggctcaatcaccgcgatgccgatnatcgagacccaggcgggcgacatttcggcttacattcccaccacgtaa

SEQ ID NO: 57878 - protein, 332 aa, Unknown
  Obtained from environmental sample
  DOMAIN (23)...(91): ATP synthase alpha/beta family, beta-barrel domain
  misc_feature (1)..(332): Xaa is any amino acid
MANYDDLTKVLKERIENWKGGAVSGSSGFVVQVGDSVATVYGLNDAVYGELVDFASGAHGIVFNLEEENAGCVILTGESLVKDGEEVKRTGKVVSIPSGSSLFGRVVNPLGEPLDGKGPITAEAYMPMESPAAPVIDRGSVDTPLQTGCVSIDAMIPIGRGQRELIIGDRQTGKTSIAIDTIINQKGKNVICIYCAIGQKSSSIVAILNNLEKHSAMDYTFVVLASASDSAALQYISPYSAVAMAEYFLRQGKDVLVVYDDLSKHAVAYRAVSLLLRRPPGREAFPGDVFYLHSRLLERAVKLSPSKGGGSITAMPXIETQAGDISAYIPTT

SEQ ID NO: 57879 - DNA, 429 bp, Unknown
  Obtained from environmental sample
  misc_feature (1)..(429): n is a, c, g, or t
gtgaaggtagaacacgtcgccggggaaagcctcgcgcccgggaggccgccgcagaagcaggctgaccgcgcggtaagccacggcgtgcttcgacagatcgtcgtaaaccaccagcacgtcttttccctggcgcaaaaaatattcggccatggcgaccgcggaatagggcgagatatattgaagggccgccgaatcggaggccgaggcgagcaccacaaaggtataatccatcgcgctgtgtttctcaaggttattcaatatggcgactatcgaagaagacttctgcccgatggcgcagtatatgcagataacgttcttccctttctggttgattatcgtgtcaatggcgatcgatgtctttccggtctggcggtcgccgattatcagctcgcgctggccgcgccctatggggatcatcgcgtctattga

SEQ ID NO: 57880 - protein, 142 aa, Unknown
  Obtained from environmental sample
  misc_feature (1)..(142): Xaa is any amino acid
MKVEHVAGESLAPGRPPQKQADRAVSHGVLRQIVVNHQHVFSLAQKIFGHGDRGIGRDILKGRRIGGRGEHHKGIIHRAVFLKVIQYGDYRRRLLPDGAVYADNVLPFLVDYRVNGDRCLSGLAVADYQLALAAPYGDHRVY

SEQ ID NO: 57881 - DNA, 465 bp, Unknown
  Obtained from environmental sample
  misc_feature (1)..(465): n is a, c, g, or t
ttgtttaattcaggttttcgcccggctatagacgtagggctttcggtcagccgcgtcggtggttcggcgcagacaaaagccatgcggaaaatttccggcaggatcaggctggacctggcccagtaccgcgagatggcggccttcgcgcaattcggcagcgatttggacaaggctacccaggacaaactcgcgcagggagagcggcttatggaagtgctgaagcagccccagctttcgccctacccgcttgttgaacagatagcgattcttttccttgcagtggaaggttatcttcttgatgtcaagactgaaaatgtttcaacgtttgtaaaagactttttgtcacaccttaaaaaccagaaggcggatctgttgaagggcatcgcggatacgggagtcgtttcaaaagaacaggaagacgaattgcgcctaaccgtacaaaattttaaaggagcaaggaaataa

SEQ ID NO: 57882 - protein, 154 aa, Unknown
  Obtained from environmental sample
  DOMAIN (29)...(133): ATP synthase alpha/beta chain, C terminal domain
  misc_feature (1)..(154): Xaa is any amino acid
MFNSGFRPAIDVGLSVSRVGGSAQTKAMRKISGRIRLDLAQYREMAAFAQFGSDLDKATQDKLAQGERLMEVLKQPQLSPYPLVEQIAILFLAVEGYLLDVKTENVSTFVKDFLSHLKNQKADLLKGIADTGVVSKEQEDELRLTVQNFKGARK

SEQ ID NO: 57883 - DNA, 387 bp, Unknown
  Obtained from environmental sample
  misc_feature (1)..(387): n is a, c, g, or t
atggcaagcctgcgcgatgtccgcctgcgcatgcgggccattgaacagacattgaaagtgaccaaggcgatgaaccttatctccacggcgaaactccgcaaggggcgcaagatgctcgcggatacggttccgtatttcagcaggatccaaaaatccatgtacgacatcctttcaagcgaaaaatatataggaagcgcgtttttcagaaagcccgatccctcaaaacccagctacacggcgataatagttgtaaccagctacaaggggcttgccggcggctataacgcgaatatttaccgcaacgtaaaggagttatccgaaaaggttgaaaatcccgtactgataattatcggaggaaacgtcgcctaccgctattctcggccataa

SEQ ID NO: 57884 - protein, 128 aa, Unknown
  Obtained from environmental sample
  misc_feature (1)..(128): Xaa is any amino acid
MASLRDVRLRMRAIEQTLKVTKAMNLISTAKLRKGRKMLADTVPYFSRIQKSMYDILSSEKYIGSAFFRKPDPSKPSYTAIIVVTSYKGLAGGYNANIYRNVKELSEKVENPVLIIIGGNVAYRYSRP

SEQ ID NO: 57885 - DNA, 1005 bp, Unknown
  Obtained from environmental sample
  misc_feature (1)..(1005): n is a, c, g, or t
gtgaatacgaaattcaccgcccattatacgaatggtttatacaagaagacgaagtttttccttcacggcagactagaatttgcccgtcttaatctgagccataccgttatgagcaaacgctggcttttaaaactcgtgcaggataagcgcgttacaggttgggacgatccacgaatgcccacaatagccggtctccgcagacgtggatacactcccgaggcgatccgcagttttgtttcacagattggcatcgcaaagacggacagcatggtagacatagcgttccttgaatactgtcttcgcgaagacctgaacaaacgtgctttgcgcgtaatggcggttttacgcccactcaaattaattatcgaaaactgggaagaaggcaaaagcgaagaaatggaagcggtaaataatcccgaagacgaatctgctggaaaacgccttgtgccattttcccgcgaactgtggattgaacgtgaagattttgaagagactccaccgccaaaatatttccggctcttcccgggtaactccgtccgtctgcgttatgcgtacattgtcacatgcaccggctttgacaaggacgcaaacggtaatattacagccgtgcgttgcacatacgatccgcagacaaggggcggtaacgcgcctgacaacaaaaagattaaatctacaattcattgggtatccgccactcatgccgcgccaatacaggcgcgtatttacgattacctgttcagcgtggaaaagccaatggaagtttcccaacgccccgatggctctcccggcgattttaccgacaaccttaatcccaattcattggaagtaattgaaaatgcgtggggcgagccgtcgcttgcaaatgtttcgccgggcaaagttttccaatttgaacgcatgggctattttgtccgcgatccagacacaggcgcggacggacgagcggtttacaacaaaactatcggtctgcgcgacacttgggcgaggatagcaaataaaaaataa

SEQ ID NO: 57886 - protein, 334 aa, Unknown
  Obtained from environmental sample
  DOMAIN (108)...(306): tRNA synthetases class I (E and Q), anti-codon binding domain
  misc_feature (1)..(334): Xaa is any amino acid
MNTKFTAHYTNGLYKKTKFFLHGRLEFARLNLSHTVMSKRWLLKLVQDKRVTGWDDPRMPTIAGLRRRGYTPEAIRSFVSQIGIAKTDSMVDIAFLEYCLREDLNKRALRVMAVLRPLKLIIENWEEGKSEEMEAVNNPEDESAGKRLVPFSRELWIEREDFEETPPPKYFRLFPGNSVRLRYAYIVTCTGFDKDANGNITAVRCTYDPQTRGGNAPDNKKIKSTIHWVSATHAAPIQARIYDYLFSVEKPMEVSQRPDGSPGDFTDNLNPNSLEVIENAWGEPSLANVSPGKVFQFERMGYFVRDPDTGADGRAVYNKTIGLRDTWARIANKK

SEQ ID NO: 57887 - DNA, 834 bp, Unknown
  Obtained from environmental sample
  misc_feature (1)..(834): n is a, c, g, or t
atgaataacgagaacgacgccgacgcgaatcctgaagctctgggaactgattttatcagcgaatttattaaagaagatttggcagcgggaaaattcaaccatgtgcatacgcgctttccgccggaacccaacggctggctgcatatcggccactgcaaggcgttctacatcgactttagcatggcggagcgcttcggcggaaagtgcaatctgcgttttgacgataccaatcccgaaaaagaggacatctcttatgtcgaggcgattaagcgcgatattaaatggatgggctatgactgggaagaccgcgaattttacgcatccgattattacgaatacctgtatgagttagctgtaaaaatcatcaaaaaaggaaaggcttatgttgatgatttaaccgatacggaaatgagcgaataccgcgggacagcagttgcggataagaacaatatcaccgtaacaccgccgggcagaaacagcccgtacagagatcgttatatcgaagagaaccttgacctctgtgctcggatgcgcgcgggcgaattcgcagacggggcaaaatccctgcgcgcgaaaatggatatgactcaccctaacttgttcgtgcgtgagcgtgtcatgtacggcatacgccgagaaactcattaccgcacaggcaattcagggtgtatctatccaatgtatgattttcagcacccgctttgcgacgtgaaagagggaatcactcactctctctgctcgggtgaatacgaaattcaccgcccattatacgaatggtttatacaagaagacgaagtttttccttcacggcagactagaatttgcccgtcttaa

SEQ ID NO: 57888 - protein, 277 aa, Unknown
  Obtained from environmental sample
  DOMAIN (34)...(276): tRNA synthetases class I (E and Q), catalytic domain
  misc_feature (1)..(277): Xaa is any amino acid
MNNENDADANPEALGTDFISEFIKEDLAAGKFNHVHTRFPPEPNGWLHIGHCKAFYIDFSMAERFGGKCNLRFDDTNPEKEDISYVEAIKRDIKWMGYDWEDREFYASDYYEYLYELAVKIIKKGKAYVDDLTDTEMSEYRGTAVADKNNITVTPPGRNSPYRDRYIEENLDLCARMRAGEFADGAKSLRAKMDMTHPNLFVRERVMYGIRRETHYRTGNSGCIYPMYDFQHPLCDVKEGITHSLCSGEYEIHRPLYEWFIQEDEVFPSRQTRICPS

SEQ ID NO: 57889 - DNA, 408 bp, Unknown
  Obtained from environmental sample
  misc_feature (1)..(408): n is a, c, g, or t
atggcgagtaacagcggggaattacggacatttatagaacattttcagaataatcttgaccttttaatccaaaaaacatgggttgaaaaagctgaagaaagacgcaaagatcatcttcaggataaaataccggtttttatgggctttatcgaaaagggggattatcaaaaggcaatagaacatttcgctttgatccttgaagaattggcttttctctttttcggcattcaaagcagcaaaaatgattttacagaatatactttccgcattgacgcgcaaatggggcttttttggtggtacagcgcaaggctttccatgctgaaagatatagacaagacaatcaatacggatgataaaaccttgtgggcaattttactccttggtctgtgttatctgacaaatttttaa

SEQ ID NO: 57890 - protein, 135 aa, Unknown
  Obtained from environmental sample
  misc_feature (1)..(135): Xaa is any amino acid
MASNSGELRTFIEHFQNNLDLLIQKTWVEKAEERRKDHLQDKIPVFMGFIEKGDYQKAIEHFALILEELAFLFFGIQSSKNDFTEYTFRIDAQMGLFWWYSARLSMLKDIDKTINTDDKTLWAILLLGLCYLTNF

SEQ ID NO: 57891 - DNA, 504 bp, Unknown
  Obtained from environmental sample
  misc_feature (1)..(504): n is a, c, g, or t
ttgttagagggaatcaagaatcacaatctttacagtgataaaacaaaaaattgggatatagacctgataactgaatctagccaactccatgatattgggaaaatttccatagaagacagtattctaaaaaagacagggaaattaactgaagctgaatttaccgaaatgaaaaaccacacgacatttggagagaaaataataacaaaaattgaagccatgacaaaagaaaatgattttttgaaatacgcaaaaatccttgccgccagtcatcacgaaaaatgggacggctctggttacccaaaaggattaaaggaacaggaaattcctttgctcgggcgcattatggcaatagcagacgtttacgatgcccttgtttcttataggccatataaagatgcttttccgcacgaagaagcggttagaataattgtagaaaacaaagcaaagcattttgacccccacctaaccgatatattcctcgaagtttccgacaggtttaagtaa

SEQ ID NO: 57892 - protein, 167 aa, Unknown
  Obtained from environmental sample
  DOMAIN (5)...(124): HD domain
  misc_feature (1)..(167): Xaa is any amino acid
MLEGIKNHNLYSDKTKNWDIDLITESSQLHDIGKISIEDSILKKTGKLTEAEFTEMKNHTTFGEKIITKIEAMTKENDFLKYAKILAASHHEKWDGSGYPKGLKEQEIPLLGRIMAIADVYDALVSYRPYKDAFPHEEAVRIIVENKAKHFDPHLTDIFLEVSDRFK

SEQ ID NO: 57893 - DNA, 444 bp, Unknown
  Obtained from environmental sample
  misc_feature (1)..(444): n is a, c, g, or t
ttgaatcttctcttgaaggttcaagttacaaatctattgtttggaggcattttcatggaaaatgttaaccgtaaccacaagaatagcgtattttcttcgctgttcagcaccccggacgttctgcgagaactctactcagctattgagggtatccctataccgccggacatacctattgatattaatactctttcaaacgtacttattatgaagcagataaatgatgtctctttcttgctcgacaaacggcttgtcgtgctgatagaacaccagtctacaataaacgaaaacttgccttaccgtctgcttgaatatataacacgggtatatgaaaaaatagttgataaagaaagaaagtatcaaaagaatctcatgaaaattccaaaacctgaatttatcgtcttgtacaacggaacagatgattatcccgatttaaggaattaa

SEQ ID NO: 57894 - protein, 147 aa, Unknown
  Obtained from environmental sample
  misc_feature (1)..(147): Xaa is any amino acid
MNLLLKVQVTNLLFGGIFMENVNRNHKNSVFSSLFSTPDVLRELYSAIEGIPIPPDIPIDINTLSNVLIMKQINDVSFLLDKRLVVLIEHQSTINENLPYRLLEYITRVYEKIVDKERKYQKNLMKIPKPEFIVLYNGTDDYPDLRN

SEQ ID NO: 57895 - DNA, 396 bp, Unknown
  Obtained from environmental sample
  misc_feature (1)..(396): n is a, c, g, or t
atggagatatataccacgctgtgcctgatgatgaggccgcctggcattgcgcgaagtgaaaaacctgatcctgtttccggcaggatttatacggattgggctcggaaaaaatacggttcttacgctaacgacccaactaaaaccagccctaactactgtactatcgggattgaattgtgcattgatgcgcagggcaattttacccctgaaaccttacaggccgccgtggaacttgcagcaaaactgttaggcgaaaacaaattatccgttgatgatattggcactcacaatttaattgtcggatggaaaaattgtccgcttccctgggtaaaaaatcctgctttgtttgaggattttatagacaaggtaaaagcaagaatgggagttctgctgtag

SEQ ID NO: 57896 - protein, 131 aa, Unknown
  Obtained from environmental sample
  misc_feature (1)..(131): Xaa is any amino acid
MEIYTTLCLMMRPPGIARSEKPDPVSGRIYTDWARKKYGSYANDPTKTSPNYCTIGIELCIDAQGNFTPETLQAAVELAAKLLGENKLSVDDIGTHNLIVGWKNCPLPWVKNPALFEDFIDKVKARMGVLL

SEQ ID NO: 57897 - DNA, 1809 bp, Unknown
  Obtained from environmental sample
  misc_feature (1)..(1809): n is a, c, g, or t
gtggttttggccagggaattgagtttagaagagctccggggcgtcaggcaggaaaccaaccttgaactggaggtttttgtgcacggcgccctgtgtatcagcgcttcaggcttgtgccttttttccagctatttaggcggcaagtccgcaaaccgcgggttgtgtacccaggcctgccggaggctctactcccgcgaagaccaggccggacagggcggctactatttcagccccgcagatttacagcttttggaacgcgtccccgaccttgccgctgccggaattaacgcccttaaaatcgagggccgcatgaaaagcgcggattatgtcggcgttgtggtcagcgcgtaccggctggttttggacgctattgcaggcggggatgagggagaaatcctggcgagtatccggcggggcagggagatactgcggaatgactttgcccgctcaaagacccagttttactttgacgctcaggcgggcaacggcggtatactgtcgaattcgacttctctggactggctgaatcccgatcaggacggcggcacaggtatcaatcttgggacaattctcaaggtgaggggcagggatagcagcgcctttatttccggcaatggcgggctgcttccacgtttgggagactcggtgcgcctgcacagcaaggatgatatcaacagagtctcccacaagttaaagtttgtcgagcccgacggcggcggcttaacctgcggtttttggatttcagtacctgaaggttttaaaatcggcgacagggtttacctgattcagactaaaaccatgtccaagcgttactcgcctgtaattgagcgtaacgttccggcgcgcgggcctggacatgagaaagcgccgttccccgattttagcgaatttgccaaagccggaaaaagcgcgaaacaggcgaaggcaggcggtttccccgaagggctttacgttgctgtttcgcgcacggaggatcttttcatagtgcagtcttcgcgtccccagcgggtgatgctcgcctattcacgcaaaaccgccgcttacctactggcggaaaacaagcctccccttcccttcaagcctgccgagatcatcctggttttggatccctatttgccgcagggggccgtttccgccggggcagagaccgggggtgaaacccttgaaaatgaaattgaacggctggtaggaaaaggctaccggcagtttgtgcttaacaaccccgggcatttttcgctttttcgcaatttaaaagacagggaaaaagcgcttttaatcgcaggcccctggctttatatattcaacgcttggtcgctgtcttttgtgttgtctctgggcgtggacggctgtatttcgccgcttgagaacaaccgccaaaacctggagcgcaccctgggagagcttccacattcgacaggccgtctaaaggctaaaggggcccgacaggctcctggtgccctgcgctccagggtttttattccggttttcgcctggcccccgttgttccggattcgctcagaccttggcccggtatacgactttaactcgtttacagataatatgggcgcgaatttttctattgtttccgggcctgaaggctcccaggtttatcctgggaacccattttccacaaccgataagattccctttttaagggaagcgggcttttcgcggtttgtaattgacctctccggccctccgctcaaaaaggccttttaccgcgatctaatgcgagccgtagacgaaggggttccgattaatggcgctacaaggtttaactggaaagatgggttctaccagaaaacttaa

SEQ ID NO: 57898 - protein, 602 aa, Unknown
  Obtained from environmental sample
  DOMAIN (2)...(162): Peptidase family U32
  misc_feature (1)..(602): Xaa is any amino acid
MVLARELSLEELRGVRQETNLELEVFVHGALCISASGLCLFSSYLGGKSANRGLCTQACRRLYSREDQAGQGGYYFSPADLQLLERVPDLAAAGINALKIEGRMKSADYVGVVVSAYRLVLDAIAGGDEGEILASIRRGREILRNDFARSKTQFYFDAQAGNGGILSNSTSLDWLNPDQDGGTGINLGTILKVRGRDSSAFISGNGGLLPRLGDSVRLHSKDDINRVSHKLKFVEPDGGGLTCGFWISVPEGFKIGDRVYLIQTKTMSKRYSPVIERNVPARGPGHEKAPFPDFSEFAKAGKSAKQAKAGGFPEGLYVAVSRTEDLFIVQSSRPQRVMLAYSRKTAAYLLAENKPPLPFKPAEIILVLDPYLPQGAVSAGAETGGETLENEIERLVGKGYRQFVLNNPGHFSLFRNLKDREKALLIAGPWLYIFNAWSLSFVLSLGVDGCISPLENNRQNLERTLGELPHSTGRLKAKGARQAPGALRSRVFIPVFAWPPLFRIRSDLGPVYDFNSFTDNMGANFSIVSGPEGSQVYPGNPFSTTDKIPFLREAGFSRFVIDLSGPPLKKAFYRDLMRAVDEGVPINGATRFNWKDGFYQKT

SEQ ID NO: 57899 - DNA, 942 bp, Unknown
  Obtained from environmental sample
  misc_feature (1)..(942): n is a, c, g, or t
atgaatatccgtttttggggagtacgaggttctcttcccgcacctataacccctgagcgcgttaaaagcaaaatatccgcgatagttgagcagataactcccgaagatctggttaacgcggaaagcagggaacggtttttggctgatcttcccccgtggctttttggtactgtgggcgggaacagcccctgcgtaactgttgacttcgatgatccaaaagaaagtatcatctttgactgcggttccggccttcgtgaattcggagtgtcccaaataaaagacaaccttacgtcaacccaatattatgtctttctttcccattttcactgggatcacatacagggactgccgttcttcggccccggatataatccgtccgtcactatgaatttttatactcctttcgcggatatagaaaaattattatgcgggcaaatggtaactccgtattttcccatcgctcttgaagcaatgggatcaaaaaaaacatttaaccagcttaaagacaaagtaaatgtcgcgggacgcacggtaagctataaaagaatgaaccatcccggaggttcttacgcgtactgcgttaacgacagcggaaaaagaataatttattctacggataccgagcttaccacggtcgattttgaaaagacggaagaaaatatttctttctttaaggacgccgaccttattattattgactgccagtatactctgggagaagccatagaaaaatacaactggggacacagcgcgttcagccttgcggtagactttgcggctaactggggaattaaacgtatggttatgttccatcacgatccttcttatgatgatcataaactttacggaattttacagtccgccagatggtatctggaaaggatgaacataaaaggaattgaattgtttcttgcctatgaaggcatggaaatatccctgtaa

SEQ ID NO: 57900 - protein, 313 aa, Unknown
  Obtained from environmental sample
  DOMAIN (61)...(249): Metallo-beta-lactamase superfamily
  misc_feature (1)..(313): Xaa is any amino acid
MNIRFWGVRGSLPAPITPERVKSKISAIVEQITPEDLVNAESRERFLADLPPWLFGTVGGNSPCVTVDFDDPKESIIFDCGSGLREFGVSQIKDNLTSTQYYVFLSHFHWDHIQGLPFFGPGYNPSVTMNFYTPFADIEKLLCGQMVTPYFPIALEAMGSKKTFNQLKDKVNVAGRTVSYKRMNHPGGSYAYCVNDSGKRIIYSTDTELTTVDFEKTEENISFFKDADLIIIDCQYTLGEAIEKYNWGHSAFSLAVDFAANWGIKRMVMFHHDPSYDDHKLYGILQSARWYLERMNIKGIELFLAYEGMEISL

SEQ ID NO: 57901 - DNA, 1875 bp, Unknown
  Obtained from environmental sample
  misc_feature (1)..(1875): n is a, c, g, or t
ttgtcagcgagtactgcggatgacacaatcttcgtggtagtcggaggacgaatggcctacaaaaatacggatgatattgatgatgtgcgctctgaagccccgtacaatggcatgatgatgtgcgtacaaatgaatgatcaagcgagattcgacaaactctggaaatgggcaagaacctacatgtacaacacagtaaacaatggcagcaataacagaggttatttctcatggcaatgccagacaaatggcaataaaaaggatcaaggcgtcgctccagacggagaggtatactttattacatcactgttgttcgcgcacgcccgctggggaagcagttcatcaggcataaataattacgcgcaggaagcaaggcaggttatctatgatttaacgcgccgcaaaccggggaacggagatccttatggcgagccttcaatgtttaatgtggacaattggttgattagattctccacaattggaagttcagccacccatacggatccctcgtaccatttaccggcattcctggaatgttgggcgctggaactggaaagcgactataatgccaataaactctacgggatctgggcagataaagctgatctgaagagagatgttgatttctttaagaaagcagctgaggaaagccggaaatacttcaagactacgacatattctacaacaggacttggccctgattatgccaattttgacggaacgcctaccggcggagaacacgctgattttaagtatgacgcgtggcggatcgccatgaacatcggcatggattacgcgtggtgggcaaaagacccctggcaaaaaacatttgctgacagaatacaggcgttctttgccggcaaaggaacttcctacggaagcctgtggacattaaacgggacactgctttcggcaaactcggcaggggatcattcaccgggcctggttgcctgtaacgcggtcgcgtccctggcggcgacgcatgagaatgcctggaaatttatcgaagacttctggaatgccggcatgacggcagggcaataccgttattatgacggatgcctgtatatgcttggtatgctgcatgtaagcggcaactttcaggcgtatctgtcgaatacaacgccgagcgcctctatttcccccgctacggcgacattcgatagaaaaactgaccagcaggcggatatttctgtaacaattacgcctaacggcaatacccttgtgagcgtcaaaaatggcagcgtaaatcttgccagcggcacggattattccgttagcggcaatacggtaacgattaagaaagaatatcttgcggctcaggcaaccggcactacaacgctggcattcacattcaacgcgggaaaaaccaggaatatagcgatcacaatcaaagatactacaggcggcagcagtggcggcggaggaggaacgcttataaagtataattttgctactgattctatagctgcggggtacccgacgtatagtacaactggcttaactgcgagtgtaaatggaggagttttacaagtaacaaaaactaccggtcattcaacagtatattttacactgccttttaatgttggagcgggaagtcttaccgattattccggtattaaaataaatatacgaggatcttcaggagatttcggtaataaaggatttttggcgcgagttggtaaatcggactctagtactacagtgccgcttaccggcataggcaactccggattaacggcaagttttcaagatataaccgttctgattccttcaactgcgagtggttataccggagaaatagagatagggtttgcgttcgataacacgccggcttttggttgtgagataacgagcatagaattgatacctaaatga

SEQ ID NO: 57902 - protein, 624 aa, Unknown
  Obtained from environmental sample
  DOMAIN (1)...(364): Glycosyl hydrolases family 8
  misc_feature (1)..(624): Xaa is any amino acid
MSASTADDTIFVVVGGRMAYKNTDDIDDVRSEAPYNGMMMCVQMNDQARFDKLWKWARTYMYNTVNNGSNNRGYFSWQCQTNGNKKDQGVAPDGEVYFITSLLFAHARWGSSSSGINNYAQEARQVIYDLTRRKPGNGDPYGEPSMFNVDNWLIRFSTIGSSATHTDPSYHLPAFLECWALELESDYNANKLYGIWADKADLKRDVDFFKKAAEESRKYFKTTTYSTTGLGPDYANFDGTPTGGEHADFKYDAWRIAMNIGMDYAWWAKDPWQKTFADRIQAFFAGKGTSYGSLWTLNGTLLSANSAGDHSPGLVACNAVASLAATHENAWKFIEDFWNAGMTAGQYRYYDGCLYMLGMLHVSGNFQAYLSNTTPSASISPATATFDRKTDQQADISVTITPNGNTLVSVKNGSVNLASGTDYSVSGNTVTIKKEYLAAQATGTTTLAFTFNAGKTRNIAITIKDTTGGSSGGGGGTLIKYNFATDSIAAGYPTYSTTGLTASVNGGVLQVTKTTGHSTVYFTLPFNVGAGSLTDYSGIKINIRGSSGDFGNKGFLARVGKSDSSTTVPLTGIGNSGLTASFQDITVLIPSTASGYTGEIEIGFAFDNTPAFGCEITSIELIPK

SEQ ID NO: 57903 - DNA, 924 bp, Unknown
  Obtained from environmental sample
  misc_feature (1)..(924): n is a, c, g, or t
ttgtttatggtaaaatgttttaaggagccccccatgcctaaaaaacccgccatcgacacgtccaaactcaaccaaatagacacctacacccaccccgaatatgaccgtgccaacattccgcccgtcggcatggcgcaatacgacaccttagcaagccgtgaggcgaagtacgaatacgacccccacatagacccatccctgcaatgggcagggaaagccgaaggtacctcctttaccgtgccaacctcatcaatccatatccacgaagtaataaagccccataaaattatccggtcagttcaaactttgggagatgactatgtagacctgcaaggcaacttgtttgaatctgatgcagaacgggcaaaaagacgcaatgactccatagagttctaccagcataagaacaaatggacaaatcgccttatagccggagacagcctagtcataatgaattccttgcttgaaaaagaaggaatggcaggacaggttcaaatggtctacatagacccaccctatggcataaaatacggctccaatttccagccctttgtgaacaggcgggacgtgaaagacaaaaaagacgaagacctgacaacagaaccggaaatgataaaagccttccgtgatacctgggaattgggaatacattcgtatttaacgtacctgagggacaggcttttgcttgctaaggaattactttccgataccggcagcgtttttgtgcagattagcgatgagaatgtgcatctagttaagtgtatatttgatgatgtatttagaagtgagaattatttaaatattatcccttttgttaaaacaagtggagtaaccactaaatttctaccaagtagagtcgattttttaatatggtacgcaaaaaacaaagatatgtgtaaatatcatacacctcggccgatctga

SEQ ID NO: 57904 - protein, 307 aa, Unknown
  Obtained from environmental sample
  misc_feature (1)..(307): Xaa is any amino acid
MFMVKCFKEPPMPKKPAIDTSKLNQIDTYTHPEYDRANIPPVGMAQYDTLASREAKYEYDPHIDPSLQWAGKAEGTSFTVPTSSIHIHEVIKPHKIIRSVQTLGDDYVDLQGNLFESDAERAKRRNDSIEFYQHKNKWTNRLIAGDSLVIMNSLLEKEGMAGQVQMVYIDPPYGIKYGSNFQPFVNRRDVKDKKDEDLTTEPEMIKAFRDTWELGIHSYLTYLRDRLLLAKELLSDTGSVFVQISDENVHLVKCIFDDVFRSENYLNIIPFVKTSGVTTKFLPSRVDFLIWYAKNKDMCKYHTPRPI

SEQ ID NO: 57905 - DNA, 942 bp, Unknown
  Obtained from environmental sample
  misc_feature (1)..(942): n is a, c, g, or t
atggcgagaatcgcggggcttgaggttgagaggatcatcaacgagccgacagcggcgtcacttgctttcggcttcaacaaagatcagaaaaaagacaaaactatcgccgtgtacgatttgggcggcggcactttcgacatatccattctggagcttggcgacggcgttttcgaggtaaaatccaccaacggcgacacccacctgggcggcgacgattttgacctcaaaattcttgaatggcttatcagcgaattcaaaaacgatacgggcatcgacctgagcaaagacaggatggccctgcagcggttgagacaagcctcagaagatgcaaaaatccagctttccgccatgcaaacgaccgatattaacctgccctttatcaccgcggatcagagcggccccaagcatttacaaaaatcccttacaagagcgaaattcgagcagatggtttccgacttgcttgagcgatcaaaagaaccctgcatcaaggcactgagggacgcaaacttaaccgccgaacagatcgacgaagtgatccttgtcggaggttctacccgcatccccgcggtacagcagcttgtcaaggacctgttcaaaaaagaacccaacaaaggcgtaaaccccgacgaagcggtcgcggtcggcgcggcaatccagggcggcatcctgggcggcgatgttaaagacgtgcttctgttagacgtcacgccactttcgcttggcatagaaaccctgggaggcgttatgacaaaactcataccgcgcaacacgactattcccacccgcaagagccagattttctcaacagccactgacagccagcccgcggtctccattaatgtattacagggcgaacgggaaatggcaagtcagaaccgcgtactgggacgttttgatctggttggaatgtcctcccgcgccgcgcggcgttcctcaaattga

SEQ ID NO: 57906 - protein, 313 aa, Unknown
  Obtained from environmental sample
  DOMAIN (2)...(313): Hsp70 protein
  misc_feature (1)..(313): Xaa is any amino acid
MARIAGLEVERIINEPTAASLAFGFNKDQKKDKTIAVYDLGGGTFDISILELGDGVFEVKSTNGDTHLGGDDFDLKILEWLISEFKNDTGIDLSKDRMALQRLRQASEDAKIQLSAMQTTDINLPFITADQSGPKHLQKSLTRAKFEQMVSDLLERSKEPCIKALRDANLTAEQIDEVILVGGSTRIPAVQQLVKDLFKKEPNKGVNPDEAVAVGAAIQGGILGGDVKDVLLLDVTPLSLGIETLGGVMTKLIPRNTTIPTRKSQIFSTATDSQPAVSINVLQGEREMASQNRVLGRFDLVGMSSRAARRSSN

SEQ ID NO: 57907 - DNA, 300 bp, Unknown
  Obtained from environmental sample
  misc_feature (1)..(300): n is a, c, g, or t
gtgataaagggcaggttaatatcggtcgtttgcatggcggaaagctggatttttgcatcttctgaggcttgtctcaaccgctgcagggccatcctgtctttgctcaggtcgatgcccgtatcgtttttgaattcgctgataagccattcaagaattttgaggtcaaaatcgtcgccgcccaggtgggtgtcgccgttggtggattttacctcgaaaacgccgtcgccaagctccagaatggatatgtcgaaagtgccgccgcccaaatcgtacacggcgatagttttgtcttttttctga

SEQ ID NO: 57908 - protein, 99 aa, Unknown
  Obtained from environmental sample
  misc_feature (1)..(99): Xaa is any amino acid
MIKGRLISVVCMAESWIFASSEACLNRCRAILSLLRSMPVSFLNSLISHSRILRSKSSPPRWVSPLVDFTSKTPSPSSRMDMSKVPPPKSYTAIVLSFF

SEQ ID NO: 57909 - DNA, 447 bp, Unknown
  Obtained from environmental sample
  misc_feature (1)..(447): n is a, c, g, or t
atggagaccgcgggctggctgtcagtggctgttgagaaaatctggctcttgcgggtgggaatagtcgtgttgcgcggtatgagttttgtcataacgcctcccagggtttctatgccaagcgaaagtggcgtgacgtctaacagaagcacgtctttaacatcgccgcccaggatgccgccctggattgccgcgccgaccgcgaccgcttcgtcggggtttacgcctttgttgggttcttttttgaacaggtccttgacaagctgctgtaccgcggggatgcgggtagaacctccgacaaggatcacttcgtcgatctgttcggcggttaagtttgcgtccctcagtgccttgatgcagggttcttttgatcgctcaagcaagtcggaaaccatctgctcgaatttcgctcttgtaagggatttttgtaaatgcttggggccgctctga

SEQ ID NO: 57910 - protein, 148 aa, Unknown
  Obtained from environmental sample
  misc_feature (1)..(148): Xaa is any amino acid
METAGWLSVAVEKIWLLRVGIVVLRGMSFVITPPRVSMPSESGVTSNRSTSLTSPPRMPPWIAAPTATASSGFTPLLGSFLNRSLTSCCTAGMRVEPPTRITSSICSAVKFASLSALMQGSFDRSSKSETICSNFALVRDFCKCLGPL

SEQ ID NO: 57911 - DNA, 585 bp, Unknown
  Obtained from environmental sample
  misc_feature (1)..(585): n is a, c, g, or t
ttgactggagcctccgcccatgccgcccatattggtatcgccgccgggctgtttgccagccccctgctgcgccgccgcttgctgcttgtagatgtcctcggcaattttgtacgatgcctgtttaagggcctcggttttgtcctttattacctgaaggtcgccgccttccagagctttgcggagatcggccattgcctcttcggccttggctttgtccgcggcgctaaccttgtcgcccaggtctttgatgttcttttcggtagcgtagatcatcgaatccgcctcgttgcggacttccgccttttcacgttcttttttgtcttcctcggcgtgcagttccgcttctttttccattcgatcgatgtcctgctcgttaaggccgctggaactttcaatccggatattctgctctttcccagtgcccaggtctttcgcgctgacgtggacaacgccgtaagcgtcaatgtcaaagccaacctcaatttgaggaacgccgcgcggcgcgggaggacattccaaccagatcaaaacgtcccagtacgcggttctgacttgccatttcccgttcgccctgtaatacattaa

SEQ ID NO: 57912 - protein, 194 aa, Unknown
  Obtained from environmental sample
  misc_feature (1)..(194): Xaa is any amino acid
MTGASAHAAHIGIAAGLFASPLLRRRLLLVDVLGNFVRCLFKGLGFVLYYLKVAAFQSFAEIGHCLFGLGFVRGANLVAQVFDVLFGSVDHRIRLVADFRLFTFFFVFLGVQFRFFFHSIDVLLVKAAGTFNPDILLFPSAQVFRADVDNAVSVNVKANLNLRNAARRGRTFQPDQNVPVRGSDLPFPVRPVIH

SEQ ID NO: 57913 - DNA, 654 bp, Unknown
  Obtained from environmental sample
  misc_feature (1)..(654): n is a, c, g, or t
atgtattacagggcgaacgggaaatggcaagtcagaaccgcgtactgggacgttttgatctggttggaatgtcctcccgcgccgcgcggcgttcctcaaattgaggttggctttgacattgacgcttacggcgttgtccacgtcagcgcgaaagacctgggcactgggaaagagcagaatatccggattgaaagttccagcggccttaacgagcaggacatcgatcgaatggaaaaagaagcggaactgcacgccgaggaagacaaaaaagaacgtgaaaaggcggaagtccgcaacgaggcggattcgatgatctacgctaccgaaaagaacatcaaagacctgggcgacaaggttagcgccgcggacaaagccaaggccgaagaggcaatggccgatctccgcaaagctctggaaggcggcgaccttcaggtaataaaggacaaaaccgaggcccttaaacaggcatcgtacaaaattgccgaggacatctacaagcagcaagcggcggcgcagcagggggctggcaaacagcccggcggcgataccaatatgggcggcatgggcggaggctccagtcaaaccggttccggcggcaacagcaacaacaaaggcgccgaagacgccgactacgaagttgttgacgacaagtaa

SEQ ID NO: 57914 - protein, 217 aa, Unknown
  Obtained from environmental sample
  misc_feature (1)..(217): Xaa is any amino acid
MYYRANGKWQVRTAYWDVLIWLECPPAPRGVPQIEVGFDIDAYGVVHVSAKDLGTGKEQNIRIESSSGLNEQDIDRMEKEAELHAEEDKKEREKAEVRNEADSMIYATEKNIKDLGDKVSAADKAKAEEAMADLRKALEGGDLQVIKDKTEALKQASYKIAEDIYKQQAAAQQGAGKQPGGDTNMGGMGGGSSQTGSGGNSNNKGAEDADYEVVDDK

SEQ ID NO: 57915 - DNA, 783 bp, Unknown
  Obtained from environmental sample
  misc_feature (1)..(783): n is a, c, g, or t
ttggcaaagcgcgattattacgaagttctcggagtacagaaaaacgcttcaaaagacgatataaaaaaggcatatcgtaaacttgccattcagtatcatccggacaagaatccgggcaacaaggaagctgaagaaaaattcaaggaagccactgaagcctacgaggtgcttgccgatgaaaagaaaaaggccgcctatgaccaattcggctttgccggcgttgacaacatgggcggccaaacccatgactggagcaatttccggggctttgaggatattttcggcggcggcgactttggcagtatttttgacagcatctttggcacttttggcggcggcggcttccacaggggcggaggcggcggtcagaacggggtaaggcagggagcggacctccgctacgaccttgatattgctttcaaggacgcggtttttggaaccaaagaagaaatccagtttttacataatgaatcctgccaggcctgcaagggttccggagccgcanaaggcgcggaaagaaaaacctgccctacctgccagggatcaggccaggtacggcacactcaaagttttttctcggtagcctctacctgtcccaactgcagagggcaaggctttatcattgaaagaccctgcccggaatgcggcggctccggcacccagaagaaacggataaaaatcgcggtgactattcccgcggggttgaaaacggaaggcgattggttattccccggcagggcgacgcgggccaaaacggcggcccggcaggcgatctgtatgtga

SEQ ID NO: 57916 - protein, 260 aa, Unknown
  Obtained from environmental sample
  DOMAIN (146)...(226): DnaJ central domain (4 repeats)
  misc_feature (1)..(260): Xaa is any amino acid
MAKRDYYEVLGVQKNASKDDIKKAYRKLAIQYHPDKNPGNKEAEEKFKEATEAYEVLADEKKKAAYDQFGFAGVDNMGGQTHDWSNFRGFEDIFGGGDFGSIFDSIFGTFGGGGFHRGGGGGQNGVRQGADLRYDLDIAFKDAVFGTKEEIQFLHNESCQACKGSGAAXGAERKTCPTCQGSGQVRHTQSFFSVASTCPNCRGQGFIIERPCPECGGSGTQKKRIKIAVTIPAGLKTEGDWLFPGRATRAKTAARQAICM

SEQ ID NO: 57917 - DNA, 495 bp, Unknown
  Obtained from environmental sample
  misc_feature (1)..(495): n is a, c, g, or t
atgcggcggctccggcacccagaagaaacggataaaaatcgcggtgactattcccgcggggttgaaaacggaaggcgattggttattccccggcagggcgacgcgggccaaaacggcggcccggcaggcgatctgtatgtgataatccggataaagccccatgaatattttgagcgacatgactttgatctgtactgcgcggttccaatctcggtaacccaggcggctctgggcgcggaaatccgcgtcagcacccttgacggcaaaacaataaaggtgaaagtaccccccggaacccagaacggcaaaatgctccgcatccgcgacgagggcgtaccttcgggggctcaccggggaaatctctatattaaattaattgtccgcataccggataaactttcccgccgcggcaaggagctgctggaagaactgtcccgtaccgaaggcgaaaacgacagccccggacctgttccgctttcgcaattaagcgagtaa

SEQ ID NO: 57918 - protein, 164 aa, Unknown
  Obtained from environmental sample
  DOMAIN (25)...(145): DnaJ C terminal region
  misc_feature (1)..(164): Xaa is any amino acid
MRRLRHPEETDKNRGDYSRGVENGRRLVIPRQGDAGQNGGPAGDLYVIIRIKPHEYFERHDFDLYCAVPISVTQAALGAEIRVSTLDGKTIKVKVPPGTQNGKMLRIRDEGVPSGAHRGNLYIKLIVRIPDKLSRRGKELLEELSRTEGENDSPGPVPLSQLSE

SEQ ID NO: 57919 - DNA, 366 bp, Unknown
  Obtained from environmental sample
  misc_feature (1)..(366): n is a, c, g, or t
atgatcagatggccgaaactcggcaaaagcgggttggagcttgggaaacccttctcccggcaaatatttctcatatccgcctcaattgccggctcatattatgtggacgatattgataaactgcttgacgagatgaagatcggagccaaactgcgttttgtccgtgagccggataatcaatatgatgaattggctatactggttaaagatcagaatgacaataaacttggctatgtgccgcgtaaaaagaacccaattcttgcaagacttatggatgccggaaaacttatttatggtactgttaaaacaataaaaaatgacgacagttatattaatattgaaatggaaatatttatggatgattaa

SEQ ID NO: 57920 - protein, 121 aa, Unknown
  Obtained from environmental sample
  misc_feature (1)..(121): Xaa is any amino acid
MIRWPKLGKSGLELGKPFSRQIFLISASIAGSYYVDDIDKLLDEMKIGAKLRFVREPDNQYDELAILVKDQNDNKLGYVPRKKNPILARLMDAGKLIYGTVKTIKNDDSYINIEMEIFMDD

SEQ ID NO: 57921 - DNA, 519 bp, Unknown
  Obtained from environmental sample
  misc_feature (1)..(519): n is a, c, g, or t
gtgcagtccgattcgaccacggatatttccgggcgctggaacgataccgactcgaggatcgtggccgaggagatggtcaaggacgcgctcagccgggcttggatcgaaaagtggaaagataaggaaaaggtgcccacaattatcatcggtaagatatccaacaagagtcacgagcatatcggcgtcgagacgtttatgaaggacattgagcgcgagcttttgaactccggcaaagtcgagttcgtcgcgtctaaagcggagcgcctccagcttcgcgaggagcgcggggagcagcaggagtacgcgggcgccgcgtcccgtttggacatgggcgaggagcagggcgccgacctcatgatgatcggaaccatcacctcgattgaggacagggacgggaagctctccgtcgtattctatcaggtggatatggagttgattgagcttgagtcgaccaagaaggtgtggtcgcatgggaagaagattaaaaaggtcgtggagcgcgccgggacaaaatactaa

SEQ ID NO: 57922 - protein, 172 aa, Unknown
  Obtained from environmental sample
  misc_feature (1)..(172): Xaa is any amino acid
MQSDSTTDISGRWNDTDSRIVAEEMVKDALSRAWIEKWKDKEKVPTIIIGKISNKSHEHIGVETFMKDIERELLNSGKVEFVASKAERLQLREERGEQQEYAGAASRLDMGEEQGADLMMIGTITSIEDRDGKLSVVFYQVDMELIELESTKKVWSHGKKIKKVVERAGTKY

SEQ ID NO: 57923 - DNA, 1386 bp, Unknown
  Obtained from environmental sample
  misc_feature (1)..(1386): n is a, c, g, or t
atgcgccgatccgattcgcacggtgggaaactcgcccgaaaactgtccgctccggcgttggcggcgtcaatgttgctggcttgtttcctattgccctcttgtaccagcaaggcggttctgcgggatagggtgctgaataagccgctggccgacgactatctcgccagaatcgcgaatatcaggaaagagaagaagaagctttacggtaaaggcgtgaagaacgcttttttgtacaacatggatatcggcgtccttttccactacgcggggatgtacgattcgagcaacgtctacctgcttgaggccgagcggattttcgacgacctgttcgcaaggtcgctcacaaacgaggccgcgtcgctgctcacaaacgacaacgtgaggccctatcgcagtaagccgtacgagctcaccatggtccaccagtttgcggcgctcaactttatggcgatgggcaagttcgacgatgccttggttgagagccgcaggatgcagatctacttcaacgagtggaagcgtgccggcgcggctgagaaaaagtaccataccgacgggatgtttcacctcctgtcggcgttggcttacgagagggtaggcgagccggacaactcgctcatatcgacctacaactccgtggacgcgttcaagaaggggccggtgccgctcgccgaggaggtcgagggtttcgcctacgaccgtttcatggacggggacagggaggacgatgtcaacacgctgggtctgcggccgctcgacggccccaataagtggacggcgaagatgggcgacgcggagatcgtgatagtcgggtacgtaggcaagggccccgtgatgatagagcgggactggcgcggcaccatgatgcccggcgggggtctgtacatctccgcgtccaaaagagaccggaacggccaagagataacctactccgcgctggcgccgcccttgccgtacagctacagaaacaacagacgggcgtggaggacccaccacttaagaatctcgctgccggagctgctgactacgccgtccggagccgaccgcttctcggcgcggttgagcggaggcagtcagacgtactggtcggtggatgtggaagacatcgacaagcaagccgggcaaagccctctccgacgacttcggcgcgatagtcgccagaacggcgataagggcgatcatccgcacgatagccgccgagcagaccaagaaaaacgtcgacaccggcagccagctggggaatttggcgttcagcatattcacggatttggccttcgaccagctggagatggcggacgtgcgcatgtgcttctttctcccgcaaaagataacgctgataagaatccctgtggaacccgggaagcacagcgtgcagatgaaaattcatga

SEQ ID NO: 57924 - protein, 461 aa, Unknown
  Obtained from environmental sample
  misc_feature (1)..(461): Xaa is any amino acid
MRRSDSHGGKLARKLSAPALAASMLLACFLLPSCTSKAVLRDRVLNKPLADDYLARIANIRKEKKKLYGKGVKNAFLYNMDIGVLFHYAGMYDSSNVYLLEAERIFDDLFARSLTNEAASLLTNDNVRPYRSKPYELTMVHQFAALNFMAMGKFDDALVESRRMQIYFNEWKRAGAAEKKYHTDGMFHLLSALAYERVGEPDNSLISTYNSVDAFKKGPVPLAEEVEGFAYDRFMDGDREDDVNTLGLRPLDGPNKWTAKMGDAEIVIVGYVGKGPVMIERDWRGTMMPGGGLYISASKRDRNGQEITYSALAPPLPYSYRNNRRAWRTHHLRISLPELLTTPSGADRFSARLSGGSQTYWSVDVEDIDKQAGQSPLRRLRRDSRQNGDKGDHPHDSRRADQEKRRHRQPAGEFGVQHIHGFGLRPAGDGGRAHVLLSPAKDNADKNPCGTREAQRADENS

SEQ ID NO: 57925 - DNA, 363 bp, Unknown
  Obtained from environmental sample
  misc_feature (1)..(363): n is a, c, g, or t
gtgatattctacgagaccccgcacagaatcgttaaaacattagaagatattaaagaagtattgggcgacgtgcgtgtggttatcgcgcgggaactgacgaaaatacacgaggagttcttacgcggcaacgccgaagaactgctaaaacacttcgcgacgcgtcaaccgcgtggcgaaatggtaatcttgtttaacacgcgaataacatccccttcgactccgctcagggaccgtccttcgactccgctcagggaccgtccttcgactccgctcagggaccgtccttcgactccgctcagggaccgtccttcgactccgctcagggaccgccctcaaccgccggataccccgaaaggccgctga

SEQ ID NO: 57926 - protein, 120 aa, Unknown
  Obtained from environmental sample
  misc_feature (1)..(120): Xaa is any amino acid
MIFYETPHRIVKTLEDIKEVLGDVRVVIARELTKIHEEFLRGNAEELLKHFATRQPRGEMVILFNTRITSPSTPLRDRPSTPLRDRPSTPLRDRPSTPLRDRPSTPLRDRPQPPDTPKGR

SEQ ID NO: 57927 - DNA, 720 bp, Unknown
  Obtained from environmental sample
  misc_feature (1)..(720): n is a, c, g, or t
ttggtctggtcccggcccacgggaagcggcaagtctaccaccctatgcgcgatgatagactacataaaccgtaaccgcaaagaccacatgataacgatagaagaccccatagagttcgtccacgagaacaagaactgcctgataaaccaacgcgaggtgcacgagcacaccgactctttcaagagcgcgctgcgggcggcgctgcgcgaagaccccgacatcgtctacatcggcgagatgcgcgacctcgagacgatctccatagccatagagaccgccgagaccggccacttggtcttcggcacgctgcacacctccaccgccccatccaccgtcgaccgtatcatcgaccagttccccggcgacaagcaggaccagatccgcatgatgctggccgacagcctgcgcggcgtgatctgccaggtgctctgcaaaaagcagggcggcggccgcgtcgcggcaatggaggtgctgatggtgaccccgtccatctcaaacctgatccgcgaaagaaagacctttatgatccagtctatcctgcaaacgggaaagaacttgggaatgtgcacgatgaacgacagtttctttgaactggtcaagcaaaagacggtctcgccggaggaggcctacgacaaggcgcttgacaagcccgggctgctgggaatgtttgagaagaacggaatcgggacggggtggttgagcggcaaggctcagcagtaa

SEQ ID NO: 57928 - protein, 239 aa, Unknown
  Obtained from environmental sample
  misc_feature (1)..(239): Xaa is any amino acid
MVWSRPTGSGKSTTLCAMIDYINRNRKDHMITIEDPIEFVHENKNCLINQREVHEHTDSFKSALRAALREDPDIVYIGEMRDLETISIAIETAETGHLVFGTLHTSTAPSTVDRIIDQFPGDKQDQIRMMLADSLRGVICQVLCKKQGGGRVAAMEVLMVTPSISNLIRERKTFMIQSILQTGKNLGMCTMNDSFFELVKQKTVSPEEAYDKALDKPGLLGMFEKNGIGTGWLSGKAQQ

SEQ ID NO: 57929 - DNA, 375 bp, Unknown
  Obtained from environmental sample
  misc_feature (1)..(375): n is a, c, g, or t
ttgaccagttcaaagaaactgtcgttcatcgtgcacattcccaagttctttcccgtttgcaggatagactggatcataaaggtctttctttcgcggatcaggtttgagatggacggggtcaccatcagcacctccattgccgcgacgcggccgccgccctgctttttgcagagcacctggcagatcacgccgcgcaggctgtcggccagcatcatgcggatctggtcctgcttgtcgccggggaactggtcgatgatacggtcgacggtggatggggcggtggaggtgtgcagcgtgccgaagaccaagtggccggtctcggcggtctctatggctatggagatcgtctcgaggtcgcgcatctcgccgatgtag

SEQ ID NO: 57930 - protein, 124 aa, Unknown
  Obtained from environmental sample
  misc_feature (1)..(124): Xaa is any amino acid
MTSSKKLSFIVHIPKFFPVCRIDWIIKVFLSRIRFEMDGVTISTSIAATRPPPCFLQSTWQITPRRLSASIMRIWSCLSPGNWSMIRSTVDGAVEVCSVPKTKWPVSAVSMAMEIVSRSRISPM

SEQ ID NO: 57931 - DNA, 744 bp, Unknown
  Obtained from environmental sample
  misc_feature (1)..(744): n is a, c, g, or t
atgctcaaatgcttttttgaggacacggcacagatcggcggcaaagacacgagagcgctgtttcgcgggttgaagatagaggaagccggggagcggtatatggagcatctggggaagtacccggtgatattcttgaccttcaaagaagcagagagtgagagctttgacgaaacttgccatatatttaaaaaaatgctttcggatgaatttcgccgacacggatatgttaaggaaaaaatcgacgacgcggtggacttgaaattgtttgaaagcctatcgtcgggcgacacaaatatttcttcatacaaggatgccatcaaatttttaagcaaatgtctagaacgttaccacggcaagaaggcgattgttttgattgacgagtatgacgttcccctgcaaaaatcttgggcttgcaaatattacaaggagatgattgccttcatccgtccgctccttagcagcgcgctcaaagacaatccgcacctgcaatttgcggtgatgacgggatgcttgcgcatttccaaagaaagcattttcacagggcttaacaatatgcaagtaatctcgatactggataaatattattctgaatatttcggctttacacagttagagatggacaatatgttggaatactacggactttccgaaaagaggcaaattgtcagggattggtacaacggttacctttttggtaagatagaggtatataatccngtggagttctgtatttgtggcggatag

SEQ ID NO: 57932 - protein, 247 aa, Unknown
  Obtained from environmental sample
  misc_feature (1)..(247): Xaa is any amino acid
MLKCFFEDTAQIGGKDTRALFRGLKIEEAGERYMEHLGKYPVIFLTFKEAESESFDETCHIFKKMLSDEFRRHGYVKEKIDDAVDLKLFESLSSGDTNISSYKDAIKFLSKCLERYHGKKAIVLIDEYDVPLQKSWACKYYKEMIAFIRPLLSSALKDNPHLQFAVMTGCLRISKESIFTGLNNMQVISILDKYYSEYFGFTQLEMDNMLEYYGLSEKRQIVRDWYNGYLFGKIEVYNPVEFCICGG

SEQ ID NO: 57933 - DNA, 744 bp, Unknown
  Obtained from environmental sample
  misc_feature (1)..(744): n is a, c, g, or t
gtggagcccggcgaagtagttgtgatcgaaaacggcgaaatgaaaagcgagggaataaagcttaaaaacagggaaaatgatcggggactttgtatttttgaatatatttatttcgcgaggccggattcggtaatcgacgggctttccgtatacaaagcacgtcatatgatgggaaaggagctggcaagagaatcccagccgagtgccgacattgtatgcggtgtgccggatagcggactaatcgccgcaagtggatacagcgaggcaagcggaatatcattggaaaccgggtttgtcatgaatcgttacattggccggagttttatttatcccacgcaaatacagcgggatagcgccgtccggcttaagcttaacccgcttacggcaaatattcagggcaaacgggtagtgcttgtggaggattccattgtacgcggcacaacaacaggactgatgctccgaaacctgaaaaacgcgggtgccaaagaagttcacatgatggttgcttcgccgcctttccgccacacctgccattacggaaccgacatagacagtgaggaaaaccttttagcgaataaaatgagcctggaggagatcagggcaaaaatcggcgctgacagccttggctatatcagcattgaaggattaaagcgtgcctgcagcggatgttctttaagtttttgtactgcctgctttacaggcaacggcgaatcctcacgggccaagaaagatgtgtttgagtag

SEQ ID NO: 57934 - protein, 247 aa, Unknown
  Obtained from environmental sample
  DOMAIN (42)...(184): Phosphoribosyl transferase domain
  misc_feature (1)..(247): Xaa is any amino acid
MEPGEVVVIENGEMKSEGIKLKNRENDRGLCIFEYIYFARPDSVIDGLSVYKARHMMGKELARESQPSADIVCGVPDSGLIAASGYSEASGISLETGFVMNRYIGRSFIYPTQIQRDSAVRLKLNPLTANIQGKRVVLVEDSIVRGTTTGLMLRNLKNAGAKEVHMMVASPPFRHTCHYGTDIDSEENLLANKMSLEEIRAKIGADSLGYISIEGLKRACSGCSLSFCTACFTGNGESSRAKKDVFE

SEQ ID NO: 57935 - DNA, 1173 bp, Unknown
  Obtained from environmental sample
  misc_feature (1)..(1173): n is a, c, g, or t
ttgagtagcgtattaatcctaacaattgtttccattttcctagtactgaactcctgttcccgatcctccgactggatacagttcagaggcgaagacggaagaggcgtaagcaattcccgcataactccgcctttgggcattcgctggaaaataaatcttcaatccggcgacgaaaaaatccgttcgctgaatccgcccatcgtcatgggagacacaatttatttcggttccgacgacggcaatttttacgcgcttgatgtggagagcggttacatgcgatgggtgtttaaaagcggcgcggaaatcaactcgatcccttgttcggataaagacaatatttattttggcagtaaagacggaaaactctacgctttgtcgtgtgaaacaggacaggtgatttggacatttcaggcggagagccagatcaattcgcaggtgcaaagatacggggactatgtaatttttgtcggagacgccgacgccgtttattttctttctccgcagggcgaggaaaaattcaggcttagaaatcccggctggtacaattattcattccttgttacggacgacataatgtacatgggaaccggtcctacagtggaattagtcggtccttttaattttaaaaaaagagaattcctttggtttatggattatcacgaaatggaagctatctggtattcatttaccgccgtccgaggggatcttttgtatatgggaacggcgtctgttatcatggatacgacatatcttggctaccacgctttcaaccgccatacgggggaagtagtctggcgtaagtatctggacggtaaaatatacggtcaaaattttaacagtatatgggaatattttataagaaaccttgatattttggactttatgtcccccgcagtatggaaggatctcgttatttttacgggcggcgacaacacagcccgcgcgttcgacgcggaaacaggcgaattacgctgggaaaagatatttgataccgccgtaagttccgcgccgaccattgcgtccgggcgggtttacttcggtcttatgggaaatgattttaatccgcccaaattggtctgtatttccgcaagggacggtaggcttctttggcagatggaaaccgagggctctatcctttccgcgcccgtaatgccgaaactcggccgattctga

SEQ ID NO: 57936 - protein, 390 aa, Unknown
  Obtained from environmental sample
  SIGNAL (1)...(23)
  DOMAIN (302)...(339): PQQ enzyme repeat
  misc_feature (1)..(390): Xaa is any amino acid
MSSVLILTIVSIFLVLNSCSRSSDWIQFRGEDGRGVSNSRITPPLGIRWKINLQSGDEKIRSLNPPIVMGDTIYFGSDDGNFYALDVESGYMRWVFKSGAEINSIPCSDKDNIYFGSKDGKLYALSCETGQVIWTFQAESQINSQVQRYGDYVIFVGDADAVYFLSPQGEEKFRLRNPGWYNYSFLVTDDIMYMGTGPTVELVGPFNFKKREFLWFMDYHEMEAIWYSFTAVRGDLLYMGTASVIMDTTYLGYHAFNRHTGEVVWRKYLDGKIYGQNFNSIWEYFIRNLDILDFMSPAVWKDLVIFTGGDNTARAFDAETGELRWEKIFDTAVSSAPTIASGRVYFGLMGNDFNPPKLVCISARDGRLLWQMETEGSILSAPVMPKLGRF

SEQ ID NO: 57937 - DNA, 1545 bp, Unknown
  Obtained from environmental sample
  misc_feature (1)..(1545): n is a, c, g, or t
gtggaggaaattcttaaaaaagaaaaggctattctttttattgacgaaatccatactctggtcggcgcgggttcagtatctggcagcgcccttgacgcttcaaaccttttaaagccggctttgaccagcggcaagctgcgttgtataggctccacaacccacgaagattacggtaaattttttgaaaaggacagggcgctttcacggcgttttcagaagattgacattaacgaaccaagtcaggaagacgcggttaaaatcatcagcggccttaaaaccaagtacgaagactaccataaagtccactattccgatgacgcggtggaaggtgcggtcaggctttctgcccagtacatcaccgagcggcggctgcccgacaaggccatcgacgttattgacgaagccggttcctacgcccgaatcgaagcttacatgaaggaagaaaaagaatttgccgagcttttcggcaaaaaggccgacgaatttacttcttcggaaaaagtccacactgtgcagggaggttccgttgaaaaaatcgagataggccttcccctgattgaaacggtggtgtccaaaattgcccgtattcccgaacgttcggtgggcggaagcgaaaaggatcgcctgcgcttgttggaagacaggataaaggaaagaatattcggccaggatcaggcggttaatgccgtggttaangcggttaaacgttcaagggctgggttcagggcggacggcaaacccgtagcgaactttttatttgtcggacccacgggcgtaggcaagacagaacttgcgcgtcagttggcggaaacattgggaatttccatgctccgctttgacatgagcgagtatcaagagaagtatacaatctcgcgccttataggctcctcgcccggctatgtcggctacgaagacggcggtcagcttaccgacgcagttcgcaaacagccgcacgccgtagtcctactcgatgaaattgaaaaagcccacagcgatatcttcaatatactcctgcaaatcatggattacgccacccttaccgacaatcagggacgcaaggcggacttccgcaatgtaattttgataatgacaagcaacgccggagcgagagagattggcaagggtcttattggttttggagatcgtattcaggacgacagcgcggtaaacgaagctgtagaaaaaatctttactcccgaattccgcaacagactggacgccattgtccgctttggacatctttcgcgcgaaattatggtttccattgtccataaagaattggacgctttcaccgcccagcttacggaaaagaacgtaacccttaccgttacggaaacctgcgtggacaaattagcggaagaaggctacagcaaagaattcggcgcaaggaatgccggcagactaatcgaagaaaagataaaaagcttctttgtagatgaagtcctattcggcagtctgagcgaaggcggcagcgcggttgtggactggcgcgacggctactgcatggacatcgaagaaacgcaagatgtaacagcggaaaattag

SEQ ID NO: 57938 - protein, 514 aa, Unknown
  Obtained from environmental sample
  DOMAIN (204)...(477): Torsin
  misc_feature (1)..(514): Xaa is any amino acid
MEEILKKEKAILFIDEIHTLVGAGSVSGSALDASNLLKPALTSGKLRCIGSTTHEDYGKFFEKDRALSRRFQKIDINEPSQEDAVKIISGLKTKYEDYHKVHYSDDAVEGAVRLSAQYITERRLPDKAIDVIDEAGSYARIEAYMKEEKEFAELFGKKADEFTSSEKVHTVQGGSVEKIEIGLPLIETVVSKIARIPERSVGGSEKDRLRLLEDRIKERIFGQDQAVNAVVXAVKRSRAGFRADGKPVANFLFVGPTGVGKTELARQLAETLGISMLRFDMSEYQEKYTISRLIGSSPGYVGYEDGGQLTDAVRKQPHAVVLLDEIEKAHSDIFNILLQIMDYATLTDNQGRKADFRNVILIMTSNAGAREIGKGLIGFGDRIQDDSAVNEAVEKIFTPEFRNRLDAIVRFGHLSREIMVSIVHKELDAFTAQLTEKNVTLTVTETCVDKLAEEGYSKEFGARNAGRLIEEKIKSFFVDEVLFGSLSEGGSAVVDWRDGYCMDIEETQDVTAEN

SEQ ID NO: 57939 - DNA, 660 bp, Unknown
  Obtained from environmental sample
  misc_feature (1)..(660): n is a, c, g, or t
atgcctgcgcccattaagcgggacggcaaagaaaacaacagtgaaaccctccttgactggtacgcgaaaatatttcctcctgtaatggggctttcaggcaaagagggaggccttctgcaccgccttgattttgaaacacatggcctggttcttttcgcgaagaaccaacaggcgctggaaaatttgtcagaccagcagaaacaaggaaagctcatcaaggagtacagcgcaatctgccagagatcagagcctcagcccgacgccgcgcaatttgatgtttccgccgctcccccacttgtaattgcaagctatttccggccatacggcccgggcaggaaacaggttcgtccggtgatgaaagaaaaattaaaaggcaaggaaattgccaaagacgcaggcgcatactataaaacagaaattatcggcattgaaaaaacaaacattgccggacaggaagaatcgtaccatttcaccgtaaggcttaaacgcggtttcaggcatcagatacgctgtcatctcgcgtgggttggcttccctgtgttaaacgatccactttacggcaaaggagaagtaagcggtttcctggccctgcgggcaacgagccttttttttgatgatccaaaaagcaggaaaccagtaatagtgagaagtgagaagtga

SEQ ID NO: 57940 - protein, 219 aa, Unknown
  Obtained from environmental sample
  DOMAIN (10)...(175): RNA pseudouridylate synthase
  misc_feature (1)..(219): Xaa is any amino acid
MPAPIKRDGKENNSETLLDWYAKIFPPVMGLSGKEGGLLHRLDFETHGLVLFAKNQQALENLSDQQKQGKLIKEYSAICQRSEPQPDAAQFDVSAAPPLVIASYFRPYGPGRKQVRPVMKEKLKGKEIAKDAGAYYKTEIIGIEKTNIAGQEESYHFTVRLKRGFRHQIRCHLAWVGFPVLNDPLYGKGEVSGFLALRATSLFFDDPKSRKPVIVRSEK

SEQ ID NO: 57941 - DNA, 807 bp, Unknown
  Obtained from environmental sample
  misc_feature (1)..(807): n is a, c, g, or t
atgttggcaaagcgcataattccctgtttggatgtggacgacggaagggtggtgaagggcgttaaatttgaaggcatcagggacgtgggcgatccggtggaactggcccgccgctataacgacgagggcgccgacgagcttactttccttgacataggcgcttcttacaagagtcgcgcgacgttgcttgaagttgtccataagatcgcaaatgaagtttttattcccctttgcgtgggcggcggcatacgcagccttgacgatatgcgcgacgctatgaacgccggagcggacaaggtatcggtttgcacttcggcattgagccgccctgatctgttaagcgaaatggcaaaagcttacggcagccagtgcgttgtgttgtcgattgacgcgaagcgggtgggggagggcctgcaatggcacgccttttcccacggcggcaggacggacacgggagttgacgccatagagtgggcggttcgcgcggtagagcttggcgcgggggaaatccttctcaattccattgacgcggacggcacaggcggcggttacgatcttgagctgacccggcgcatcctcaattccgttccggttccggtaatcgcctccggcggcgccggaacccttgaacagatagccgatgttctgctcagcaccgcgtcgacgganatgccgcggaacaccgcgcctgacgaagcgccgggcgccgatgccgctctgctcgcgtcgcttctgcattttggtttaactacgatcagggacataaaaaaaaccgcagaagccaaaggcgtctgtgtcaggtggtaa

SEQ ID NO: 57942 - protein, 268 aa, Unknown
  Obtained from environmental sample
  DOMAIN (5)...(251): Histidine biosynthesis protein
  misc_feature (1)..(268): Xaa is any amino acid
MLAKRIIPCLDVDDGRVVKGVKFEGIRDVGDPVELARRYNDEGADELTFLDIGASYKSRATLLEVVHKIANEVFIPLCVGGGIRSLDDMRDAMNAGADKVSVCTSALSRPDLLSEMAKAYGSQCVVLSIDAKRVGEGLQWHAFSHGGRTDTGVDAIEWAVRAVELGAGEILLNSIDADGTGGGYDLELTRRILNSVPVPVIASGGAGTLEQIADVLLSTASTXMPRNTAPDEAPGADAALLASLLHFGLTTIRDIKKTAEAKGVCVRW

SEQ ID NO: 57943 - DNA, 624 bp, Unknown
  Obtained from environmental sample
  misc_feature (1)..(624): n is a, c, g, or t
atgacaggcgtaataaactacggcgcgggaaacctgggctcggttatgaatgccttaaagcggctttcaatcccggctcgttttgtttccggcgtggacgagcttgccctgagaacaacgccctttgacaggatcatcttcccgggcgacggccatttcgcgacggcgatggcttccctgacgaaatccggttatgatcaggcgatcagggaatggattcaggccgacaggccttttctgggaatatgcatcggcctgcaattactctttgattcatcggaagaggcgccgcctgttgacggcgttgaagttaagggcctctctgtgatttccggaaccgttaggcgttttcccgggcgcaagctgccccaaatcggctggaaccagacggaagcgcggcctaattcaaggctgttcaaaggcataaacgaaaaaagttttttttattatatacattcttattacgccgatccaacggatgaatcggagcgggccgccgaagccgaatattatttgcgttactgctgcgctgtggaacgcggcgcccttgcggcggtgcaattccatcctgaaaaatcaggcgcggcggggcttgcgctcttaaggaattggatcaacgggtga

SEQ ID NO: 57944 - protein, 207 aa, Unknown
  Obtained from environmental sample
  DOMAIN (37)...(160): CobB/CobQ-like glutamine amidotransferase domain
  misc_feature (1)..(207): Xaa is any amino acid
MTGVINYGAGNLGSVMNALKRLSIPARFVSGVDELALRTTPFDRIIFPGDGHFATAMASLTKSGYDQAIREWIQADRPFLGICIGLQLLFDSSEEAPPVDGVEVKGLSVISGTVRRFPGRKLPQIGWNQTEARPNSRLFKGINEKSFFYYIHSYYADPTDESERAAEAEYYLRYCCAVERGALAAVQFHPEKSGAAGLALLRNWING

SEQ ID NO: 57945 - DNA, 1380 bp, Unknown
  Obtained from environmental sample
  misc_feature (1)..(1380): n is a, c, g, or t
ttgagcaattattaccgtttttttaaacagctgcaacaggaaaaactcagggattatgtcgtttactgtgtccaggaattggcagtgaacgccaaaaaggcaaataccaagcgggtgtactttatggaacgtgggctggatcttgccaaccccgacgactacaagctggggatgtcggggtttaaggaaaacaccctgagcaatatcgcccattaccttcagcttcagaaagagaaagggctttacatcaaactaattctacagataaaaaacaatatcatttatgtagaaatcagaaacaacgtgtcggtaacaaaaaccgagcttatccgtatccatgacaagcttgcccgttccaggcagtacaacaaccttgaagatgccatgtcccaggttctggatgactctgaaggggccgggcttgggcttgtcatactggtactgatgcttaaaaaaatgggccttgatgaggactgctttgacattctcggaaccgacaaggaaaccatcgcccgcctggttattccgttggagcagacacgccttgaaaacctttcggccctttctactactattgtggataacatcacctccctgccccagtttccggaaaacatccttttggtgcagaagctcatcaacgatccaaaatcggagatggccgacattgcccgtcagatttccatggatccagctcttacggcggatcttttgaagatcgtaaattccgcccagtacatgctttccaagaaggtggacagcatcgccgaagccgttaagatggttggtatccggggcatcaaaaacctgctttactcctacggcacgcaaaagattcttggcgatgacacgacggaaaagaagaacctatgggaacacagttataaaactgcattttttgcctataacctggtcaagaatttccacagggatcgtaacttgctggacgatgcctatgtcggaggaatactgcatgatatgggaaaaattattttttccaacgttcatcctgatttactcaacaagataaacagcttctgcgccgaaaggcgactgcctgcttctacctttgaggatctttccgccggcatgaaccatgcggaaatcggcgcccttattgccgataaatggaattttcccgaaggcctggttgtcagtatccgctaccaccacgatccgtcatcggccccgacagaatacagggatttggcggatacggtttaccttgccaatatgttctgcgagcttgaaaccggcggggttacctttgaccaactggagcctactgtgcttgagaatttcggcatcacaacgaaaaggcagattgaaaacctgctggataaattcttaagcggctttaaaaaagaaaccagccaatag

SEQ ID NO: 57946 - protein, 459 aa, Unknown
  Obtained from environmental sample
  DOMAIN (290)...(412): HD domain
  misc_feature (1)..(459): Xaa is any amino acid
MSNYYRFFKQLQQEKLRDYVVYCVQELAVNAKKANTKRVYFMERGLDLANPDDYKLGMSGFKENTLSNIAHYLQLQKEKGLYIKLILQIKNNIIYVEIRNNVSVTKTELIRIHDKLARSRQYNNLEDAMSQVLDDSEGAGLGLVILVLMLKKMGLDEDCFDILGTDKETIARLVIPLEQTRLENLSALSTTIVDNITSLPQFPENILLVQKLINDPKSEMADIARQISMDPALTADLLKIVNSAQYMLSKKVDSIAEAVKMVGIRGIKNLLYSYGTQKILGDDTTEKKNLWEHSYKTAFFAYNLVKNFHRDRNLLDDAYVGGILHDMGKIIFSNVHPDLLNKINSFCAERRLPASTFEDLSAGMNHAEIGALIADKWNFPEGLVVSIRYHHDPSSAPTEYRDLADTVYLANMFCELETGGVTFDQLEPTVLENFGITTKRQIENLLDKFLSGFKKETSQ

SEQ ID NO: 57947 - DNA, 2184 bp, Unknown
  Obtained from environmental sample
  misc_feature (1)..(2184): n is a, c, g, or t
atgtgggtcgaggccgactgtaacattaccgggagcgaatcccttgtgcgccagttcctggttggtaaaaaggcatgcaaggaaatgctcggctgcgagggggacaccctctggctgcccgatgtattcggttatgctgccgccctgccccagatactttcgctttgtcgaattaattatttcgttacaagcaagatcaactggaacgacacaacccgtttcccatacaacacatttatctggagggggatcgacgggacaggcataaagacccatttcatcaactcctgggcaaccggctataacggcatggtcaaccctgccgaccttgccgagacatggaacaacgtgcagaacaaagagctgcagtccgcttcgatcaagcctatcggcgagggggacggcggaggcgggacagccaggggagacctggaagcagcccgccggcttgccaacctggaaggtgcgccaaaggcaggctggaaaaaagtctccgatgccctggaaagcatattcgcggaaagcgctcattggcccgagtggcagggggagctttaccttgagctccacaggggcacctacaccacccagggtgccgttaagcgatacaaccgcaagctggaatttgccatgcggaccacggagtttttttcaagccttgccatgctggaaagcgggacaccctacccccatgaaagactcttgaaaaactggaagctcctccttaccaaccagttccacgacatcatccccggctcttccatcggcagagtctacgacgaagcgaaagaaacctaccgcggtatcgaagcggatctgatcgaactctcgaaaaccacgcttcaaaatatctccggttccaaagacgccgctgtttcaggcagtttaaaattctacaacgatctttcctgggaacgtggagatccggtaagtttccctgcggatttagttaaaggagcaagcgctctaaaagcaagcaccggcaacggcgaaaaaatataccccgttcaacgctataccaacctggacggcaaggagaccgccgtggcctctccccgcctgccatccctcggctggatcactctgagccccgcggagctgaaaacagattcctcatcttttgccttcaagggaaacagtctaaaaactccattatatgaagtgggctttgacgaggccggcagaattaaaagcctttttgatattaagaggaacagggagctggttgcgccctgcggcgttctcaatggctttaccagcgcccaggatgtgcccgttctttgggatgcctgggatattgacgccgactggaccaggtacctcaccgaagaaacccgcctgctttcaacggaggttgccgcctccgggcctgtttgtttcaggatcaggcgaaagtataaaatcggtgaggcgtcccttctgagccaggacacggttttttacgcgactcatcccaggatagattttgaaaccctggtagactggcgggaaaaacaacggcttttaaaggtacattttgacaccgccataaataccacccagatacgctgcgaggtacagttcggccaccttttacgcaacacgcacaagaaccttccgcaagaccgcgcccgttttgaattctgcgcccacaagtgggtcagccttgaagaagagggcgggggcattgccctcctcaacgactgcaaatacggccacgacgccgaagggagccgcgtacgcctgaccctgctccgctcgcctgtagcgccggatccggacgcggatacaggcgaacaccgctttacttacgccttgctcccctttacaggctgctttggcgaatccggcattgtccgcacaggctacgagctgaacgatccagcccgtgtggaacctgcctttggttctttggcttccgctgagcccgcagaatattcccttttcagaattgatgggcaaagcgtcattgtcgagacggtcaaagcgcccgaagcttctgccacggggaagcggcttgtgatccggctttacgaaagcctcggtgggcctgcaagaactgtcctgcgctttaaccgccctatactgtccgccgccgaaacggatatgctcgaagggaatcccagggagctgcctgtatcgggaaaagatctgtttctggaattcagggcatttgaaatcaagaccgttttggtgtctttttag

SEQ ID NO: 57948 - protein, 727 aa, Unknown
  Obtained from environmental sample
  DOMAIN (1)...(183): Glycosyl hydrolases family 38 N-terminal domain
  misc_feature (1)..(727): Xaa is any amino acid
MWVEADCNITGSESLVRQFLVGKKACKEMLGCEGDTLWLPDVFGYAAALPQILSLCRINYFVTSKINWNDTTRFPYNTFIWRGIDGTGIKTHFINSWATGYNGMVNPADLAETWNNVQNKELQSASIKPIGEGDGGGGTARGDLEAARRLANLEGAPKAGWKKVSDALESIFAESAHWPEWQGELYLELHRGTYTTQGAVKRYNRKLEFAMRTTEFFSSLAMLESGTPYPHERLLKNWKLLLTNQFHDIIPGSSIGRVYDEAKETYRGIEADLIELSKTTLQNISGSKDAAVSGSLKFYNDLSWERGDPVSFPADLVKGASALKASTGNGEKIYPVQRYTNLDGKETAVASPRLPSLGWITLSPAELKTDSSSFAFKGNSLKTPLYEVGFDEAGRIKSLFDIKRNRELVAPCGVLNGFTSAQDVPVLWDAWDIDADWTRYLTEETRLLSTEVAASGPVCFRIRRKYKIGEASLLSQDTVFYATHPRIDFETLVDWREKQRLLKVHFDTAINTTQIRCEVQFGHLLRNTHKNLPQDRARFEFCAHKWVSLEEEGGGIALLNDCKYGHDAEGSRVRLTLLRSPVAPDPDADTGEHRFTYALLPFTGCFGESGIVRTGYELNDPARVEPAFGSLASAEPAEYSLFRIDGQSVIVETVKAPEASATGKRLVIRLYESLGGPARTVLRFNRPILSAAETDMLEGNPRELPVSGKDLFLEFRAFEIKTVLVSF

SEQ ID NO: 57949 - DNA, 660 bp, Unknown
  Obtained from environmental sample
  misc_feature (1)..(660): n is a, c, g, or t
ttgatggccgagcaccgccgccgcgcaaatactcaaagaagagaaatgactcctgaggaatcttatctggcggcatcaatagaaatgatgattatcagagaaaccgcaagatcatatacaagggaacaaaaatttatcgccttggaatatatcggcgaagcccttaacaaaggaaacacaaacgacgaaatacgccagaccttggaatacctttccagggaaggcagggcgtctaccgcaagggaaaacggacgtattgtgaacaacttccccgatgtaagacggcaatcggcaaagtacttgggacagattggcacggaagaagccagaaaaaccctcattgatgtaattcaatttgaaaatgaggagacggttttgcaggaagcgataaaatctcttggtgatatcggagcaaatccaaacaacgaaactgtagtggttatatcgtgggttatgaaccgttataacaccctaaagccggacaatcttatggctctttccaccattgacgcgtttgagaaaattgccagaaaaaacaatggcattaactctcccgaagcgattaggactttaatcctcatttcagaggggctctatgttacgccggttagagagcgggcaaagcagttattagcggaattacgcacttacggcaagtaa

SEQ ID NO: 57950 - protein, 219 aa, Unknown
  Obtained from environmental sample
  misc_feature (1)..(219): Xaa is any amino acid
MMAEHRRRANTQRREMTPEESYLAASIEMMIIRETARSYTREQKFIALEYIGEALNKGNTNDEIRQTLEYLSREGRASTARENGRIVNNFPDVRRQSAKYLGQIGTEEARKTLIDVIQFENEETVLQEAIKSLGDIGANPNNETVVVISWVMNRYNTLKPDNLMALSTIDAFEKIARKNNGINSPEAIRTLILISEGLYVTPVRERAKQLLAELRTYGK

SEQ ID NO: 57951 - DNA, 888 bp, Unknown
  Obtained from environmental sample
  misc_feature (1)..(888): n is a, c, g, or t
atgatttttgatttcctgttttttctaaaacggaaaagagtcttcgctcttattggggatagcggcacaggcaaaagtttccacgcaaagattgtcgcgcaaaaatacagaatagattatctgatagacgacggtcttttaatacgggataaccgtatccttgccggtcattcggcaaagatagaacataccttccttgcggcggttaaagtcgccctttttgatgaaaagtcacacagagacgaagtcgcgcgcaaattgcaaagtgaaaaatacaaacgtattttaattcttggaacttccgaaaaaatggtttataaaatcgccgtgcgccttcagcttccccctccttctaaaattattaaaattgaagatatcgccactcaggaagaaattgacagggcggtaagaacaaggcgcatagaaggaaaacacgtaatccccgtaccctcaatcgaagtaaaaaaaagttatccaaacattttttttgacgcaataaggatttttaaacgccgcgttactcccgatggagacccaatgaatttacccacagggctgggattgggacccgtccctaccctgnctgaaaaatcggtagtacgtcccgaatactcaaaaagaggcaaggttattatttcagaatcggctttaagccagatggtcatacactgcgtcgatgaatacaaccaaaatatcaggataaaaaaaatcattgtacgcgacaatgaaatgggttacagtttcgtgatcaccatcgacgtgccttacgacatacagcttggaggcaatatgcacgagcttcaaaattatattatagataatattgagcggtacacgggaatacttattgaagaggttaatattattattgataaaattattcaataa

SEQ ID NO: 57952 - protein, 295 aa, Unknown
  Obtained from environmental sample
  misc_feature (1)..(295): Xaa is any amino acid
MIFDFLFFLKRKRVFALIGDSGTGKSFHAKIVAQKYRIDYLIDDGLLIRDNRILAGHSAKIEHTFLAAVKVALFDEKSHRDEVARKLQSEKYKRILILGTSEKMVYKIAVRLQLPPPSKIIKIEDIATQEEIDRAVRTRRIEGKHVIPVPSIEVKKSYPNIFFDAIRIFKRRVTPDGDPMNLPTGLGLGPVPTLXEKSVVRPEYSKRGKVIISESALSQMVIHCVDEYNQNIRIKKIIVRDNEMGYSFVITIDVPYDIQLGGNMHELQNYIIDNIERYTGILIEEVNIIIDKIIQ

SEQ ID NO: 57953 - DNA, 402 bp, Unknown
  Obtained from environmental sample
  misc_feature (1)..(402): n is a, c, g, or t
atgagcgacataaaagtatctttggcatccggcgcatcgggaaaaatcgaaactttcgactgccccttcggcatcatcgccgacacgcttctgccgcatttcggcatcgcggaaaacgccgtcgtcgcgctgagggtaaataacgagattcgccccttaaaaaccaggttggaagttaattccaggctggaaccggtgcttatggactcgccggaaggggcgatgatctaccgacgttccctttctttcattcttgccatcgcggcccacgagcttttccctgacagacggctctacgtcggccactcgcttgggaacagctattactacacgtttgattcgggtgacgcccccgcagaaaatgaggtcgccacccttcaggaaagatggaagccctggtaa

SEQ ID NO: 57954 - protein, 133 aa, Unknown
  Obtained from environmental sample
  misc_feature (1)..(133): Xaa is any amino acid
MSDIKVSLASGASGKIETFDCPFGIIADTLLPHFGIAENAVVALRVNNEIRPLKTRLEVNSRLEPVLMDSPEGAMIYRRSLSFILAIAAHELFPDRRLYVGHSLGNSYYYTFDSGDAPAENEVATLQERWKPW

SEQ ID NO: 57955 - DNA, 1287 bp, Unknown
  Obtained from environmental sample
  misc_feature (1)..(1287): n is a, c, g, or t
atggaagccctggtaaaagaagacctccccatcacgttcaagtaccttgcatacgaggaatcccttgaggttttcaggaaaaacaatcagacggacaccgcgctgcttttggatcagcgcggcacttcgcggataaagataaacgaatgtaaaaacaacatcgacatttacgtcgaacccctggcgccacgtaccggcctgctttccgcttttgagctgatgccctatcaggaaggattcctgctccgtttctccgcgcttggcaaaggcaggatcgtcggccccttcacggacgagccgaaaattttcaacgtgtacaacgagtataaaaaatggggacgcacagtcggagtacgggtggtgggcgatctgaattcccttgtcgcgaaaaggaatatccgcgactatataagaatcgccgaggcgcaccaggcgcggaaaatggcggatatagccgaacagatatgcgggcggaaagatacggtaaaaaccgtcctgctcgccggtccttcaagctccggcaaaaccaccagcgcgaaaaagctttccatagagcttctggtattggggataaagcccatcgccatcagccttgacagttattatgtggggaatgaccggacaccaaaggatgaaaaaggcgatccggactacgaatgtcttgaggcgcttgacatccgcctgttaaacgatcatcttctggcgctgtacaggggcggggagataagtctgcccgtttacgattttaagacgggtacaagcatcagagacgccggcaaaaagatccgtatggaagaaaatacggtgcttattgtcgagggcatacacggcctcaacgacgcgcttacctacagtataaaccgcgatacaaaatttaagatttacatttccgcccttacccagcttaaccttgacgatcacaacagaatccccaccagcgacaacaggctcttgcggcgcatggtgcgcgattcccaattcaggggaatgcaggcggcgggcaccataaaaatgtggcccaaagtgcaggccggagagcgcaagtacattttcccctttcaagacaccgccgacgccacatttaattccgctctagattacgaactttcagtcttcaagtactttgccgatccgctcttaaaagccgtaaagcctggcatgaacgaatacgccgaagcgataagattgctgtcgttcctggaaaacttcacgcctattccgcccgagtacgtaccgggaacaagcattttacgcgagtttataggcgggagcgagtttaagtattag

SEQ ID NO: 57956 - protein, 428 aa, Unknown
  Obtained from environmental sample
  DOMAIN (167)...(370): Phosphoribulokinase / Uridine kinase family
  misc_feature (1)..(428): Xaa is any amino acid
MEALVKEDLPITFKYLAYEESLEVFRKNNQTDTALLLDQRGTSRIKINECKNNIDIYVEPLAPRTGLLSAFELMPYQEGFLLRFSALGKGRIVGPFTDEPKIFNVYNEYKKWGRTVGVRVVGDLNSLVAKRNIRDYIRIAEAHQARKMADIAEQICGRKDTVKTVLLAGPSSSGKTTSAKKLSIELLVLGIKPIAISLDSYYVGNDRTPKDEKGDPDYECLEALDIRLLNDHLLALYRGGEISLPVYDFKTGTSIRDAGKKIRMEENTVLIVEGIHGLNDALTYSINRDTKFKIYISALTQLNLDDHNRIPTSDNRLLRRMVRDSQFRGMQAAGTIKMWPKVQAGERKYIFPFQDTADATFNSALDYELSVFKYFADPLLKAVKPGMNEYAEAIRLLSFLENFTPIPPEYVPGTSILREFIGGSEFKY

SEQ ID NO: 57957 - DNA, 1671 bp, Unknown
  Obtained from environmental sample
  misc_feature (1)..(1671): n is a, c, g, or t
ttgcggctcttttctacacaacatcctcatcttccgcaatggacaaacagaatatttgtcaacgggcagtttttcctttctcagggaattgatgcaaggcttgcggatgtttatctcgccaacagcttgaaaacgcttgaaaacaccgcaatggggcggacgatactcgtcaacgcctcgcccgtatttaataaagcgcaaagttcaacctgtcttgcggctatgtttttccccatacaggaaggaagcgggtgcgttctgttttcaaccgaaaccctaaacgaaagttttggtatgggcgttaacgcttctttccttataaacgccgacggcgatattatcgcggacgccgacatagaaagggtaaaaactcaaacaaatttggctgaacaggaaattatcagaaatatatttaacagctccgaccgcaacaaacaaatgttagtcgagcttgatattcagctaactcaaaattattcgtcttcttcatcattattttcctacttgtgggaaaaacttgtcggaaaaatcaaaaaaactaatacgcaaaatgaaaacaaaaaagtacgccattatcttgcctataccaaactgaataccgccggaagcgttctaattaccacaatcgaatacgataaagtctttgaaggcataaacgcgaccacacggcgcaacctctaccttaccgccgcgatattgttcctttctattatgtgtatctggtttttcgcaaaaagcatttcagttccgcttaaaacgcttgccggcgcggcgcgttctatcgagggcggtatttttaatattgagctaacgccggcaagcggcgatgaaataggtttattaacttccagctttggaaaaatgtgcgccgctcttaatattttcggcaagttcacaaaccgcgacattgccgttcaagccatgcgagggcaaattaaaccgggcggcttgtcgaagcatgcgacaatctttttttccgacatacgcggttttaccgaaaaatccgagaactttgtaaaggcattcggcagcgaagcttccgaccggattgttttctggcttaacgagtatttaacgcgcatggttgaatgtgtcgaaaaaaccaacggtattatcgataaatttataggcgacgccgtgatggcgcattggggaaccgcttataccacgggaagcccgcaggcggacgcgctcaactgcgtcaaggcggcgatgatgatgagaatcgctttgtataaattaaatatgaaccgcaaaaaagaaaacatgggaaacccgcccattacaataggctgcggcataaacacaggcgtagttaccgccggacagattggctccgatctccgcatggagtacaccgtcataggcgaccctgtgaatctcgcctcgcgtgttgaggcgcttaacaaaccgcttggtacggacattctgattaccgaagatacatggaaccttgtaaaggatcaatttatcgttgaagaaatgccgtctgtaaccgtaaagggaaaagaaaaacccgtgcggctttttgcggttgtaaatcatatctccgttcagtcgggaccaaaaactttggcggaagtacggaaaatattaggtataaaaccgccggatatttcaaaggcggatgtaaacgcagaagaagttaaatacaagattggcggcaaataa

SEQ ID NO: 57958 - protein, 556 aa, Unknown
  Obtained from environmental sample
  DOMAIN (225)...(294): HAMP domain
  misc_feature (1)..(556): Xaa is any amino acid
MRLFSTQHPHLPQWTNRIFVNGQFFLSQGIDARLADVYLANSLKTLENTAMGRTILVNASPVFNKAQSSTCLAAMFFPIQEGSGCVLFSTETLNESFGMGVNASFLINADGDIIADADIERVKTQTNLAEQEIIRNIFNSSDRNKQMLVELDIQLTQNYSSSSSLFSYLWEKLVGKIKKTNTQNENKKVRHYLAYTKLNTAGSVLITTIEYDKVFEGINATTRRNLYLTAAILFLSIMCIWFFAKSISVPLKTLAGAARSIEGGIFNIELTPASGDEIGLLTSSFGKMCAALNIFGKFTNRDIAVQAMRGQIKPGGLSKHATIFFSDIRGFTEKSENFVKAFGSEASDRIVFWLNEYLTRMVECVEKTNGIIDKFIGDAVMAHWGTAYTTGSPQADALNCVKAAMMMRIALYKLNMNRKKENMGNPPITIGCGINTGVVTAGQIGSDLRMEYTVIGDPVNLASRVEALNKPLGTDILITEDTWNLVKDQFIVEEMPSVTVKGKEKPVRLFAVVNHISVQSGPKTLAEVRKILGIKPPDISKADVNAEEVKYKIGGK

SEQ ID NO: 57959 - DNA, 300 bp, Unknown
  Obtained from environmental sample
  misc_feature (1)..(300): n is a, c, g, or t
atggaaagcaaaaagaaatcaaacggcaaattccgattaatagattttcttgttattattctttgtctttcgggcgcggtctacagcgttaacttgttttgggctgacctttttcaaaccctcaacggacaaaataaaacgccaatcggaagcgtttccataaaaagaaatattgttcagcgccgtatgtcggacagggtaatatgggataggctgattaaagaatctcccgtatattccaacgacatgatccgcgtgggagataactccgaagcccgaccttcatgtcggcggcaatga

SEQ ID NO: 57960 - protein, 99 aa, Unknown
  Obtained from environmental sample
  misc_feature (1)..(99): Xaa is any amino acid
MESKKKSNGKFRLIDFLVIILCLSGAVYSVNLFWADLFQTLNGQNKTPIGSVSIKRNIVQRRMSDRVIWDRLIKESPVYSNDMIRVGDNSEARPSCRRQ

SEQ ID NO: 57961 - DNA, 1020 bp, Unknown
  Obtained from environmental sample
  misc_feature (1)..(1020): n is a, c, g, or t
ttgattgcgagcttgaagcggaaaatcagttatatcatctctacctcagagaaaggcagggacccggctaatgacagcgtgaagatacgcatgcgggcctgcacactgggcgttccctgccttacgtcggtcgataccgcaaacgcgctggcggacggcctgctttcagggtacagcgagatcaatacagagctggttgacataaaccgcctaaggagcaagcgtaccaaacttgctttcacgaaaatgcacacttgcggcaacgattatatttacttcaactgcttcgacatggaaatcaattcgcccgaatcgctgtcggtgttcctttccgacaggcataccggcgtgggcggcgacggcgttgtactgatactgcggtcgagtattgccgacgcaaaaatgcgaatgttcaaccttgacggcagtgagagcagtataagcggaaatgcaatccgctgcgtcgcgaaatttctttacgacaatgaaattgtaaaaaaacgcgatatgcggatagagacaaagagcggcgtgaaagagctatctctctccacgcagaacggagcggtatcatccgtcaaggtggacatgggccgcgcagagctgcgccccgaaaaaatccccgtcaatttggcgggagaaagcgtgatagcaaaagaactaaccatcggtggcgatgtgtatgagattacctgcgtctcgatgggcaaccctcacgccgtagtgtttcatgacaatctggatgatcttgatttgagcaaaatagggcccctgtttgaaaacgacgctatgtttcccgacagggtaaacgcggaatttgtcaaagtcgtagccagaaaccgtttaaaaatacgtttgtgggaacgcggcagcggtgaaacgctggccagcggctcagcagcctgcgcttcggctgtggccgcggttctgaacgggcactgcgacaaggacacagacatcaaagtacaactgcccggcggagatttaccatccgttacacggatgaggccgtgtacatga

SEQ ID NO: 57962 - protein, 339 aa, Unknown
  Obtained from environmental sample
  DOMAIN (231)...(335): Diaminopimelate epimerase
  misc_feature (1)..(339): Xaa is any amino acid
MIASLKRKISYIISTSEKGRDPANDSVKIRMRACTLGVPCLTSVDTANALADGLLSGYSEINTELVDINRLRSKRTKLAFTKMHTCGNDYIYFNCFDMEINSPESLSVFLSDRHTGVGGDGVVLILRSSIADAKMRMFNLDGSESSISGNAIRCVAKFLYDNEIVKKRDMRIETKSGVKELSLSTQNGAVSSVKVDMGRAELRPEKIPVNLAGESVIAKELTIGGDVYEITCVSMGNPHAVVFHDNLDDLDLSKIGPLFENDAMFPDRVNAEFVKVVARNRLKIRLWERGSGETLASGSAACASAVAAVLNGHCDKDTDIKVQLPGGDLPSVTRMRPCT

SEQ ID NO: 57963 - DNA, 1551 bp, Unknown
  Obtained from environmental sample
  misc_feature (1)..(1551): n is a, c, g, or t
ttgcataaaagttttcgacggaacagtggatatatgagcgaactggtattagtgctggatttcggcgggcagtataaggaacttatcgcaagcacagtaaggagcttgtccgtatactcacaaataatgccgggcagtacaccggctgacgaggtcaagcagctaaaaccgattggcatcatactgacaggcgggccgaaaagtgtttacttaagtgattcgccaaaatgtgatccgaaaattttttcgttgggtatccccgtcctcggtatttgctacggtttgcacctgatttgccatacgctaggcggcaaggtcgcgccaggcgattccggtgaatacggacgaattaaagtaacgcctgccggaagctcctcaaaattattcggcaaggaaccattcaccgcccttatgagccacagggacgccgcaacgcaactacctgaaagtttccgcgtaacggcaaaaaccgccgcctgcatcgccgcctgcgagaacagcgcaaagaaaatctacgccgtgcagttccaccccgaaaccaagcacaccgagggcgggcgtgaaatactccgcaagtttttatacgatgtctgtaaagcttcaggcgattataaacttgacgattacatagaaacgcaaatagcccaaatacgaaaaacggttggcgataaaaaggcgctgctcgctttgtccggcggagtcgattcatctgtttgcgcaagccttttatctctgggcataccgggacagctaacctgcatctttgttgatcacggcttaatgcgtttaaacgagggcgatgaaatagagcgcgttttttcaaaacgaaacctccgcttcatccgcgttaacgcgcaaaagcgtttcctcgccaaattgaagggcgtgacggagcccgagaaaaagcgcaagatcatcggcgaagaatttatccgcgtgtttgaagaagaatcagcgaagttaggcgatattccttttctcgcgcaggggactatatacccggatgtcgttgagtctggcggcaaatacggcgcggttataaaaagccatcataacgtgggcggacttccggaaaggcttaagtttaccggaatcctggaaccgctgtcggggctttttaaggacgaggtacgcgttatcggcaaaaaactgaagcttccctcttcgattgtaaaccgccagccatttccgggaccggggctcgcgatccgcgtcatgggcgaggcttcggaagaaaagctggaaaccttatgcaaggcggacgcgattctccgcgaagagctggatggtctcaaaagcaggccggatcaatatttttgcgtccttaccgacacacgctccgttggcgttaaaggggacgacaggacatacgatttcgtaatcgccgtcagggcagtaaagacggatgactttatgacctgcgaatacgcccctctgccgcacaagcttttaagccgcctatcatcaaggataacggcggagataccgtccgcgagccgcgttgtttacgatattacatcaaagccccccgctacggtagaatgggaatag

SEQ ID NO: 57964 - protein, 516 aa, Unknown
  Obtained from environmental sample
  DOMAIN (15)...(179): Peptidase C26
  misc_feature (1)..(516): Xaa is any amino acid
MHKSFRRNSGYMSELVLVLDFGGQYKELIASTVRSLSVYSQIMPGSTPADEVKQLKPIGIILTGGPKSVYLSDSPKCDPKIFSLGIPVLGICYGLHLICHTLGGKVAPGDSGEYGRIKVTPAGSSSKLFGKEPFTALMSHRDAATQLPESFRVTAKTAACIAACENSAKKIYAVQFHPETKHTEGGREILRKFLYDVCKASGDYKLDDYIETQIAQIRKTVGDKKALLALSGGVDSSVCASLLSLGIPGQLTCIFVDHGLMRLNEGDEIERVFSKRNLRFIRVNAQKRFLAKLKGVTEPEKKRKIIGEEFIRVFEEESAKLGDIPFLAQGTIYPDVVESGGKYGAVIKSHHNVGGLPERLKFTGILEPLSGLFKDEVRVIGKKLKLPSSIVNRQPFPGPGLAIRVMGEASEEKLETLCKADAILREELDGLKSRPDQYFCVLTDTRSVGVKGDDRTYDFVIAVRAVKTDDFMTCEYAPLPHKLLSRLSSRITAEIPSASRVVYDITSKPPATVEWE

SEQ ID NO: 57965 - DNA, 885 bp, Unknown
  Obtained from environmental sample
  misc_feature (1)..(885): n is a, c, g, or t
atgagaaaacagttttcacttgtttttttaatattacttgccgtttgtattttgggcgcgcttcctttttatttttccggctatatccctaattttacggacgcggtttttgaaagcgtatcaggctttacagccaccggcgcgacaatcttgaaagatatcgaagctcttccgaacgtacttttattctggcgcgcgcttacccagtggctgggcggcatgggaatactgcttcttgtctcaggcagttttcgcgtgcaaaaaaaagaaattatccgcatccttttgtcattctatgccgcccttaccgcgcttcaattcatcttgcttgtaatcttcggcatgaactggtttgacgctttaactcactcaatgtctaccatatccacgggcgggttcagtatcaggaacagcggcatcgcgtattacagcaacgcggcggcggaatggatctgcgtgttcttcatgtttctttccggcattaatttctttcttatctggcgtcttcttttcagaaaatcggatgacattatccgcagtacggaaacaaagatatatgcgggaattatattgatcgcggcggcgattgttaccgcctcgttattttttcaaagatcgcctgacactttgtctgttgacaaagccctgctttttgacgaagccttgttttttgaccaaaccttgcctttttacaaagccttgttttttaaaaaagccatgtcttttccaacagcaatccggcaggcttttttccatgtaacttcaacaatcagcacctgcgggatttttaacgcggattacaattactggccctccgccgctcagggggtaatatttttcttttgttataagaggctgttcaagctccgcggccggaaggaataa

SEQ ID NO: 57966 - protein, 294 aa, Unknown
  Obtained from environmental sample
  SIGNAL (1)...(27)
  DOMAIN (79)...(290): Cation transport protein
  misc_feature (1)..(294): Xaa is any amino acid
MRKQFSLVFLILLAVCILGALPFYFSGYIPNFTDAVFESVSGFTATGATILKDIEALPNVLLFWRALTQWLGGMGILLLVSGSFRVQKKEIIRILLSFYAALTALQFILLVIFGMNWFDALTHSMSTISTGGFSIRNSGIAYYSNAAAEWICVFFMFLSGINFFLIWRLLFRKSDDIIRSTETKIYAGIILIAAAIVTASLFFQRSPDTLSVDKALLFDEALFFDQTLPFYKALFFKKAMSFPTAIRQAFFHVTSTISTCGIFNADYNYWPSAAQGVIFFFCYKRLFKLRGRKE

SEQ ID NO: 57967 - DNA, 1404 bp, Unknown
  Obtained from environmental sample
  misc_feature (1)..(1404): n is a, c, g, or t
atgcgtatcgttattgccggcgccagaaccaccggctcacagttagcaaaattcctcattcaggaaaaacatgacgtatcgcttatagaggcaaacgaagatcgcgccaagcatgtttcaaaccgctatgactgcatggttattcacaacaacgccaacaatgtaaaagcgttaaaggaatcgggaatcgaaaaagccgacgcgctgatctgcgttacaggttacgatgaagttaacatgatcatctgcggtcttgcctcttcgcttgtaagcaaagataaaaaactgataaaaatcgccagagtgtataacgatgattatatgcagcttatccggccggaaggcgggcggctttggggcatcgatcattttattcatccgggcatggaagccgcgtgctcaataatcaaggcgattgaacacggcgtaataggggacattgtttctttttcggacacgccttacgaactcggttcaattgaaattgttaaaggcagcgcgatggacggccttgtccttaaggattaccgaaaacttgtaaagcacgaaagccttgtaactttggtggaacacgacagcgagattttgcttccgtcaggtacaaccgaattaatacacggagaccgtattcatgttcttgcagataacaaaaacctgcctgaaatttacaaactggcgggagatactcaaaagcctatccgcaagatcggcattgcgggaggcagtaaagtaggcatgttgatcgcggaaggattgctggaaaaagacagtatcatttataaaagcattaaaaataaaaatacaaaaaaccacagcgtggtcttttttgataatgactcaaaaagatgttataaacttgccgcccgcttcccttccgcgctggttctgcatgaggatatttccgacgaaagttttgcttcttatgatgaattaagcggcatagactgccttattacctcgacatccaacgatgaactgaacatcattacggcggtatacatgaaatccaagggcattaaacgtactatcgccattgttaacggttccggtcacgcggcaatggccaggcacttgggcgttgacgtagtgatccctatgatgtccgtagtggtagattccattctttctcatttaatgggcagtaacgtaaaagaagtacattctttgggatatgaaaacattgatttaattgaggctgaaatcgaaaagaacgcgcctgtcattgacaagccgatttccgcgttcaaactttcggagggcggccttctgcttcttgtaaacagggacggggtatcttttattcctaagggcgattatgtttttaaggaaggcgaccgcattgtcgtaattgccagtgtggacagccattctgagatagaaagatattggcgctcaaagcaatag

SEQ ID NO: 57968 - protein, 467 aa, Unknown
  Obtained from environmental sample
  DOMAIN (157)...(227): TrkA-C domain
  misc_feature (1)..(467): Xaa is any amino acid
MRIVIAGARTTGSQLAKFLIQEKHDVSLIEANEDRAKHVSNRYDCMVIHNNANNVKALKESGIEKADALICVTGYDEVNMIICGLASSLVSKDKKLIKIARVYNDDYMQLIRPEGGRLWGIDHFIHPGMEAACSIIKAIEHGVIGDIVSFSDTPYELGSIEIVKGSAMDGLVLKDYRKLVKHESLVTLVEHDSEILLPSGTTELIHGDRIHVLADNKNLPEIYKLAGDTQKPIRKIGIAGGSKVGMLIAEGLLEKDSIIYKSIKNKNTKNHSVVFFDNDSKRCYKLAARFPSALVLHEDISDESFASYDELSGIDCLITSTSNDELNIITAVYMKSKGIKRTIAIVNGSGHAAMARHLGVDVVIPMMSVVVDSILSHLMGSNVKEVHSLGYENIDLIEAEIEKNAPVIDKPISAFKLSEGGLLLLVNRDGVSFIPKGDYVFKEGDRIVVIASVDSHSEIERYWRSKQ

SEQ ID NO: 57969 - DNA, 924 bp, Unknown
  Obtained from environmental sample
  misc_feature (1)..(924): n is a, c, g, or t
gtgatcgactacgtcggcgggcgggagggcgtggaagctaggatcattaaggcgataggcgacccagaacagcgctttcgggaggactacctgcggatgctgcgggcggttcgcttcgcggcgcggttcggcttcgacatagaggagcggaccttcgcggcgataagagcaaacgccccgcgcataacggccatctccgccgagcggatctacgccgagatgtgcaaggcgctggtgggcccgaatccgcaccggttcatagagtttctgcacgataccggcctcctcaaacacttcctacccgaggtagagaacctacgcggggtggagcagccggcgcagttccatccggagggcgacgtcttcgtccacacggtgaaggcgctgagcctattgccggaaagcccctcgccggccctggcgtgggcgacgctcctgcacgacatcggcaagcccgccacaatgaccctctccgaccgcatacgcttcaacaaccacaacgtcgtgggcgcggcgatgtctcagaacgtcctgaaacgcctgcgcgccccaaacgcgcttgtcgaagcggtagtcgccatggtggagaaccacatgaacttcattaacgtcagcaaaatgcgcctctcaacgcttaaaaagtttctgtcgagggagacgattcgcgatgagttggagctgcacagggtagactgtttgtcgagccacggggatctggaaaactatcggtttgttgaggaaaaactctccggtttcaaggcggatcagataaagcctaagccgtttgttacggggaaggatttgatagagttggggctaaagccgggtccggcgttcgggaagatactgggcgacgtttacgacctgcagcttgaggaaaagttacgtcgagagaagaggggcttgcggcgttgcgcgggatga

SEQ ID NO: 57970 - protein, 307 aa, Unknown
  Obtained from environmental sample
  DOMAIN (121)...(236): HD domain
  misc_feature (1)..(307): Xaa is any amino acid
MIDYVGGREGVEARIIKAIGDPEQRFREDYLRMLRAVRFAARFGFDIEERTFAAIRANAPRITAISAERIYAEMCKALVGPNPHRFIEFLHDTGLLKHFLPEVENLRGVEQPAQFHPEGDVFVHTVKALSLLPESPSPALAWATLLHDIGKPATMTLSDRIRFNNHNVVGAAMSQNVLKRLRAPNALVEAVVAMVENHMNFINVSKMRLSTLKKFLSRETIRDELELHRVDCLSSHGDLENYRFVEEKLSGFKADQIKPKPFVTGKDLIELGLKPGPAFGKILGDVYDLQLEEKLRREKRGLRRCAG

SEQ ID NO: 57971 - DNA, 387 bp, Unknown
  Obtained from environmental sample
  misc_feature (1)..(387): n is a, c, g, or t
gtgcaaggcgctggtgggcccgaatccgcaccggttcatagagtttctgcacgataccggcctcctcaaacacttcctacccgaggtagagaacctacgcggggtggagcagccggcgcagttccatccggagggcgacgtcttcgtccacacggtgaaggcgctgagcctattgccggaaagcccctcgccggccctggcgtgggcgacgctcctgcacgacatcggcaagcccgccacaatgaccctctccgaccgcatacgcttcaacaaccacaacgtcgtgggcgcggcgatgtctcagaacgtcctgaaacgcctgcgcgccccaaacgcgcttgtcgaagcggtagtcgccatggtggagaaccacatgaacttcattaa

SEQ ID NO: 57972 - protein, 128 aa, Unknown
  Obtained from environmental sample
  misc_feature (1)..(128): Xaa is any amino acid
MQGAGGPESAPVHRVSARYRPPQTLPTRGREPTRGGAAGAVPSGGRRLRPHGEGAEPIAGKPLAGPGVGDAPARHRQARHNDPLRPHTLQQPQRRGRGDVSERPETPARPKRACRSGSRHGGEPHELH

SEQ ID NO: 57973 - DNA, 627 bp, Unknown
  Obtained from environmental sample
  misc_feature (1)..(627): n is a, c, g, or t
gtgtgcgaagggcgaccctcaggttataatcgtcgtttagtcttacaagcccgtttacgttcaggtaatagctcttgtcgtcgtagagcccttcaaagtcgtttccgttgtaggcgtaaagattgtctacgtcaaaggccgcagatattccgcgaaatcgatcgttctgccggggtgatatccaaaaagcgccccttagcgagaattcgcttacgtcccaggcgcccgttatgtcgtagtattcgaatatccgaaacgagttcccgatgttcgcgtttcccaaccacagtccggcgctgccgggggataggtcgatgtccgtgtagacgtagagcgcgttccatcccaagccgttggaatttacaatctggtcgggcagcaggcctacgctcacgcaggccttatcggcttcccagaggcccgggtaggcgactttcacgctcggcaggctcttgtagacttcgggaaacaggacgccccggaagtggcggtcgaatatgccgtagatgccggaatcgtaggcctcgaagaaataggtcggttgcgcggaaacgggtcgcggcagtccgcacgcaacgaggagcgtacagacgcgaacaagtattgatacggcgaggatttttttaa

SEQ ID NO: 57974 - protein, 208 aa, Unknown
  Obtained from environmental sample
  misc_feature (1)..(208): Xaa is any amino acid
MCEGRPSGYNRRLVLQARLRSGNSSCRRRALQSRFRCRRKDCLRQRPQIFREIDRSAGVISKKRPLARIRLRPRRPLCRSIRISETSSRCSRFPTTVRRCRGIGRCPCRRRARSIPSRWNLQSGRAAGLRSRRPYRLPRGPGRRLSRSAGSCRLRETGRPGSGGRICRRCRNRRPRRNRSVARKRVAAVRTQRGAYRREQVLIRRGFF

SEQ ID NO: 57975 - DNA, 1779 bp, Unknown
  Obtained from environmental sample
  misc_feature (1)..(1779): n is a, c, g, or t
gtgcttttggcgatttcgatttttgctgttatcagtatttattccgtgcgaaaatcaagtttcgaagccgccgttatcatggggaaagacaaactttcgggagatatggttcatttcgcgaataggatgcaacttaaatacggacaattaagccttaaagacggcgatttggaagggcaggaaggtgcttccctcaaatatgattatgaactgatagacgaattaagctctgatttgggcatagcggtaaccgtctttgtccgggacggtaatgattaccgcagaataagcaccagcattgtggacaatgcgggaaaacgggcggtggacacttttctgggaacaggcagcgccgcgtatcccgctgtaaactccggccggaaatactcgggagaagcggttattctcggtaaaaattatcttaccgaataccgtcctattatcgactcaagcagcaataatgttatcggtattttatttatcggtaacgaaatgaccgctatcgaagaagtcattgccgccaatacggttagggagattaaactaatcggtgttatcgcggttagtattttggtggcttccgctatagtaaacgcgctgagctgcaaatttatattattaagacctattaattccgcaaccgcaatgctcaaggaaatatccgaaggcgaaggagatatgacaaaacggcttaagctttccagcagggatgaaataggcgatatggtgctgtattttaacgaaaccttggaaaaaatccaaaacatgattagagtcatcaagaaagaagcggtaagccttagcaccatcggaaatgacctgtccagcaacatgacggaaaccgccgccgcggtgaaccagattaccgccaacatccagagcattaagggccgcgtcattaaccagagcgccagcgttaccgaaaccaacgcgactatggaacaggttatcgccaatatcaacaagcttaacggccatgtggaaaaccagagcagaaatgtttcccaggcctcatccgccattgaagaaatggtggcaaatatcagttcggtcaccaacacgctggtcaataacgccgccaatgtaaccgcgttaaaagaagcgtccgaaataggaaaaaccggattgcaggaggtggcgtccgacattcaggaaatatcccgcgagtccgaaggcttgctggagattaactcggtaatggaaaatatcgccagccagaccaacctgctttcgatgaacgccgcgatagaggcggcccacgcgggagaggcgggcaagggcttcgccgtagtcgccgacgagatccgcaaactggcggaaagttccggcgagcagtccaagacgattggaacggtactgaaaaagatagccgaatcaatcaaaaaaataaccaaatccaccgagaacgtactaaccaaattcgaagcgattgactcaggcgtaaaaaccgtttcacagcaggaagaatatatccgcaacgcgatggaggaacagggccaggggagcaagcaggtactgcaaagcgtcagcggtttgaatgagctcacccaactggtaaagagcggttccgaggaaatgcttgagggcagcaaggaagtaatgaatgagagccggaaccttgaaagggtaacgcaggagatcacaggcggcatgaacgagatggcttccggcgcggatcaggtgaacgtggcggtacacaatgtcaatgatatcagcaccaaaaaccgccagagcatagacgctttaatacatgaggtctcgcgctttaaaatagagtaa

SEQ ID NO: 57976 - protein, 592 aa, Unknown
  Obtained from environmental sample
  DOMAIN (182)...(255): HAMP domain
  misc_feature (1)..(592): Xaa is any amino acid
MLLAISIFAVISIYSVRKSSFEAAVIMGKDKLSGDMVHFANRMQLKYGQLSLKDGDLEGQEGASLKYDYELIDELSSDLGIAVTVFVRDGNDYRRISTSIVDNAGKRAVDTFLGTGSAAYPAVNSGRKYSGEAVILGKNYLTEYRPIIDSSSNNVIGILFIGNEMTAIEEVIAANTVREIKLIGVIAVSILVASAIVNALSCKFILLRPINSATAMLKEISEGEGDMTKRLKLSSRDEIGDMVLYFNETLEKIQNMIRVIKKEAVSLSTIGNDLSSNMTETAAAVNQITANIQSIKGRVINQSASVTETNATMEQVIANINKLNGHVENQSRNVSQASSAIEEMVANISSVTNTLVNNAANVTALKEASEIGKTGLQEVASDIQEISRESEGLLEINSVMENIASQTNLLSMNAAIEAAHAGEAGKGFAVVADEIRKLAESSGEQSKTIGTVLKKIAESIKKITKSTENVLTKFEAIDSGVKTVSQQEEYIRNAMEEQGQGSKQVLQSVSGLNELTQLVKSGSEEMLEGSKEVMNESRNLERVTQEITGGMNEMASGADQVNVAVHNVNDISTKNRQSIDALIHEVSRFKIE

SEQ ID NO: 57977 - DNA, 504 bp, Unknown
  Obtained from environmental sample
  misc_feature (1)..(504): n is a, c, g, or t
atgccgcctgtgatctcctgcgttaccctttcaaggttccggctctcattcattacttccttgctgccctcaagcatttcctcggaaccgctctttaccagttgggtgagctcattcaaaccgctgacgctttgcagtacctgcttgctcccctggccctgttcctccatcgcgttgcggatatattcttcctgctgtgaaacggtttttacgcctgagtcaatcgcttcgaatttggttagtacgttctcggtggatttggttatttttttgattgattcggctatctttttcagtaccgttccaatcgtcttggactgctcgccggaactttccgccagtttgcggatctcgtcggcgactacggcgaagcccttgcccgcctctcccgcgtgggccgcctctatcgcggcgttcatcgaaagcaggttggtctggctggcgatattttccattaccgagttaatctccagcaagccttcggactcgcgggatatttcctga

SEQ ID NO: 57978 - protein, 167 aa, Unknown
  Obtained from environmental sample
  misc_feature (1)..(167): Xaa is any amino acid
MPPVISCVTLSRFRLSFITSLLPSSISSEPLFTSWVSSFKPLTLCSTCLLPWPCSSIALRIYSSCCETVFTPESIASNLVSTFSVDLVIFLIDSAIFFSTVPIVLDCSPELSASLRISSATTAKPLPASPAWAASIAAFIESRLVWLAIFSITELISSKPSDSRDIS

SEQ ID NO: 57979 - DNA, 585 bp, Unknown
  Obtained from environmental sample
  misc_feature (1)..(585): n is a, c, g, or t
atgaacctgtctctcgtcgagcacggcttccctgaagtgcctttggtgaaataccgcgacattgtcggctggggaatcatcaggctggcggagcttgccctgccgcaggaggagcgtacaaaagataacatacactgggtcagcaattacgccagacatcttatggagcaacagcccattgataaatcccttgccaaaccatatccgggcataccggaattattggcggaactgaaagcaagaaaaataaaaaccgcggtccttagcaacaagccggatcccgctttacgccgcattatagccggtatttttccggatcatcatttcaacctggtttggggactgcgccatgatgcggctccaaaaccgaatccgacgtcggtctgggaactgctggcggatatgggcgttaccccccatgaggctattctcatgggcgattctgagattgatatggaaacggcccgaaacgccggatgttacccccttggcgtaagctggggctttcgttcccgcgccacaatagaagccgccggcgccgcaaagataatcgacaagcccagcgatttttttactctattttaa

SEQ ID NO: 57980 - protein, 194 aa, Unknown
  Obtained from environmental sample
  DOMAIN (15)...(168): haloacid dehalogenase-like hydrolase
  misc_feature (1)..(194): Xaa is any amino acid
MNLSLVEHGFPEVPLVKYRDIVGWGIIRLAELALPQEERTKDNIHWVSNYARHLMEQQPIDKSLAKPYPGIPELLAELKARKIKTAVLSNKPDPALRRIIAGIFPDHHFNLVWGLRHDAAPKPNPTSVWELLADMGVTPHEAILMGDSEIDMETARNAGCYPLGVSWGFRSRATIEAAGAAKIIDKPSDFFTLF

SEQ ID NO: 57981 - DNA, 1461 bp, Unknown
  Obtained from environmental sample
  misc_feature (1)..(1461): n is a, c, g, or t
atgatccgcagcgcacaggtaatgaaaaaagccgccgccgcgctgagcccgtacatggaaaagaaaaacgatgcgctttcgcccaaaattattctggcaacggtaaaaggcgacgttcacgacatcggtaaaaatattgtcggcgtggttctggcctgtaacggctatcagattattgatttgggggtcatggttcccgccgagcggataattgataccgcggaaaaagaacaggcggccataatcggcctttccggccttatctcgccgtcgctggatgaaatggcacatgtcgcgcgggaaatggaacagcgccgcatgaggattcccctgctcatcggaggcgccgcggcgagcctcgtccataccagcctgcgccttgccccggaatattccggtccggtggtttatgttcccaatgccggaaaggccgccgggatagtccatgccctgctgtccgttacggagcgcccccgttttctgcaaaaccttgaacaaagctaccatgacgccgccagccgccacgaaaccattcaatcccggcttgaaattatcccgcttgagtccgcgcgtaccaataaaggaccagcggcctcgccgatggcggtaacaaatccgcccgcgcccaaaaccaccggcatcattgagctgaacgattatccgctggaccgcgtcattccctacattgactggaatgcttttttggtgcctgtcaccatttcagacgcgcaggcgctactggaacgggttagaaccgaaggtttgctgaaactgcgcggcgttgcgggaattttccccgccgccgccgccggcgatgatgttctcatcggtgacagacaccgtttttgttttttacgcagccagaacaaaaaacccgccgggattttcaactcctgtttggcggattttatcgcgccggtggacggtaggcaggcatcagggaaccctgttgactgggtggggctgtatgccttgagcgccggtttcggcatgggaaataccggtcttgatgactacgatacgctgctgctgacaagtctggcaaacgcgctggcggaggcttttgtcgaagaaatccacctccgtatccggcgggaatggtggggctatgcgccggatgaatccctctctatcgaagaaatcctgaaaagcggctatacaggcatacggcccgcctttggttatccctcttgtcccgaccacgaggataaacgtatagcctttgaattgcttgaagcggaaaaacgcagcggcttaaaactaacagatacggcaatgatcattcccgccgcctcagtatgcgggatgttttttgccaatcccacggcgtattacttcggtattggaaccataggcgaagaccaactggctgattgggcggggcgcaaaggcatcagtattgaggaagcnccggcggcggaccggtcaccatccgtttgttccccgacgataattcaataa

SEQ ID NO: 57982 - protein, 486 aa, Unknown
  Obtained from environmental sample
  DOMAIN (28)...(152): B12 binding domain
  misc_feature (1)..(486): Xaa is any amino acid
MIRSAQVMKKAAAALSPYMEKKNDALSPKIILATVKGDVHDIGKNIVGVVLACNGYQIIDLGVMVPAERIIDTAEKEQAAIIGLSGLISPSLDEMAHVAREMEQRRMRIPLLIGGAAASLVHTSLRLAPEYSGPVVYVPNAGKAAGIVHALLSVTERPRFLQNLEQSYHDAASRHETIQSRLEIIPLESARTNKGPAASPMAVTNPPAPKTTGIIELNDYPLDRVIPYIDWNAFLVPVTISDAQALLERVRTEGLLKLRGVAGIFPAAAAGDDVLIGDRHRFCFLRSQNKKPAGIFNSCLADFIAPVDGRQASGNPVDWVGLYALSAGFGMGNTGLDDYDTLLLTSLANALAEAFVEEIHLRIRREWWGYAPDESLSIEEILKSGYTGIRPAFGYPSCPDHEDKRIAFELLEAEKRSGLKLTDTAMIIPAASVCGMFFANPTAYYFGIGTIGEDQLADWAGRKGISIEEAPAADRSPSVCSPTIIQ

SEQ ID NO: 57983 - DNA, 1656 bp, Unknown
  Obtained from environmental sample
  misc_feature (1)..(1656): n is a, c, g, or t
atgacagaatcggcacgagtgctggtagaaaccatttttgacacactcaacgccaaagccgccctgttcgccataacgaggctgctggaagaacggaatattgatgttcccattatggtttccgccacggtttcaggcgattcgggcaggctgctttccggtcaaacactggaagcgttctgcgcgtcaatactccacgcggagccctgggctgtaggtctgaactgttcctttggcgcgggaaaactgctgccccatgtccgcctggtatccggtatagttccctgtctggtcagcgcctaccccaatgcggggctgcccaatcaacttggcggctatgatgaaacccctgaaacaatggcgtctcacattgaagtttatttgaaagaagggctgatcaatattgcgggcggctgctgcggttccacgccggcgcatattgcggctatcgcggcgaaggcggcacaataccagccccgcgcgctgccgcagacggttcggccatcttgttttgcggggcttgaactgcttacccttaacaatccctcttcgctcaccctgatcggcgaacgcaccaacgttgcgggaagccgcaaattcctgcgtattatcagcgaaggcgaatttgaagacgcggcggattttgcgcgggatatgattgaagacggcgcggctattatcggcgtgggtatggatgacgccatgctggacgcggagaaatcaatgacggcgtttttgggcgccgccctgtttgatccgtacattgccaaagttcccgttatgatcgacagttcccgctggaacgttattgaagcgggcctgaagcgcttgcagggaaaagggctggtcaattcaataaacctgaaagacggcgaggcggaatttctgcgccgggcgtcgctggtcaagcgctacggcgcggcggtggtggtgatgcttattgacgaacaggggcaggcggtcagttatgagcggaaaattgaaatagccggacgcgcctatcgtctgctgtttgaaagcggttttccgcctgaaaatatcgtatttgatcccaacatactcgccgttgcgaccggaatcggcgaaagtgattcctgcggtattgattttatccgcgcctgcgcgtggattcgggacaactgcccccgcgttcagatttccggcggcatttcaaacctttcgtacagtttccggggaaacaaccccgtgcgggaggctatgcacagcgtttttcttttccatgccggagccgctggcctgactatggctattgtgaatccggcggcgctaaaggcatataacgacattgaagaaaatcttcgcaatgccgttgaagatgttattcttaaccgcagcccgggcgcggctgaccgcctccttaaactcgccgaaaaaaaaaacagcccatcaaccccctcaactcaacactccccactgaccaatgattggcggaatgagtccgccgaagcccgcattattcacgcgctggtaaaaggcattgacggttttattgaagcggatgtactggaactcatgaacagcaagggagattcaaccggtaaaacagcgctggaaattgtcgaaggcccgctgatggacggcatgaaagaagtgggaaaacgctttgacgaagggacaatgtaccttcccagatga

SEQ ID NO: 57984 - protein, 551 aa, Unknown
  Obtained from environmental sample
  DOMAIN (484)...(551): B12 binding domain
  misc_feature (1)..(551): Xaa is any amino acid
MTESARVLVETIFDTLNAKAALFAITRLLEERNIDVPIMVSATVSGDSGRLLSGQTLEAFCASILHAEPWAVGLNCSFGAGKLLPHVRLVSGIVPCLVSAYPNAGLPNQLGGYDETPETMASHIEVYLKEGLINIAGGCCGSTPAHIAAIAAKAAQYQPRALPQTVRPSCFAGLELLTLNNPSSLTLIGERTNVAGSRKFLRIISEGEFEDAADFARDMIEDGAAIIGVGMDDAMLDAEKSMTAFLGAALFDPYIAKVPVMIDSSRWNVIEAGLKRLQGKGLVNSINLKDGEAEFLRRASLVKRYGAAVVVMLIDEQGQAVSYERKIEIAGRAYRLLFESGFPPENIVFDPNILAVATGIGESDSCGIDFIRACAWIRDNCPRVQISGGISNLSYSFRGNNPVREAMHSVFLFHAGAAGLTMAIVNPAALKAYNDIEENLRNAVEDVILNRSPGAADRLLKLAEKKNSPSTPSTQHSPLTNDWRNESAEARIIHALVKGIDGFIEADVLELMNSKGDSTGKTALEIVEGPLMDGMKEVGKRFDEGTMYLPR

SEQ ID NO: 57985 - DNA, 1473 bp, Unknown
  Obtained from environmental sample
  misc_feature (1)..(1473): n is a, c, g, or t
atgaccgagctgttccgccaacacttcataacaaatccggactccacctccttctactgcatctgcgaaatcatagacgacatgtggcaacgcctgttgcaaccctccatagagcaagacgtgaaggagggtataagggaacaggccgagagctgggccgtaaaagagatcgtgagcgggctttcgaagagattcgccgacgagcaggcggcgccctccgtgttcgtggtggacatgtccggcaaaaaagactacatcgtggtggcggtaagcgcaagcggcagcctcttaggcgctaccaccgagaaaaaacccggcgacggccggtcgttcctcaccgagcggctacgccaattcttcagccggcatagaccgtcgcgcattcttgctaaagagggcggcgccgaaattccggaaaactttataaaacaggcgaacgactgcctcacaaatcgaatagaagtgacaaaagtgcgcgccgcgtcgggcggcggcgacccgtgcgcctccgaatacatgaagcaacgcgaattcgcgatactggacgaccgcacgaagcggctctacggactggcgatcatgttcctgcagccggtttcgctcatcacccgcctcggcctatccttctacacggtgcacccgttgcaacggtcgctgtgttccgaaaaattcactagtgctgtcgacagcgtcgttgagtacgctcaactccttgccggcacctccgtaaaagatattgccgactcgcccatagcgaagttccgttgcgtaaccaaagaactcctcgcggccgtcaaggcgcacgacgccgccgacccgataagttccaaaaacgacctgttgcaggttaaaggcatgacggagaccgcgttcagaaacatttccggcttcgtactcataccgaacgccgaaaaccccatagacagatccaccgcgcaccccgacatgttcccgttcatagaacaagcggtaaacgatctgacggtctcccgtgaaaccataatctcaaacccggacgtcctgctgtcgcaaccgatagacgacccgacgcagagggcctacgtgcaaagaaaacttatcccgcaactgcaagtcgcccaacgctaccaaggcatagtctcgcagaagtcaaagcggagagtaaaactaggcgaggtcaaagagggcgcggtagtctccggacgagtgacgaacatcaccccattcggcgtattcgtaaacataaacgccgtctgcgacggcctgatccacatatcgcaactaaccgaccaatacgtagaaacacccgaccaagtagtatcggtaggggatagggtggacgtacgcatcctgaaagtagacacaaagaagcgcagaatctcgctatctcttaaaaacatcggcggcgtagggaagttaacggccggcggatcgaaagttaagcctacaaagggacagttggataatctggcggaacactttaagaataggtaa

SEQ ID NO: 57986 - protein, 490 aa, Unknown
  Obtained from environmental sample
  DOMAIN (385)...(458): S1 RNA binding domain
  misc_feature (1)..(490): Xaa is any amino acid
MTELFRQHFITNPDSTSFYCICEIIDDMWQRLLQPSIEQDVKEGIREQAESWAVKEIVSGLSKRFADEQAAPSVFVVDMSGKKDYIVVAVSASGSLLGATTEKKPGDGRSFLTERLRQFFSRHRPSRILAKEGGAEIPENFIKQANDCLTNRIEVTKVRAASGGGDPCASEYMKQREFAILDDRTKRLYGLAIMFLQPVSLITRLGLSFYTVHPLQRSLCSEKFTSAVDSVVEYAQLLAGTSVKDIADSPIAKFRCVTKELLAAVKAHDAADPISSKNDLLQVKGMTETAFRNISGFVLIPNAENPIDRSTAHPDMFPFIEQAVNDLTVSRETIISNPDVLLSQPIDDPTQRAYVQRKLIPQLQVAQRYQGIVSQKSKRRVKLGEVKEGAVVSGRVTNITPFGVFVNINAVCDGLIHISQLTDQYVETPDQVVSVGDRVDVRILKVDTKKRRISLSLKNIGGVGKLTAGGSKVKPTKGQLDNLAEHFKNR

SEQ ID NO: 57987 - DNA, 837 bp, Unknown
  Obtained from environmental sample
  misc_feature (1)..(837): n is a, c, g, or t
atggtcagaatcggccgagccgggaacgcgtctttggaagaagtggtcatgggcctgcgcgtccgcggcgactttttttccgccgacacgaagatcgacagcagccagatatacgcggcaagccgcctcgtgtcgcaggtgacaggggtgaaggttcagccgaacaaggccattgtcggcgacaacgcgttcgcgcacgaggcggggattcaccagcacgggatattggcgaaaagggaaacctacgagatcatgactccgcagtcaatcggcattcctcaaaaccgcatggtgcttggaaaacattcgggccgccacgcttttgaggagcgccttaaagatctgggcctgagcgttacgccggaagcgttagaaaaagtatttgcggacttcaaagaccttgccgacaaaaagaaagtggtcaatgaccgcgacattgaagcccttgtaatggacaaggcggtctccgttcccgaaacatggaagctggatcattgggctgtaaacacgggctccgctttgggcgcggcgggcgttatacgcttaaagcacaaagacggcgattttaaaaaactggtctgcatgggagacggccccatcgactcgatcttcaaagcgattaacgagatttcaggcagagagccggagctggagctttatgaaatcgacgccgttacgggcggttcgtcatctcagggcaaagcgatggtaaaaatcgcgatggacgggcggcgctggaacgggcgcggcgtttccaccgacgtaattgaggcttcgataatggcttacctttcggcgattaacgcgatggagtgggatttggcaagtgagaagtga

SEQ ID NO: 57988 - protein, 278 aa, Unknown
  Obtained from environmental sample
  DOMAIN (140)...(271): LeuA allosteric (dimerisation) domain
  misc_feature (1)..(278): Xaa is any amino acid
MVRIGRAGNASLEEVVMGLRVRGDFFSADTKIDSSQIYAASRLVSQVTGVKVQPNKAIVGDNAFAHEAGIHQHGILAKRETYEIMTPQSIGIPQNRMVLGKHSGRHAFEERLKDLGLSVTPEALEKVFADFKDLADKKKVVNDRDIEALVMDKAVSVPETWKLDHWAVNTGSALGAAGVIRLKHKDGDFKKLVCMGDGPIDSIFKAINEISGREPELELYEIDAVTGGSSSQGKAMVKIAMDGRRWNGRGVSTDVIEASIMAYLSAINAMEWDLASEK

SEQ ID NO: 57989 - DNA, 936 bp, Unknown
  Obtained from environmental sample
  misc_feature (1)..(936): n is a, c, g, or t
ttgggcggaattaaaaaattcatgcccaggcgcctgggcccgggctttataagcactttgcttgatttgttgaacagcgaacctgacgcgcccgctgataaccccgtgacgccgcggcccgcgtggtggaaagaggcggtattctatcagatttacccgcgcagtttcggaaaaaacggcgcgtcctgcgtcctgcgcggcatcttgtcaaagctcgactacctccgcgatctcggcgttgacgccgtgtggttaagccccgtgtacgattcgccgaatgacgacaacggttatgacatccgcgattattataaaattttgcccgagttcggcgctatggaagacatggacgcgctcatcgccggactgcacgaacgcggcatgaagctggtcatggatcttgtggtcaaccatacttcggacgaacacccctggtttaaggcggcgttacgcgatgagaaatcgccgtaccgggatttttatttcttccgcaaatcaggaggcaggccgcccaacaactggacttcttttttcagcggcccggcgtggaactattatccaaagcaggatgtttgggcgctccacctgttctccaaaaagcaaatggatttaaactgggaatgtcccgcgttacgcgaagagatttacaaaatggtgcgctggtggctggccaaaggcgttgacggcttccggcttgacgttatcaattatatttccaaaaaccccggccttaaaaacggcgatccctttatcggctcgctgctgacatataccggcattgaacattatttttacgggccgaaactccacgaatacctgaaagaactccgcgccaaagcgtttgacccctacaacgcgttctccgtcgggggaaacgcccggcatcggagtacggacggggcgccttttaacggacgattaccgccgcgagcttga

SEQ ID NO: 57990 - protein, 311 aa, Unknown
  Obtained from environmental sample
  DOMAIN (50)...(310): Alpha amylase, catalytic domain
  misc_feature (1)..(311): Xaa is any amino acid
MGGIKKFMPRRLGPGFISTLLDLLNSEPDAPADNPVTPRPAWWKEAVFYQIYPRSFGKNGASCVLRGILSKLDYLRDLGVDAVWLSPVYDSPNDDNGYDIRDYYKILPEFGAMEDMDALIAGLHERGMKLVMDLVVNHTSDEHPWFKAALRDEKSPYRDFYFFRKSGGRPPNNWTSFFSGPAWNYYPKQDVWALHLFSKKQMDLNWECPALREEIYKMVRWWLAKGVDGFRLDVINYISKNPGLKNGDPFIGSLLTYTGIEHYFYGPKLHEYLKELRAKAFDPYNAFSVGGNARHRSTDGAPFNGRLPPRA

SEQ ID NO: 57991 - DNA, 1065 bp, Unknown
  Obtained from environmental sample
  misc_feature (1)..(1065): n is a, c, g, or t
atgaaagcattacaaccacaaataaataaggaagacaaaaagttaatggaaaagttgttatcagcaggccacattgaacacaaatatgcggtacggctgcgaacagtgttattgagggcacaaggcgaaggaaccggcgatattgctaaatttttgggaatacatcaatcctccgtaagtgagtatataaaccgatataatgagcacggtattgattcacttttacgggacaagacccgcaagccgggaaagaaaccaataagccaggatataataaacaaagtctaccgcctggcgtgcaatgagaaaccaaaggatgaaacccattggagttgccggacattagcacggcgcgtagggatctcgcataccaaagtaaaccagatattgcacgaacagggattacaaccgcaccgggtggcagaacggaattacagtaatgatattgattttgaaacgaaactcattgacgtggtgggattgtaccttaaaccgcctaaaaacgcgataatattgtgtatagatgagaaaagccagatacaggcgctggaacggagccagccggtactgccgatgatccggaatgtccccgagcggcaaagcgtcgactatctgcggcacgggacgacaacgctttttgcggcgttggacgtgttaagcgggaatgtcatcggcgaatgcagcgagcggcataccgctgaagattacatccgctttttgaagaaggtggacaaggcatgcgcgaaaaaaaaggtgctgcatattattacggataacctgtcggcgcataaaacgcccgcggtgtacgattatcttgaaacccggccggggaggtttgtactgcactttatcccgacccattcatcatggctcaatctggtggaacggtggtttgcggagataacgaacaaacggatacggcgtggaagctttgaatcggttccgcaattgatacgggcaataaaagattacatcaagacatggaacaagtcagggcgttcatttacctggacaaaaacacctgaagaaattcttgcaaaaacaaacaaagcgaaatcattttga

SEQ ID NO: 57992 - protein, 354 aa, Unknown
  Obtained from environmental sample
  DOMAIN (192)...(346): Integrase core domain
  misc_feature (1)..(354): Xaa is any amino acid
MKALQPQINKEDKKLMEKLLSAGHIEHKYAVRLRTVLLRAQGEGTGDIAKFLGIHQSSVSEYINRYNEHGIDSLLRDKTRKPGKKPISQDIINKVYRLACNEKPKDETHWSCRTLARRVGISHTKVNQILHEQGLQPHRVAERNYSNDIDFETKLIDVVGLYLKPPKNAIILCIDEKSQIQALERSQPVLPMIRNVPERQSVDYLRHGTTTLFAALDVLSGNVIGECSERHTAEDYIRFLKKVDKACAKKKVLHIITDNLSAHKTPAVYDYLETRPGRFVLHFIPTHSSWLNLVERWFAEITNKRIRRGSFESVPQLIRAIKDYIKTWNKSGRSFTWTKTPEEILAKTNKAKSF

SEQ ID NO: 57993 - DNA, 780 bp, Unknown
  Obtained from environmental sample
  misc_feature (1)..(780): n is a, c, g, or t
atggccgaggacattgccgctacgctcttccttatttgcggcgtctttatcgctctaatgaacatagaagagattttgaataacgcgggggatatgccggacgcggtcgtctacctgaacgacggggtgtccggcgactcggcgcaacggggcgggcttattgattccataaaaaagatgcccggggtaaaagcgttggttttccagagcaaggacagcgcgtggagccgttttaaggcgatgtacggcgcggagatgttggaggcggtggacgagaacccgtttgccgcgtctatcgacatcacgctctacgagagcagccagacctctcaggccgccgccgagttgcaggagaagatatcgacgcttggcggcgtggagtccatgcgttactcgcgggattggtttgactatataaaaacggtgcgcgaccgcttctacataatatcgatagcggcgggcctaataatccttctcgcgttgcacgcaatcatctccaatacgataaagctgaccatatacgctcgccgcgaccttgtacggaacatgcattacgttggcgccaccgacctgttcattaagatgccgttcctcttggaggggatgctgcaaggtttcataggcggagtgctttgcgtaggcgttatgatcgcggcacgggtggttctgtcgaatatttccataaattggcacttttcctatttgccgttcgtcgtcgtcataggggtatttttcgggtggctcggaagcaggctcgcggtaagcaaatttctggtatag

SEQ ID NO: 57994 - protein, 259 aa, Unknown
  Obtained from environmental sample
  DOMAIN (96)...(258): Predicted permease
  misc_feature (1)..(259): Xaa is any amino acid
MAEDIAATLFLICGVFIALMNIEEILNNAGDMPDAVVYLNDGVSGDSAQRGGLIDSIKKMPGVKALVFQSKDSAWSRFKAMYGAEMLEAVDENPFAASIDITLYESSQTSQAAAELQEKISTLGGVESMRYSRDWFDYIKTVRDRFYIISIAAGLIILLALHAIISNTIKLTIYARRDLVRNMHYVGATDLFIKMPFLLEGMLQGFIGGVLCVGVMIAARVVLSNISINWHFSYLPFVVVIGVFFGWLGSRLAVSKFLV

SEQ ID NO: 57995 - DNA, 1653 bp, Unknown
  Obtained from environmental sample
  misc_feature (1)..(1653): n is a, c, g, or t
ttgcgtaggcgttatgatcgcggcacgggtggttctgtcgaatatttccataaattggcacttttcctatttgccgttcgtcgtcgtcataggggtatttttcgggtggctcggaagcaggctcgcggtaagcaaatttctggtatagcgctcgcggcgcggtgttgcgtggcggtggttataatagccgccgcgcactattcgccgttatttgcgctgcccgacagctccggcgccgctcaaaagaaatcggcgccgtcagcgcaaaagggtattgatcaacagaaatctgcgccgtcgccgcagaagagcgccggtcagcaaaaatcggcgccgtcgccgcagaagagtgttagtcagcagaaatcggtatcgccgccgcagaagagcgctaatcagcagaaaacagcgccggcgtcgcagaaaggcgctaatcaaaaaaaatccgcgtcgccgtcggcacctaaaaccgcggatcaaaagaaatcagtgtcaacatcggcgcagcaaagatcgagcgcggagccgtcaagccccgccgtcgccgccgtggagaaagagctgagcaagacccaaggcacgttagactccataaaagcggagcttgaacgcggcaggcagcgcttcaaggagctgcagcacgaggaggggaactacctgagtcgcttggagcagatagagaaaaacatctactcctccggcaaatacgcggatctcgtgcagaaacagatcgacacgacggaaatagtgatcgagacgctcggcgactccctgactagggcggaggccgacctataccgcgcccgcgagttgatgaagaggcggctgcgcaacgcccaaatgacaggcgacatgaataggctgcaaatgctgcttacctccggcaacccgtcagagtttatccgccgtgtgcgctattttcaggatctgaaccgccacgacaggctcctcgccgcgtctatcaaggagagcatcgtcttggtgaacgagaatcggagcgctatggaggagaatagggacaaacttgtgaagctgttgtcggacaagaagagggagcagcaggttttggcggcggaggaggcgcagaggcgtacggttctttcggacattcgcaccaagaagagcgcccacgaagcgatggtggcggaactggaggaggctcagaatgaactggacgcgctgataaagacgttggaaggcaggcgtaaaaaggtcaaagaggaggaggaagagcgcagggcggccgtcagtttcgagaataggaaagggaagctgccgtggccgttgcgcggcgaggtagtgagaaagttcggtaacgtggtgcatcccgtctacaagactataactccgaataacggcatagacatagccgccaagaaaggcgcgtcggtggcgagcgccgccccgggcgaagtggcgcttgtaaagtggatgcggggttacggcaggtgcgtattcatagaccacagcggcggctactacaccctatacgcccacctggacgaggtgtccgtggcggaaaacgccaaagtggcctccggcgcggagatcggcaaagcgggggagacggggactaccggcggccctaagctgcactttgaaataaaacttagggcggagtcgttgaatccggaggagtggttggagaaatga

SEQ ID NO: 57996 - protein, 550 aa, Unknown
  Obtained from environmental sample
  DOMAIN (449)...(544): Peptidase family M23
  misc_feature (1)..(550): Xaa is any amino acid
MRRRYDRGTGGSVEYFHKLALFLFAVRRRHRGIFRVARKQARGKQISGIALAARCCVAVVIIAAAHYSPLFALPDSSGAAQKKSAPSAQKGIDQQKSAPSPQKSAGQQKSAPSPQKSVSQQKSVSPPQKSANQQKTAPASQKGANQKKSASPSAPKTADQKKSVSTSAQQRSSAEPSSPAVAAVEKELSKTQGTLDSIKAELERGRQRFKELQHEEGNYLSRLEQIEKNIYSSGKYADLVQKQIDTTEIVIETLGDSLTRAEADLYRARELMKRRLRNAQMTGDMNRLQMLLTSGNPSEFIRRVRYFQDLNRHDRLLAASIKESIVLVNENRSAMEENRDKLVKLLSDKKREQQVLAAEEAQRRTVLSDIRTKKSAHEAMVAELEEAQNELDALIKTLEGRRKKVKEEEEERRAAVSFENRKGKLPWPLRGEVVRKFGNVVHPVYKTITPNNGIDIAAKKGASVASAAPGEVALVKWMRGYGRCVFIDHSGGYYTLYAHLDEVSVAENAKVASGAEIGKAGETGTTGGPKLHFEIKLRAESLNPEEWLEK

SEQ ID NO: 57997 - DNA, 354 bp, Unknown
  Obtained from environmental sample
  misc_feature (1)..(354): n is a, c, g, or t
ttgcgctgcccgacagctccggcgccgctcaaaagaaatcggcgccgtcagcgcaaaagggtattgatcaacagaaatctgcgccgtcgccgcagaagagcgccggtcagcaaaaatcggcgccgtcgccgcagaagagtgttagtcagcagaaatcggtatcgccgccgcagaagagcgctaatcagcagaaaacagcgccggcgtcgcagaaaggcgctaatcaaaaaaaatccgcgtcgccgtcggcacctaaaaccgcggatcaaaagaaatcagtgtcaacatcggcgcagcaaagatcgagcgcggagccgtcaagccccgccgtcgccgccgtggagaaagagctga

SEQ ID NO: 57998 - protein, 117 aa, Unknown
  Obtained from environmental sample
  misc_feature (1)..(117): Xaa is any amino acid
MRCPTAPAPLKRNRRRQRKRVLINRNLRRRRRRAPVSKNRRRRRRRVLVSRNRYRRRRRALISRKQRRRRRKALIKKNPRRRRHLKPRIKRNQCQHRRSKDRARSRQAPPSPPWRKS

SEQ ID NO: 57999 - DNA, 984 bp, Unknown
  Obtained from environmental sample
  misc_feature (1)..(984): n is a, c, g, or t
atggacgcaaagtacatttccatagacgccttctacaaggtgatgggaagccccgtgctacaaccggcaaatggttttgagatgggtagcgccgtgactttccggtggggcttcaagcgcagtctagtgaaagttaaagacacgccaaagaccgcgccgaaggccgaaacgttcgcaccttggacggcgtcgaccgatacggttgcggagcctgccttgccggacttggaattcttccaggacgaggacgagtcggaagagatctacgagaccatagagacagacatattgattataccgccgctgccgccgacaccggaaacaccgccgccatcatcgccggaaacgccgccgccgacaccggaaacgccgttgccgccatcgccggaaacgccaccgcctacaccggaaacgccgttgccgccatcgccgccggaaccggaaacgaaaacgtcgtctaatcagcttaccgcggaggaaacgcaaaagtttggcgtcgcccagcgcgcgatcaatttcatcaccggcagcgcaaacctgacgggtagctcttacgccccgttggatacgatagcgaaccttctgtcgcagcacccggacatccgctacgaagtgcagggccacaccgattcgcagggcgatgatatgtacaacctgctgctctcgtcggaacgcgccgcgatagtgaaatactacctaatgttgcgcggcgcgccggaatcgagcttagtggcggtgggctacgggaaaaacattcccatagccgacaacaagacagtggtaggccgagcgctgaacaggcgcgtagagttcgtgccgatacaatcgcaggagcactacgactgggttaagaggttcgaactggaaatgatacctaggcttactcatagggtaattattcacaagaagaagatacttgagccgaagatcgaggggcaaatcatttctccaaccactcctccggattcaacgactccgccctaa

SEQ ID NO: 58000 - protein, 327 aa, Unknown
  Obtained from environmental sample
  DOMAIN (172)...(267): OmpA family
  misc_feature (1)..(327): Xaa is any amino acid
MDAKYISIDAFYKVMGSPVLQPANGFEMGSAVTFRWGFKRSLVKVKDTPKTAPKAETFAPWTASTDTVAEPALPDLEFFQDEDESEEIYETIETDILIIPPLPPTPETPPPSSPETPPPTPETPLPPSPETPPPTPETPLPPSPPEPETKTSSNQLTAEETQKFGVAQRAINFITGSANLTGSSYAPLDTIANLLSQHPDIRYEVQGHTDSQGDDMYNLLLSSERAAIVKYYLMLRGAPESSLVAVGYGKNIPIADNKTVVGRALNRRVEFVPIQSQEHYDWVKRFELEMIPRLTHRVIIHKKKILEPKIEGQIISPTTPPDSTTPP

SEQ ID NO: 58001 - DNA, 702 bp, Unknown
  Obtained from environmental sample
  misc_feature (1)..(702): n is a, c, g, or t
atgtcggttgacttgagcacctaccttatgcacagaaaaaattcgcaggtgctttttgaaggcgctcagggaacccttctcgatcttgatcttggaacttatccctatgtgtccagcggaatgtcatgcgctgccggcgcggcggtaggcggctgtataggaccgcgctccatcgacaaggtgttaggcgttttcaaagcctattccacacgcgtaggaaacggcccgctcccctcggaattcgatccgtcttccgaagacgaactttgccgctttgtccgcgaaacaggccgcgagtacggcgtgacaaccggaaggcctcgccgctgcggttacctcgaccttgtttccctgcgctacgcctgccttaccaactcaattgacagtcttgtaatgacccacctcgacgtttacgacacttttgaagaaatcaaggcgtgcatcgcctaccgcatcggcgataaaatcgtggaaaacttcccggcctcaattgaagaacttaacaacgcaaaaccggttctgcggactttccccggctggaagaaatcccttgcgaacgcgctaacctacgaggaattccccgtcgccgcgatggaatacataagttttattgaacgtttctgcgaaactccggttgacattgtttctgtcggctacgaccgcaaagcgacgataatccgcaagagcccttgggttcgttaa

SEQ ID NO: 58002 - protein, 233 aa, Unknown
  Obtained from environmental sample
  DOMAIN (5)...(226): Adenylosuccinate synthetase
  misc_feature (1)..(233): Xaa is any amino acid
MSVDLSTYLMHRKNSQVLFEGAQGTLLDLDLGTYPYVSSGMSCAAGAAVGGCIGPRSIDKVLGVFKAYSTRVGNGPLPSEFDPSSEDELCRFVRETGREYGVTTGRPRRCGYLDLVSLRYACLTNSIDSLVMTHLDVYDTFEEIKACIAYRIGDKIVENFPASIEELNNAKPVLRTFPGWKKSLANALTYEEFPVAAMEYISFIERFCETPVDIVSVGYDRKATIIRKSPWVR

SEQ ID NO: 58003 - DNA, 567 bp, Unknown
  Obtained from environmental sample
  misc_feature (1)..(567): n is a, c, g, or t
gtggggggtacgttggtggttagcaaggcaataaagacgaatcccttttataaagagaaactggaggaatttggctttgacaaggttactacgactgacgcagacagcgatgctcttaattctatcattcgggaaatgaagccggaactgatgattgttgaggcaaggtttaatgacaacgctacggcttttaatatgggcgaattgttacgaattttcccaaagctaaacatagctgctgtgtcgctggacaggtatagcgaagagcttggaatgtgcttaattaagaacggcgttaattcctacattgcatggtcggaaggcattgacgaatttaaaaaaggaatgaaagcaatccgggacggaataagttatgtttccccaggagtattggagaggatagagctaaggagcgaagacggtgagccggcaaataggcttgcgaaaagacaaaatgaagtttcacggcttacttgcagcggttatacggaggacgaaacggccgataccctgcacatttcaaggacaacggttgtaaagcacaagacaaatatttcaggaatatga

SEQ ID NO: 58004 - protein, 188 aa, Unknown
  Obtained from environmental sample
  misc_feature (1)..(188): Xaa is any amino acid
MGGTLVVSKAIKTNPFYKEKLEEFGFDKVTTTDADSDALNSIIREMKPELMIVEARFNDNATAFNMGELLRIFPKLNIAAVSLDRYSEELGMCLIKNGVNSYIAWSEGIDEFKKGMKAIRDGISYVSPGVLERIELRSEDGEPANRLAKRQNEVSRLTCSGYTEDETADTLHISRTTVVKHKTNISGI

SEQ ID NO: 58005 - DNA, 954 bp, Unknown
  Obtained from environmental sample
  misc_feature (1)..(954): n is a, c, g, or t
atggaaagagactgccgcatggtggtgttagagggtgaagctttctggtggttcggcgctgactacggcggggggctgccaaaacaactgtacattctcaatcccaggaaactccaacttgagggagaggggttggacgtgcaggattgtgtcgcaaataaaaaacggcgctggttctatcatgccggaaccgaattagtacctatcttttctgatgagcttgttcattttcgggattggaacccgtggaaccctctgcgcggtgttaatcctcttgtctctttaactcttgaacttgaacaagatttttatgccaataaagccaattctaccttactcaaaaataacgctattccccaggggcttctcaaaactgaacagaccctgcgaccggaagaagcggacgcattagaacggagatgggagagcaaatacggacaggcaaaggcggggcgaaaaatcgccgtgcttggcaagggaaccagttttgaggctctatcattcaatcctgatgttgtcaaattatttgaactaaaacgctggaacttgtacacgatattggcaaagtacggtataccgccgagggttgcaaatatctctgacaggtctacggcgttaagcggcaaagatactaaagaacaacattcggcattttggcaatacacgttaattcccctgttgagacaatttgaacaaacattagaaagccaattttttatgcgtttcggctgncaggaaaacggaaggtntgatctctgggatattccagagcttcaagaaaatgaagacgcacaaagcaagcgtgatatagcggaaataaacgcagggataaaaacgattaacgatgtactcaaagaacgtgggaaggagcttaaaccctggggtgacgtatggcatcgcccaaccaatttaaaaacatatgaccgcaaagatgaggctaagggcggtgaatag

SEQ ID NO: 58006 - protein, 317 aa, Unknown
  Obtained from environmental sample
  DOMAIN (10)...(285): Phage portal protein
  misc_feature (1)..(317): Xaa is any amino acid
MERDCRMVVLEGEAFWWFGADYGGGLPKQLYILNPRKLQLEGEGLDVQDCVANKKRRWFYHAGTELVPIFSDELVHFRDWNPWNPLRGVNPLVSLTLELEQDFYANKANSTLLKNNAIPQGLLKTEQTLRPEEADALERRWESKYGQAKAGRKIAVLGKGTSFEALSFNPDVVKLFELKRWNLYTILAKYGIPPRVANISDRSTALSGKDTKEQHSAFWQYTLIPLLRQFEQTLESQFFMRFGXQENGRXDLWDIPELQENEDAQSKRDIAEINAGIKTINDVLKERGKELKPWGDVWHRPTNLKTYDRKDEAKGGE

SEQ ID NO: 58007 - DNA, 1230 bp, Unknown
  Obtained from environmental sample
  misc_feature (1)..(1230): n is a, c, g, or t
atgggaacttcggtagtctttaagcctacggcggtacaaaaacaagccctttcacttataaagagcggggctatacatatattgctttatggcggttcccgttccggcaaaactaccgtactggttatggtgataattttccgcgctttgatgtatgccggttcccgccatttgatttgcagataccgcgctaaagacgcacggtcttctgtactgcgggagactttaataccgtggcttgataataccattggcaaaaacggttatacctacttggcgcatgaaagcatgattactttatacaacggttctgaaatttggattgggggattgggcgatagagagcaagcggacaaaatactcggacacgagtattgcacaatatattttaatgaaatatcgcaactttcatatatcgcagtaacaaccgcttattccaggcttgcaatgcgggttaagggttgtaaaaacttatttctttatgactgtaatccaggttcgccgttacattgggcatataaagtttttattcttaaacttgtttttcttactggtaaaccgctggagaaaccagaattatatncagcaatgctgttnaaccctgatgataacaaagaacatttaccggaagattatatagccaatattcttgatgtgcttcctgaaaaacaaagggctcgtttccttttcggttcatgggttaaaccggaaggcgttatatacgagaaatttgagcaaagcatgattattaagaccgctgacctccctgaacgatatgatagatacgctgcggggcaagacttcggacttaacattactttcgtgaaaattgggtgggttggcgatgtggtttatgtcctttgtgattatggggctttcaatatgactactcaatcattcaatgaggaagttacggcgcggggctggtttgagtgtcctgatggaatgggcttgcctgtgtattgcgatccagcggggggagaaaggatacaggaaataacaggcggtactaaagcaaataattctgttgacagcggtatagattttataaacgccaaaattgaacggcgtcaattttatgtttgtgaaacttgtacaggcgttctttctgaaatttgggattactgccgtgatgaggcggggcagattgtaaaagttaacgaccactatttagacgctttgcgttatgcgatatttacagacgttcagcagggggttgtattatcgtga

SEQ ID NO: 58008 - protein, 409 aa, Unknown
  Obtained from environmental sample
  DOMAIN (28)...(401): Terminase-like family
  misc_feature (1)..(409): Xaa is any amino acid
MGTSVVFKPTAVQKQALSLIKSGAIHILLYGGSRSGKTTVLVMVIIFRALMYAGSRHLICRYRAKDARSSVLRETLIPWLDNTIGKNGYTYLAHESMITLYNGSEIWIGGLGDREQADKILGHEYCTIYFNEISQLSYIAVTTAYSRLAMRVKGCKNLFLYDCNPGSPLHWAYKVFILKLVFLTGKPLEKPELYXAMLXNPDDNKEHLPEDYIANILDVLPEKQRARFLFGSWVKPEGVIYEKFEQSMIIKTADLPERYDRYAAGQDFGLNITFVKIGWVGDVVYVLCDYGAFNMTTQSFNEEVTARGWFECPDGMGLPVYCDPAGGERIQEITGGTKANNSVDSGIDFINAKIERRQFYVCETCTGVLSEIWDYCRDEAGQIVKVNDHYLDALRYAIFTDVQQGVVLS

SEQ ID NO: 58009 - DNA, 1314 bp, Unknown
  Obtained from environmental sample
  misc_feature (1)..(1314): n is a, c, g, or t
atgaaactctgcgatcttgaaatagcggaagatcaatctttcagccgttcagtccgcacccttaacgggcttaaagattcggcgcaagtctctttgaacgcgggtctttggaactggcggctgacttttaacggcgttgttttggattccgggcgtttcaccataatggataataaaggacttgagttgttaagcccggcgagaaacaggcagtttttttatgaaacagagccgccgaaactgtatttccagtggtctcaaatagacgatgtatcgcattacattgtagaagttgacgtaacgcccgaattcagaaaccccattattaaaaagcaaacaacggccgcgtctttttcctattcaaatctcggagaaggaatctggtactggcgcgtaacgcccgttttttctctaacaggtgaaaactcaggcggcgttaccgctgcaaacccgtccgctttccgtatagttaaaagcaaagaactgcagacgccgtctctcacttttgttgaagaacccgcttctgttccgccgcccgcacctgtacccgctcccagaccggttcccgcaccgccgcccgctcccgctccggctcccgcacctgcgccgacacccgctcccgtgcgtccttcagaaccgaagcgcataacgctggattctccgtctaatgagacgatattgcaagggcttaccgccctgcgccagcaaacggttttccgatggagtaccgatgaggctgtggcaaaatcaagattcgttctttctcataaccccaacccgcttgcaggacaggctgtgatagaaatactcgatccaaacaggacaatccgcattgaccgtcttgagcaaggcgtctggtactggacggtggaagcgcaaactcccgaaggcgtaaatattaccgctcaggctccacggcgactgcgtgtttcgcccattccgtttcttccttctccctcagggcgtcagcctgccaacggatacagtgtaggcatagaagaattgaaaaggacaaatatcaatttcagttggtcacaggtgcagggggcaaacggttatatcttgacgatttatcaggagacaggcggcgaacggcggcaggttatgcaaatgggaccggaaaatcgcacctcatggtcaacggctattaaaactctcggacggggaaattttatttggcgcatagaagcggtaaatgtggggcgtaacaatgtaattgaacagcacgggagtcccgcggaaaatcgttttgtcatagatattccaagggcgggacccgtaaaaattatcggcgagccggagattaagccatga

SEQ ID NO: 58010 - protein, 437 aa, Unknown
  Obtained from environmental sample
  misc_feature (1)..(437): Xaa is any amino acid
MKLCDLEIAEDQSFSRSVRTLNGLKDSAQVSLNAGLWNWRLTFNGVVLDSGRFTIMDNKGLELLSPARNRQFFYETEPPKLYFQWSQIDDVSHYIVEVDVTPEFRNPIIKKQTTAASFSYSNLGEGIWYWRVTPVFSLTGENSGGVTAANPSAFRIVKSKELQTPSLTFVEEPASVPPPAPVPAPRPVPAPPPAPAPAPAPAPTPAPVRPSEPKRITLDSPSNETILQGLTALRQQTVFRWSTDEAVAKSRFVLSHNPNPLAGQAVIEILDPNRTIRIDRLEQGVWYWTVEAQTPEGVNITAQAPRRLRVSPIPFLPSPSGRQPANGYSVGIEELKRTNINFSWSQVQGANGYILTIYQETGGERRQVMQMGPENRTSWSTAIKTLGRGNFIWRIEAVNVGRNNVIEQHGSPAENRFVIDIPRAGPVKIIGEPEIKP

SEQ ID NO: 58011 - DNA, 441 bp, Unknown
  Obtained from environmental sample
  misc_feature (1)..(441): n is a, c, g, or t
gtgaagcgacgcccatactccgttacggcacccgcgatctcaccggcttttacactgaaccatgtcccctgcggcaggacccaccgccgcttccgccgcataacgggacgcagcgacgacatgctaatcattaacggcgtgaatgttttcccaagccagattgaagaagtgatcatgagcatgaaagaagtcggcaacaattacctcattgtggttgaaaaagacggtgcgcttgaccgtctgacggtaaaaaccgaagtgaacccggacatatttgttgacgatgcacgtcctctcaatgctttgatggaacggataaaggacacacttaggacttcaattttcatcagccccaaggtggaactccacgagagcggcagtttgccggtatcggaaggcaaggcggtgcgcgttatggacaagcggcctaaagacgtgtga

SEQ ID NO: 58012 - protein, 146 aa, Unknown
  Obtained from environmental sample
  misc_feature (1)..(146): Xaa is any amino acid
MKRRPYSVTAPAISPAFTLNHVPCGRTHRRFRRITGRSDDMLIINGVNVFPSQIEEVIMSMKEVGNNYLIVVEKDGALDRLTVKTEVNPDIFVDDARPLNALMERIKDTLRTSIFISPKVELHESGSLPVSEGKAVRVMDKRPKDV

SEQ ID NO: 58013 - DNA, 1008 bp, Unknown
  Obtained from environmental sample
  misc_feature (1)..(1008): n is a, c, g, or t
atgaactttcaatactgggagccggacactgagaagatgccgcgggatgagcttgccgcgctgcagttgcgaaagctgagggaggaaatcggctttagcctgcgtactccgttctataggaaacgccttgccgcagcaggcattcaaagtccggatgacattaaaactcttgatgatttaaggcgcattccttttaccacaaaaaatgatctaagggacggttttccctacggttttttaagtattccaagagaggaagtggtaaggttgcacgcatcaagcggcacaaccggaacgccgaccacgatttattttaaccgcaacgacatcaaaaactggacgaacaacatggcccgctgtatttacggaacaggctgtactgaaagcgatgtgtttcagaacatgataacttacggcctctttaccggaggccttggcctgcaccagggcggtgaggaagtcggcatgctggttattccgtcgggcgcgggaaataccaacaggcaattaaaactgatggaagattttggaaccactgtggtgcacgccactccgagtttccttctgcatcttgaaacaaaaatgaaagaagccggggtaaagagggaaagccttgctcttaaacgcgcttttgccggcgccgagccgtactcggaagataccaggaagcggattgaagccctgttaaaaattgacgtatttaattcatacggcctttcggaaatgaacggcccaagcgttgcctttgagtgccagtgcaagagcggaatgcacctgtgggaagacggctacatcgccgagataataaacccggacaccctggaacctgtgaaagagggggagataggggagctggtacttaccattctctgccgtgaagcgacgcccatactccgttacggcacccgcgatctcaccggcttttacactgaaccatgtcccctgcggcaggacccaccgccgcttccgccgcataacgggacgcagcgacgacatgctaatcattaa

SEQ ID NO: 58014 - protein, 335 aa, Unknown
  Obtained from environmental sample
  misc_feature (1)..(335): Xaa is any amino acid
MNFQYWEPDTEKMPRDELAALQLRKLREEIGFSLRTPFYRKRLAAAGIQSPDDIKTLDDLRRIPFTTKNDLRDGFPYGFLSIPREEVVRLHASSGTTGTPTTIYFNRNDIKNWTNNMARCIYGTGCTESDVFQNMITYGLFTGGLGLHQGGEEVGMLVIPSGAGNTNRQLKLMEDFGTTVVHATPSFLLHLETKMKEAGVKRESLALKRAFAGAEPYSEDTRKRIEALLKIDVFNSYGLSEMNGPSVAFECQCKSGMHLWEDGYIAEIINPDTLEPVKEGEIGELVLTILCREATPILRYGTRDLTGFYTEPCPLRQDPPPLPPHNGTQRRHANH

SEQ ID NO: 58015 - DNA, 594 bp, Unknown
  Obtained from environmental sample
  misc_feature (1)..(594): n is a, c, g, or t
atgctttctaaatttcntgatgtgatgataggcatcgtcatcctgcttgtgttcgcggcttccatgtccacgctttcgtccctggttatagcttcggcgtcaaccttgacgctggattttttgaagggacacgtaataaagaaaatgaacgacaaaagccagctccttgtaatccggatgctgattgtagtgtttatcgttatttcctcatttatcggaattgttcaatacaggggcgggatcagctttatcgcgcagcttatgggtgtttcctggggcgctctggccggatcgttccttgcacccttcgtatacggcctatattggaagcgggtgagcaaactcgccgtttggtgcagttttgtgttcagcaccggcctgttgacgctcaacatcttctttagaagctcattccccgctcttttacagtcgccgatcaacgccggggcctttgcaatgctcgccgggcttgtcattgtgcctgtggcaagtatgatcaccaaagcgccggataaagccttggtggataactgcttttcctgctatgaggaaacggttacagtcaaggttcgcgacgatttaggcagtaattaa

SEQ ID NO: 58016 - protein, 197 aa, Unknown
  Obtained from environmental sample
  SIGNAL (1)...(26)
  misc_feature (1)..(197): Xaa is any amino acid
MLSKFXDVMIGIVILLVFAASMSTLSSLVIASASTLTLDFLKGHVIKKMNDKSQLLVIRMLIVVFIVISSFIGIVQYRGGISFIAQLMGVSWGALAGSFLAPFVYGLYWKRVSKLAVWCSFVFSTGLLTLNIFFRSSFPALLQSPINAGAFAMLAGLVIVPVASMITKAPDKALVDNCFSCYEETVTVKVRDDLGSN

SEQ ID NO: 58017 - DNA, 981 bp, Unknown
  Obtained from environmental sample
  misc_feature (1)..(981): n is a, c, g, or t
atgaatgcaaaagaagcgttaaatctttggaaaaatgcaagctgggctgaacttgccgcagaagctcataagaggcgtattgaaattcacggcaaaaaaaatgttagctacacggtttttagaataataaattataccaatgtgtgcaaaatcgcctgctctttttgctcattcaaaaacacaaagccatacacccttcccaaaaaggaaattatctccactgcccttgccgcaaaaaaacaaggagcagatgcaattttttttcaaggcggagtaaatccggcaattccgcttgattattatatcgacataattaacactttaagcaaaaaactgaaattcaaagtacgcggtttttctcctgttgagcttttccatattgcaaaaaacaataaaatgcccctccctgaacttttgcaaaaactaaaaaaagcaggtctctcatctgtcccaggtgcgggtgcagaaataatgacaagccgtatgcgaaaaattctcgccccaaacaagctctctgcaaaagattggatgagtgttatggaagagtgccacaaggcaggtttgctcggcagtgcgaatatagttatcggttcaagcgaaaccccagaagaaattatccagcatttgaattatgttcgcgaggttcaaaataaaactagaggttttcaaagttttatcccttgggtgttccagcctcaaacaaaaaattttccaattcgccacgtgcgaagcgaagaatatataaaactcgttgcgctttgcaggttgtttttccacaacataccaaacatagaagtttctgttctcggtatgggcaaggttttgggagagcttgcgctttatgctggtgcaaacgatatcagcagcgttgttttggaagagagggttatgcgctcgcagggtgtggggagcattgaggaagcagaggaatttatcaataatgcggggtttaagccagttaggagaggggtgaattattaa

SEQ ID NO: 58018 - protein, 326 aa, Unknown
  Obtained from environmental sample
  DOMAIN (43)...(212): Radical SAM superfamily
  misc_feature (1)..(326): Xaa is any amino acid
MNAKEALNLWKNASWAELAAEAHKRRIEIHGKKNVSYTVFRIINYTNVCKIACSFCSFKNTKPYTLPKKEIISTALAAKKQGADAIFFQGGVNPAIPLDYYIDIINTLSKKLKFKVRGFSPVELFHIAKNNKMPLPELLQKLKKAGLSSVPGAGAEIMTSRMRKILAPNKLSAKDWMSVMEECHKAGLLGSANIVIGSSETPEEIIQHLNYVREVQNKTRGFQSFIPWVFQPQTKNFPIRHVRSEEYIKLVALCRLFFHNIPNIEVSVLGMGKVLGELALYAGANDISSVVLEERVMRSQGVGSIEEAEEFINNAGFKPVRRGVNY

SEQ ID NO: 58019 - DNA, 651 bp, Unknown
  Obtained from environmental sample
  misc_feature (1)..(651): n is a, c, g, or t
atgccttttaaatacgaagaaaacctgcaatatggcaaagatgccacaaaatacaaccttatagccaaggcaaaagaagctggaatttccgttgccaaattcaatggcaaaaaagttctgaaagtcaaccgcaaggctttggtaaaattaaccgaagctgcctattcagaggtcagctttcgcctacgccccgcacacacaaaacaggtcgccgcaattttggaagacccagaggcaagccaaaacgataaattggttgcgctcacaatgctgcaaaattcctgcgttgcaaataagggaattttgccattttgccaagacacaggcacagcctcggtttttgttaaaaaagggcagaatatatggacaggaataaatgatgcagaagccatttccgaaggcatttacaatgcctacacaaaactaaacttgcgctacagccaaattgcaccgctcacaatgtacgaagaaacaaataccgcttgcaacctgcctgcccaaatagatatttatgccgcagaaggcgaccactttgattttctctttgtagccaaaggcggaaggctcgcaaataaaacttactattggcccatgacaaaagctttgctcactcctgcaaaatctgaaaaattttttgaacgaannaaataa

SEQ ID NO: 58020 - protein, 216 aa, Unknown
  Obtained from environmental sample
  DOMAIN (47)...(211): Fumarate hydratase (Fumerase)
  misc_feature (1)..(216): Xaa is any amino acid
MPFKYEENLQYGKDATKYNLIAKAKEAGISVAKFNGKKVLKVNRKALVKLTEAAYSEVSFRLRPAHTKQVAAILEDPEASQNDKLVALTMLQNSCVANKGILPFCQDTGTASVFVKKGQNIWTGINDAEAISEGIYNAYTKLNLRYSQIAPLTMYEETNTACNLPAQIDIYAAEGDHFDFLFVAKGGRLANKTYYWPMTKALLTPAKSEKFFERXK

SEQ ID NO: 58021 - DNA, 2214 bp, Unknown
  Obtained from environmental sample
  misc_feature (1)..(2214): n is a, c, g, or t
ttgccggcaaggaccttgttcttgaaacgcggcagaatcgcaagacaggcaaacggcgctgttttcgcgcagtacgcgggatcagccgtgattgcgactgtctgctcatcttcggaaccggtggaagggctggattacgttcctcttacggttgattacaacgaaaaatactatgccgcagggaagatccccgggggcttcatcaagcgggaaagccggccaaaggacaaggaaatcctcgtcagccgccttatcgaccgcccgatgcgcccgcttttcgagaaaactttcggcagggagatacagcttgtccccaccacgctctcgaccgatcaggtaaaccccccggatatgctggcgataatcgcctcgtcagccgcggtgcatatttcggacattccctttaacggccccattgccggcgtgcgtgtctgccaggtggacggcgagctggtagtcaatcctacctacgagcagattgaaaaatccacaatggaaattgtcgtcgccggtacaagagacggcattacaatggtcgaaggcggggcaaaagaggtcagcgaagatctgatgatagaggctctggataaagcccataacatgatcgtggagttatgcgcttttcaggaaaagctccgcgagcttgccggtaagcctaaacttccccttgttgtccctactcatgttctggaaaacaaagacgctatctacgcttcggcatacccgaaactggaaaaagcctgtttccttgcgaccaagcaggagcgacacgagggcattagagcgatacaagcggaactggcggcgcagtacgcggcccagttcgaggacgaaaaacagaaaaaactcttcaacgccctgtttgaagaaatgcagtacaacatactccgttcttccatacttaacaatggaagacgcgttgacgggcggggtaccgaggacatacgcgatatcacctgcgaggttgacatactcgcgagaacccacggatcggcgctttttacacgcggcgaaacccaggccctggttgtaacaaccctgggcacggtgtttgacgagcaggtgtatgacgacatcgaaggcgacaagcgggagcattttatgctccattacaacttccccccctattcggtaggcgaagtcggcaggctgggaacaggccgccgcgagataggccacggcaacctggcccgccgctcgctggaagcggttgtaccctccaaagaggaattcccctacacggtgcgggtggtctcggagataatggaatcaaacggttcctcgtcaatggcgtcggtttgcggggggacgctttcaatgctccacgccggagtgcctttaaaaaaacccgtggcgggcatcgcgatggggcttatcacggaaggctcgccatcagaagatggcggaggcaaggcaggcgaccgttacgcggtgttatccgacattctgggcgaggaagaccacctgggcgacatggacttcaaggtcgcgggcagcaaggacggcataaccgccctgcagatggatattaaaatcgccggtgtcagcccggaaatcatgcgcaaggcgctggatcaggccaagcgcggcagaatgcacatcctttcgattatgaacaaaacgatcagccgcccggcggaagagatcagcgaatacgcgcccaagatcgttaccctgcgtattgacatcgacaagataggcacgcttataggtcccggcggcaagaatataaaggccctgtgcgaacagtacagcgtaaagatcaacaccgaggatgacggcaccgttacgattttcggcaaaaacaccaaagacgcggaagaagccaaaaccgccgttatgggcgttacctccgacccggaaatgggcagggtgtacaacggcacggtaaaacggattatggattttggcgcctttgtggagattctgcccggcagggaagggctagtgcatatcagcaagctttcccgtcagcgcatagccaatgtcaccgacgtactaaaggaagggcaggagattcccgtcaaacttaccgagattgacaaaatgggcaggcttaacctttcgtatattgacgctatcgacccggatggcgccgattccggcgacacgggaggcgcccatcgcggcggcgctcatagcggcggtcattccgaaaaccgccacgacagcaaaggatttaataaatccggcagggatcgccccaggcattaa

SEQ ID NO: 58022 - protein, 737 aa, Unknown
  Obtained from environmental sample
  DOMAIN (556)...(613): KH domain
  misc_feature (1)..(737): Xaa is any amino acid
MPARTLFLKRGRIARQANGAVFAQYAGSAVIATVCSSSEPVEGLDYVPLTVDYNEKYYAAGKIPGGFIKRESRPKDKEILVSRLIDRPMRPLFEKTFGREIQLVPTTLSTDQVNPPDMLAIIASSAAVHISDIPFNGPIAGVRVCQVDGELVVNPTYEQIEKSTMEIVVAGTRDGITMVEGGAKEVSEDLMIEALDKAHNMIVELCAFQEKLRELAGKPKLPLVVPTHVLENKDAIYASAYPKLEKACFLATKQERHEGIRAIQAELAAQYAAQFEDEKQKKLFNALFEEMQYNILRSSILNNGRRVDGRGTEDIRDITCEVDILARTHGSALFTRGETQALVVTTLGTVFDEQVYDDIEGDKREHFMLHYNFPPYSVGEVGRLGTGRREIGHGNLARRSLEAVVPSKEEFPYTVRVVSEIMESNGSSSMASVCGGTLSMLHAGVPLKKPVAGIAMGLITEGSPSEDGGGKAGDRYAVLSDILGEEDHLGDMDFKVAGSKDGITALQMDIKIAGVSPEIMRKALDQAKRGRMHILSIMNKTISRPAEEISEYAPKIVTLRIDIDKIGTLIGPGGKNIKALCEQYSVKINTEDDGTVTIFGKNTKDAEEAKTAVMGVTSDPEMGRVYNGTVKRIMDFGAFVEILPGREGLVHISKLSRQRIANVTDVLKEGQEIPVKLTEIDKMGRLNLSYIDAIDPDGADSGDTGGAHRGGAHSGGHSENRHDSKGFNKSGRDRPRH

SEQ ID NO: 58023 - DNA, 567 bp, Unknown
  Obtained from environmental sample
  misc_feature (1)..(567): n is a, c, g, or t
gtggcctatctcgcggcggcctgttcccagcctgccgacttcgcctaccgaatagggggggaagttgtaatggagcataaaatgctcccgcttgtcgccttcgatgtcgtcatacacctgctcgtcaaacaccgtgcccagggttgttacaaccagggcctgggtttcgccgcgtgtaaaaagcgccgatccgtgggttctcgcgagtatgtcaacctcgcaggtgatatcgcgtatgtcctcggtaccccgcccgtcaacgcgtcttccattgttaagtatggaagaacggagtatgttgtactgcatttcttcaaacagggcgttgaagagttttttctgtttttcgtcctcgaactgggccgcgtactgcgccgccagttccgcttgtatcgctctaatgccctcgtgtcgctcctgcttggtcgcaaggaaacaggctttttccagtttcgggtatgccgaagcgtagatagcgtctttgttttccagaacatgagtagggacaacaaggggaagtttaggcttaccggcaagctcgcggagcttttcctgaaaagcgcataa

SEQ ID NO: 58024 - protein, 188 aa, Unknown
  Obtained from environmental sample
  misc_feature (1)..(188): Xaa is any amino acid
MAYLAAACSQPADFAYRIGGEVVMEHKMLPLVAFDVVIHLLVKHRAQGCYNQGLGFAACKKRRSVGSREYVNLAGDIAYVLGTPPVNASSIVKYGRTEYVVLHFFKQGVEEFFLFFVLELGRVLRRQFRLYRSNALVSLLLGRKETGFFQFRVCRSVDSVFVFQNMSRDNKGKFRLTGKLAELFLKSA

SEQ ID NO: 58025 - DNA, 513 bp, Unknown
  Obtained from environmental sample
  misc_feature (1)..(513): n is a, c, g, or t
gtgcacctggggcaccagtctntgattcgccgtatatgcgagacttcccaatccccagtccctaccgtagttaccttccgcgaaaatcccatgaaaagccttaacccggccggatttaccggcgatatctataatcttgatcaaaagcttgagctccttgagtctctgggggtaaaactgacggtgctaattgacttttctgaagaaattagtaaaatgaacggaagggattttatcgatctgctcttagggagccaaccggtaacattgcttgccctagggggaaatttccgctgcgggcatggccgggataccggcgttgtggagatacagagccttgcaaaagcgcggggggtggagaactgggtcgcgccgcctgtcatggacgatggaaagccgataagctccaaccgtatcagacaggcattggcagcagggcgtcttgaggaagcgcagcgtatgttaggccgacctttggattcgataacctttaataaatttgtacccaaatag

SEQ ID NO: 58026 - protein, 170 aa, Unknown
  Obtained from environmental sample
  DOMAIN (1)...(138): FAD synthetase
  misc_feature (1)..(170): Xaa is any amino acid
MHLGHQSXIRRICETSQSPVPTVVTFRENPMKSLNPAGFTGDIYNLDQKLELLESLGVKLTVLIDFSEEISKMNGRDFIDLLLGSQPVTLLALGGNFRCGHGRDTGVVEIQSLAKARGVENWVAPPVMDDGKPISSNRIRQALAAGRLEEAQRMLGRPLDSITFNKFVPK

SEQ ID NO: 58027 - DNA, 1275 bp, Unknown
  Obtained from environmental sample
  misc_feature (1)..(1275): n is a, c, g, or t
atgagcaatcgaagcgatatagcgcaatctattgcttccccctgtggggatgaaccgtatttttatcacgaagcgaaggcgcttgataatgacgtggagttgccgctccggcgcagcgacgccgtgataaacgaggccgtcgtagaattcctcaaactcttaggacgtgaggccgaacttaatgtccactctgtttacgacatagagaatgaaatcttcctcatcgacaggggttggtacaacaagcggaccgacctcatgttgaccggacgtacgctcgttggagcgctgtcgcctagagaccgatggtttgaagaccaatatgtcggtttgataaaagggcgcgtgtttatttgtttgaagggatccgcttacagtgagaggtactgccacaaaggtattgcgcctaaccagtacaagatcgtcgtcaatgattggacagacaagaagtcggacgtcagaatcgacaacaacaaaaatatgattgatagaacagaagggcacgcgctgcggtccaatttggtttgcctgctgcacgaaaagcctttcgccggagtcaacggtagcggaaagcacgtcggttggtcgctcttttacggcaattactccgaattgttcaatcccggcgatactatcgatgataacctgatatttctgacgctcttggtatcggtgatacacgcggtacaccgccacggcgacctcctacgcgccgccgccgcttccgccggtaacgagaggcgtttgggcgaaagcggggcgccgcccgccataatgagcgtctctctcggcgaacaactcgcgaaaattatctccgcgatagagtccggaaaaacggaaaaagggaagaaacgcgacctagccgacctagacatattccccctgcccaagttcacacaagacaaaacagacggcaatcgcgcctcccctttcgcctttaccggcacgggattcgagttcagaatgccgggtagttcagtggacatttcgaccatagtcacgattatgaacacaatcattgccgactccattaagactatctgcgatcggataaaaaaagagctcaacaaatgcaagggcgacaaacacgccgacccctcattatccgccgccgtgttgaacgtcctctccgccgtaatcaaagaatcaaagtccatcctgtttaacggcgacaacaactcaagcgagtgggcgaaagaagcgcagacgcgcggtctgcaaaacatcgtgtccacccccgaagccctaaagacattcatcacccccaaaccgtag

SEQ ID NO: 58028 - protein, 424 aa, Unknown
  Obtained from environmental sample
  DOMAIN (49)...(325): Glutamine synthetase, catalytic domain
  misc_feature (1)..(424): Xaa is any amino acid
MSNRSDIAQSIASPCGDEPYFYHEAKALDNDVELPLRRSDAVINEAVVEFLKLLGREAELNVHSVYDIENEIFLIDRGWYNKRTDLMLTGRTLVGALSPRDRWFEDQYVGLIKGRVFICLKGSAYSERYCHKGIAPNQYKIVVNDWTDKKSDVRIDNNKNMIDRTEGHALRSNLVCLLHEKPFAGVNGSGKHVGWSLFYGNYSELFNPGDTIDDNLIFLTLLVSVIHAVHRHGDLLRAAAASAGNERRLGESGAPPAIMSVSLGEQLAKIISAIESGKTEKGKKRDLADLDIFPLPKFTQDKTDGNRASPFAFTGTGFEFRMPGSSVDISTIVTIMNTIIADSIKTICDRIKKELNKCKGDKHADPSLSAAVLNVLSAVIKESKSILFNGDNNSSEWAKEAQTRGLQNIVSTPEALKTFITPKP

SEQ ID NO: 58029 - DNA, 762 bp, Unknown
  Obtained from environmental sample
  misc_feature (1)..(762): n is a, c, g, or t
ttgagaagccaaattcctgtcaggacatactttgaccgggacacggttaagcctggaaagtttgcatttgacacggttgcgcactgcggaggctcagcgagcgggcagttttgcaaaactttaacaggaacagacgtttattccgggtggtatgaagggcgcgccctgctaaacgcggctaactgctgggttaaggccgccatttccgacattcaggcaggccttcccttcccgatgacaggcgctcattacgacaacggcatggaattcataaacgaaccgctgcttgcttggtgcattgctcagcacattgaggccactcgtaccaggccgtaccacaaaaacgacaactgctacgcggaacagaaaaactacgatgcggtcagaaaaaccgtcgggtactttcgcttcgacactgctgaagagtgcgcggcactggccgaagtgtacctttggctttgccccctgtataattactggatgccctcgtttcgcctaacggacaaggaaaaacaggatgacggccgctataagaaggtctacgaaaagcagccgaggacgccgtacgagcggctgatggaatcgcctgatgtaccgtcggggtgcaaagcggaactggaacgcagaagggccgggcaaaaccctgtcgaactgaaccggaaattgaatgaggctgtcgagcggctcttgaaaataaaccgcgaaaaactgtaccttggaaaaacctcctgtcaggagggcgatcgggcacccgctgcctga

SEQ ID NO: 58030 - protein, 253 aa, Unknown
  Obtained from environmental sample
  DOMAIN (13)...(193): Integrase core domain
  misc_feature (1)..(253): Xaa is any amino acid
MRSQIPVRTYFDRDTVKPGKFAFDTVAHCGGSASGQFCKTLTGTDVYSGWYEGRALLNAANCWVKAAISDIQAGLPFPMTGAHYDNGMEFINEPLLAWCIAQHIEATRTRPYHKNDNCYAEQKNYDAVRKTVGYFRFDTAEECAALAEVYLWLCPLYNYWMPSFRLTDKEKQDDGRYKKVYEKQPRTPYERLMESPDVPSGCKAELERRRAGQNPVELNRKLNEAVERLLKINREKLYLGKTSCQEGDRAPAA

SEQ ID NO: 58031 - DNA, 1323 bp, Unknown
  Obtained from environmental sample
  misc_feature (1)..(1323): n is a, c, g, or t
atgagtggaaaggcagtttatgcacggattaagcaattatttgaggaaattcgcagtgaaaaaataaaagaggcagcccgcaagtccggcgagttgtgcagctggacacggaaacgaattatgccacttcatgatatactcacctttatacttgccaagaaaggcttgagcgcggcgatggaaatacgaaagttctttgaggcggcggggaaaacggaacagagcgtcagcaagcaagactatctgaaacaacgcaagaaactaaacccggaagtattcaaactgctcaaccgcgactacctaaaacagttttacggaaggcaggaagctaagggatggagagggtatctggtactggcggaagacggcagccgtgcagaaatacctgatagcgtggagaaccggaaaacctatggggagaacgggaaccagcacggggaaaccgttagtcgggctaatatcaacattctttacgatgtcgagaaccgtttcatactggacgttgggatacaccgggtcggcagcagcgagataacagaagccaaagagcagattgaatgccttaaggaaacgataggggaaaggaaagcgctggcgatcttcgatcggaactacggatcgctggaatttatcaattttttggaagagcaagggataaaatacattatccggctgcaagcagggaaatataaagcagaagtatccggaatgcgacacaaggacgagtgggttgcattggaacataccagcaatcggctaaggaacagtagcgcaaagcgaaagcaggagcttgccgaaaaggggcatacgtcggtgcggatggtacggacgggatttgcggacgaggaacagggaatgctggtaacaaacctgaaggaagggagttctagcgagatacaaaggctgtaccgcaggcggtggaagattgagcagaaattccacaccttgaaaaacaagatgaagtttgagagcgtaacaggaaaagcgagcatctatgtacagcaggatttctgggcgcagatgctggtattcaatattgtgcaggatctgataacagcagcacagcggcgtgcggccagggaagcaaagaaaaagaagtatatttatgagatgagaataaatgagaatatagccataggactgtttaaagaacagtttataaggttgatgatgactgaggatgaccaaatgaaaggtgcgctgttcaaacagttgattgctgacatggaacagtacattgtaccggtgcggaaactgaaaagctcccctcgcaagtggaagcgtatgaacaagtacaagtgcaaccaaaaaccttcattttag

SEQ ID NO: 58032 - protein, 440 aa, Unknown
  Obtained from environmental sample
  DOMAIN (118)...(346): Transposase DDE domain
  misc_feature (1)..(440): Xaa is any amino acid
MSGKAVYARIKQLFEEIRSEKIKEAARKSGELCSWTRKRIMPLHDILTFILAKKGLSAAMEIRKFFEAAGKTEQSVSKQDYLKQRKKLNPEVFKLLNRDYLKQFYGRQEAKGWRGYLVLAEDGSRAEIPDSVENRKTYGENGNQHGETVSRANINILYDVENRFILDVGIHRVGSSEITEAKEQIECLKETIGERKALAIFDRNYGSLEFINFLEEQGIKYIIRLQAGKYKAEVSGMRHKDEWVALEHTSNRLRNSSAKRKQELAEKGHTSVRMVRTGFADEEQGMLVTNLKEGSSSEIQRLYRRRWKIEQKFHTLKNKMKFESVTGKASIYVQQDFWAQMLVFNIVQDLITAAQRRAAREAKKKKYIYEMRINENIAIGLFKEQFIRLMMTEDDQMKGALFKQLIADMEQYIVPVRKLKSSPRKWKRMNKYKCNQKPSF

SEQ ID NO: 58033 - DNA, 2289 bp, Unknown
  Obtained from environmental sample
  misc_feature (1)..(2289): n is a, c, g, or t
atgcgagcgtggagggcatatatctgggatacggaaacgactaacgccggaaacgtggcgggcaatggcatcagcgtacgcgttgtgtcgtatcccagaaacggcgccgccggtaccactcccaagacaagcttgatcagcgagcggttcgacgccccgggaacgccgcatgtcagtacgccggattcaagcaaaccattcgaagctaccaggcccaacaccagcccctataacaaggatttcccggtcgggcttaacaagtacaatagaatcaccgtgaacctgaggccctacatagcgggcttcctgcggaatacgagcgccttctcccataatacccgttcccgccaggggcggtacatgttctaccagggagagaacgcggttctcaaaggctttaacctgggcgccgggactatcagcataaacgggacagctcttcccgccaccatagctgtccccgccggcgatctcggcagctatggcataacaacggcgaatgacaaccaataccggcgcttcactgttggcgccggcacagtaaccggcaacggccttgtaacgtatgcgaacacacaggacgcggttaatacaggcggtgaaagatcgagggcgaacggaacgcccgtccggcccgcttatatccagccctggaatgtcgaatattcaccgggcattgacggttccacgctctgggacgactttacccaggttcatatctggcggtccaatgacactaccagcggcgctgaccgcggccaattccccaaagacaacaacatggagatctttgatcccgccatgtccattgatccggaaaacggcgacctctgggaaagccataacgagggcggcggcaacggaggcaacagcggcagtaccaaggtgagcagcaacaacggcgccggctctttcgcggtagcggcttttatagacccgattattaacagcgacatttacatcagttcccagaacagcggttataccggcagcaacctgacaaacaccgtatggacggtcgccagcataataggaaggccgggcggcggcgttgactggagatatcttgggggtatttggcttaccgggccgcaaggcagcagcgttaatcatcaaagcggatttaatgttaccggcaatagcggctttgccggcaataacgatgtcgccgcgcgcagccaatactacggtgaaagcacctactataactccgtgccctctccgtggaataataatcctaaccttaaccagttcaagaatccccatattattgcctccagtgacggcaacgatatccatgtcagctactacgacaccaaagacaaatccattaaataccgctacaaccggcggaacagtccgggacctgtttccggagcgaatcccgggcttaacagcgcaaacatttcaagggcatggaccaacttggacggcggttttgacgcggaagatcaaagcgcgttaaccgctttaaccccattcccggcggttgccgaaaatggccgcatcgtaggttactcctcccgtccggctgaggcaaaccgcatcgacgcgggcgagtataactccatagcgctcacccgcgatgggtatccggtagttgcctactatgacaggaccaaccaaaaactaaagctggcggtcagcaacagcgcctctcccgtcgcggccgcgaactggaggataattgaaaatgtaatacccgccgcaaagcagacggccttcacgggtacgggccagtatgtcagcatcaggatcgacacgagaaccgggacaaaccagaaccgtatccatattgcggccatgaactcgctgaacaagaacctggtgtatatcacggggttcgccaatttcgccagcagtacatttacaggtaccagcggcgggacagacgaacctaccgtgcaggtggtggacagcgtgggcagcgtgggacgctggtgcgccctctcgctggacagcgacggcaacccatggatcagctatcaggatgaaagctaccagggggcgcgggacgggataaaactcgcgtacaagaacaccgacaggtactacaagggcagagtcacatatgccgggaaagacgtagacatcaacaatgttgacattaacggctgggaagcgatgcacgttcccactcaattccgggtagagaacgcgaggagcggcatggagtgttatccgacgcgcaactttgaaggaacgcgcgccgtacagtcaaaattctggagaggggcggtcggctacctcggccaggatcttttccgcgccgcctactatgtggaataa

SEQ ID NO: 58034 - protein, 762 aa, Unknown
  Obtained from environmental sample
  misc_feature (1)..(762): Xaa is any amino acid
MRAWRAYIWDTETTNAGNVAGNGISVRVVSYPRNGAAGTTPKTSLISERFDAPGTPHVSTPDSSKPFEATRPNTSPYNKDFPVGLNKYNRITVNLRPYIAGFLRNTSAFSHNTRSRQGRYMFYQGENAVLKGFNLGAGTISINGTALPATIAVPAGDLGSYGITTANDNQYRRFTVGAGTVTGNGLVTYANTQDAVNTGGERSRANGTPVRPAYIQPWNVEYSPGIDGSTLWDDFTQVHIWRSNDTTSGADRGQFPKDNNMEIFDPAMSIDPENGDLWESHNEGGGNGGNSGSTKVSSNNGAGSFAVAAFIDPIINSDIYISSQNSGYTGSNLTNTVWTVASIIGRPGGGVDWRYLGGIWLTGPQGSSVNHQSGFNVTGNSGFAGNNDVAARSQYYGESTYYNSVPSPWNNNPNLNQFKNPHIIASSDGNDIHVSYYDTKDKSIKYRYNRRNSPGPVSGANPGLNSANISRAWTNLDGGFDAEDQSALTALTPFPAVAENGRIVGYSSRPAEANRIDAGEYNSIALTRDGYPVVAYYDRTNQKLKLAVSNSASPVAAANWRIIENVIPAAKQTAFTGTGQYVSIRIDTRTGTNQNRIHIAAMNSLNKNLVYITGFANFASSTFTGTSGGTDEPTVQVVDSVGSVGRWCALSLDSDGNPWISYQDESYQGARDGIKLAYKNTDRYYKGRVTYAGKDVDINNVDINGWEAMHVPTQFRVENARSGMECYPTRNFEGTRAVQSKFWRGAVGYLGQDLFRAAYYVE

SEQ ID NO: 58035 - DNA, 1431 bp, Unknown
  Obtained from environmental sample
  misc_feature (1)..(1431): n is a, c, g, or t
atggaaggcgctgaaaactttgaatttttccgtcaacctgattttgttaaagagccttttctaaagggcagttacgctgtttataaaaaggaaacattggtgggcgaagggacggggaaactttgccatatacatagacctgaaattatagacgctaggggtcggcgctgttgggggatattagcggttgtcggggatatgttgcacataacaattcccgaaaagtggcttgctgacgctaaatatcctgttattgtcgatcctacgattgggactactacggttggaagccaatacgagtgggacgctgatccgccggagccgtgggttcagttgatgtttgaaggcgcaatagttgtcaaccgttttttagtttcggatacaataaacggttcatgtacggcttatatgtactcttatgtggataattatgatgatgcaggcgggagacctgttttatattcagataatggaaattcgcctcttaccagaaaatcaaagaatgaacagtttgccgattttacggtaaaccgaaataaacctgcggggtggcgttcatcaacatttcagagtaacggggcaatatcaagcggttcatatatctggttcggcgttttttgtgattttttctgggagcctcgatttgattatggggctaaatgttatagtgatgattggtacatggtaggcaacagcataccaaacacattccctatatataatgttaattggtatttcgattttagattatcaatgtattttacttacacgtcggcgcaaaattatgtaagaacaattacgcaaggtgtttctttatcagatacacgaaaattgacaggaaactacaagcgaagtttgtctcaaacggtgggagttaattctttacttgggcggtttgaaactttttaccgcaaatgcgtaatgacggcgcaaaattctatgaaccttaaccgcttgcctgtgtttatacgcaaggttgcggaaaatatcaatgttactatggatttttttcaatctctcttttttacaaggaaatgtacggaagatgtaaacgccaattctcaaactggcagaaaattcagcgcaattcggaaagtccaggacaatttgaatggaacggatacgcaagatatttcaattatttatgtcaggtctttaactgataatgttcagataacgcaggctttcaggaattggggggcttttattcgtgggttgcgtgtaaacgctgaaagtattgcggaaacttcccataaagcggaatactacaggtttacttctgatacggcgttggcggttgggacggtgtttcgtgggcttttgttatatgtgcggattgtttcanaggtatttgtcagggactatcttttgcggcggtttttngaggcgaaggaagattttattttgaagtctcctatttgtttggaataa

SEQ ID NO: 58036 - protein, 476 aa, Unknown
  Obtained from environmental sample
  misc_feature (1)..(476): Xaa is any amino acid
MEGAENFEFFRQPDFVKEPFLKGSYAVYKKETLVGEGTGKLCHIHRPEIIDARGRRCWGILAVVGDMLHITIPEKWLADAKYPVIVDPTIGTTTVGSQYEWDADPPEPWVQLMFEGAIVVNRFLVSDTINGSCTAYMYSYVDNYDDAGGRPVLYSDNGNSPLTRKSKNEQFADFTVNRNKPAGWRSSTFQSNGAISSGSYIWFGVFCDFFWEPRFDYGAKCYSDDWYMVGNSIPNTFPIYNVNWYFDFRLSMYFTYTSAQNYVRTITQGVSLSDTRKLTGNYKRSLSQTVGVNSLLGRFETFYRKCVMTAQNSMNLNRLPVFIRKVAENINVTMDFFQSLFFTRKCTEDVNANSQTGRKFSAIRKVQDNLNGTDTQDISIIYVRSLTDNVQITQAFRNWGAFIRGLRVNAESIAETSHKAEYYRFTSDTALAVGTVFRGLLLYVRIVSXVFVRDYLLRRFXEAKEDFILKSPICLE

SEQ ID NO: 58037 - DNA, 1635 bp, Unknown
  Obtained from environmental sample
  misc_feature (1)..(1635): n is a, c, g, or t
ttggaacaggcctttatcgacatattaaaacaactcgtaaaagagcatggcagcgccgcgctgacggacgcgaaaaaatgcaagtctcttttggcggattacaccagaaaccagtacaggaaacaaagccgccttctaatgctgactgtcgaggaaggattgccgaaagttattgaaggcgcacaagaccttgccgcttgcaagaaagggataatcaaagaactggaagaagagcatggaattagttccgtgtttgcggctgacatagtgaacgccctcgcgctggtactgcgcggagacactaccgtaacggtttcgccgacagccgttgttcccgcgccgccgccgacccttcaacagaaagccgcttccacggccccaccgccgccgccgccagcggagcctgtaaaaccagccgccataacagacccccaggcgcagtttgaacttggcaatcgttacgcaaacggcgatggagtaaaaaaagatgaaaccaaagcccttgaatggtggacaaaggcggcggaacagggattaatggaagcgcagtataaagtcgggctttgtaattataacggctattataacggcactactatgtatgaggacgtacccacagccgaaaaatggtggaaaaaggcggcggcacaaggggacgttagagcacaatatatgctcggcgtttgctatacaagcggctatataatcggaaaagatacgcgccttgcccgcgaatactttcgtaaagccgccgcgcagggtaatgttcaggcgaagaaagaattaagcaagcgtatcctcctgtttgacttgctggcggagcgtattggcagcaggccttacacttctcctttgccgtatttctcaggcataataatcggtttgtgctttgcccccggcgcatgggcgttattcgcaagggtgcttcaattcaatattgttcctgctattgcgctgtccgtactaacaatggcgcttggcggtttcatcacctacaaagcggtaaatgactggttttatacttccggcggcattgtactgattacgcccgtcatcgccctcatcggcatagtgttctttttcatcatccctaatccggttaaagcggatcagccagctccgcccgaaatagaacaagccgcatcgccgcaaacggcggcacagacacaaacaaagccgaagacgcagcagcagacacagaaacaaaatgagatgctgcaagcaacggtacagcaatcagcggtgcaaactgaaaaacagacggaagcgcctccgcttactgcgaatcctgcggaggaaattgttgattgggcaagaggcaagtatccggagaatattttcgtcaacgcaaattccataacaggccataacatcaacataacaggagcgcggacagttattcaaaagccgttatcgggacaccccaatttaaaatgggcttacgtttatgtaggcgataaaaaatacggcgtagtatgggacagaacaacgtatacccgttcaatgcatgacggaattgaactcggcataggaagcgaggcgcgatccgcgtttgacttttacggcggttctgacaaagacagtattttttctgatattagtcgtgaagcgcccgcaataaaagttgtgaagtga

SEQ ID NO: 58038 - protein, 544 aa, Unknown
  Obtained from environmental sample
  DOMAIN (180)...(219): Sel1 repeat
  misc_feature (1)..(544): Xaa is any amino acid
MEQAFIDILKQLVKEHGSAALTDAKKCKSLLADYTRNQYRKQSRLLMLTVEEGLPKVIEGAQDLAACKKGIIKELEEEHGISSVFAADIVNALALVLRGDTTVTVSPTAVVPAPPPTLQQKAASTAPPPPPPAEPVKPAAITDPQAQFELGNRYANGDGVKKDETKALEWWTKAAEQGLMEAQYKVGLCNYNGYYNGTTMYEDVPTAEKWWKKAAAQGDVRAQYMLGVCYTSGYIIGKDTRLAREYFRKAAAQGNVQAKKELSKRILLFDLLAERIGSRPYTSPLPYFSGIIIGLCFAPGAWALFARVLQFNIVPAIALSVLTMALGGFITYKAVNDWFYTSGGIVLITPVIALIGIVFFFIIPNPVKADQPAPPEIEQAASPQTAAQTQTKPKTQQQTQKQNEMLQATVQQSAVQTEKQTEAPPLTANPAEEIVDWARGKYPENIFVNANSITGHNINITGARTVIQKPLSGHPNLKWAYVYVGDKKYGVVWDRTTYTRSMHDGIELGIGSEARSAFDFYGGSDKDSIFSDISREAPAIKVVK

SEQ ID NO: 58039 - DNA, 651 bp, Unknown
  Obtained from environmental sample
  misc_feature (1)..(651): n is a, c, g, or t
atggtgatgcgagttgaacaaattggctccgccacactttatctctgcgactgcatgaaacttatggcaactttgcctgataaaagcatagatctagcgatagttgatcctccctttggtggaggcaatcataatatgcgcaataaaatatgtaatggcgtaagaaataaatcttatgacactaaaaataaaataaaaaaatgggacaatgcacctactaatgattattttactgaactctttagagtatcaaaaaagcatataattttcggaggaaattattttaatttaccgccgtcaagaaactttataatttattacaaagaaaatataccagaaacttttaatatggctatggcagaatttctatggacaaacatagacggtaattcaaaagtttttagatacagagcaaaacaaaataaagacaggtttcacccctgtcaaaaaccaatagaactttataagtggcttttatcaaattatgcaaaactagattatattattcttgacacccatttcggaagcggctcaatagccgttgcctgtaatgatttaggttttaatttaatcgcaagtgaaattgataaaacatattttagtactgcctgtaaacaaataaaggagaaaataaactatgaaaaaacctga

SEQ ID NO: 58040 - protein, 216 aa, Unknown
  Obtained from environmental sample
  DOMAIN (30)...(205): DNA methylase
  misc_feature (1)..(216): Xaa is any amino acid
MVMRVEQIGSATLYLCDCMKLMATLPDKSIDLAIVDPPFGGGNHNMRNKICNGVRNKSYDTKNKIKKWDNAPTNDYFTELFRVSKKHIIFGGNYFNLPPSRNFIIYYKENIPETFNMAMAEFLWTNIDGNSKVFRYRAKQNKDRFHPCQKPIELYKWLLSNYAKLDYIILDTHFGSGSIAVACNDLGFNLIASEIDKTYFSTACKQIKEKINYEKT

SEQ ID NO: 58041 - DNA, 1794 bp, Unknown
  Obtained from environmental sample
  misc_feature (1)..(1794): n is a, c, g, or t
atgccgaaccgaatcgccatactgccgccgcaagaggctctgcgtattgcagccggcgaagttatcgaccgcccagccgctcttgttagggaatttcttgacaacgccatagacgcaggctctttaaacattgaaatttccatcgaagaaggcggctgtaaaaaggttgaagtttccgacgacggcggcggcatgacgcgcgaagatttggcaatctgctctcttacccacgcgacaagtaaaataaaatgccttgatgatttaaataccgctaatacgcttggttttaggggggaggcattggccgccgcctgcgccgtagcgcgtcttgaaattataagttccgtagacggaagggaggcttggcggcttgccacaggtcccggggaaacgcgcgcgcctgaaattgagcaaacgcgcagaacaaagggatcgacggtaagggcgttaaatctttacgagactattccggcgcgcaaacgttttttaaaaagggaaggaagcgaagctacattgtgccgtcaagtatttattgaaaaagctcttttctttaacggtattaatttccgttatgtgcaagacggaaagttaaaagattttctgcccgccgttaaaacaaaaaaagagcgttttgccgccgtgttacaaacaggcgaagaaaattttctgcatgaaataaatgttacgggatcgggtttttcggcggtcatagttatcggcggacctgaattgtacagaaacgacagacggcagctttatattttcgctaacggcagaaaaatacaggaatattcgctggttcaggcagttgaatacggctctcaggggtggtttcctaacggagtccatcctgtggcggcggtttatgtggaaatagacccgtctcttgcggattttaacattcacccggcaaaacgcgaagtgcgtttccgcgatcccggtgcgattcatcaggcgatttcgggtggagtaaaaaacttttttcacagtttatatcttaagaactccggtaaagacaatacgccggaacccgaagatgaagagagttatgaagaaaggagaggttaccgcagcgatgaagaatcttccgccggatattcgcaaagaaatgaaagagagttttcatttacatataacaaaaataattcagatgttaaacgcaatacggaagaatacgaaaagtttaccgattttgtttccgcttccctgcgtaaccgcgaaaattcatctttaaacgtatccgctcccgcacacggcgatatgcgttacgcaggcagaatatttgatctgtttatcctgatggaatggggagacaaaatttatattatcgaccagcacgccgcgcatgaacgtatcctttacaataaattcctaagcgaacccgtccctaaacaagaactgcttgcgcccattcctttcactacggaaagcgacgaagaagacgtttttctttccgctaaccgcgaagaattgtcgcgtcttggcgttgaaattgaaaaagacgcggaaagctggagtattaccgctctgcccgctgactggcggatgggcgacgcggaaaccgtgaaggaaattctagggcttcggcaagcgggtgaaaacatggcaaaacgctgggcggcgacattttgttgccgcgcggcaattaaagacggcgatcttcttgatgatgaaaccgcgtttgaattaggcaaggaagcgttagctttgcctgatccgcgctgtcctcacgggagacctgtttggacggagattagcagggaagcgctttttaaggctgttagacgggaatag

SEQ ID NO: 58042 - protein, 597 aa, Unknown
  Obtained from environmental sample
  DOMAIN (20)...(154): Histidine kinase-, DNA gyrase B-, and HSP90-like ATPase
  misc_feature (1)..(597): Xaa is any amino acid
MPNRIAILPPQEALRIAAGEVIDRPAALVREFLDNAIDAGSLNIEISIEEGGCKKVEVSDDGGGMTREDLAICSLTHATSKIKCLDDLNTANTLGFRGEALAAACAVARLEIISSVDGREAWRLATGPGETRAPEIEQTRRTKGSTVRALNLYETIPARKRFLKREGSEATLCRQVFIEKALFFNGINFRYVQDGKLKDFLPAVKTKKERFAAVLQTGEENFLHEINVTGSGFSAVIVIGGPELYRNDRRQLYIFANGRKIQEYSLVQAVEYGSQGWFPNGVHPVAAVYVEIDPSLADFNIHPAKREVRFRDPGAIHQAISGGVKNFFHSLYLKNSGKDNTPEPEDEESYEERRGYRSDEESSAGYSQRNEREFSFTYNKNNSDVKRNTEEYEKFTDFVSASLRNRENSSLNVSAPAHGDMRYAGRIFDLFILMEWGDKIYIIDQHAAHERILYNKFLSEPVPKQELLAPIPFTTESDEEDVFLSANREELSRLGVEIEKDAESWSITALPADWRMGDAETVKEILGLRQAGENMAKRWAATFCCRAAIKDGDLLDDETAFELGKEALALPDPRCPHGRPVWTEISREALFKAVRRE

SEQ ID NO: 58043 - DNA, 396 bp, Unknown
  Obtained from environmental sample
  misc_feature (1)..(396): n is a, c, g, or t
gtggcaagccgccaagcctcccttccgtctacggaacttataatttcaagacgcgctacggcgcaggcggcggccaatgcctcccccctaaaaccaagcgtattagcggtatttaaatcatcaaggcattttattttacttgtcgcgtgggtaagagagcagattgccaaatcttcgcgcgtcatgccgccgccgtcgtcggaaacttcaacctttttacagccgccttcttcgatggaaatttcaatgtttaaagagcctgcgtctatggcgttgtcaagaaattccctaacaagagcggctgggcggtcgataacttcgccggctgcaatacgcagagcctcttgcggcggcagtatggcgattcggttcggcatctctattcccctgtattaa

SEQ ID NO: 58044 - protein, 131 aa, Unknown
  Obtained from environmental sample
  misc_feature (1)..(131): Xaa is any amino acid
MASRQASLPSTELIISRRATAQAAANASPLKPSVLAVFKSSRHFILLVAWVREQIAKSSRVMPPPSSETSTFLQPPSSMEISMFKEPASMALSRNSLTRAAGRSITSPAAIRRASCGGSMAIRFGISIPLY

SEQ ID NO: 58045 - DNA, 699 bp, Unknown
  Obtained from environmental sample
  misc_feature (1)..(699): n is a, c, g, or t
gtgacggttacgggggggacggcaagcggcggcagttatgaggcgggggcgacggtcatcatatctgcgagggtccctgaaggtcagcggttcaagaattggacgagtacgagcaacggcgtgtcgttcgacaacgcggacagcgcgacgacgacgtttatcatgccgtcgaacgcggtggcggttacggcggtgtttgaaacgtcggtcgtaacgccgccgggtaataatgtgtcgcaaacggtcaacggatatacttttgagatggtgccggttgcgggggggacgtttacgatggggtgtacgagtgaacaagggagtgattgctacgctgaagaacagacgacgcattctgtggctttgagcagttactacataggtaagtacgaggtgacgcaggggttgtggaaggcggtgatgggtagtcttcccacatcaatatcatcaagttatggaatgggtgataattatccggtgtattatgtaagttggaatacaatagtgaatgaatttattcctaaattgaatgatttgacgggcaagacctataggttgcctacggaggctgagtgggagtacgcggcgcgtgggggcgtangtagcaaggggtacaagtattctggtagtaacaatattgatgatgttgcttggtataatagtagtggcggtgcgcatctagtagcggaaacaaccgaatga

SEQ ID NO: 58046 - protein, 232 aa, Unknown
  Obtained from environmental sample
  DOMAIN (85)...(232): Domain of unknown function (DUF323)
  misc_feature (1)..(232): Xaa is any amino acid
MTVTGGTASGGSYEAGATVIISARVPEGQRFKNWTSTSNGVSFDNADSATTTFIMPSNAVAVTAVFETSVVTPPGNNVSQTVNGYTFEMVPVAGGTFTMGCTSEQGSDCYAEEQTTHSVALSSYYIGKYEVTQGLWKAVMGSLPTSISSSYGMGDNYPVYYVSWNTIVNEFIPKLNDLTGKTYRLPTEAEWEYAARGGVXSKGYKYSGSNNIDDVAWYNSSGGAHLVAETTE

SEQ ID NO: 58047 - DNA, 1074 bp, Unknown
  Obtained from environmental sample
  misc_feature (1)..(1074): n is a, c, g, or t
atgccagtcaaaaagactgtcaaaaagaccgtcaaaaagaagcgtaccgcgaccgccgtcaaaaccgtcgcgaagaccgctaccaagaagcccgcagagcgcgagttggtctcattcgacttcgccgtcaaatacctattgcgcggcaagcgcgactacgtcgtcctcaacggcttcctatccgaacttctcggtaaaaaggtcgaggttaaatccatagaagacgtagaaaatattaaggacgacaaagacgataagaccaaccgtgtagacttaaaagcacagataaacggcggcgagattgtcgtatttgagattcaatttttgcaagaatgggatttcttcggcaaagcgcttttcggcgtatgcagcgccataaaggatcaggttgaggctggcgatgtgtataacatcaagaaagtctattcggtaaacatcgcgtactttaatttaaaagccaaaaaggagtatctgttttccggcaagttaaacggctttcagggcgtccactacaaggacgaagtgatcccgttcgctcaatcccgttcccaaaagtcaaaaaaacagtttgagattcatcctgagtattacctgattttaccgaaaatgttcgacgagaaattgcgcggtcgtttcgacgaatgggtctacatcctgaagaactcgaaagcccgcgccgacttcaaggccgccggaatcaaagaggctaaaaccaagttagactacctgcgtatgacgcccgaaaagaaaaaacagtacgcaagatttctggaacaccgccgaagcgccagaagcgcgttagaaacggcggtaggcaaaggcgaacttagaggcgagcgcagaggcctacggaaaggcctacagcaaggcctacagcaaggcctacagcaaggcctacagcaaggcctactgcaaggcatagagcagggcatgcaacaaggtctagagaaaggtcaggaaatagaacgcgccaaacatgtcaaanatatgtacaaaataggctttacggtcaaacagaatggtaaaagcctcgaactttccgaaaccgcggtcaaaacgattttaggcttgtaa

SEQ ID NO: 58048 - protein, 357 aa, Unknown
  Obtained from environmental sample
  misc_feature (1)..(357): Xaa is any amino acid
MPVKKTVKKTVKKKRTATAVKTVAKTATKKPAERELVSFDFAVKYLLRGKRDYVVLNGFLSELLGKKVEVKSIEDVENIKDDKDDKTNRVDLKAQINGGEIVVFEIQFLQEWDFFGKALFGVCSAIKDQVEAGDVYNIKKVYSVNIAYFNLKAKKEYLFSGKLNGFQGVHYKDEVIPFAQSRSQKSKKQFEIHPEYYLILPKMFDEKLRGRFDEWVYILKNSKARADFKAAGIKEAKTKLDYLRMTPEKKKQYARFLEHRRSARSALETAVGKGELRGERRGLRKGLQQGLQQGLQQGLQQGLLQGIEQGMQQGLEKGQEIERAKHVKXMYKIGFTVKQNGKSLELSETAVKTILGL

SEQ ID NO: 58049 - DNA, 828 bp, Unknown
  Obtained from environmental sample
  misc_feature (1)..(828): n is a, c, g, or t
ttgatggggacgatattgatgtcttcttcttcaaccgccggctcgacttcgggcgtttccaccgtaaggatctttatcggctcgctccgtttcttccggaactcgcttaactcttcctctaagcgtttcttggcctcttcctccggagttaacgcttcgggcggtttttcttccgtagcaaccgtgtcaacgtcgccgccctcgcccgccttgaccggttgcgtcgcgtcgccgtcctttcgggcggatgtatcctctgataccgtttgctcctgcgtcggcgtctcttttccttccgtatcgacaaccggcgtctccgcgttcttatccgtttccttttttgaggccttagccgcctgcttctctttaacagcctccgagcggatgtccggcgatttctctatgctgaccttgatatccgaaataaccattttcatccactcgaccgcatccgcaaacaactcggacaagacggcgaaaacgctctgcggcttaacgcgcagcccgaccattacggtcacagccatcacaagcagaacgatgaagtacggcccgaagacgcggccccgaaagagcggcacgagtaaattgacaagagacatccccaagaggttaacgcccacggcgtccatcacgccccaaaaaccgttgactgcgccgctcaactgcggcatgcgccccacggcgagcagtacgcacagttcaatcgcgagaagcgcgcaccatagaagcaatttgaccggcatgggcttgttggtcagtttcgtcacgccgacgtaccccaccccaacggcaaacgcggctgccgccaggcgaccgaagatgtag

SEQ ID NO: 58050 - protein, 275 aa, Unknown
  Obtained from environmental sample
  SIGNAL (1)...(18)
  misc_feature (1)..(275): Xaa is any amino acid
MMGTILMSSSSTAGSTSGVSTVRIFIGSLRFFRNSLNSSSKRFLASSSGVNASGGFSSVATVSTSPPSPALTGCVASPSFRADVSSDTVCSCVGVSFPSVSTTGVSAFLSVSFFEALAACFSLTASERMSGDFSMLTLISEITIFIHSTASANNSDKTAKTLCGLTRSPTITVTAITSRTMKYGPKTRPRKSGTSKLTRDIPKRLTPTASITPQKPLTAPLNCGMRPTASSTHSSIARSAHHRSNLTGMGLLVSFVTPTYPTPTANAAAARRPKM

SEQ ID NO: 58051 - DNA, 1389 bp, Unknown
  Obtained from environmental sample
  misc_feature (1)..(1389): n is a, c, g, or t
ttgcggattttacttagatacaaaaattacggtttttataaatgcttatcccataaagaattagcgtcgctagttatgtatgctaaaaattatgggaaatgggtgttatcagtaatgacatcatatttccaaaagagggcatttatgaagattcacaatgattttaccctgtattacagggaaaccccgtcgggaaaacggattgtttatttctacgcttacgatgaaaacggcaagcggacgcagggcaggtctacgggacaggttaataaaacggcggctagggtgcttgtaaacaggctcttgaaagaaggggggctgttgccgaaaaaagacgatgttcccactttcggcgcttacgccgtgaactggtgggattgggagaattgcgagtacctgaaaaaaagacgcaagagggctaatctgacccaaagttattctgaccacatgaagcggaatttgaataaggtcgtattgccgtattttaaaaatatgagaatggacgccattaccccttccgtgattgaggcgtttctagacagccttataaaacaggggtataaacacgccacgattaacgactactacggaacttttaaaacaatgatgattgaagcggtggaacgtgagattatcgcaaaagaccccacagcaaaagttgaaaggttgattaataactgtaaagcgataaagattataactccgcttgaatttaaaaaattgtttgtgggggattggcgcaaggtgtgggaagataatcaaattgtttataccgtgaataaattggcggcgttgtccggcatgagggtttcggagattttggggcttaaaggggattgcctgtttgatgatcatatctacgtctgtatgcaacatgacaattacggttatagacccactaaaacaaaagacaggcacaatataccgcttccagattccctgattgaagatttgaaattgcttaaagaaaaaagtggggacggatatttgttttccactgacggcggttgcaatcctatctgtaggaaaacggttttaatgtatttgcggaaagcgttggtaaacatcggcattaacagggcggaaattaaagagcggaatttgcatatccacgcttggagacatttttttaatacggaaatgttaaaaggcggtatgactaaagagcaggcgcaagcgataaccacgcataagagcgagagaatgacggagcgttatacgcattttgatccgcttgagtttgtaaaggctaaggaaattcaagaggctttattaacgcctgttaatgaaaaaccgcaggtactggaagcggaaaaaaaggaactaccgccgaatgtgtataatttccctgtgtcctgttttccgcaagatgaacggaaacaagcgtaa

SEQ ID NO: 58052 - protein, 462 aa, Unknown
  Obtained from environmental sample
  DOMAIN (243)...(416): Phage integrase family
  misc_feature (1)..(462): Xaa is any amino acid
MRILLRYKNYGFYKCLSHKELASLVMYAKNYGKWVLSVMTSYFQKRAFMKIHNDFTLYYRETPSGKRIVYFYAYDENGKRTQGRSTGQVNKTAARVLVNRLLKEGGLLPKKDDVPTFGAYAVNWWDWENCEYLKKRRKRANLTQSYSDHMKRNLNKVVLPYFKNMRMDAITPSVIEAFLDSLIKQGYKHATINDYYGTFKTMMIEAVEREIIAKDPTAKVERLINNCKAIKIITPLEFKKLFVGDWRKVWEDNQIVYTVNKLAALSGMRVSEILGLKGDCLFDDHIYVCMQHDNYGYRPTKTKDRHNIPLPDSLIEDLKLLKEKSGDGYLFSTDGGCNPICRKTVLMYLRKALVNIGINRAEIKERNLHIHAWRHFFNTEMLKGGMTKEQAQAITTHKSERMTERYTHFDPLEFVKAKEIQEALLTPVNEKPQVLEAEKKELPPNVYNFPVSCFPQDERKQA

SEQ ID NO: 58053 - DNA, 777 bp, Unknown
  Obtained from environmental sample
  misc_feature (1)..(777): n is a, c, g, or t
atgagtatgaatacagaaaaaagctgcccgtctcttgtaagtataatcataccaaagagtgttaaaagtataggggatgtcgctttttcctattgcgacagacttaccagcgtaaccataccggacagcgttaccagcattggatcccgcgcttttgagggatgttccagtcttacaaatataatcataccaaacagtgttaaaagtattggggatctcgcttttgccgtttgcgccggccttaccagtgtaacaatatctaacagcgttaccagtattggggaaaatactttttccggttgtgccggccttaccagcgtaaccttaccttacggcgttaccggcattgggaatagagctttttttaactgcgccagacttaccagcgtaaccatacctaacagcgttaccagtattgggattagcgcttttgaaaatacgccatggttcaataaccagccgtccggtgtaatttatatcgggaaaatagcattaggatataaaggtgatatgcctgaaaatacaagtatagcgctgcttgacggtacaaaaataatcgctaaaagggctttttcaaatgaaaggcttaccggtataaccataccgaacaccgttatcagcattgaggatgaagctttttactgttgctccggccttacctgcataatcatacccaaacatgttaaaaatatttgggggcgctgcttttggcgtttgccccgggctttaccagtggtacctttacccaacataaaggaaattgcggattttacttag

SEQ ID NO: 58054 - protein, 258 aa, Unknown
  Obtained from environmental sample
  misc_feature (1)..(258): Xaa is any amino acid
MSMNTEKSCPSLVSIIIPKSVKSIGDVAFSYCDRLTSVTIPDSVTSIGSRAFEGCSSLTNIIIPNSVKSIGDLAFAVCAGLTSVTISNSVTSIGENTFSGCAGLTSVTLPYGVTGIGNRAFFNCARLTSVTIPNSVTSIGISAFENTPWFNNQPSGVIYIGKIALGYKGDMPENTSIALLDGTKIIAKRAFSNERLTGITIPNTVISIEDEAFYCCSGLTCIIIPKHVKNIWGRCFWRLPRALPVVPLPNIKEIADFT

SEQ ID NO: 58055 - DNA, 819 bp, Unknown
  Obtained from environmental sample
  misc_feature (1)..(819): n is a, c, g, or t
gtgatgaagaaaaagctgggcgatccaaacgatcccctccttgtttcggtgcgctcgggcgccgcggcttccatgcccggcatgatggatactatacttaaccttgggattaacgacctggcggtaaaggggctcgccgacaaaacaaagaacccgcgtttcgcgtgggacgcctacaggcgttttatacagatgtacggcgacgttgtgatgggcgttgatcatgatcacttcgaggaagtcttaagcgctgaaaagaaaaagcacggcttcgagcaggatacccagcttactgcgaaggaccttgaacacattgtaggcgaatataaaaatgttgtgcgcaagtacagcggcaaggattttccgcaggctccgcttgaacaactctggggcgcgataaacgccgtctttggttcatggatgaacgagcgcgcgatcaaataccgcgagattaacaatatcaaggacctgaagggaaccgcggtcaacgtgcagtcaatggtattcggcaactttggcgaggactccggcacaggcgtatgcttcagccgcgatccctcaacaggcgttaatcttttctacggcgacttccttatgaacgcgcagggcgaggacgtagtagccggcatcaggacgcctgaaagaatttcagatcttgagaagcacaatcccgtcatttatgatcagctggtaaaaattaaaaacaggctggaaaaacattttaaagatatgcaggatatggaattcaccatccagcagggcaagctttttctgctttcagaacaagaaacggcaaacgcgccggaaccgcggcggtaa

SEQ ID NO: 58056 - protein, 272 aa, Unknown
  Obtained from environmental sample
  DOMAIN (1)...(272): Pyruvate phosphate dikinase, PEP/pyruvate binding domain
  misc_feature (1)..(272): Xaa is any amino acid
MMKKKLGDPNDPLLVSVRSGAAASMPGMMDTILNLGINDLAVKGLADKTKNPRFAWDAYRRFIQMYGDVVMGVDHDHFEEVLSAEKKKHGFEQDTQLTAKDLEHIVGEYKNVVRKYSGKDFPQAPLEQLWGAINAVFGSWMNERAIKYREINNIKDLKGTAVNVQSMVFGNFGEDSGTGVCFSRDPSTGVNLFYGDFLMNAQGEDVVAGIRTPERISDLEKHNPVIYDQLVKIKNRLEKHFKDMQDMEFTIQQGKLFLLSEQETANAPEPRR

SEQ ID NO: 58057 - DNA, 876 bp, Unknown
  Obtained from environmental sample
  misc_feature (1)..(876): n is a, c, g, or t
atggtcgcggaaggtttaatcgacaaagaaaccgctattatgcgtgtaacgccggcgcaccttgaccagcttttgcacccaatggtcgaaacacaggcaagaaagcaggcaaaattccttacaaagggccttaacgcttctccgggagccggtacgggcagaatagtttttaacgcgaaagacgccgaagcctggcatcaaagaggcgaaaaagtgcttcttgtgcgtaaagatacaagcccggaagacataggcggtatggttgtttcgcagggtattcttacatcaacaggcggaatgacaagccacgcggcagttgtcgcccgcggtatgggaactccgtgcgtcgccggagcaaaaggcgtagttgttcagaataatatcgttactataggaaacgacacgtaccatgaaggcgactggatcactatcgacggctctacaggcgaagtatacgacggaaaattgccccttgtagcggcgacaatttcaaaagacatgaataccttccttaaatggtgcgatgatgtccgcgctaaggcggttcgcggtccaattaagggctttaatgtcagaacaaacgccgatcagcctgaggacgcgaagcgcgcggtatctttcggcgctcagggcataggtctttgccgcacagagcacatgttctttgacaaagacaaacttatccacttccgcgcgatgatagtcgcggatacggaagaagacaggaaagttcagttaaagaagatacttcccctgcagcagaaagatttcttcggtattttcaaagcaatggaaggccgtcctgtaacaatcaggcttttagacccgccgcttcatgatttgttccccatacaaaagaagaaattgaagaattag

SEQ ID NO: 58058 - protein, 291 aa, Unknown
  Obtained from environmental sample
  DOMAIN (172)...(291): PEP-utilising enzyme, TIM barrel domain
  misc_feature (1)..(291): Xaa is any amino acid
MVAEGLIDKETAIMRVTPAHLDQLLHPMVETQARKQAKFLTKGLNASPGAGTGRIVFNAKDAEAWHQRGEKVLLVRKDTSPEDIGGMVVSQGILTSTGGMTSHAAVVARGMGTPCVAGAKGVVVQNNIVTIGNDTYHEGDWITIDGSTGEVYDGKLPLVAATISKDMNTFLKWCDDVRAKAVRGPIKGFNVRTNADQPEDAKRAVSFGAQGIGLCRTEHMFFDKDKLIHFRAMIVADTEEDRKVQLKKILPLQQKDFFGIFKAMEGRPVTIRLLDPPLHDLFPIQKKKLKN

SEQ ID NO: 58059 - DNA, 855 bp, Unknown
  Obtained from environmental sample
  misc_feature (1)..(855): n is a, c, g, or t
ttggggctttccgcaataaaaaaaattacgaaaaaaaacataaaaaacgcggaaattactttaataaaaggtatgttaaaccgttcaaaatataaaatccccgattccgtaaaagtattggattcaacgccgaatttcgcggatcagctctatgaatacgatcttgtaataacccattacggcatcacggcttacgaggccttatacgccgggacaacagttttactggaccaccctactccttatcacagaaaaatagcaaaagctgccggatttacggacataaaaaaaataaaacctgtccttaaatctattgccaaacaacagaaaaagaaacaacagttcacgcttgtccgcgttgtccgcggtaaatttcaaacatatttgacggagcccggctcttggtcaaaaaacaacgaaacaacccttgccaaattaatcagctctttttctcctcaaattaaccattcctgccccgtctgcgaaaacgagggaaacaaccgccatggaaacatgagcatagcccgctttcctgaccgcacttaccgctattgttcaaagtgcggcgtaatgtacatggacacaacctgtccgccctccgtaacatacgaaagggagtatttttttgattcttacaaaaaacaatacggaaaaacctatctggaagactttcccaaccttatcgcaatggcaaaacgccgcttaaaaattatttccaggatattctcgcaaaaaaaggaagaacctcaaaccgaggacgcgcgggacaaagttaaaactttattggatataggctgcgcatacggtcccttcctttcagccgcgaaggaaaagggatattctccttgggactga

SEQ ID NO: 58060 - protein, 284 aa, Unknown
  Obtained from environmental sample
  misc_feature (1)..(284): Xaa is any amino acid
MGLSAIKKITKKNIKNAEITLIKGMLNRSKYKIPDSVKVLDSTPNFADQLYEYDLVITHYGITAYEALYAGTTVLLDHPTPYHRKIAKAAGFTDIKKIKPVLKSIAKQQKKKQQFTLVRVVRGKFQTYLTEPGSWSKNNETTLAKLISSFSPQINHSCPVCENEGNNRHGNMSIARFPDRTYRYCSKCGVMYMDTTCPPSVTYEREYFFDSYKKQYGKTYLEDFPNLIAMAKRRLKIISRIFSQKKEEPQTEDARDKVKTLLDIGCAYGPFLSAAKEKGYSPWD

SEQ ID NO: 58061 - DNA, 423 bp, Unknown
  Obtained from environmental sample
  misc_feature (1)..(423): n is a, c, g, or t
atgacaggcgctgtactgattgtcccctgctgtgaaaaaggaaaaggcggcggccacttaacccggtgtataaaacttgcaaaaaaattacgcgatacagacagggaagcgtatctttttattcctgacggtattaatatcgaaagtttcctaataacctcacaatttgacagatcgtttgttgtttcaaaaaacagaatttttaaaaagagttgggatttaataatccttgaccgttatcagactcctcatgatgagcttgccaattggaaaaaaattgcgcctgtaatcggaattgacgaaggcggttctttccgcgattattttgattttcttatagatatactaatccctgaaaattttgaaaaaccgtccgcgaatattacttcttgcggtttacttgaccttccggaaaaaagataa

SEQ ID NO: 58062 - protein, 140 aa, Unknown
  Obtained from environmental sample
  misc_feature (1)..(140): Xaa is any amino acid
MTGAVLIVPCCEKGKGGGHLTRCIKLAKKLRDTDREAYLFIPDGINIESFLITSQFDRSFVVSKNRIFKKSWDLIILDRYQTPHDELANWKKIAPVIGIDEGGSFRDYFDFLIDILIPENFEKPSANITSCGLLDLPEKR

SEQ ID NO: 58063 - DNA, 678 bp, Unknown
  Obtained from environmental sample
  misc_feature (1)..(678): n is a, c, g, or t
atgacagctgtcgttttacaggcgcgcattgattcatcacggcttccccgaaaagccctcctcccccttgacggaaaaccgcttgtctttcgcgtaatggaagccttgaataacgttcccgctgatttaagaatactcgcctgtcctcaggattcactttcagcttttgagccttttgcggcgcaggccggttttgaaataaccgcaggccctaaagacgacgttcttgaacgttactgtcaggttatacggcgttttaatattacccgcgtaataagggctacggcagacaatccctttgtttttgcagacgccgcctttgcgatcaacgccgaagctctggcgcttaacgccgattattccggttattctgggattcccacaggcgcgggagtggaatcggtctgtgcagccgcccttcttcgcgccgaaagcgaaagctcctcgccttatgatcgcgaacacgtttgtccttatttgtacagtcatccggagcttttcaaacttcaccgtccgctcgctccgattcgctttcagggttcaaacatccggcttaccgtagacacgcaggaagattttgatcgcgcccttgttttatacgacgttttaaagaatgagcctcttcgttaccacggatttacaatactcaggaagtacgcggagatattcaaaggatga

SEQ ID NO: 58064 - protein, 225 aa, Unknown
  Obtained from environmental sample
  DOMAIN (3)...(215): Cytidylyltransferase
  misc_feature (1)..(225): Xaa is any amino acid
MTAVVLQARIDSSRLPRKALLPLDGKPLVFRVMEALNNVPADLRILACPQDSLSAFEPFAAQAGFEITAGPKDDVLERYCQVIRRFNITRVIRATADNPFVFADAAFAINAEALALNADYSGYSGIPTGAGVESVCAAALLRAESESSSPYDREHVCPYLYSHPELFKLHRPLAPIRFQGSNIRLTVDTQEDFDRALVLYDVLKNEPLRYHGFTILRKYAEIFKG

SEQ ID NO: 58065 - DNA, 414 bp, Unknown
  Obtained from environmental sample
  misc_feature (1)..(414): n is a, c, g, or t
atgaatacatttgccaaaactatcgatttattacaccgctcaatggacgccagcacggttcgcaggcaggcaatagccaacaatttggctaacgccgatgttccgaatttcaagcggacggatgtcaattttgaaagcgagttaaaaagggcgcttgaatcggaaaagaaaaaacccgcgctggaaatgaatatgacccacccaaaacattttccgaattacaaggaaagggactatcgtgatgtgcaaatccgccgtgttttggattacacaaccacatacaacaacaacggaaacaatgttgatcctgaaaaggaattcatgcttgccacgcagaaccagatgagctacacgctctttacgcaggcggcagcttttgaattcagtcagataaatcaggtattaagaggataa

SEQ ID NO: 58066 - protein, 137 aa, Unknown
  Obtained from environmental sample
  DOMAIN (8)...(38): Flagella basal body rod protein
  misc_feature (1)..(137): Xaa is any amino acid
MNTFAKTIDLLHRSMDASTVRRQAIANNLANADVPNFKRTDVNFESELKRALESEKKKPALEMNMTHPKHFPNYKERDYRDVQIRRVLDYTTTYNNNGNNVDPEKEFMLATQNQMSYTLFTQAAAFEFSQINQVLRG

SEQ ID NO: 58067 - DNA, 2145 bp, Unknown
  Obtained from environmental sample
  misc_feature (1)..(2145): n is a, c, g, or t
atgaaaacttcttcggacatggggcttccgcttgttggtatagggcttttgtacaggcagggatattttacccagatgctgaacgccgacggctaccagcaggaaagctatcccgagaacgactggtacaatatgcccgtcgaaaggaaaaacggcaaagacggccagcccttaaaaatttccgtggatttggcgggaaggcaggcaatagcccaaatttgggaagcaaaagtcggccgttcttcgctttatctcttagacacgaatatcgaggaaaacgccccggactttagaaatattaccgcttctctttacggcggcgacaaagaaaccagaatgcagcaggaaatccttttgggcataggcggcatccgcgccttacgcgccctgggaatcaatcccgcggctacccacatgaacgaggggcacgcggcgtttttgggccttgagcgtatccgcgaaataatggaagagaagggatttacttttgaggaagcgcgcgaggctgtttggccgtcaaatatctttacgacccacactcccgttccggccggaaacgagcgttttgaaattcctatgatggaaaaatatttccgctcatggccgcaggttttgggaatttcatggaaagacttccttggcctcggcaggatttatcccggcgacgagcgcgaaactttctgtatgaccgttctcgctcttaagatggcggcttacgccaacggagtcgcgaaactgcacggagtggtttcccgcgatatgtggaaaggaatctggcctggcctgccgcttaatgaaattccgattggccatgtgaccaacggcgtacacacaagaacatggatttccagcggcatgatagaccttttggacaggtattttggtcccagctttttggacaaacctaccgatttgaaaatttgggaacgcatggaccgcatctccgatgaagagttgtggcgcacccatgaaaggcgccgcgaacggttggtcgcctttgtgcgcgagaggattgacgcgcagtatgtacgcacgggcgcggcgcgtatacatcaggcggaagacgctctttctccctacgcgctgaccctttgtttcgcgcgccgttttgcaacttacaaacgcggcaatctgctcttacgcgatcctgagcgccttttaaagctggtaagggatcaagaccgccccgttcaattgatttttgccggaaaggctcacccgcacgatatgccgggtaaagaccttatccgcgagatagttcactttgccgaaaaatacgacgtatcaagccgtatcgtttttgtcgaaaactacgacatgaacgtcgccaagtatttgacctcaggcggagacgtgtggcttaataccccgcgccgcccgatggaagcgtcaggtaccagcggcatgaaagccgcgatgaacggcgttcttaactgttcaattctggacggatggtgggacgaagcgtactgcccggaagtaggatgggctatcggacacggggagcagtatcatgacgataatcttcaggatgatattgaaagcaaggcgttatacgatcttctggagagggaaattattccgctgttctaccagagagggcgcgacggcctgccccgcgaatggataaaattgatgaaagactgcatgaagcagatagggcagtccatgtcatgccaccgcatgttaatggattactcgaacaatttttattttccggcgcttaaaaactaccgccgtttcagcaaagacggctatgccgaagccaaatcgttggcggcttatttcaacaaactgcagcagtcatggggcaacctgaaaattgtcaaaattgaatccaacgcaaaacctgttatgcaccgcggcgacactctttccgttaccgctcacatcgatcttggcaatattttgccggaagaagtgcaggtggaactctatcacggcacggtttccagccagaacaaggaatttgccaacgcggccaagaccgaaatgaagtgggtaaaggccgacggaaacctgaatttattccaggttcgcgtagaatgtgttgataccggaatgcaggggcatacagttcgtatactgcccaagcatgacgcgttgattcatccatacaggcccggcttcgtaaagtgggcttag

SEQ ID NO: 58068 - protein, 714 aa, Unknown
  Obtained from environmental sample
  DOMAIN (1)...(558): Carbohydrate phosphorylase
  misc_feature (1)..(714): Xaa is any amino acid
MKTSSDMGLPLVGIGLLYRQGYFTQMLNADGYQQESYPENDWYNMPVERKNGKDGQPLKISVDLAGRQAIAQIWEAKVGRSSLYLLDTNIEENAPDFRNITASLYGGDKETRMQQEILLGIGGIRALRALGINPAATHMNEGHAAFLGLERIREIMEEKGFTFEEAREAVWPSNIFTTHTPVPAGNERFEIPMMEKYFRSWPQVLGISWKDFLGLGRIYPGDERETFCMTVLALKMAAYANGVAKLHGVVSRDMWKGIWPGLPLNEIPIGHVTNGVHTRTWISSGMIDLLDRYFGPSFLDKPTDLKIWERMDRISDEELWRTHERRRERLVAFVRERIDAQYVRTGAARIHQAEDALSPYALTLCFARRFATYKRGNLLLRDPERLLKLVRDQDRPVQLIFAGKAHPHDMPGKDLIREIVHFAEKYDVSSRIVFVENYDMNVAKYLTSGGDVWLNTPRRPMEASGTSGMKAAMNGVLNCSILDGWWDEAYCPEVGWAIGHGEQYHDDNLQDDIESKALYDLLEREIIPLFYQRGRDGLPREWIKLMKDCMKQIGQSMSCHRMLMDYSNNFYFPALKNYRRFSKDGYAEAKSLAAYFNKLQQSWGNLKIVKIESNAKPVMHRGDTLSVTAHIDLGNILPEEVQVELYHGTVSSQNKEFANAAKTEMKWVKADGNLNLFQVRVECVDTGMQGHTVRILPKHDALIHPYRPGFVKWA

SEQ ID NO: 58069 - DNA, 1725 bp, Unknown
  Obtained from environmental sample
  misc_feature (1)..(1725): n is a, c, g, or t
atgagcgaaatactatcacgatactgcccccggacggaatttgacagctatgaggatttttacgccaactaccgctgtaatacgcctgatgattttaactttgcccgcgatgttgttgacgaatgggcgcggctgcatcctgaaaaaccagcccttttatggaccgacgattccggggcgatgaagtcgttcaccttcagtgacatcaaacggctttccgacaaagcagctaacgcgcttatcgcgctggggattaaaaaaggcgacgtggcaatgctgatactcaaacaacatcccgaagtttgggtgatgatgtgcgcccttgaaaaaataggcgccgtctgcatacctggcacttatcagctaacggcaaaagatttggaataccgctgtaacatcgccgaagttaaactgctggtgacaattgacgaccccggactgttagctgacattgccaccgccagacccaaatgcggcggactgaaacacatagccgttgtgtacgacaaagaaaagcgtgtaggtacacgcaacgattatattgatctgcactccgaaacagagaaggcaagcgataactttaagtacattgcgacaaagaccgaagaacccatgctgatatatttttcctccggcaccaccgggatgccaaagatggtgctgcacaaccacagcctccccctggggcatattgtcacggcgaaatactggcaatgcgtggaagacggcaaggttcaccttacccagaccgattccggctgggcaaaattcgcgtggggaaaaatatacggccagtggatttgcggcgcggctatcggcgcgtatgacacggaaaaatttaccccccagggaatgttggacgcgttacagaggctaaaaccaacgactttttgcgcccccgcgacgattttccgttatttaataaaagaggacctgtccggctatgacttcagttttatccgccacacctcggtcgccggcgaacccctgagcccggaagtgtacaataggttaaaatcgttaacaggccttgaaatccgcgaaggttttggccagtcggaaacttcggtaatggcggcggtgttcaagtggcttccggtaaggcccggttccatgggaaagcccgcccccctgttcaaacttgctctgcttgacgaagacggcggcgtctgcgatgacggcatgatcgggaacatgagcattaccgcggcgggcaaaaacatgtacgagcttggacacgcagcgcccggcacagggcttcccgtaatcggcccctcggaatttcccgggcttttcaggggttactggaaagatcaggatagtacctcttcttcatggaacaacggaacctataaaacaggcgacatggcatggcgcgacggcgaggggtatttgtggtttgtgggcaggaacgacgatgtgatcaaatgctccggttaccgcataggccccttcgaggtcgaaagcgccctgatggagcatccctcggttctggagtgcgccgtaaccgccgcgcccgatcccatgcggggccaggtggtcaaggcgagcatagtgcttgcgcggggcttttctccctcggatgagcttgtccatgaactgcaaaaccacgtcaagcgcgtaacggccccctacaagtatccgcgcatagtggagtttttacctgagcttccaaaaacaataagcggcaagatacgccggaatgctatacgaaacggtgaataa

SEQ ID NO: 58070 - protein, 574 aa, Unknown
  Obtained from environmental sample
  DOMAIN (65)...(502): AMP-binding enzyme
  misc_feature (1)..(574): Xaa is any amino acid
MSEILSRYCPRTEFDSYEDFYANYRCNTPDDFNFARDVVDEWARLHPEKPALLWTDDSGAMKSFTFSDIKRLSDKAANALIALGIKKGDVAMLILKQHPEVWVMMCALEKIGAVCIPGTYQLTAKDLEYRCNIAEVKLLVTIDDPGLLADIATARPKCGGLKHIAVVYDKEKRVGTRNDYIDLHSETEKASDNFKYIATKTEEPMLIYFSSGTTGMPKMVLHNHSLPLGHIVTAKYWQCVEDGKVHLTQTDSGWAKFAWGKIYGQWICGAAIGAYDTEKFTPQGMLDALQRLKPTTFCAPATIFRYLIKEDLSGYDFSFIRHTSVAGEPLSPEVYNRLKSLTGLEIREGFGQSETSVMAAVFKWLPVRPGSMGKPAPLFKLALLDEDGGVCDDGMIGNMSITAAGKNMYELGHAAPGTGLPVIGPSEFPGLFRGYWKDQDSTSSSWNNGTYKTGDMAWRDGEGYLWFVGRNDDVIKCSGYRIGPFEVESALMEHPSVLECAVTAAPDPMRGQVVKASIVLARGFSPSDELVHELQNHVKRVTAPYKYPRIVEFLPELPKTISGKIRRNAIRNGE

SEQ ID NO: 58071 - DNA, 948 bp, Unknown
  Obtained from environmental sample
  misc_feature (1)..(948): n is a, c, g, or t
atgaacgagactgcctcggcggtcaatgaaattacctccaatatacaaagcatcaaagcccgcgtacttaaccagtccgccagtgttacagaaacaaacgcaactatggaacaggtcgtagccaacatcaataaactcaacaatcatgttgaaaatcagagtcagaatatttcccaggcgtcatcggccattgaagaaatggtggcgaatatcaattcagtaaccaatacactggtcagtaacgcaaccaatgtaagtacattaaaagaagcttccgaagtcggccacagcggattacaggatgttgcgtctgatattcaggaaattttccgtgaatccgaaggtttacttgaaattaacgctgttatggagaatatagcaagccagaccaatttgctttcgatgaacgcggcaattgaagcggctcacgccggagaggcgggcaaaggtttcgccgtagtcgcggatgaaatccgtaaacttgcggaaagttcaggtgaacagtccaaaaccatcggcactgtattaaaaaagatagctgaatcaatcaacaaaataacaaagtccacagaaaacgtacttaaaaaattcgaagcgattgactcaagcgtaaagacagtatctcaacaggaagagaatatccgctatgctatggaagaacagggcgagggaagcaaacagcttctgtcaagcgccggaggcttaaaagaaaccacccggcaggttaagagcagttccgaggagatgcttgagggcagccaggaagtaatgaaggaaagccggaatcttgaaagggtaacgcaggagatcacgggcggcatgaacgagatggcctctggcgcggatcagattaacgtggcggtaaatagcgtcaatgagataagcctcagaaaccgccagggtattgaatctctaacgagggaagtttcgaagttcaaagttaattaa

SEQ ID NO: 58072 - protein, 315 aa, Unknown
  Obtained from environmental sample
  DOMAIN (37)...(315): Methyl-accepting chemotaxis protein (MCP) signaling domain
  misc_feature (1)..(315): Xaa is any amino acid
MNETASAVNEITSNIQSIKARVLNQSASVTETNATMEQVVANINKLNNHVENQSQNISQASSAIEEMVANINSVTNTLVSNATNVSTLKEASEVGHSGLQDVASDIQEIFRESEGLLEINAVMENIASQTNLLSMNAAIEAAHAGEAGKGFAVVADEIRKLAESSGEQSKTIGTVLKKIAESINKITKSTENVLKKFEAIDSSVKTVSQQEENIRYAMEEQGEGSKQLLSSAGGLKETTRQVKSSSEEMLEGSQEVMKESRNLERVTQEITGGMNEMASGADQINVAVNSVNEISLRNRQGIESLTREVSKFKVN

SEQ ID NO: 58073 - DNA, 600 bp, Unknown
  Obtained from environmental sample
  misc_feature (1)..(600): n is a, c, g, or t
gtgtgggttttgcgcaacgataccatgcagcccggcttacaatccggcgaccgttttattgtggtctcctcggcgctcccttccctgcttgctgaaataaagcagcaggaaggcgcggcccttttcaagcggggaaatattgtcctgttggataccatgcgcggggaaagtcggcactggtttcttgatgtcgccgacggttttgtccggttttttaccgcgcagcaaataagtatcttcggggcacaggagcatatttttgtaaagcgccttatcggccttcctggtgatgaaatcggcatggtcaactttgtcctgcgcgtgcagccgggaggcagcttgtacaccttaaccgaattcgaactgtcggacaggccgtattacccgaatataccccaggttccagcgctatgggatgaatcgcttcccctttcgggaaacatggacaaaatcaccctcggccccggcgaatattttatcgtgtcggacgacaggggcagcacgggagattcccgcacgtgggggcctgtcagcgcaaaagaaataatcgggcggcccgtgtttcgtttttggccgccgtcccgccttggccgtttgtaa

SEQ ID NO: 58074 - protein, 199 aa, Unknown
  Obtained from environmental sample
  misc_feature (1)..(199): Xaa is any amino acid
MWVLRNDTMQPGLQSGDRFIVVSSALPSLLAEIKQQEGAALFKRGNIVLLDTMRGESRHWFLDVADGFVRFFTAQQISIFGAQEHIFVKRLIGLPGDEIGMVNFVLRVQPGGSLYTLTEFELSDRPYYPNIPQVPALWDESLPLSGNMDKITLGPGEYFIVSDDRGSTGDSRTWGPVSAKEIIGRPVFRFWPPSRLGRL

SEQ ID NO: 58075 - DNA, 1107 bp, Unknown
  Obtained from environmental sample
  misc_feature (1)..(1107): n is a, c, g, or t
ttgcttgacaggtatgttgaatccctgctgcgcgatgttgaacatcagattgattttttcaatgtcaataacatgccgagcgtctatataggcggcggaacgccttccgcgcttggagcaaagcgcataacacgtttgttgtcctcaattaataaactgttaaaaaatattggtacgactcctgttgaattcaccgtggaagcgaacccggaatcaactgacggggctttcctgcgggcctgcgttgaaggcggcgtcagccggataagccttggcgtgcagagcttttgtgaagcgtcacgaaaagccattcacagaacgggcggccgcgctcagatcaaagacgcccttgctcttgtcgcgcggtattaccccaacgctttttccgcggatcttgtcaccggcctccctttccagaccgaaaccgttattatggaagacgtcaaacaactgctctcgttcccggtcgcacatgtttccctatacagccttatccttgagccgcagacgcctcttggcaaagcggttaaacaaggcgcagcgtccctgcccccgcctgacgaggccgacaacctctggatagcgggacgggacttgctggaaactgccggttaccgccaatacgaggtgtccaatttctgtctgccgaacaaaacctgcgcccacaacatacgttactggagaatggaaaactggctgggcgcggggcccgcggcttccggaacgatcatcaacgatgaaacaggcgagggaaaaagattcacctatcctgcggacattgagacttacatcaggatggcaagcccccgcataaatcacgccatagtagaagaattgagcaaggaagacctgatcaaagaaacattgctaatgggattcaggtattgcgaaggccccgacaagacgcttttcaaacaacgctttggccgcgagattgaggacttgatccccaaaacaatcgccctctggagcaaacgggatttttttcaaacagggcaattaaagccctcaaaacagggaatgctttttgttaatggatttctgcgcgacgcctttagagaattggaaatagggactggggactggggactggggactgggtcttga

SEQ ID NO: 58076 - protein, 368 aa, Unknown
  Obtained from environmental sample
  DOMAIN (224)...(342): HemN C-terminal region
  misc_feature (1)..(368): Xaa is any amino acid
MLDRYVESLLRDVEHQIDFFNVNNMPSVYIGGGTPSALGAKRITRLLSSINKLLKNIGTTPVEFTVEANPESTDGAFLRACVEGGVSRISLGVQSFCEASRKAIHRTGGRAQIKDALALVARYYPNAFSADLVTGLPFQTETVIMEDVKQLLSFPVAHVSLYSLILEPQTPLGKAVKQGAASLPPPDEADNLWIAGRDLLETAGYRQYEVSNFCLPNKTCAHNIRYWRMENWLGAGPAASGTIINDETGEGKRFTYPADIETYIRMASPRINHAIVEELSKEDLIKETLLMGFRYCEGPDKTLFKQRFGREIEDLIPKTIALWSKRDFFQTGQLKPSKQGMLFVNGFLRDAFRELEIGTGDWGLGTGS

SEQ ID NO: 58077 - DNA, 1296 bp, Unknown
  Obtained from environmental sample
  misc_feature (1)..(1296): n is a, c, g, or t
ttgcttatgacagacagaaaattaacggttaaacaaaaacttgggtttggaatcttcgaccttggcggaaatatgctctttacgctcatgtccttctgggcgctaaaataccttacggacacagtgggtatcgccgcagtttgggcaggatcggcggtaatgattggcaaggcctgggatgccgtaaccgacccgatgatgggctttatttccgacagaaccttgtcccgctggggacgccggcgcgtgtaccttcttttcgggtgtgtccccatgtgtcttaccatgctgttcttttttaccgccccgacttaccttccgcagtatttgcatatcttctgggctattctcgccttgatgatgctcaataccgcttcaaccataatcaacgtgccctattcttccctgacgccggaactcaccactgattaccacgaacagtcttcgttgaacggctaccgttttggctgcgcggtattcggcaccattttgggcgctgcggcagttctgcccctggtggatctgtttgctaaatttaaacagagcgcggacggcggcggaattggagatttgcgattcggctggtccatgaccggccttttattgggcgcggttatcgccattgtcacgctggttacctttttcggcgtgaaggaaaaaaagctcaccaaagccgatttgcccgtcaagggttttttcgccacatacaaagccgttttcctcaacggcccctttgtcaagcttctgttcacctacggcctgaatataatggggctgacttttctgcaaaccatactcgcctattacaccgaatacgtgtacagccgccctgacatcacgcccctggcgatgatgatcctgctgttaaccgcaatgatctgtattcccatttcggtattgatctccaaaaaaattggtaaaaagcggacctaccagatatgtttcgtcgcgctttccaccgcttccatgatcatttatcttctcggccaccgtttggggcccaactttttcctcggcatgatggtgtacgccgggatcggcgtgggctttatgtatgtcgcccccttcgcgatgatacccgacgccgtggattacggcgcggcgcagaccggggaacgggacgaaggcgcctactacggcatttggacttttatatcaaaactcggaaccagcttttccgtgtttgtcagcgggttaattttgtcggcgggagggtatatcgcaaacatcgcgcaaagcgattcggcaattttcgcgattaagctgattatcggccccattcccgccgtcatttaa

SEQ ID NO: 58078 - protein, 431 aa, Unknown
  Obtained from environmental sample
  DOMAIN (14)...(402): Major Facilitator Superfamily
  misc_feature (1)..(431): Xaa is any amino acid
MLMTDRKLTVKQKLGFGIFDLGGNMLFTLMSFWALKYLTDTVGIAAVWAGSAVMIGKAWDAVTDPMMGFISDRTLSRWGRRRVYLLFGCVPMCLTMLFFFTAPTYLPQYLHIFWAILALMMLNTASTIINVPYSSLTPELTTDYHEQSSLNGYRFGCAVFGTILGAAAVLPLVDLFAKFKQSADGGGIGDLRFGWSMTGLLLGAVIAIVTLVTFFGVKEKKLTKADLPVKGFFATYKAVFLNGPFVKLLFTYGLNIMGLTFLQTILAYYTEYVYSRPDITPLAMMILLLTAMICIPISVLISKKIGKKRTYQICFVALSTASMIIYLLGHRLGPNFFLGMMVYAGIGVGFMYVAPFAMIPDAVDYGAAQTGERDEGAYYGIWTFISKLGTSFSVFVSGLILSAGGYIANIAQSDSAIFAIKLIIGPIPAVI

SEQ ID NO: 58079 - DNA, 1779 bp, Unknown
  Obtained from environmental sample
  misc_feature (1)..(1779): n is a, c, g, or t
ttggcgcgtgaggcgaatgaggctaacagcattaaacgagacactccgattatggttgttttgggaaacccgccgtatagcggggaaagccaaaataaatgcgaatggattatgcaactgatggatgattacaagaaagaaccgcccgccgactccacgctgcaagagaaaaatcctgaccattggttggaagtgcacgaacaaagcgctcaaaagctgtacgagcgtaattctaagtggattaatgacgattactgcaaatttatccgtttaggacagtactttattgataaaaataatgaaggcatattagcgtatatcaataatcatagttttctcgacaatcctacgtttaggggtatgcgttggagtttgttgaaaagttttgacaagatttacattcttgatttgcacggtaacagcaagaagaaagaggtttgtcccgatggaagcaaagatgaaaatgtgtttgatattcagcaaggtgtgagtatcaatatctttgtgaaaacgggacgtaaagcgaaaggggctttggcggaagtttatcatattgatgttttcggaaagagggaagagaagtataaatatctgcatgatagcaaattttctaaggtcaattttacaaaactcaagccgtcagcgccagagtatttttttgtgcctaaggattatggtctcaaagaggaatatgaaaagggttttagtgtgcaagatttgttttcagtaaattctttaggattattaacaaaaagggatagtctgtctatttcatattcggagagagaattaactgaaaaaataaaattttttcttgatgaaaataattctatacaagacgtttgtgatcactttgatataccgttaaaagataatgataaatggaatgcatcaatttcccgtacaatgattaatgttaaacagataaaaaaacacattaccaatgttttatatagaccatttgataaaagatgcgtattttacaatgaatggtttgttgcaagattaaacaaaacaacgttagataatttgcaaaataccaaccatgctttgataattggacgacaaggacaggttgttggcgatattggtgggtggaatattgtttttattacaaattctatagtggaccaaaatattttttatagagggggtggtactgtttttcctctctatctttaccacgaccatgaaatacgcaaaccaaacctgaacgacacaatcgtcagcgaaatatccaaacggatagacgtgcggtatgttgaagaaaaagaaataggttcatataaaaaatgctttgcgccgatagacattttagactacatatatgcgatcttgcactccccagtctaccgcgagcgctacaaagagttcctaaaaatagacttcccgcgcatcccttatcccgaagacgccaagcaattccgcaccctcgcaaaactcggtgaaaaactccgctgcttgcacttattggaagatgtggagccgctacggaacacagcggactatcccgtccccggtagcgacgaagtagagaaaatccaatacgacgaagacggcggcaaaggcaaggtattcatcaacagcaagcaatattttaggaacgtcccccgcgaggcgtgggagttctacatcggcggttaccaacccgcccaaaagtggctaaaagaccgtaaagggcggattttgagttatgacgatacgttacattatcggcgaataatcacggttttattgaaaactatggagataatggaagaaatcaaggcaatattgtag

SEQ ID NO: 58080 - protein, 592 aa, Unknown
  Obtained from environmental sample
  misc_feature (1)..(592): Xaa is any amino acid
MAREANEANSIKRDTPIMVVLGNPPYSGESQNKCEWIMQLMDDYKKEPPADSTLQEKNPDHWLEVHEQSAQKLYERNSKWINDDYCKFIRLGQYFIDKNNEGILAYINNHSFLDNPTFRGMRWSLLKSFDKIYILDLHGNSKKKEVCPDGSKDENVFDIQQGVSINIFVKTGRKAKGALAEVYHIDVFGKREEKYKYLHDSKFSKVNFTKLKPSAPEYFFVPKDYGLKEEYEKGFSVQDLFSVNSLGLLTKRDSLSISYSERELTEKIKFFLDENNSIQDVCDHFDIPLKDNDKWNASISRTMINVKQIKKHITNVLYRPFDKRCVFYNEWFVARLNKTTLDNLQNTNHALIIGRQGQVVGDIGGWNIVFITNSIVDQNIFYRGGGTVFPLYLYHDHEIRKPNLNDTIVSEISKRIDVRYVEEKEIGSYKKCFAPIDILDYIYAILHSPVYRERYKEFLKIDFPRIPYPEDAKQFRTLAKLGEKLRCLHLLEDVEPLRNTADYPVPGSDEVEKIQYDEDGGKGKVFINSKQYFRNVPREAWEFYIGGYQPAQKWLKDRKGRILSYDDTLHYRRIITVLLKTMEIMEEIKAIL

SEQ ID NO: 58081 - DNA, 408 bp, Unknown
  Obtained from environmental sample
  misc_feature (1)..(408): n is a, c, g, or t
atgagctcttcaaaagaaaagaatagacgcatactggtcatcgacgacgaggcggacgtccttgagttcttgaggatctaccttgagacgatgggctgggaggtgaaggccgtgcccacggtggcggccgctttcgaggccttggccgaagctccgtacttcttggtcatcaccgacatcgccatgcccgaaatggacgggtacgagctggtggacgccgtgaaggaacgcggctaccaatgccgcttcgccctaatgaccggtttcgggtacaaccccaaacacacgatcataaagatcaataaaacaataaaattcccatgcctcttcaaaccgttcaaccgagaaaaggtgatggacgcggtaaacgaggcgttttccatttatcacagcgatattaccgagtaa

SEQ ID NO: 58082 - protein, 135 aa, Unknown
  Obtained from environmental sample
  DOMAIN (9)...(123): Response regulator receiver domain
  misc_feature (1)..(135): Xaa is any amino acid
MSSSKEKNRRILVIDDEADVLEFLRIYLETMGWEVKAVPTVAAAFEALAEAPYFLVITDIAMPEMDGYELVDAVKERGYQCRFALMTGFGYNPKHTIIKINKTIKFPCLFKPFNREKVMDAVNEAFSIYHSDITE

SEQ ID NO: 58083 - DNA, 378 bp, Unknown
  Obtained from environmental sample
  misc_feature (1)..(378): n is a, c, g, or t
atgaaaaagaagatactggttatcgaggacgacaacgacattgccgatctcgtcaagctcgtgcttgaaaccgatatgtttgaggttcaagcggttctcgaaccggaaaccgccctcgataaggtcaaagagtatcggcccgacgccatactcctcgatatatgtatgccgaaactagacgggtgggcggtgttcaagcagatccgccgatgcgaagaattcagcaacgtccccatcgcgatcctgtccggcaagagccagcagctggaccacatggtggggttgcacataatgaacgcggacgcgtatatcgcaaaaccgttcgggaaacaggaattgatagacaaaacttatgagctcttcaaaagaaaagaatag

SEQ ID NO: 58084 - protein, 125 aa, Unknown
  Obtained from environmental sample
  DOMAIN (3)...(118): Response regulator receiver domain
  misc_feature (1)..(125): Xaa is any amino acid
MKKKILVIEDDNDIADLVKLVLETDMFEVQAVLEPETALDKVKEYRPDAILLDICMPKLDGWAVFKQIRRCEEFSNVPIAILSGKSQQLDHMVGLHIMNADAYIAKPFGKQELIDKTYELFKRKE

SEQ ID NO: 58085 - DNA, 966 bp, Unknown
  Obtained from environmental sample
  misc_feature (1)..(966): n is a, c, g, or t
ttgtcgtctgggattttttccgatcccgacatcgtcatgcaaaaattaattgacaccgcgaaaacgctgcgcacggagtcgggatacggcggctacattcacctaaaaataattcccggcacaggcgagaaaatgatacgcgaggctggactttgggccgacaggcttagctgcaacattgagcttccgacagaaaagagccttgtatgtcttgctccgcagaaatcgggaaaggacattctcggcgcgatgaatgatttttccggtttaaagagcgaatttgaagaaacaagccgtaaaagccgttttataccgaagggaaaaatcaacgcgccctatttcgcgcccgcagggcaaagcactcagcttattgtcggcgctacgcaagaagacgacaggcagatagtcaatctttcaagttctctctataaaaaattttcattaaagcgcgtttactactctgcctttattcaccccggcggttatgcgcaaaaagaaaactcaatgttaaccgattcgcgtcttcctgaaatgttaagcccgccccttgtgagggaacatcgtttgtatcaggcggactggcttttacgtttttatcacttcagcgccggtgaaattttgagcgatgacgagcccttccttgatacgcatgtcgatcctaaaacagcgtgggcgcttaaaaatcttgactttttccccgtagaaataaaccgcgccgattacgagaccttgctgcgcattcccggtatcggcgcanaaacagcccgcagaatacttgaaacccgccgttccagaagaattactatcgaaaccttgcagagaatgggagctatactaaaacgagcccgttatttcttaacggctggcggagcgttcatcgaacagcctgatgatcctgtccgtatccgcaggctgttatcggatactgacggcgctggtatgcaacttccgctatttgagttttag

SEQ ID NO: 58086 - protein, 321 aa, Unknown
  Obtained from environmental sample
  DOMAIN (232)...(261): Helix-hairpin-helix motif
  misc_feature (1)..(321): Xaa is any amino acid
MSSGIFSDPDIVMQKLIDTAKTLRTESGYGGYIHLKIIPGTGEKMIREAGLWADRLSCNIELPTEKSLVCLAPQKSGKDILGAMNDFSGLKSEFEETSRKSRFIPKGKINAPYFAPAGQSTQLIVGATQEDDRQIVNLSSSLYKKFSLKRVYYSAFIHPGGYAQKENSMLTDSRLPEMLSPPLVREHRLYQADWLLRFYHFSAGEILSDDEPFLDTHVDPKTAWALKNLDFFPVEINRADYETLLRIPGIGAXTARRILETRRSRRITIETLQRMGAILKRARYFLTAGGAFIEQPDDPVRIRRLLSDTDGAGMQLPLFEF

SEQ ID NO: 58087 - DNA, 1179 bp, Unknown
  Obtained from environmental sample
  misc_feature (1)..(1179): n is a, c, g, or t
atgacaaatacgcaaaataaaatttggttagtaaccaagggtctgtgtcaacggtggtttataacagctttcggcggtatggcgttcggtttgtttgctacgcttatagccggaacaattgtcaatcagattggaaaatggattggaaacagcaatgcaggtctcgcgtttcaggctgctggcttggttgctcagttgcttatgggagcaggcataggcgcaggtattgcgcaaagtttgaaagctgataagcttatacttttttccgccatttgcgccggatttatcggggcgcagagtattgcgataattaatgctgttcattcggccgctcaattaagcgctcaaggcggtttgcctgtattcgggatgtttaacctgacggcgaatgtcgctgttgagaacggagccttagtcagaaacggcggactggttggcccaggggagcctgtttccgcattcattgcgtctgtcgttgccgtggaaatcggtttgtttttaaaagggaaaaccaggcttgatatagtcgtacttcctgtttccgctttattgcttgggttatttcttgcttttacagtttgtccccatgttgttagaacattcacggcattcggcaactggatcatgctgtcaacagagataaacccggtatggatgggatttgttctttctgtttctgtagggttacttttgactatgcctacttccagcgcggcgatttgcgtagcgtgcggtataggcggactggccgggggagccgccgctgtcggcggagccgcccacatggtctgcttcgcggtaatgagctggcgggaaaaccgagtaccgggccttatttcacaggggcttggaacgagtatgctgcaaatacccaatatatttaaaaaccccagagtacttgttccgcctgtagcggcgagcgcggtttgcggacctcttgccgccgctgtttttagtttgcgttgcagcagtacaggaagcggtatgggcacggctggtcttgtcgggttatttacaacaattactgcgtcacttgatgccggagttaagacaggtatgcttgtttttggtattatactgctcttctttgttattccggttgtcttcggcgcggtcgggagattgttattgggaaatatcggctggattaaagacgacgatttaaaactggaactttaa

SEQ ID NO: 58088 - protein, 392 aa, Unknown
  Obtained from environmental sample
  misc_feature (1)..(392): Xaa is any amino acid
MTNTQNKIWLVTKGLCQRWFITAFGGMAFGLFATLIAGTIVNQIGKWIGNSNAGLAFQAAGLVAQLLMGAGIGAGIAQSLKADKLILFSAICAGFIGAQSIAIINAVHSAAQLSAQGGLPVFGMFNLTANVAVENGALVRNGGLVGPGEPVSAFIASVVAVEIGLFLKGKTRLDIVVLPVSALLLGLFLAFTVCPHVVRTFTAFGNWIMLSTEINPVWMGFVLSVSVGLLLTMPTSSAAICVACGIGGLAGGAAAVGGAAHMVCFAVMSWRENRVPGLISQGLGTSMLQIPNIFKNPRVLVPPVAASAVCGPLAAAVFSLRCSSTGSGMGTAGLVGLFTTITASLDAGVKTGMLVFGIILLFFVIPVVFGAVGRLLLGNIGWIKDDDLKLEL

SEQ ID NO: 58089 - DNA, 1029 bp, Unknown
  Obtained from environmental sample
  misc_feature (1)..(1029): n is a, c, g, or t
ttgatcagatcggccgaggtgtacgacgtgatgccaagcgtcagcatcggcaactggaaggggctggaggccgaggttcctgaagtagcggtaggcgaggaagatattgcccgcgagttggaagaactgcgggaccgcaacgcttttgtccttgacagggacgatgccgcggaagccaggctcggcgatgttgtcactgtgaactattgcctgctggatgatgcgggcaataccctgcccgacagcgggagggatgatttttccttcaccctgggaagcgggcagaataactttgattttgacaatgacgttgtcggaatgaaaaaaggcgaaacgaaagacattaccaaggccaacggcgcggatggggaaaaccctggggaaacaaagaaaattagggtaacgctcaccgcccttaaggaaaaaaagctccccgatttgaatgatgatctggcccaggatatcgatgaaaaattcaacacccttgacgatctaaagaacagcataagggaacggctggaaaaagcgctggcaaaccgccttagagagtataaggtcagcaaattgcttgagaaaatcatagaaaatacccctgttaccctgcctgaatccatggtaaaggcggaaattgacggcaggcttcgcaatcttgccaggcaatacggcctggacgcggcaaaaatgatgcagatgctttcccaggggggcgaggggcttgatgatattgaaggcaaatggcggccttcggcggaaaaagccctgcattctcgcctaatcgtggaaaaactcatggaagatcagcatattgaagccaataatgaggaaatcgagaaggagatggagaatttcgccgctgaatcggatatgtccgtggaagaatttaaaaaacattacaacgaggagaaagccatggaatacattaaagacgaggtgaaagaacggaagatttatgacctgattttgggtgaaaatacaataaaaaccggatctaaaatgaactatctggattttatgcaaaataatggttaa

SEQ ID NO: 58090 - protein, 342 aa, Unknown
  Obtained from environmental sample
  DOMAIN (54)...(137): FKBP-type peptidyl-prolyl cis-trans isomerase
  misc_feature (1)..(342): Xaa is any amino acid
MIRSAEVYDVMPSVSIGNWKGLEAEVPEVAVGEEDIARELEELRDRNAFVLDRDDAAEARLGDVVTVNYCLLDDAGNTLPDSGRDDFSFTLGSGQNNFDFDNDVVGMKKGETKDITKANGADGENPGETKKIRVTLTALKEKKLPDLNDDLAQDIDEKFNTLDDLKNSIRERLEKALANRLREYKVSKLLEKIIENTPVTLPESMVKAEIDGRLRNLARQYGLDAAKMMQMLSQGGEGLDDIEGKWRPSAEKALHSRLIVEKLMEDQHIEANNEEIEKEMENFAAESDMSVEEFKKHYNEEKAMEYIKDEVKERKIYDLILGENTIKTGSKMNYLDFMQNNG

SEQ ID NO: 58091 - DNA, 1449 bp, Unknown
  Obtained from environmental sample
  misc_feature (1)..(1449): n is a, c, g, or t
atgagtatgacagaacaaatgaacagtctggttcccatagttgtcgagcagaccggagcgggtgaaagatcctatgatatattttcccggcttttgaaagacaggatcgtttttatcgacggggagataaacgacctgagcgcggatctggttgtcgcccagcttctcttcctggacggacaggatacggaaaaggacatcaacctgtacatcaattcgccgggcggctcggttacagcggggcttgccatatacgataccatacagtacctcaggtccgatgtccagacgatctgccttggccaggccgcgagcatggcggcgctaatcgtggccgccggggctgcgggcaagcggctggttcttccgtcctcgcgtatgcttatccaccagccctggggcggcgcttcgggacaggcccgcgacataggcatacagtccaaggaaataatccgcctganaaaaatgaccattgattattttgcaaaacacacaggcaaagaaccacagataatagccgccgacatggaaagggatttctatatgtcggcgcaggacgccgtcgcttacggcgttgcggatcgaattcttgtgagggagaaaatggcgcgaattcgtaataccgaaggaatgaacgagagggtatgttctttctgcggaaaaagcaccgatatggcccgcaggctcatcgcggggccgaacaaggtatttatctgcgatgaatgtgtcgaagtctgccgcaagatactgacagacgaggatcatgagctgaccagccagttcaccggggacatacccacgccggttgagatcaaactgtaccttgaccagtttgtgattggccaggaggcggccaagaaagccctgtccgtcgccgtttacaaccactacaaacgaattgccaatcccaacaggagcaacaacaatgacgtggaaatagaaaaatccaatgtcctgctgattggacctacgggcacgggcaagaccctgctcgcgaggattctcgccaggaagcttaaagtcccctttgccattgttgacgcgaccacccttaccgaggcgggctatgtgggcgaggatgtggagaacatactgctcaagttgatccagaacgccggcggcaacatagcggtcgccgagcgcggcattgtgtacattgacgaaatcgacaagatcgcccgtaagggggagaatgtttccattaccagggatgtatcgggcgagggcgtgcagcaggcgttgcttaaaataatcgaggggacaatagcctcggtgccgccgcagggcgggcgcaaacacccgaaccaggaactgatccgtatagacaccacgaacatactttttatctgcggcggggcttttgtgggccttgataaaatgatcgcgcgaagggttgtccagcatcccctgggctttggcacggagggcgccagttctgaaaaaacctga

SEQ ID NO: 58092 - protein, 482 aa, Unknown
  Obtained from environmental sample
  DOMAIN (279)...(416): Sigma-54 interaction domain
  misc_feature (1)..(482): Xaa is any amino acid
MSMTEQMNSLVPIVVEQTGAGERSYDIFSRLLKDRIVFIDGEINDLSADLVVAQLLFLDGQDTEKDINLYINSPGGSVTAGLAIYDTIQYLRSDVQTICLGQAASMAALIVAAGAAGKRLVLPSSRMLIHQPWGGASGQARDIGIQSKEIIRLXKMTIDYFAKHTGKEPQIIAADMERDFYMSAQDAVAYGVADRILVREKMARIRNTEGMNERVCSFCGKSTDMARRLIAGPNKVFICDECVEVCRKILTDEDHELTSQFTGDIPTPVEIKLYLDQFVIGQEAAKKALSVAVYNHYKRIANPNRSNNNDVEIEKSNVLLIGPTGTGKTLLARILARKLKVPFAIVDATTLTEAGYVGEDVENILLKLIQNAGGNIAVAERGIVYIDEIDKIARKGENVSITRDVSGEGVQQALLKIIEGTIASVPPQGGRKHPNQELIRIDTTNILFICGGAFVGLDKMIARRVVQHPLGFGTEGASSEKT

SEQ ID NO: 58093 - DNA, 327 bp, Unknown
  Obtained from environmental sample
  misc_feature (1)..(327): n is a, c, g, or t
ttgagcaccgtatcctttgtaattaacacatgtttatacccctttatggagggaatttcaaacataatgtcggtcatcaatttttccacaatggcccgaagccctctggcaccggtcttctgtttgattgccgtatccgcaatcgcgtcaatcgcgtcttcggtgaattcaagcttaacttcgtcaatggccagggatgcggtgtattgttttataatcgcgtttttgggctcagtgataatccgtttaaggtcatccctgttaagctcttccaggcttacggttattggaagcctgccgataaattcggggatcattccaaagtga

SEQ ID NO: 58094 - protein, 108 aa, Unknown
  Obtained from environmental sample
  misc_feature (1)..(108): Xaa is any amino acid
MSTVSFVINTCLYPFMEGISNIMSVINFSTMARSPLAPVFCLIAVSAIASIASSVNSSLTSSMARDAVYCFIIAFLGSVIIRLRSSLLSSSRLTVIGSLPINSGIIPK

SEQ ID NO: 58095 - DNA, 360 bp, Unknown
  Obtained from environmental sample
  misc_feature (1)..(360): n is a, c, g, or t
atgatccccgaatttatcggcaggcttccaataaccgtaagcctggaagagcttaacagggatgaccttaaacggattatcactgagcccaaaaacgcgattataaaacaatacaccgcatccctggccattgacgaagttaagcttgaattcaccgaagacgcgattgacgcgattgcggatacggcaatcaaacagaagaccggtgccagagggcttcgggccattgtggaaaaattgatgaccgacattatgtttgaaattccctccataaaggggtataaacatgtgttaattacaaaggatacggtgctcaaatccgagccccctgatattcagactctgcaaaaaatcgcttaa

SEQ ID NO: 58096 - protein, 119 aa, Unknown
  Obtained from environmental sample
  misc_feature (1)..(119): Xaa is any amino acid
MIPEFIGRLPITVSLEELNRDDLKRIITEPKNAIIKQYTASLAIDEVKLEFTEDAIDAIADTAIKQKTGARGLRAIVEKLMTDIMFEIPSIKGYKHVLITKDTVLKSEPPDIQTLQKIA

SEQ ID NO: 58097 - DNA, 414 bp, Unknown
  Obtained from environmental sample
  misc_feature (1)..(414): n is a, c, g, or t
gtggtatggttatacatgatcatactcatggcgggtattacaactatccccatatcgctgtatgaatccgcgtctattgacggcgctaatagcggacaaacaacatggtacataactctgcccctgcttcgcccgataatgctctacattctggttacttctatgatcggcggtatgcagatgtttgatattcccttcctgcttaccgatatgcagggcgctcccaattataagattcgtactactacggtgtatcagtacaatgtagccttagggagaggcgctaacgactatgcctacggagccgctatttcaataggtatatttattattactatactgcttgcccttttaatattcttcttcctgcaggatcgtagtgagttaaagaaaaataaaggaggcgcggtatga

SEQ ID NO: 58098 - protein, 137 aa, Unknown
  Obtained from environmental sample
  SIGNAL (1)...(24)
  misc_feature (1)..(137): Xaa is any amino acid
MVWLYMIILMAGITTIPISLYESASIDGANSGQTTWYITLPLLRPIMLYILVTSMIGGMQMFDIPFLLTDMQGAPNYKIRTTTVYQYNVALGRGANDYAYGAAISIGIFIITILLALLIFFFLQDRSELKKNKGGAV

SEQ ID NO: 58099 - DNA, 441 bp, Unknown
  Obtained from environmental sample
  misc_feature (1)..(441): n is a, c, g, or t
atgagaatttatttagatcattgcgcttataatagaccgtttgatgaccaaaataacataaaaaatcagttggaaacatcggcaaaattacatatacaagaccagataagacaaggaaaatatgacttagtttggtcttatatgtcggattttgaaaatgataataatccaaatattgaaaacaagaaatctatacaagtatgggaaaatatatcaaaatataaatgtaagtcatctgaaaatattttaatgcgggggagtaaaattgcggaaaaaggtattcaagcaaatgacgccctgcatattgcttgtgcaatagaaagccaatgtgaatactttataactacagatgcaagtttgacaaataaagaaattgatgggataaaaataatcaatccaattgattttgtacgaaatatggaggaaaaaaatgagaactga

SEQ ID NO: 58100 - protein, 146 aa, Unknown
  Obtained from environmental sample
  misc_feature (1)..(146): Xaa is any amino acid
MRIYLDHCAYNRPFDDQNNIKNQLETSAKLHIQDQIRQGKYDLVWSYMSDFENDNNPNIENKKSIQVWENISKYKCKSSENILMRGSKIAEKGIQANDALHIACAIESQCEYFITTDASLTNKEIDGIKIINPIDFVRNMEEKNEN

SEQ ID NO: 58101 - DNA, 1281 bp, Unknown
  Obtained from environmental sample
  misc_feature (1)..(1281): n is a, c, g, or t
atgagtgaatacatcattaacggcggggttccgctgaatggaactatcaaggtcagcggaaacaaaaacgccgccctgccctgcattgccgcggcgcttttaaccgatgagccggtcattttacggaacattcccgatattgaggacgtgcgggttatgtttgacgtgttcgccgcgcttggcggggaagttacaaatcttcagcctaatgtttacagtctttcgcttcaaaatattaaatcttcggaaataccgcctgaacaggcgaaaaaaataagggcgtctatcctgtttgccggccctcttctcgcgaggacgggaaaagtcatccttcccccgccgggcggcgacgttatcggaagaaggcggcttgacacccactttctggtgcttacggagctcggctccaaagtaaaaataagcgacaaatttacttttaccgcgaagacgcttacaggcgcggatatttttcttgacgaggcttcggttacggcgacggaaaacgcaatcatggcggcagcgcttgcgaaaggtaaaacaattctgactaacgccgcaagcgagccgcacgttcaggacctttgcaatatgctggtcaaaatgggcgcgaagatagagggaataggctccaatatccttatcattaacggcgtaaaaaaactttccggctgtgattttgaaataggccccgattttatggaagtaggttccttcattgggcttgcttcggtaaccggcggagaccttcacattgagggcgcgcgcataaacgatatgcgcccggcgaaaatctcattcggcaagctgggaattgtctgggcgcatgaaggaacagttatccatgtgcctaaaaaccaaagcatggaagtaaatcacgacctaggcggtatgattccaaaaatagacgatgccccctggccaggatttccgcctgatcttatcagtattataatcgtagttgcgacacagataaagggaaccgtccttgttcacgaaaaaatgtacgagtcgcggatgttctttgtagacaaactgattggtatgggcgcaaggatcgtgttatgcgatcctcaccgcgccgttatttcaggtcctacaaaactgcacggcacggagcttataagccccgatgtacgcgccggaatggcaatgctcatagccgcaatgtgcgcggaaggaaacagtgttattcgcaatatttaccagattgaaagaggttacgaacatcttgaggaaaggctttcatcgcttggagcgcgcataaaaagaatcgaagcataa

SEQ ID NO: 58102 - protein, 426 aa, Unknown
  Obtained from environmental sample
  DOMAIN (6)...(414): EPSP synthase (3-phosphoshikimate 1-carboxyvinyltransferase)
  misc_feature (1)..(426): Xaa is any amino acid
MSEYIINGGVPLNGTIKVSGNKNAALPCIAAALLTDEPVILRNIPDIEDVRVMFDVFAALGGEVTNLQPNVYSLSLQNIKSSEIPPEQAKKIRASILFAGPLLARTGKVILPPPGGDVIGRRRLDTHFLVLTELGSKVKISDKFTFTAKTLTGADIFLDEASVTATENAIMAAALAKGKTILTNAASEPHVQDLCNMLVKMGAKIEGIGSNILIINGVKKLSGCDFEIGPDFMEVGSFIGLASVTGGDLHIEGARINDMRPAKISFGKLGIVWAHEGTVIHVPKNQSMEVNHDLGGMIPKIDDAPWPGFPPDLISIIIVVATQIKGTVLVHEKMYESRMFFVDKLIGMGARIVLCDPHRAVISGPTKLHGTELISPDVRAGMAMLIAAMCAEGNSVIRNIYQIERGYEHLEERLSSLGARIKRIEA

SEQ ID NO: 58103 - DNA, 975 bp, Unknown
  Obtained from environmental sample
  misc_feature (1)..(975): n is a, c, g, or t
gtgtttcgtgttgtgcgttctgttagctgcaatggcaacgccgcctgggcccgcggaaagattgaaactgccaccgccgaaggcactgagacctggcggcatattttcgatattaaagggcggagaaaaggcacatataattttattgtaaacgcccaggaccatgcggggaacgaatcggtttccggccctttcaatataaagattgatcccaattcgggcatgcccatggtgaaggtaatattcccggaaaataactctgtcgtacggcagaatatcaatgttttaggcaccgccaaagggtattttgacattgaaaaagtatctgtccgtctggacggcggcgaaactcttgaagcggaaggcaaggaatactggagcaggatgatcgaatttaatggcgctaccgacggcaaaggcaaatccagggggattaccgacggtaaacacgccctgtatatcaaggccactgacgccaatggaaccaccggcccggaacagagaatcgattttatctttgataccagccctccgaaaattgagatactttcgcataaaatcggcgacactatcagttcgaatgtaagcataagggggagggcaagcgacgcaaacgggatacgctcggtggaattgagcgaggacggaaagagttacacaaggctggatgtacagaatttgcggggtttgtttaaatcgctgaagaaaaacacctccattaattttgagatcccggcaaaagccagagaattgccggacggcgcgaaggtgtaccatgtgcgcgcaacggacgcaaccggcgccgtcactgtcaagcagtttatgttttatattaaaagacggcctccccgcgctggaaatatatacccccatgccggacgagcccatagccggcgtatttatgctctccggcagggcgtattcccaggccggtatttcacagttatcaatggaatggggcaaaatgaagagtga

SEQ ID NO: 58104 - protein, 324 aa, Unknown
  Obtained from environmental sample
  misc_feature (1)..(324): Xaa is any amino acid
MFRVVRSVSCNGNAAWARGKIETATAEGTETWRHIFDIKGRRKGTYNFIVNAQDHAGNESVSGPFNIKIDPNSGMPMVKVIFPENNSVVRQNINVLGTAKGYFDIEKVSVRLDGGETLEAEGKEYWSRMIEFNGATDGKGKSRGITDGKHALYIKATDANGTTGPEQRIDFIFDTSPPKIEILSHKIGDTISSNVSIRGRASDANGIRSVELSEDGKSYTRLDVQNLRGLFKSLKKNTSINFEIPAKARELPDGAKVYHVRATDATGAVTVKQFMFYIKRRPPRAGNIYPHAGRAHSRRIYALRQGVFPGRYFTVINGMGQNEE

SEQ ID NO: 58105 - DNA, 519 bp, Unknown
  Obtained from environmental sample
  misc_feature (1)..(519): n is a, c, g, or t
ttggatactggatgcagtgaatgtaccggccaagcccaaggcgggacggcggagctgaatgccaaggtgtccgagctggagaagtccctcgcggaagagagggacaaatatacgcgccttttggcggactacgacaacagccgcaagaggtcggccaaggaagtgcagttgggcgtggagcaggttgaaagacagatactgctggaggtgctgcaggtcatggacagcttccgccgctgcctggcctcaaactacgccagcgtcgaggacttccgtgcgggcgttggtcttatagagagacagttcgactctgcgctgcgccgactcagggtgtcggaaatagagataggcgttgggggcgagttcgacacgcatgtggccgaggcccttacaacggtgaaaatggcggggttccctgctgggagcatcgtggaggtgtgcgaaaggggctacaggattggtgaaaggcttttgcgcccggcaagggtggtcgtcgccgcaggcgacgacgctccgtag

SEQ ID NO: 58106 - protein, 172 aa, Unknown
  Obtained from environmental sample
  DOMAIN (12)...(167): GrpE
  misc_feature (1)..(172): Xaa is any amino acid
MDTGCSECTGQAQGGTAELNAKVSELEKSLAEERDKYTRLLADYDNSRKRSAKEVQLGVEQVERQILLEVLQVMDSFRRCLASNYASVEDFRAGVGLIERQFDSALRRLRVSEIEIGVGGEFDTHVAEALTTVKMAGFPAGSIVEVCERGYRIGERLLRPARVVVAAGDDAP

SEQ ID NO: 58107 - DNA, 720 bp, Unknown
  Obtained from environmental sample
  misc_feature (1)..(720): n is a, c, g, or t
gtgaccatcttcgcccaattacgcttcgcccgcgagcttgagctcgcgcagcacgaaggcacttatctcaggcggggagtactgcctttcgcccaccgtgacccaagcatccccgttgggggccctcgacacagtgtaaggcaagtgcggaatggcgccctgcacgttgggcgaatcgtagcgctgaccgatcaggcgcttgatggcgaacagtgtgccctgcggattcatcgcggcctgcctctttgccacatgccccacaagctctttgccaccctccgcaaaggccacaaccgaaggcgtggtcatgctcccctcggcgttggggatcactttgtattccccgttttccacaacgcaggcgcagctattagtcgtgcccaagtctatgcctatcagtctgctgggcattgcaattcctttgtgctgcgttgcatgggcacgcccctacggagcgtcgtcgcctgcggcgacgaccacccttgccgggcgcaaaagcctttcaccaatcctgtagcccctttcgcacacctccacgatgctcccagcagggaaccccgccattttcaccgttgtaagggcctcggccacatgcgtgtcgaactcgcccccaacgcctatctctatttccgacaccctgagtcggcgcagcgcagagtcgaactgtctctctataagaccaacgcccgcacggaagtcctcgacgctggcgtagtttga

SEQ ID NO: 58108 - protein, 239 aa, Unknown
  Obtained from environmental sample
  misc_feature (1)..(239): Xaa is any amino acid
MTIFAQLRFARELELAQHEGTYLRRGVLPFAHRDPSIPVGGPRHSVRQVRNGALHVGRIVALTDQALDGEQCALRIHRGLPLCHMPHKLFATLRKGHNRRRGHAPLGVGDHFVFPVFHNAGAAISRAQVYAYQSAGHCNSFVLRCMGTPLRSVVACGDDHPCRAQKPFTNPVAPFAHLHDAPSREPRHFHRCKGLGHMRVELAPNAYLYFRHPESAQRRVELSLYKTNARTEVLDAGVV

SEQ ID NO: 58109 - DNA, 318 bp, Unknown
  Obtained from environmental sample
  misc_feature (1)..(318): n is a, c, g, or t
ttgatggcgaacagtgtgccctgcggattcatcgcggcctgcctctttgccacatgccccacaagctctttgccaccctccgcaaaggccacaaccgaaggcgtggtcatgctcccctcggcgttggggatcactttgtattccccgttttccacaacgcaggcgcagctattagtcgtgcccaagtctatgcctatcagtctgctgggcattgcaattcctttgtgctgcgttgcatgggcacgcccctacggagcgtcgtcgcctgcggcgacgaccacccttgccgggcgcaaaagcctttcaccaatcctgtag

SEQ ID NO: 58110 - protein, 105 aa, Unknown
  Obtained from environmental sample
  SIGNAL (1)...(28)
  misc_feature (1)..(105): Xaa is any amino acid
MMANSVPCGFIAACLFATCPTSSLPPSAKATTEGVVMLPSALGITLYSPFSTTQAQLLVVPKSMPISLLGIAIPLCCVAWARPYGASSPAATTTLAGRKSLSPIL

SEQ ID NO: 58111 - DNA, 393 bp, Unknown
  Obtained from environmental sample
  misc_feature (1)..(393): n is a, c, g, or t
atgcccagcagactgataggcatagacttgggcacgactaatagctgcgcctgcgttgtggaaaacggggaatacaaagtgatccccaacgccgaggggagcatgaccacgccttcggttgtggcctttgcggagggtggcaaagagcttgtggggcatgtggcaaagaggcaggccgcgatgaatccgcagggcacactgttcgccatcaagcgcctgatcggtcagcgctacgattcgcccaacgtgcagggcgccattccgcacttgccttacactgtgtcgagggcccccaacggggatgcttgggtcacggtgggcgaaaggcagtactccccgcctgagataagtgccttcgtgctgcgcgagctcaagctcgcgggcgaagcgtaa

SEQ ID NO: 58112 - protein, 130 aa, Unknown
  Obtained from environmental sample
  misc_feature (1)..(130): Xaa is any amino acid
MPSRLIGIDLGTTNSCACVVENGEYKVIPNAEGSMTTPSVVAFAEGGKELVGHVAKRQAAMNPQGTLFAIKRLIGQRYDSPNVQGAIPHLPYTVSRAPNGDAWVTVGERQYSPPEISAFVLRELKLAGEA

SEQ ID NO: 58113 - DNA, 1167 bp, Unknown
  Obtained from environmental sample
  misc_feature (1)..(1167): n is a, c, g, or t
atgggtttcaataaaaacgccgctgttcttaaatcaattgtcgataaaaccctcagcattatcaacgtaaataatatctcgaaccaatggatgcataaaacttacgattaccggaaaaaattaacggaagcccagcgcccctggtttatcggagccgcgggtttgtttctcacggtacttgtccttgtgctgtttttcctgcataaaagccgcaatttcggtaaacagcttgaatcggttgtaaggcacagaacaagcgaactttcattgaagacctcgcagcttcagatgatgatcgattcaattcccgatcttatattttgcaaggatatcgatttaaaatatacgcaatgcaataagatctttgaagattttatcggcgtcagtgaagcggagctgttcggcaagaccgacagggaaggctcgtggttatcatccgattcggagaaaagaatatccgcagtggaagaatccgtacttaaagaaaagaatatcgcgaaatatgaagagtatgtttcatctatcgtaaccaaaaagggttattactttgaaaccattaaagccccgcttataaaagacggagttgttgtcgggttaatgtgtatagcgcgcgacataacagggcgcaaaacaatggcaaaggaaatcgccctgcaggcttccctgcttaaaaccataattaactcccttcccgacagcgtattctgcaaaaatctggagcttaaatatacgctgtgcaacaaatacatggcggatttattcggcagagaaataaatgaaatcctgggacacaatgatatgcaggcttttggtttttcaaaagaagctatggagattgcaaataacgcggacaggacagccctgaacgaatgccggcaggtatcctttgaggaatggatggtatgcggggacggaaccaagcggctttttgaaaccgtaaaagtgccgcttattctggacgaagaaatagtcggaattctgggcataggccgcgatataacccagcgcaaggcaatggaagaggaagtaagggcggcttctgtcgccaagtccgatttccttgccaatatgagccatgaaatccgcacgccgcttaacgtggttatcggccttacggacctggtgctggaagacggctccctttccaaagaagtacggaaaacctga

SEQ ID NO: 58114 - protein, 388 aa, Unknown
  Obtained from environmental sample
  DOMAIN (221)...(333): PAS fold
  misc_feature (1)..(388): Xaa is any amino acid
MGFNKNAAVLKSIVDKTLSIINVNNISNQWMHKTYDYRKKLTEAQRPWFIGAAGLFLTVLVLVLFFLHKSRNFGKQLESVVRHRTSELSLKTSQLQMMIDSIPDLIFCKDIDLKYTQCNKIFEDFIGVSEAELFGKTDREGSWLSSDSEKRISAVEESVLKEKNIAKYEEYVSSIVTKKGYYFETIKAPLIKDGVVVGLMCIARDITGRKTMAKEIALQASLLKTIINSLPDSVFCKNLELKYTLCNKYMADLFGREINEILGHNDMQAFGFSKEAMEIANNADRTALNECRQVSFEEWMVCGDGTKRLFETVKVPLILDEEIVGILGIGRDITQRKAMEEEVRAASVAKSDFLANMSHEIRTPLNVVIGLTDLVLEDGSLSKEVRKT

SEQ ID NO: 58115 - DNA, 678 bp, Unknown
  Obtained from environmental sample
  misc_feature (1)..(678): n is a, c, g, or t
atgcccagtatgctaaacgacgtgattacccttgtctctacacgccttggagaaaaacctatcaaattcagtctaaacatcagtgacgatttacccaataaactctacggagacgatcttcgcataaaacagattttcaataatttattgagtaatgccatcaaatatacgcacagcggaaccatcgaattaaacgtgagctgcgaacgtgaaggcgctgatgtgttgatgaaagtgtccgtcagcgataccggcatcggtataagcgaagaaaatataaaaaaacttttcgcggattataaccaggtagacacccgtgccaaccgcaatatagaaggcacaggcctgggattggccatcacgaagagacttacggagcttatggggggggaaatctccgtagcaagtgagtacggcaagggctcggttttctccgtgtatatccggcagggctttgtaagcgatacgccaatagggcctgttgtcgcggaaaacctccgtaaattccgttacgccgagggtaaacgcactgttacaaaaaaactcgtacgccacgatttaagttacgccatagtactggtcgttgacgatatgcagaccaaccttgatgtggcggcaggcctcttgcggaaatataaaatgcaagtcgattgtctgctcagggaaaagaggccctga

SEQ ID NO: 58116 - protein, 225 aa, Unknown
  Obtained from environmental sample
  DOMAIN (37)...(151): Histidine kinase-, DNA gyrase B-, and HSP90-like ATPase
  misc_feature (1)..(225): Xaa is any amino acid
MPSMLNDVITLVSTRLGEKPIKFSLNISDDLPNKLYGDDLRIKQIFNNLLSNAIKYTHSGTIELNVSCEREGADVLMKVSVSDTGIGISEENIKKLFADYNQVDTRANRNIEGTGLGLAITKRLTELMGGEISVASEYGKGSVFSVYIRQGFVSDTPIGPVVAENLRKFRYAEGKRTVTKKLVRHDLSYAIVLVVDDMQTNLDVAAGLLRKYKMQVDCLLREKRP

SEQ ID NO: 58117 - DNA, 2352 bp, Unknown
  Obtained from environmental sample
  misc_feature (1)..(2352): n is a, c, g, or t
atggccgagaatattcccgtaggccccggacgcggttcgggagcgggttccattgtcgcctattccctgcgtattaccgatattgatcccttaaaatacggccttatatttgagcgttttttaaaccccgagcgcatttccatgcccgattttgacattgattttgccaatgagggacgcgaggaagtaataaattatgttacgcgaaaatacggcaaagaaagggtggcgcagataatcacgttcggaacattgggcgcgaaagcggttatcaaggacgtggcaagagtattgggaatatcaattccggaatcggaaatgataacaaaacttatttcgtttgatcctgaaattacccttgataaggcaaaagaagatgagccccgccttagggaactggaaaacgatccgcgttttacggaactattcgccatcgcgcataaacttgaggggcttaaccgtcattcaagcatacacgccgccggcatcgtaatcgggaaaaaaccgctgattgaactggtgcccctctttcaggaaagggaagaaaagggcggcaatatcgccacgcagtacagcatgaacttccttgaagaatgcggccttgttaaaatggattttctcggcctcaaaaaccttgacatccttaaacattcgcaggaattaatccgccggcgcgggggcaaatattcaaactttaatatggaagatattccggaagatgacaaaaaaacctttaagatgttaggcgagggaaaaagccacgctgtttttcagtttgcctccgacggcatgcaggatattttaaggcagacgaagcccacatctatagaagacttaactgccttaaacgcgatgtacaggccgggacctatgcagtttattccccgctttgtggattgtaaaaacggaaaagcgccgataacctatcccgatccaagccttgaaggaattcttaaagaaacctacggcgttattgtttatcaggaacaggttatggaagtggcaaaaataatcgccggttacagcatgggaaaagcagacctcctccgccgcgccatgggaaaaaagaaaaaagaaattattgacggggaaaaaatcccgttcctggaaggcgctacaaaacagggatactccgcgcaaaaggccggggaaatttacgacatactggttccgttcgcgggttacgggttcaataaaagccatgccgccgcttattcagtattggcataccagaccgcttaccttaaagcgaattttcccgcggaatatatggcggctacattgatagtcgaaataaaattcgccgataggcttttatacaccattgtcgaagcccgtaaaatgggaataagcgtcgatcctcctaatattaattattcagacaaactttttacagtagtagacggcaggatagtatacggtttccttgggattaaaggcgtaggggacgctccggctgaagaaatcgtgcggggcaggcaaaacgaccattataaaagttttatggattttctggacagagtggacataaaagccgtaagcaaaaaagttatagaactgcttattcacacaggcgcgtttgatgattttaaagtttcgcgcgaaacgctcgccggtaatatggaaaaagccatagaatacgcgcaaaagagtaaagaagacaaacagctcggacaatcaaacctgtttgaaaattcaaacgaatcggatatgcccgattttaaatttaccgaatttccgcctgtaagccgctctgaaagattgaatcttgaaaaacaacttattggtttttatttttcggggcatcctttagatgaatataaggaaatctggcaggatgtcgtgaccgtaaatcttgggcagattgaaacttataaaataggaaactgcgttattgtaggaattattaaaaatataaaacaaataaatacggcgaaaggcggcaagatggcttttgcgactcttgaagattacaacggcgaaattgaagttacttttttttcaggtccgtgggaaagatgtcagaatattattaaggatgattctgtcgtcatattaaaaggaaaaattgattatcaaaaagataaagacaagtacagtttccttgccgacggcgttataagcaaacaggaagtttcgtcagtcgtaaaagaagttaaagagttggacgaaaaaaataaattacataaaaacacatggctttacatggctgatttaaaaagttcttatattacgcaggcgaaaaaaggcaattataccgttataggcttcttaaaatcgatcagggattttaaggatagaaaaggaaacgacatggcgtttggaacgttgcaggatttgaaggcgaaatga

SEQ ID NO: 58118 - protein, 783 aa, Unknown
  Obtained from environmental sample
  DOMAIN (630)...(709): OB-fold nucleic acid binding domain
  misc_feature (1)..(783): Xaa is any amino acid
MAENIPVGPGRGSGAGSIVAYSLRITDIDPLKYGLIFERFLNPERISMPDFDIDFANEGREEVINYVTRKYGKERVAQIITFGTLGAKAVIKDVARVLGISIPESEMITKLISFDPEITLDKAKEDEPRLRELENDPRFTELFAIAHKLEGLNRHSSIHAAGIVIGKKPLIELVPLFQEREEKGGNIATQYSMNFLEECGLVKMDFLGLKNLDILKHSQELIRRRGGKYSNFNMEDIPEDDKKTFKMLGEGKSHAVFQFASDGMQDILRQTKPTSIEDLTALNAMYRPGPMQFIPRFVDCKNGKAPITYPDPSLEGILKETYGVIVYQEQVMEVAKIIAGYSMGKADLLRRAMGKKKKEIIDGEKIPFLEGATKQGYSAQKAGEIYDILVPFAGYGFNKSHAAAYSVLAYQTAYLKANFPAEYMAATLIVEIKFADRLLYTIVEARKMGISVDPPNINYSDKLFTVVDGRIVYGFLGIKGVGDAPAEEIVRGRQNDHYKSFMDFLDRVDIKAVSKKVIELLIHTGAFDDFKVSRETLAGNMEKAIEYAQKSKEDKQLGQSNLFENSNESDMPDFKFTEFPPVSRSERLNLEKQLIGFYFSGHPLDEYKEIWQDVVTVNLGQIETYKIGNCVIVGIIKNIKQINTAKGGKMAFATLEDYNGEIEVTFFSGPWERCQNIIKDDSVVILKGKIDYQKDKDKYSFLADGVISKQEVSSVVKEVKELDEKNKLHKNTWLYMADLKSSYITQAKKGNYTVIGFLKSIRDFKDRKGNDMAFGTLQDLKAK

SEQ ID NO: 58119 - DNA, 1200 bp, Unknown
  Obtained from environmental sample
  misc_feature (1)..(1200): n is a, c, g, or t
atgaaagatgaaaaaaaattctccggcaggttcggagaatacggcggacagtatatccctgaaacattgatgaacgagatcatcaatcttgaacaggcctataaccattacaaggatgatcccgcgttcaaaacggagttggacgctcttttaaaaaattatgcgggacggccttccctcctttattacgcggaaaaaatgactcgcgagcttggcggagcgaaaatctacctgaaacgcgaggacttaaaccacacaggctcccacaagatcaacaatgtactagggcagacgttactcgcgaagaaaatgggcaaaacaagaattattgccgaaacgggagcgggccaacacggcgtagcggcggcgaccgccgcggctctcctgggaatggagtgcgaaatcttcatgggtaaggaagacaccgagcgtcaggcgcttaatgtctaccgcatggagttgttaggcgctaaagttaatcccgtaacaacgggaacgatgacgctcaaggacgcggtaaatgaaacaatgcgcgaatgggtaagcagagtccatgacactcattatgtgcttggctccgtgatgggaccgcatccctttcccgtaattgtgcgcgattttcaggcgataatcagcagggaggcaagggaacagatacttgccgcggaggggaagcttccttccgccgttcttgcctgtgtcgggggcggcagtaacgctatgggtattttttacaatttcataaatgattcggcagtgaagcttataggctgtgacgccgcgggttccggtatcaacaccgaaaaacacgcggcttcaatcgctaaggggcaagtgggaattttccacgggatgaaatcttatttttgtcagaacgaaaaagggcaaatcgcgccggtatattcaatttcggcaggcctggattatccgggcataggaccggaacacgcatggctaaacgacagcaagcgcgcgacctacgtgccggttaccgacgaggaagctgtggacgcgtttgagtaccttgcgcgtaccgaggggatcatctgcgcggtggaaagcgcccacgcgatagcccacgccagaaaaatcgcacgcgacttcggaaaaaacgaaaatatcgtcatctgtctttccggcaggggagacaaggacgtttcggccatagcgcgttaccgggggaaaaagatacatgagtaa

SEQ ID NO: 58120 - protein, 399 aa, Unknown
  Obtained from environmental sample
  DOMAIN (52)...(381): Pyridoxal-phosphate dependent enzyme
  misc_feature (1)..(399): Xaa is any amino acid
MKDEKKFSGRFGEYGGQYIPETLMNEIINLEQAYNHYKDDPAFKTELDALLKNYAGRPSLLYYAEKMTRELGGAKIYLKREDLNHTGSHKINNVLGQTLLAKKMGKTRIIAETGAGQHGVAAATAAALLGMECEIFMGKEDTERQALNVYRMELLGAKVNPVTTGTMTLKDAVNETMREWVSRVHDTHYVLGSVMGPHPFPVIVRDFQAIISREAREQILAAEGKLPSAVLACVGGGSNAMGIFYNFINDSAVKLIGCDAAGSGINTEKHAASIAKGQVGIFHGMKSYFCQNEKGQIAPVYSISAGLDYPGIGPEHAWLNDSKRATYVPVTDEEAVDAFEYLARTEGIICAVESAHAIAHARKIARDFGKNENIVICLSGRGDKDVSAIARYRGKKIHE

SEQ ID NO: 58121 - DNA, 438 bp, Unknown
  Obtained from environmental sample
  misc_feature (1)..(438): n is a, c, g, or t
atgagtaatatagccaaagccttcgataataataaaggcaaagccctcgataatgataaaggcaaagccctcaataatgataaaggcaaagcctttataggctttgttacaggcggggatccctgcattgagaaaacaaaggaatttatccttgagatgttccgtgccggttccgacctggttgaaattggaattcccttttcagatccgatagccgagggcccggtaatccaggaagcgaacatccgcgccctacgcgcgggagccaccgtcgaaaagctcttcacgcttgttgaagatgtccgcaaagcaaccgacgcgccgctggtgtttctgacttatcttaacccggtctttcattacggatacgacgctttttttaagcgctgcgaggctgtcggccttgacgggatcatcatcccccgatcttccttttga

SEQ ID NO: 58122 - protein, 145 aa, Unknown
  Obtained from environmental sample
  DOMAIN (24)...(145): Tryptophan synthase alpha chain
  misc_feature (1)..(145): Xaa is any amino acid
MSNIAKAFDNNKGKALDNDKGKALNNDKGKAFIGFVTGGDPCIEKTKEFILEMFRAGSDLVEIGIPFSDPIAEGPVIQEANIRALRAGATVEKLFTLVEDVRKATDAPLVFLTYLNPVFHYGYDAFFKRCEAVGLDGIIIPRSSF

SEQ ID NO: 58123 - DNA, 423 bp, Unknown
  Obtained from environmental sample
  misc_feature (1)..(423): n is a, c, g, or t
ttgacgggatcatcatcccccgatcttccttttgaggagcaggccgacgtgcgggaggcggcctcaaaatacggcatagacctcatctcccttattgcccctacgtcggaagcgcgaattaaagaaatcgccaaaaccgcctcgggctttatttaccttgtttcttcaatgggcgtaacgggcgttcgcagtgaaattaccaccgacatcgcttcgattgccgcctcggtcaaatcggttacggaactgccggtggctgtcggctttggcattcacacgccgactcaggccggcgaaatggcccggattgccgacggcgtaatcgtgggaagcgcgattgtaaaaatcgtcgccgagcatggagagaatgcgggatcacatatctttcaatacgtcagcgaaatgaaaaaagcaataatgtaa

SEQ ID NO: 58124 - protein, 140 aa, Unknown
  Obtained from environmental sample
  DOMAIN (1)...(140): Tryptophan synthase alpha chain
  misc_feature (1)..(140): Xaa is any amino acid
MTGSSSPDLPFEEQADVREAASKYGIDLISLIAPTSEARIKEIAKTASGFIYLVSSMGVTGVRSEITTDIASIAASVKSVTELPVAVGFGIHTPTQAGEMARIADGVIVGSAIVKIVAEHGENAGSHIFQYVSEMKKAIM

SEQ ID NO: 58125 - DNA, 993 bp, Unknown
  Obtained from environmental sample
  misc_feature (1)..(993): n is a, c, g, or t
gtggccggtatcgccggcccgggcgacgcgctggctaatttcaatctcactcgcgagacgtttcgctttatccgcgattacgacaagagcgttacgttctgcatagcgactaacggtctgttgctgccgcagtacgtctctcagttgcgtgagctcggcgtcagccacgttacggtaaccatcaacgcggtcgatccgacgatcggcgcgaagatttaccagcgcgtttcctacatgggtaaagcatacgagggtgcggagggcgcggcgatactgcttgccaaccagctcgccggaataaagatgctcgccgacgctggaattgtctgcaaggtaaactgcgttacgcttaagggcataaacgataagcacatcccggaagtcgtgaagacggtgtcggagcttggcgtattcatggccaatatcatgccgcacattccggtgaaggggtcggcgttcgagggacttgagcgtgttaccaatatggatatcgcggcgttgcgcaagagttgcggcgcgtacgttaagcagatgtcgcactgccgccagtgccgttccgacgcggccggaacgcttgacgacgataggtcggtggatttctacggtgacgccgacgccaaggcggaaccggaatccggtaaacgtatgcgtttcgccgtcgcgacgaagagcggcgcgattgtggacatgcacttcggccacaccagcgagttctacatctacgagagcgacgcgtctaacacgcgtttcgtggagacgcgcaaggtcggcaagtattgcaacgggcccgaatgcaacggcaaagaggataagtgggaaccgattatacgggcggtcgccgattgcgccgctgtattggctatgcgaatcggccctacgccggaaaaacgattgaaggaaaaaggcattgacgccattatgacttatgaccgtgttgaaaccgccgtcgctcgcgcggcaaaagaaaggagttctgttcatggtatcgcctaa

SEQ ID NO: 58126 - protein, 330 aa, Unknown
  Obtained from environmental sample
  DOMAIN (224)...(321): Dinitrogenase iron-molybdenum cofactor
  misc_feature (1)..(330): Xaa is any amino acid
MAGIAGPGDALANFNLTRETFRFIRDYDKSVTFCIATNGLLLPQYVSQLRELGVSHVTVTINAVDPTIGAKIYQRVSYMGKAYEGAEGAAILLANQLAGIKMLADAGIVCKVNCVTLKGINDKHIPEVVKTVSELGVFMANIMPHIPVKGSAFEGLERVTNMDIAALRKSCGAYVKQMSHCRQCRSDAAGTLDDDRSVDFYGDADAKAEPESGKRMRFAVATKSGAIVDMHFGHTSEFYIYESDASNTRFVETRKVGKYCNGPECNGKEDKWEPIIRAVADCAAVLAMRIGPTPEKRLKEKGIDAIMTYDRVETAVARAAKERSSVHGIA

SEQ ID NO: 58127 - DNA, 660 bp, Unknown
  Obtained from environmental sample
  misc_feature (1)..(660): n is a, c, g, or t
ttggctgtggccagtgggcatattttaggcagaatattccttttgctttttctcatattgataatggccgcgctaggtctcctatggtttgactacttaaatgtgatagacgctaaagatgttaccgggcctattatggattttcttcgccctttgcccgttataggccgtcttatgccctcgggggcaggccgcacccagcccttgttccccgatgaagatttaaacctggatgccgaacgctttgccatacgcatggaagcgctggaactgcttaacatggaaatggacaggcaggaacagaacatgcaaagccgtttgggcgagatcgagcaaatggcccaggaactggaagaaagacaaaaagctctcgatgaaagagagaaatcccttgatgccgtgctctcggacgccgaaattaaagataggaacgttgaacggaatgccatcaatctgaccagtatgccgccacagcgagcggtgggtattctggcagcaatggatgatcaggatgtaatcgatgttctccggaaaaccgatgagcttgcccaggcgagcggaagccagtccatcgtaccttactggctatctttgatggacagccaaagagcggcggaaataagccgtaaaatggttacaaggccttcctccctgaattag

SEQ ID NO: 58128 - protein, 219 aa, Unknown
  Obtained from environmental sample
  misc_feature (1)..(219): Xaa is any amino acid
MAVASGHILGRIFLLLFLILIMAALGLLWFDYLNVIDAKDVTGPIMDFLRPLPVIGRLMPSGAGRTQPLFPDEDLNLDAERFAIRMEALELLNMEMDRQEQNMQSRLGEIEQMAQELEERQKALDEREKSLDAVLSDAEIKDRNVERNAINLTSMPPQRAVGILAAMDDQDVIDVLRKTDELAQASGSQSIVPYWLSLMDSQRAAEISRKMVTRPSSLN

SEQ ID NO: 58129 - DNA, 1464 bp, Unknown
  Obtained from environmental sample
  misc_feature (1)..(1464): n is a, c, g, or t
gtgattcagatatcaagtcccacgcaagggccaggctccccacaggaaaccggataccggcaggaaagtaatgccgttgaaaacttgtccggcgattccccaatatggaagggagcgcaaaagaaaaataaactgggggttttcgcaaaactcctgcaaggtttatcggttaagctaacaaagggaggagcggtatcgaattcggattcttccgaactatccgaaattgaagaacctaaccctaaaggcaatggaaaaaccactaaaaaactggcgtcgcttgctataaacgacaaaaaaccgccgttcggaatggaaattcttaatggtgaaggcctggaagaagggttttttaacgctttaatgggggaaatcaaccttgaaccggtggaaagcaaggctgaagatccgcttttttctgattggttgcctgaaataaaacaaaaaaatgatctattgaactcgaacctgaacccaaacctgaacctgaatccaagccagttaattgcagcggaatcggaaaaaaccgattctgtgccggattttccgggaagtaaagctttggcaaacgagcaggcactgagcgggggcaaagcaaaaggcgggcgaaactcgggttttctgaatgtttctttccgggaggcggaggcggaattcttacggaatcagcctttggctgaaaaagccggctcaggcctggtttcccaggcggcaggaagggaaaatgcccctccatcggaaacgcggggaagaaaaagcaaagaaagactcaatatcgaagtaagggatctcagaaccggggaaggtcaaagggaggctttggctcaggctgaaaataccgtaagcctgagagaagcgattgaagcgaacttgcggccgctgtccaaaatggaaactgaaattccggtggaactggatctgaataaaggaagcgtggacgggaaagcggacggttcttcactcagtaggtcatttgaagacgcgctggcagcccagctccgcggtaacctttcaaccgatatagtccgcgacgccgcggtaatagtccgtaacggcggtgagggaactatacgcctttcgctacgccccgcttctctgggggatgtaaagatacgcctggaattgaccgaaaacaagatcagcgggcatatcattgttgaaagtgatgaggcccttcgcgcttttgaacgggagcttcctgttttggaaaaggctttcaaggattcgggcttcagcgagaccagtcttgaaatgttccttgcatcggaaaattcctcaggcggaggggcttttggcggtcgtgaagaaaggcaggaaatggattttatggttcaggcgctggccgcgtcccgctacgaggccgaatccgaacagagcgtgattagccggtcggatgaaggcgttcatgatgaaagggtttttgttacttcaccgggaagaatcccggtaaatttgcttgtttag

SEQ ID NO: 58130 - protein, 487 aa, Unknown
  Obtained from environmental sample
  DOMAIN (270)...(422): Flagellar hook-length control protein
  misc_feature (1)..(487): Xaa is any amino acid
MIQISSPTQGPGSPQETGYRQESNAVENLSGDSPIWKGAQKKNKLGVFAKLLQGLSVKLTKGGAVSNSDSSELSEIEEPNPKGNGKTTKKLASLAINDKKPPFGMEILNGEGLEEGFFNALMGEINLEPVESKAEDPLFSDWLPEIKQKNDLLNSNLNPNLNLNPSQLIAAESEKTDSVPDFPGSKALANEQALSGGKAKGGRNSGFLNVSFREAEAEFLRNQPLAEKAGSGLVSQAAGRENAPPSETRGRKSKERLNIEVRDLRTGEGQREALAQAENTVSLREAIEANLRPLSKMETEIPVELDLNKGSVDGKADGSSLSRSFEDALAAQLRGNLSTDIVRDAAVIVRNGGEGTIRLSLRPASLGDVKIRLELTENKISGHIIVESDEALRAFERELPVLEKAFKDSGFSETSLEMFLASENSSGGGAFGGREERQEMDFMVQALAASRYEAESEQSVISRSDEGVHDERVFVTSPGRIPVNLLV

SEQ ID NO: 58131 - DNA, 453 bp, Unknown
  Obtained from environmental sample
  misc_feature (1)..(453): n is a, c, g, or t
atggctttagaagctgttatgagcgcccaggaaaaagcggctaccgcccaatgggtggatgcggcaaataaaaaactcagccttgaactcaataaaggtaatgtcgcggcaaaccagaatcttggaaaagatgattttttaaagatccttttgacccagttgacccaccaggatccgtcggctcccatggaggataaggaatttatcgcccagatggcccagttttcaagccttgaacagatgaccaacatggcggcggatttcgcgaagcttaccgccatggtaagcggcagtgaggctccccagtcattgggtaaaaacgtggaactggtgaggggggaagatgtgattcagggtacggtaaaagccgttaccagaggggaaatgccgatggtattggtaaacggctcatactataactggaaccaggtgaagaaagtttttgaagagtag

SEQ ID NO: 58132 - protein, 150 aa, Unknown
  Obtained from environmental sample
  DOMAIN (17)...(150): Flagellar hook capping protein
  misc_feature (1)..(150): Xaa is any amino acid
MALEAVMSAQEKAATAQWVDAANKKLSLELNKGNVAANQNLGKDDFLKILLTQLTHQDPSAPMEDKEFIAQMAQFSSLEQMTNMAADFAKLTAMVSGSEAPQSLGKNVELVRGEDVIQGTVKAVTRGEMPMVLVNGSYYNWNQVKKVFEE

SEQ ID NO: 58133 - DNA, 570 bp, Unknown
  Obtained from environmental sample
  misc_feature (1)..(570): n is a, c, g, or t
gtgcgggctatttttttcctgcctgttatcctttcttcaggcatcatgatcgggcttgagaccaacaatacgctcctgaacagcatggctgacattatcaaggaaggcaacctgatgaagtcgtcaattactggcgtgcttgaggatattctcgtctctgaaggcgccgcaagcgactttatggggtatatttttaatattgttaatcaaatttacgatattgcgatggcttccggcattcaaatagtcattttcctttccgcactgcagacgattccgcccagtatgtttgaagcggccaaaattgagggggcgacctcctgggagtgtttctggaaaattacattccccatggtcagctccctgatactcgtcaatgttgtctatagcgtggtggattattttataagaacggataaccgcgttatggaaaaaataagagtaaccatgatgcagcgtatggaatatggtttttctaccgcgatggcctgggtatattttctcgccgttatagcgatcatcggaattgcaatgtcgttgatttccagaaaggtgtactactatgaatga

SEQ ID NO: 58134 - protein, 189 aa, Unknown
  Obtained from environmental sample
  misc_feature (1)..(189): Xaa is any amino acid
MRAIFFLPVILSSGIMIGLETNNTLLNSMADIIKEGNLMKSSITGVLEDILVSEGAASDFMGYIFNIVNQIYDIAMASGIQIVIFLSALQTIPPSMFEAAKIEGATSWECFWKITFPMVSSLILVNVVYSVVDYFIRTDNRVMEKIRVTMMQRMEYGFSTAMAWVYFLAVIAIIGIAMSLISRKVYYYE

SEQ ID NO: 58135 - DNA, 420 bp, Unknown
  Obtained from environmental sample
  misc_feature (1)..(420): n is a, c, g, or t
atggcgcgggcagtgacgttcattatgacggcgttattgtcaaagcacgcagttacgcgatactgcggcaagggaaagggggaattaatgtcttatttgattaaaaagaacgataaactttccttgacattggaaggtaaaaatgcggttgcaggttatctgtttattctgcccttcctgctcggtcttttggcgtttatgtttttgccaattctggaatctctgcgcatggtattcagcaatgtaaatatcgaccttgttaaaaaaggattcaccatggatttttccgctatggctaatttaaaacgcgttcttatgattgatcaggaatttaaccgtctgctaatcgaagaaattgggcgtatgctcctgatagttcccgcagtaattattttcagcttgtttacgtccctcatatga

SEQ ID NO: 58136 - protein, 139 aa, Unknown
  Obtained from environmental sample
  misc_feature (1)..(139): Xaa is any amino acid
MARAVTFIMTALLSKHAVTRYCGKGKGELMSYLIKKNDKLSLTLEGKNAVAGYLFILPFLLGLLAFMFLPILESLRMVFSNVNIDLVKKGFTMDFSAMANLKRVLMIDQEFNRLLIEEIGRMLLIVPAVIIFSLFTSLI

SEQ ID NO: 58137 - DNA, 1260 bp, Unknown
  Obtained from environmental sample
  misc_feature (1)..(1260): n is a, c, g, or t
atggcaaaagaataccgttcatggctcacgcggacatacccgtctttgggcgcggacaaagaagacggcgtgcccgttgccatagaagttgtcggcgcggtgaacaagacgcggcaccggctgggcataccttttgatctgcccttaaagcttacttcctataaagagtccgcgaatatgatcggggactttgcccaatggggatggaaaaacgtgcggataaaacctaacggctggtttaaccacagcgtagatcattccgtgccgaataaaattaaattaataagcgagttgggcagtaaaaaagattttaagaatctggtgtctgttgcggagaaaaacggctacgcggtttttcccgatgttgatttcatgtatatgagggatgtcaagctctttggaggcttcagcctgtaccgcgacgcggcccgctatgtaaaccgcaaacgggtggaaaaatacccctacagctttgtctggttcggcgaacgcgtccgctggggcaaactcagctatcttgcccgtccggcctatatgatgtctctgatagacaattttaaccgcaagatgtccgcgctgggcctacgtaaccttgccttcagaaacatgggcgcgaaactcgccggcgactaccatgaaaagcggctggtcagccgcgaggcctcgatgaaaatgcggcaggagaaactggcggaattaaagggtaatggagcgggtattatattgaacacgggttacgcgtattcggtaccttgggcaaatatcattaccgacatggcaattgacgatcaaggttttggcatcactgatgtttcggtgccattttatcagattgttcttcatgggcttgtgccatataccggaccggcgataaaccttgccgaagattacacgaaagacctgatgaaaaccattgaaagcggggcgggactgtacttcagttttatgaccgaagaaactaccgtgttacaggaaacgaagttcagacaattttacgccaatgaatatgccaaatgggcgcaggatgccaatgccctatatcaaatatttaccgactgttttgacggtctgtatgatcaggctattaccaatcatgttattctgtccgaaggagtgacgatgaccgaatacgaagacggaacccgcgttatagtgaatggcgcgggcagtgacgttcattatgacggcgttattgtcaaagcacgcagttacgcgatactgcggcaagggaaagggggaattaatgtcttatttgattaa

SEQ ID NO: 58138 - protein, 419 aa, Unknown
  Obtained from environmental sample
  misc_feature (1)..(419): Xaa is any amino acid
MAKEYRSWLTRTYPSLGADKEDGVPVAIEVVGAVNKTRHRLGIPFDLPLKLTSYKESANMIGDFAQWGWKNVRIKPNGWFNHSVDHSVPNKIKLISELGSKKDFKNLVSVAEKNGYAVFPDVDFMYMRDVKLFGGFSLYRDAARYVNRKRVEKYPYSFVWFGERVRWGKLSYLARPAYMMSLIDNFNRKMSALGLRNLAFRNMGAKLAGDYHEKRLVSREASMKMRQEKLAELKGNGAGIILNTGYAYSVPWANIITDMAIDDQGFGITDVSVPFYQIVLHGLVPYTGPAINLAEDYTKDLMKTIESGAGLYFSFMTEETTVLQETKFRQFYANEYAKWAQDANALYQIFTDCFDGLYDQAITNHVILSEGVTMTEYEDGTRVIVNGAGSDVHYDGVIVKARSYAILRQGKGGINVLFD

SEQ ID NO: 58139 - DNA, 1413 bp, Unknown
  Obtained from environmental sample
  misc_feature (1)..(1413): n is a, c, g, or t
atgtgcagagaaccctctttgacaaacagcacagattgcagcaacactggcaccaccaccgggaatagcttcagctggcaacgagaacttgaggaactgggcacttgcgagcttgcagacgctgctgcagacccagatgacttagatggatcctgcgatgccgtttacagcttagccaccggcgcattcgcattaaccaaaggcttctgcgaatggggttcacctatcactcagtctcaatgcgaagatccgaccggcacaggcacaggtcttggcattgaaggcatatttacgcaaaccggtacatgcgaggaaactgatgcatcacatgctagctcatgcactcctatagcgggtgctcaaagcgaacattcagtcaccgcaggcacctgcacatggactcaaatacaaggcagctccacaggagattgcccctcggctatcggctctggcgcaagaaacttcagtcttactcatggtccttgcctaagcaccactgaaatttcaggatccgatattagtgtttgcccaggaggaactgctaatcctgccgacggcatttatgtcaccgcaggcacctgcaattacaccttgactagcttgactggcagcgcacccacttattgcgatgcaaccactttcatagcgaccaaaggcatatgcaaatacgctggcttatgcgatgcaggtgactccggcttcgaaaccgacggcagcgattgcaagagttctgctgaaattacggtggaagaatgcgatttggctaacgatggcgctggtggagcaattgccgaggcagacgcaacagaaggcacctgcactgaagcaataacaggttctgacatagacggaagcgactgcacagacaccccagataatttcgagcctacaaaggtcaaatgcgcttgggactacgtaatgggtactacttgctcctccactctttcaggcacaccaggatctcttacccatggcacttgcacagaagcatcaatttctgttccggcgggagaccaagccgacgacgccaccgccgctaggaatgctctttgcgttaagggttctgttacacaacatacagatggctccactacccttgttcccaccgaaggcaaatgcgtttggggaaccagcgcacaaggagaaggcgtaacacaagcccagtgcgatgcagttgtgtctggcacaattacgattacgcctaccgaaaacgtctgcattggtcctgagaaaaccacagggctagacaacgctggctgccttgttggcggtctgcagggcacattcacacccaccttcggcacctgcacttggggcagcgtgacagaggacacttgcactggtcctattggcgctaacagctccgactggacaggctcaggcgtcgaagtctgcgaagtgaagttcccataa

SEQ ID NO: 58140 - protein, 470 aa, Unknown
  Obtained from environmental sample
  misc_feature (1)..(470): Xaa is any amino acid
MCREPSLTNSTDCSNTGTTTGNSFSWQRELEELGTCELADAAADPDDLDGSCDAVYSLATGAFALTKGFCEWGSPITQSQCEDPTGTGTGLGIEGIFTQTGTCEETDASHASSCTPIAGAQSEHSVTAGTCTWTQIQGSSTGDCPSAIGSGARNFSLTHGPCLSTTEISGSDISVCPGGTANPADGIYVTAGTCNYTLTSLTGSAPTYCDATTFIATKGICKYAGLCDAGDSGFETDGSDCKSSAEITVEECDLANDGAGGAIAEADATEGTCTEAITGSDIDGSDCTDTPDNFEPTKVKCAWDYVMGTTCSSTLSGTPGSLTHGTCTEASISVPAGDQADDATAARNALCVKGSVTQHTDGSTTLVPTEGKCVWGTSAQGEGVTQAQCDAVVSGTITITPTENVCIGPEKTTGLDNAGCLVGGLQGTFTPTFGTCTWGSVTEDTCTGPIGANSSDWTGSGVEVCEVKFP

SEQ ID NO: 58141 - DNA, 480 bp, Unknown
  Obtained from environmental sample
  misc_feature (1)..(480): n is a, c, g, or t
atgggcgcgaagatcaacacggaggaacaggcaaaaacggccttcgggccgacaggcacggtaacggtacagaagtcggagcgcgtaggaaggaaggcgcgctgcgtcccgctgtaccattacttgggccagctgccatgcatgacgatagcggcggccttcgcggagggcaagtcggtctttagagacttggaacccatgcgcctcttcgatccggacggattggaacagttggagcaatgcctgcggccgctcggcatacgccacggcgagatgccggacggtatggtgatagaaggcgccaaggagttcgacggcttcgacatatcggaaccgctgccggcgcacatagccgtcgcattttgcgtggcggggatcaagtgcatggggaagacgtcgatcgcggatgatcttgtggttgcgcggtggccggattttgaaaggatgataaacgaaatttttgaattcaggggaaaatga

SEQ ID NO: 58142 - protein, 159 aa, Unknown
  Obtained from environmental sample
  misc_feature (1)..(159): Xaa is any amino acid
MGAKINTEEQAKTAFGPTGTVTVQKSERVGRKARCVPLYHYLGQLPCMTIAAAFAEGKSVFRDLEPMRLFDPDGLEQLEQCLRPLGIRHGEMPDGMVIEGAKEFDGFDISEPLPAHIAVAFCVAGIKCMGKTSIADDLVVARWPDFERMINEIFEFRGK

SEQ ID NO: 58143 - DNA, 438 bp, Unknown
  Obtained from environmental sample
  misc_feature (1)..(438): n is a, c, g, or t
atgaatatgtattcaaaacttataacatggtctccctcatacgcggtaggaataaaaataatagatgatcagcataaggagctttttaaattggtcaatgaaatgtacaaccatattgccggcaatgaagagtcggaacgggtttattttaaaaatattattcagcgaacaatcgaatatataagggtaaattttgcaacggaagaaaaaattttgctggtaaccaaattcccgaactttttagaacataaaagcgcccatgagtccttcatattaaccttaattggcaatatgagagaggttgaaagcggaaaaaagataaattttacagcttttatccattttttaagggactggattttgactcacatagctataatggacaggcaagattttgattttttaagaaagaacatcaacaatttaaacgaaaaataa

SEQ ID NO: 58144 - protein, 145 aa, Unknown
  Obtained from environmental sample
  DOMAIN (17)...(75): Hemerythrin HHE cation binding domain
  misc_feature (1)..(145): Xaa is any amino acid
MNMYSKLITWSPSYAVGIKIIDDQHKELFKLVNEMYNHIAGNEESERVYFKNIIQRTIEYIRVNFATEEKILLVTKFPNFLEHKSAHESFILTLIGNMREVESGKKINFTAFIHFLRDWILTHIAIMDRQDFDFLRKNINNLNEK

SEQ ID NO: 58145 - DNA, 1743 bp, Unknown
  Obtained from environmental sample
  misc_feature (1)..(1743): n is a, c, g, or t
ttggtttttactctaatatattttgttatttccttcatagtgctttttctgggtacatctcanatcgtgngcaaaaaccgccgcaccgctntgaactggtactttttcgccatttgtaccgtagtcgcgatttccacttttaacacaggcgtttcgttttatatagccttttcggaaaatgtgcgtttaggcgaatcaagttatatattcagcactacaaatattattttaacaacaataaaagttttggccgttccttttctttacgcttttatccttaatctttcaaaaatcaattcaaagaaattcaaaatattacaatttgtcttactctccgctaatacgcttactgttgcctcaattttagttattttagttgtatccgctaacgcggttaatattctttcatctcctttttttaatatatttacccttttaatagttattttctctttcttctgcctgattcttctgttatataaatggataagaaccgcatccctgaaacgcgaccgtttgcaggcaaaaacaatatcaatagcctcgcttgtatcgcttctttcccttgtctgtctgttgttttcccttagttcgtattttttagaacttttcccttatgccggaatgctggctcttctctttatctgtaactattacgccaatcagtataacagttttagttttaacatttccaaccttgccgcatatgtttatacggctgttaaactgcccgtgctcattcttgacgaaacaggcagtattgtactgtgcaatacggcttcggaaagtttttttaagaataatattgaactgcttaaaagattgaaattatccgacttattttactttggaaatacatcgctgtcattgcagcgtcaaaaaaaagacgcgtctgttttcaactgcgacgccgtttgtctggtagaaaaacaaaaatgccaaatctcgctgaattatgtatatgataaattcgacgaaatgatctgtactgtcgtgattgttacagacatcaccgaaaaagaggatttaatacgccagcttaatgagtctcacgcgaaaattgaacagtttaataaagagctgcaatccgaggttgacaggcagactgaaagtatccgcaatctgcaaacggcgattgtatattcaatgagcgatttgatagaaaaaaaagacggctacaccggcgtacacacaagacgcgtaagcgaatatgtttccatcttactgcgcgaattggcgcggcgcggccatcaattcaccgaatccgacattcaaagaatagcggaatcttcccttctgcatgacatggggaaaatcgccataccggacagtatccttcttaaaaacggaaaattagacgatgatgagttcggcgtaatgaaaagccacagcgctaagggtgcggattcactggaaaaatcaatgcagtttgcgaaggacaacgattttttgaaaaacgcgtttgtaatggcaaagcatcatcatgaaaaatggaacggcggcggttatcccgacggcaaaaaaggagacgagattcctcttcttgcgcgcgtaatcgcaatcgccgatgtttatgacgctctgcgttcgcagcgttcgtataanacgccgttcagccacgagaaggcaaaagcaatcatattggaagaaaacgggcggcaatttgatcctgaactggttgatgttttcctggcggtagagccggagtttgacgcgttctgtaaagggacccaaaaagaatga

SEQ ID NO: 58146 - protein, 580 aa, Unknown
  Obtained from environmental sample
  DOMAIN (394)...(528): HD domain
  misc_feature (1)..(580): Xaa is any amino acid
MVFTLIYFVISFIVLFLGTSXIVXKNRRTAXNWYFFAICTVVAISTFNTGVSFYIAFSENVRLGESSYIFSTTNIILTTIKVLAVPFLYAFILNLSKINSKKFKILQFVLLSANTLTVASILVILVVSANAVNILSSPFFNIFTLLIVIFSFFCLILLLYKWIRTASLKRDRLQAKTISIASLVSLLSLVCLLFSLSSYFLELFPYAGMLALLFICNYYANQYNSFSFNISNLAAYVYTAVKLPVLILDETGSIVLCNTASESFFKNNIELLKRLKLSDLFYFGNTSLSLQRQKKDASVFNCDAVCLVEKQKCQISLNYVYDKFDEMICTVVIVTDITEKEDLIRQLNESHAKIEQFNKELQSEVDRQTESIRNLQTAIVYSMSDLIEKKDGYTGVHTRRVSEYVSILLRELARRGHQFTESDIQRIAESSLLHDMGKIAIPDSILLKNGKLDDDEFGVMKSHSAKGADSLEKSMQFAKDNDFLKNAFVMAKHHHEKWNGGGYPDGKKGDEIPLLARVIAIADVYDALRSQRSYXTPFSHEKAKAIILEENGRQFDPELVDVFLAVEPEFDAFCKGTQKE

SEQ ID NO: 58147 - DNA, 795 bp, Unknown
  Obtained from environmental sample
  misc_feature (1)..(795): n is a, c, g, or t
atggccgagctggccctctggtcgctggtagtgctgtttcccatctgggtaatggttgtcaattcttttaaggaccggctttcgatctatcagaaccccttcgggcttcccaaaaaatggaacttcatcaactacggctcggtactgggggacggggattttcttgtctatttccaaaacagctttatcgcggtaattttctcgcttgccattctgctggtgacaggcgcgttcgcttcttacgccctcgccaactggcgcggtaaaatcgcgcgggcactgtactttttcctcatcgccggcatgatgctccccataaaaatcgcgtcgatcaggatattggagatcgtccgcgctttgggtttgatcaacaccgtctggtcgcttatccccgtctataccgctatgggcatacctatcgcggtattcatccttacagagtttatccgccagattccctatgagctgaccgaagcgggaatcatcgacggcgccggccgctttgtaatatttgtccgcatcatcgcgccgctgctgcggcccgcccttgcgacaacggcgatttacaacctggttcccttctggaacgatctctggttcccgctgatttttatcaccgatgacagggcaaagacccttcttctgggcgttacccggctttttggccaataccagaccgactggtcaaaggtgctggcggtgctgacgctttctgcaatcccggtgattatcctgtatctctttatgagcaagcagtttatcaagggcctgaccgccggcgcggtgaaagggtaa

SEQ ID NO: 58148 - protein, 264 aa, Unknown
  Obtained from environmental sample
  DOMAIN (54)...(259): Binding-protein-dependent transport system inner membrane component
  misc_feature (1)..(264): Xaa is any amino acid
MAELALWSLVVLFPIWVMVVNSFKDRLSIYQNPFGLPKKWNFINYGSVLGDGDFLVYFQNSFIAVIFSLAILLVTGAFASYALANWRGKIARALYFFLIAGMMLPIKIASIRILEIVRALGLINTVWSLIPVYTAMGIPIAVFILTEFIRQIPYELTEAGIIDGAGRFVIFVRIIAPLLRPALATTAIYNLVPFWNDLWFPLIFITDDRAKTLLLGVTRLFGQYQTDWSKVLAVLTLSAIPVIILYLFMSKQFIKGLTAGAVKG

SEQ ID NO: 58149 - DNA, 564 bp, Unknown
  Obtained from environmental sample
  misc_feature (1)..(564): n is a, c, g, or t
gtggaggcgagggaagagtggcagtcaagccagagcgcggtggacgcggcaaggacgcactggctcgatgagaccggcgtgaactgcggcatgacgcggctgtatggtagggcaatggctggcgagagggtgtatgagtacgtgccggacgtcaggttcgagaggacgtcgcttgtgggggcccttgggctgggcggggtggtcgccccgctggcgtacaaaggctcgctggacggagagtttttcgcggcctacgtcaagaagcgcctcgcgcccgcaatgagaaggggggacacgctgatcctggacaacctgtcggcccacaaagtgaagggggctctggggccgcttgccaagaagggcgtcaaagtcgtgttcctgcccgtgtattcccaggatttcaacccgatcgagcacgcctggtccaaggtcaaggcctgcctgcggaagctgaaggccaggacggccgacgagctgctgcccgccatggccgtggccctggactcggtcacgccggaggactgcagggggtggatcaggcactgcggatatggactacaataa

SEQ ID NO: 58150 - protein, 187 aa, Unknown
  Obtained from environmental sample
  misc_feature (1)..(187): Xaa is any amino acid
MEAREEWQSSQSAVDAARTHWLDETGVNCGMTRLYGRAMAGERVYEYVPDVRFERTSLVGALGLGGVVAPLAYKGSLDGEFFAAYVKKRLAPAMRRGDTLILDNLSAHKVKGALGPLAKKGVKVVFLPVYSQDFNPIEHAWSKVKACLRKLKARTADELLPAMAVALDSVTPEDCRGWIRHCGYGLQ

SEQ ID NO: 58151 - DNA, 519 bp, Unknown
  Obtained from environmental sample
  misc_feature (1)..(519): n is a, c, g, or t
gtgcctgatccaccccctgcagtcctccggcgtgaccgagtccagggccacggccatggcgggcagcagctcgtcggccgtcctggccttcagcttccgcaggcaggccttgaccttggaccaggcgtgctcgatcgggttgaaatcctgggaatacacgggcaggaacacgactttgacgcccttcttggcaagcggccccagagcccccttcactttgtgggccgacaggttgtccaggatcagcgtgtccccccttctcattgcgggcgcgaggcgcttcttgacgtaggccgcgaaaaactctccgtccagcgagcctttgtacgccagcggggcgaccaccccgcccagcccaagggcccccacaagcgacgtcctctcgaacctgacgtccggcacgtactcatacaccctctcgccagccattgccctaccatacagccgcgtcatgccgcagttcacgccggtctcatcgagccagtgcgtccttgccgcgtccaccgcgctctggcttga

SEQ ID NO: 58152 - protein, 172 aa, Unknown
  Obtained from environmental sample
  misc_feature (1)..(172): Xaa is any amino acid
MPDPPPAVLRRDRVQGHGHGGQQLVGRPGLQLPQAGLDLGPGVLDRVEILGIHGQEHDFDALLGKRPQSPLHFVGRQVVQDQRVPPSHCGREALLDVGREKLSVQRAFVRQRGDHPAQPKGPHKRRPLEPDVRHVLIHPLASHCPTIQPRHAAVHAGLIEPVRPCRVHRALA

SEQ ID NO: 58153 - DNA, 351 bp, Unknown
  Obtained from environmental sample
  misc_feature (1)..(351): n is a, c, g, or t
atgacctacagcatagatttccgagaaaaagttcttgagttcctggacagggggcgcaccatgcgggaggcggcggacgcattcggcatcgcgctgggctcggtgaacaactggaagcggaagctgctgaatacggggggccttgaggacgcgccgctcagggccgggttcaggacgctggacccggaaaagctcagggcgcacgtagcggcgcgccccgacgcctacctggccgagatcggcgaggcgtttggctgcaacgagtcggcggtccgcaaggcgttcgcgaagctgaagatcacgcgcaaaaaaaaacgaggaggttcaaggagcagaggccggagcaggtag

SEQ ID NO: 58154 - protein, 116 aa, Unknown
  Obtained from environmental sample
  DOMAIN (1)...(115): Transposase
  misc_feature (1)..(116): Xaa is any amino acid
MTYSIDFREKVLEFLDRGRTMREAADAFGIALGSVNNWKRKLLNTGGLEDAPLRAGFRTLDPEKLRAHVAARPDAYLAEIGEAFGCNESAVRKAFAKLKITRKKKRGGSRSRGRSR

SEQ ID NO: 58155 - DNA, 447 bp, Unknown
  Obtained from environmental sample
  misc_feature (1)..(447): n is a, c, g, or t
gtggacgagacggggatagacacctggctgtgccgcgagcacggctggtcggagcgcggggccccagtggtcggggaggtgtgcgggcgcaaatacgagagggtgggcgtcgtcgccgcgctcctcggggattcggtcatcgagccgtgccaatactggcagaccatggagtcctgtttttttgaggcatggtttgaagagaggctgctgccggccctgcccgccaactcggtggtcgtcatggacaacgcgtccttccaccgcaagcccaggctgccggggcttgcagagaaggcggggcaccgggtgcttttcctgccgccgtactccccagagctgaatcccatcgaaaactactggagctggctcaagaggcagctcagaaaaattctgcccggcttccagactttcaactatgcactgtgttccatttttgaagggcgttga

SEQ ID NO: 58156 - protein, 148 aa, Unknown
  Obtained from environmental sample
  misc_feature (1)..(148): Xaa is any amino acid
MDETGIDTWLCREHGWSERGAPVVGEVCGRKYERVGVVAALLGDSVIEPCQYWQTMESCFFEAWFEERLLPALPANSVVVMDNASFHRKPRLPGLAEKAGHRVLFLPPYSPELNPIENYWSWLKRQLRKILPGFQTFNYALCSIFEGR

SEQ ID NO: 58157 - DNA, 789 bp, Unknown
  Obtained from environmental sample
  misc_feature (1)..(789): n is a, c, g, or t
ttgaccgcgatccctgggcttttgaacgtcgagaacggcactatcgacttgcggacgggggagctgctgccccaccgccaggaggataaaatcacgaaggttgcccatgtccggtatgaccggaacgccgactgcccgaaatggaagcagtttgtccgggagatcatggattacaagggcgatttgattgccttcctccaggccgccgcagggtggtcgatcagcggggacatcagcgagcagtccatgttcatcctctacggaacgggggctaacgggaaaagcacgttcctcaacgtaatcatgcgtatattgggggattacgccattaccacctaccctgaaacctttatgaagcggagcggcgattcgctgaccaacgacatcgcccgtctgcgggggacgaggtttgttgccactgcggagacggagcaggggaagcggctttcggaacacctgataaagcaggctacgggcaacgaccagatgaccgcgaggtttctgtacggggagcactttaacttcgtgccgactttcaagatattcatggcgagtaaccacaagcctgtcatcaaggggacagaccacggcatctggaggcggatcaagctgataccgttcacaacgacgatagccgaagataagatggacaggcaccttgagcagaaactgctggaagaaaaatccggcatactgaactggctgatagaaggtgcgctgcgctggcaaaaggaaggcttgaacaccccttcaatcgtggactttaccccaataggtgcacacagttaa

SEQ ID NO: 58158 - protein, 262 aa, Unknown
  Obtained from environmental sample
  DOMAIN (8)...(262): Poxvirus D5 protein-like
  misc_feature (1)..(262): Xaa is any amino acid
MTAIPGLLNVENGTIDLRTGELLPHRQEDKITKVAHVRYDRNADCPKWKQFVREIMDYKGDLIAFLQAAAGWSISGDISEQSMFILYGTGANGKSTFLNVIMRILGDYAITTYPETFMKRSGDSLTNDIARLRGTRFVATAETEQGKRLSEHLIKQATGNDQMTARFLYGEHFNFVPTFKIFMASNHKPVIKGTDHGIWRRIKLIPFTTTIAEDKMDRHLEQKLLEEKSGILNWLIEGALRWQKEGLNTPSIVDFTPIGAHS

SEQ ID NO: 58159 - DNA, 876 bp, Unknown
  Obtained from environmental sample
  misc_feature (1)..(876): n is a, c, g, or t
atggcgtaccaattcatgaaagcgaatcaaaacgagtacgccgttaaggagatggccaagctttttggggtaagccgtagcgcctattaccgatgggccaggaacggggcctcgcagcggcgtaaagcagacgatgcggagctggtgcgccttattcttgaaatagtggcgaaccatcaccgccggtatggcagcccgcgggtacgccgggaacttcgcgatacctacggaaaacgggttagccttaagaaagtagcccgcctgatgcgggaaaacggccttaatgcccgaagaagcaggaagcatatcccgacgaccgactccaaccatgcccttgcagtctttgagaacgtactgtcccgggagttttatgccgaatccggtggcgtaaagtgggtttcagacattacctatctgcgtacgataaatggctgggtatacctgaccatagtgcttgacctgtttgaccggaaaattattggctgggcgcttagccttggcatggagacttccgagacagtcatcgccgcttttgaaatggcagtcaaaaacaggagccctcaaggcggcctgatattccattcggacaggggtgtccagtattgcgcccaatccttccaggatgttttgagggaaagatctcctacagttaggcagagcatgagcaggaagggcaattgctgggacaacgcgtgtgccgaatcgtttttcaaaacactgaaaagggaattggaaacattggacggaaaacattccgaggctgatatcaggcagtcggtgtttttctacatcgaggcatattacaatcgcattcgcatgcattcggcacttgactatgtagcgcctaacgtgtttagcttaggtaaccacgcttaa

SEQ ID NO: 58160 - protein, 291 aa, Unknown
  Obtained from environmental sample
  DOMAIN (124)...(287): Integrase core domain
  misc_feature (1)..(291): Xaa is any amino acid
MAYQFMKANQNEYAVKEMAKLFGVSRSAYYRWARNGASQRRKADDAELVRLILEIVANHHRRYGSPRVRRELRDTYGKRVSLKKVARLMRENGLNARRSRKHIPTTDSNHALAVFENVLSREFYAESGGVKWVSDITYLRTINGWVYLTIVLDLFDRKIIGWALSLGMETSETVIAAFEMAVKNRSPQGGLIFHSDRGVQYCAQSFQDVLRERSPTVRQSMSRKGNCWDNACAESFFKTLKRELETLDGKHSEADIRQSVFFYIEAYYNRIRMHSALDYVAPNVFSLGNHA

SEQ ID NO: 58161 - DNA, 312 bp, Unknown
  Obtained from environmental sample
  misc_feature (1)..(312): n is a, c, g, or t
atgggaaagaaaggcataaaacggcgtgtccacacgaaggagttcaaagccgaggcgatagcattggccgagaaaaaagaaaaatcggtaagccggatcgcggcagatctggggatcaacgagaacatgctgcgccgatggatgcaggcttcccgggagtcggcgggaagcggcctgcaagcgttcccgggccacgggcggccaaaggatgcggagctcgcccgcctgcggaaagagaacaaagcgctcagggaggcaaatgaaattttaaaaaaagcggcggtcatcttcgcgcaaggggaaccccagtaa

SEQ ID NO: 58162 - protein, 103 aa, Unknown
  Obtained from environmental sample
  DOMAIN (8)...(90): Transposase
  misc_feature (1)..(103): Xaa is any amino acid
MGKKGIKRRVHTKEFKAEAIALAEKKEKSVSRIAADLGINENMLRRWMQASRESAGSGLQAFPGHGRPKDAELARLRKENKALREANEILKKAAVIFAQGEPQ

SEQ ID NO: 58163 - DNA, 1533 bp, Unknown
  Obtained from environmental sample
  misc_feature (1)..(1533): n is a, c, g, or t
atgagtaccattcttaccgctgttattgaaatcggctctacggggataaggcttaatgtcgcggaaattcattccggcgggaagtggcagattcttgaccgcgctgtgcgtcctgtagggcttggacgcgatgtatttacatccggcttactgtcaagagaatcgataatggaatgtctttccgttcttcagaattaccgcgaacttttagccggatggaagattgcagataacaacattcatgtaattgcgacaagcgcgcttagggcagcgcgtaacagggatatttttattgatcgcgtgcgtcaggaaacaggatttatccttgtcattgtagaaggtatgagggaaaacagattaatgtatcttgcggtgcgtttcgcgctgaagcaggatcttcctcttttttggaaagccaattcaatgatcatcgaaattggcggcggttctacggaaattatgcttcttcggcgcgggcagatggtagcggctcacagcttaaaaatgggaacgataattatcgatcagcgttcacgtcagggttttaacacaggcgctttttatgaacgctatttaaatgagaatataaagaatactctggggcatttaaacatggaattggatcttgcccatgtgcgagtgttagtggcttccagcggagacgcgcgtattgtcgcggataaggcgggaaaagaattaaacgagaattgccgcattattgatcgcgaagattttataaagtttttagataaaatccgcaattacagcatagaagacagcatgaaagaattcggaataacttatgccgaagctgaagggcttgttttgggtcttttggtactcaaactttttcttgaacaaacgggagccgcaagtatcgccgttcctcttgttacaatccgcgacggctatcttgtcgatttggtttccggcgttgactcctctttgcaagacgaattcttttcgcagattatcgcttccgctattaaccttgggcgtaaatatcattttgacgaggcgcacggcaaacttgtcgccaaccattgcatgacattatttgacgcgcttataaaagaacacggtatgaacaggcggcataaaataatgctggagaccgccgctattctgcatgatgtcggcgcttacataaaagagtcgggacatcagaagcatggtcagtatattgtcgctaactctgaaattttcgggcttcatcaggacgagcttgaaataatagccaatgtaatcaactgtcatcgcggagaaccgcccgctcattctgatcttgagtttatgacacttcaacgcgaggagcgcgttcttgttcttaaaatggcttcaattttaagagtcgcggacgctctggatcgcggtcatactcagcaagttaaaaaaattactgttgaacgccgttcggaaacagtagtcgtccatgtggataaagtttatgatctttcccttgagcttatgggtattgaagaaaagggcggattgtttcaagatgtatttggatataaagttattttaaattaa

SEQ ID NO: 58164 - protein, 510 aa, Unknown
  Obtained from environmental sample
  DOMAIN (345)...(458): HD domain
  misc_feature (1)..(510): Xaa is any amino acid
MSTILTAVIEIGSTGIRLNVAEIHSGGKWQILDRAVRPVGLGRDVFTSGLLSRESIMECLSVLQNYRELLAGWKIADNNIHVIATSALRAARNRDIFIDRVRQETGFILVIVEGMRENRLMYLAVRFALKQDLPLFWKANSMIIEIGGGSTEIMLLRRGQMVAAHSLKMGTIIIDQRSRQGFNTGAFYERYLNENIKNTLGHLNMELDLAHVRVLVASSGDARIVADKAGKELNENCRIIDREDFIKFLDKIRNYSIEDSMKEFGITYAEAEGLVLGLLVLKLFLEQTGAASIAVPLVTIRDGYLVDLVSGVDSSLQDEFFSQIIASAINLGRKYHFDEAHGKLVANHCMTLFDALIKEHGMNRRHKIMLETAAILHDVGAYIKESGHQKHGQYIVANSEIFGLHQDELEIIANVINCHRGEPPAHSDLEFMTLQREERVLVLKMASILRVADALDRGHTQQVKKITVERRSETVVVHVDKVYDLSLELMGIEEKGGLFQDVFGYKVILN

SEQ ID NO: 58165 - DNA, 858 bp, Unknown
  Obtained from environmental sample
  misc_feature (1)..(858): n is a, c, g, or t
atgatggccggntctgcgctagctgatattctaaacgacaaggaaacgagttataaatttaaaaagcagtatttttcccttaaaaccagaatcaattcattgatgtataatgcggcggacggtttttattacgatataggcaagaatgaaaaacaaattctgataaaaaccattgcaggctactggccgctgcttgcggaaattcctaacggcgagaaagcggaacggataatcgaaaaactttccgatccccaatttttcggcactcctcatccgtttcccagtcttgctgtttgtgaaaaagattttcaggaaatagggcgcggattccggggttcggtttttccttatctgacattcatggtaatcaaagggcttgaacgttatcagcgctggggtattgcgagggagagcgcaatcaggcatttgtactttatgctggattccatgagtccggacggcaatcatcacgggggcagtctttgggaagcgtatcttcctacaaaggaaggtcccgcgaaatggcctggcaaattaggttttccgcgtcctcaatacttaacttacgacgcgctttccacaatttgccttacaatcgaaaatatcgtagggctttcgatatcgcttcctcgtaaaaccgtagactggattattccgaatctggaaattatgggggtggaaaatctttcgcttaaaaacaacatgataacgattctttccaacaagagcggcaggggctgggagatacacatggaaagcgagaaactctactattttacaattaacgttctcgacgttattgagaaaaccctgccgattccgtcaggaaaatgttctatactgatagataaattgtaa

SEQ ID NO: 58166 - protein, 285 aa, Unknown
  Obtained from environmental sample
  misc_feature (1)..(285): Xaa is any amino acid
MMAGSALADILNDKETSYKFKKQYFSLKTRINSLMYNAADGFYYDIGKNEKQILIKTIAGYWPLLAEIPNGEKAERIIEKLSDPQFFGTPHPFPSLAVCEKDFQEIGRGFRGSVFPYLTFMVIKGLERYQRWGIARESAIRHLYFMLDSMSPDGNHHGGSLWEAYLPTKEGPAKWPGKLGFPRPQYLTYDALSTICLTIENIVGLSISLPRKTVDWIIPNLEIMGVENLSLKNNMITILSNKSGRGWEIHMESEKLYYFTINVLDVIEKTLPIPSGKCSILIDKL

SEQ ID NO: 58167 - DNA, 2202 bp, Unknown
  Obtained from environmental sample
  misc_feature (1)..(2202): n is a, c, g, or t
ttgagtaaaggattgcttaacactgcagaagagaaaaaaaaagagggtttgcctaacaccgcggatgagaataataaagaggatttacctgacatcgccgggaagaaaaaaaatagtaataaacgctggataattatcatcggagtggcggtgcttctccttaacctggcgcttggagccggggtgatttatctgctttgggaaaggaacgccagggggggtgttcattctgataccgcggcagcgagtgagttgtcagatttcatgctgcgtatcagtgaattgcttgcgaagggggactaccagcaggctctggatattttagatcgcatgctggcggcggatcccaacaatcaggaattgctgaaactgcgtgaacggttgctgagggaacagcagcttgccgattcggttttggcgtcggcttcggaggcaagcgcgcgtgagatcgaagcccagcgtcttgcgcttcagcggcttgaaaacgagaggcggcagcttgaagccgaggcccagcgtcttgcccatcagcgttcggaaaccgatagacaacagcgtgatgcagatacccagcgtactgccgcccaacagcgcgcggaaaacgagaggcagcaacagcgggaagctgagacggcaaagcaaagggcggcggaggccgaggccgaacgccttgctcagcaacgagccgaaaacgaaaggttacagcgtgaagcagaagccgcgaggcaaaaagctgaagctgaagcgcttgcccacgcttcgcgtgaattgcaggaacggatgcgggcggtgaatgacctggtttcacagggaagggcattgcttgaaaaaaatgatttagcgggcgcggagagagcttttgcagaggcgcgttcccgtatgccgagcgataataaatttgaggcgcagaaactggctgaaatggcagaagcctggtatgacgtgtatgcccgcaatcccaattcccccgccgctccggaagctttaagcaaggcgtcggcattggcaagggaagccattcccaaagatccaagcctggccctgccccattccacattgggaaaaatcagccgtgaccagcaggactgggatcccgccattgccgaattcagggaagcgacccgcctggatccttccaactatatatacttttatgaactgggccggagctatttttccgcacagcgctatgttgacgcaagggggggctttgaaaccacagtcaggctaaatccccggtttgagcccggctggtacaacttaggcggaaccttgcggattttaaatcgttatgacgacgcccttaacgcgtaccgcagggcaatagcgataaaggccgattattccgcggctcaccgggagcttgggcgaattctgcttttaaagaaagattacaagggcgcgatagaatcctttaacaccgcccttaaatttaatcccggcgatattgcgtcgctgcgggaactgggcgccgcgcacaatgaggcgggcaattataccgccgcggaggaattgtttgccagggccttacaggcggctcccacggacgctcagacaaattacaatatggccgtggtaaaacttgcccttcacaagaacgccgaggcgctttcttacgcccgtcacgctgttgacagtaatccttccagcgcggtatatacctataccctggggcttgcccttgaagccacaagcaacgccgacgccgccattgccgcgtatcaaaaatccgcttcgcttgacaggaaatacgtgcggccccgaatcaacctgggaaacctctatctgtcccataataatgttaacgaggggatacgctgtctttccgaggcatatagtattgagcctttgaattttgaagtgaataacaatcttggcgccgtatacgcaaaaatggagaactggtcaaaaagcgttgagcattacgaaaaggcgctttccgtggaatcaaaacatcccaccgtgcatttgaatttggcaagagcctacaccagcgccggcgaactttccaaggcgcagaattcgtatcaggccgtgcttcggcttgcccccgacaactgggacgccatgtatgagctgggaaaaacctacgtcagcatgggaaggccggacgaggctaaaaaatacctcagggatctgttacagcgcaacgcttcatacagcggaagggctgacgcggaaaggatactcgcgggattatga

SEQ ID NO: 58168 - protein, 733 aa, Unknown
  Obtained from environmental sample
  DOMAIN (35)...(365): TolA protein
  misc_feature (1)..(733): Xaa is any amino acid
MSKGLLNTAEEKKKEGLPNTADENNKEDLPDIAGKKKNSNKRWIIIIGVAVLLLNLALGAGVIYLLWERNARGGVHSDTAAASELSDFMLRISELLAKGDYQQALDILDRMLAADPNNQELLKLRERLLREQQLADSVLASASEASAREIEAQRLALQRLENERRQLEAEAQRLAHQRSETDRQQRDADTQRTAAQQRAENERQQQREAETAKQRAAEAEAERLAQQRAENERLQREAEAARQKAEAEALAHASRELQERMRAVNDLVSQGRALLEKNDLAGAERAFAEARSRMPSDNKFEAQKLAEMAEAWYDVYARNPNSPAAPEALSKASALAREAIPKDPSLALPHSTLGKISRDQQDWDPAIAEFREATRLDPSNYIYFYELGRSYFSAQRYVDARGGFETTVRLNPRFEPGWYNLGGTLRILNRYDDALNAYRRAIAIKADYSAAHRELGRILLLKKDYKGAIESFNTALKFNPGDIASLRELGAAHNEAGNYTAAEELFARALQAAPTDAQTNYNMAVVKLALHKNAEALSYARHAVDSNPSSAVYTYTLGLALEATSNADAAIAAYQKSASLDRKYVRPRINLGNLYLSHNNVNEGIRCLSEAYSIEPLNFEVNNNLGAVYAKMENWSKSVEHYEKALSVESKHPTVHLNLARAYTSAGELSKAQNSYQAVLRLAPDNWDAMYELGKTYVSMGRPDEAKKYLRDLLQRNASYSGRADAERILAGL

SEQ ID NO: 58169 - DNA, 1182 bp, Unknown
  Obtained from environmental sample
  misc_feature (1)..(1182): n is a, c, g, or t
atgagagagatagcgaacgtagagtatttttatgataggtgcaattcattattggggactgactacacttccaatgattggggcggtgaggtcaataagaaaaaagcaataaacatagagtgggctgtaaatgccgtaaataaagtttatcagaaaatacatcaacccaagaatggttgcagattgcttctctcaacgagattcaatgccggaaacagcagaatggccgtgaatgaagaggtggtcaacagcgtcgtaagttatctgagtaaattaaacaagaaatgcgacaatgattgcgcttgctacagagatagaaattgtaattgcgtctgcgcttctcattgtaattgcaagggtaactgtccaaaatccggtgggggaactactaaagtagccaatcattgcaattgtaaagggacttaccaatgcaactgcaactgcgcttgcgagtgcggaagtaatactgaatgcgcttgtgattgcgatccatacaactgcaactgcgcccaagcattgaattgcaatatcgggagtgcaagaccgatgactcagaactgcggaactgcttgtcaatgcaattgcgtttgtgagtgtgattgtaccccaccaccacaaagtgatggagcgtgtggtccttgtgattcttattatgacgctaacgggtctgaaggtgcagggtggtatagtggttctgatggtggcaaaataagcaattatggtccaaacggagagccatccagcggcggcggcggcgctggcggcggcggtggcggcggcggcggtgaatgtttaccagtttgggttaagatacttactgaaaaaggtttaattcctataggaaatatactttctggagataaaatgcctaatggagaagtggtatggtatgttttccattctaaacataagtgttgtttaatcaatgaaagacattatgtatctttagaacacttaatgaagaaaaaaggcattagaggcgtttgtgctgttgacccgggttcaaattctcaatttggtgtaaaaaaattaaaagttgggcattctgttttaacttcaagcggatgggaaaaagtaaattccatcaaaatgctagaagaaatggatgtagcagaaatttatatgataaatggaactcgctatattacagaaacagggattaatcagtatcactcctattaa

SEQ ID NO: 58170 - protein, 393 aa, Unknown
  Obtained from environmental sample
  misc_feature (1)..(393): Xaa is any amino acid
MREIANVEYFYDRCNSLLGTDYTSNDWGGEVNKKKAINIEWAVNAVNKVYQKIHQPKNGCRLLLSTRFNAGNSRMAVNEEVVNSVVSYLSKLNKKCDNDCACYRDRNCNCVCASHCNCKGNCPKSGGGTTKVANHCNCKGTYQCNCNCACECGSNTECACDCDPYNCNCAQALNCNIGSARPMTQNCGTACQCNCVCECDCTPPPQSDGACGPCDSYYDANGSEGAGWYSGSDGGKISNYGPNGEPSSGGGGAGGGGGGGGGECLPVWVKILTEKGLIPIGNILSGDKMPNGEVVWYVFHSKHKCCLINERHYVSLEHLMKKKGIRGVCAVDPGSNSQFGVKKLKVGHSVLTSSGWEKVNSIKMLEEMDVAEIYMINGTRYITETGINQYHSY

SEQ ID NO: 58171 - DNA, 816 bp, Unknown
  Obtained from environmental sample
  misc_feature (1)..(816): n is a, c, g, or t
ttggccgagattcttctcattgacgattatgtcggcggacgctattcatcctcatcggcggtgggcggctgtgttctctcccttgccttcggtcccgatgtgtttaaagatttccttgcgggagccgccgaagccgacaaaatggcgcttgaacccgatgttttaaaaaacgccgctcttcttgacgcgcttatcggcgtatgggagcgtaactttttgcagtatccgtataccgcggttttgccctacagtcaggcgctctcgcgattccccgcgcatttacagcagatggacatggagtcaaacggaaagcgcgtaaaccgcaatggacaacccgtcgattacagtaccggtcccgttcttttcggagagccgggaacaaacggtcaacattcgttttatcagctgcttcatcagggaacgggaattgtcccgcttcaatttatcggtttctttgaaagccagagaggcgacgatgtaagcgtggacgggtctgtcagtcatacgaaattgaaagcaaaccttgccgctcaaattgtggctttcgcaaagggacaggacagcgaggacggaaacaaagagtttaaaggcggccgcccgtcaagtttgattttcggaaagcgcctaacgcccgcagtgttgggagccttgctcgcacactatgaaaacaaagtaatgtttcagggttttgtctggaatctgaacagttttgatcaggaaggcgtacagcttggaaaaatcctgaccaaaaaagtgctttccggcaaattcggcgacgacgcgttggaaacgtatagtaaactgttaggcgtatga

SEQ ID NO: 58172 - protein, 271 aa, Unknown
  Obtained from environmental sample
  DOMAIN (1)...(263): Phosphoglucose isomerase
  misc_feature (1)..(271): Xaa is any amino acid
MAEILLIDDYVGGRYSSSSAVGGCVLSLAFGPDVFKDFLAGAAEADKMALEPDVLKNAALLDALIGVWERNFLQYPYTAVLPYSQALSRFPAHLQQMDMESNGKRVNRNGQPVDYSTGPVLFGEPGTNGQHSFYQLLHQGTGIVPLQFIGFFESQRGDDVSVDGSVSHTKLKANLAAQIVAFAKGQDSEDGNKEFKGGRPSSLIFGKRLTPAVLGALLAHYENKVMFQGFVWNLNSFDQEGVQLGKILTKKVLSGKFGDDALETYSKLLGV

SEQ ID NO: 58173 - DNA, 1116 bp, Unknown
  Obtained from environmental sample
  misc_feature (1)..(1116): n is a, c, g, or t
atgaacattggaattaacgcatccgctttgagcgcacaaaagggcggcgcgtcgttttacatattgaatatcgttaaggctttggcccaaaccgacgccgacaaccggtatttcatattcacgaccaaagccgcgaaagatcaattttcggatctgccgtcaaattttaagattgtgccttgcgcgccgttgaaaacattggcccgcttattatgggaacaatcgttcctgcctttgattgtatgtaaaaaatttaagatacaagttttgttctcccccaactataccgctcctttgattcatttcggttttttttccgtagtaacgattcacgacttgagcttcttcccgttatctgaatactatccgcgttccaggcggtttttcaggcaaataattcacttatccgtgaaatcttccgacaaagtcatcgccgtttccgaattcacaaaaaacgatatcctcaagtacataggcgaatatgagaataaaatcagagtcatttatgaggcggcggacgttaagttcttgagtaaaccggcggcagagaagatagatgatatcaaaaaacgttataaaataaacaaaaaatatatattgttcataggatttttagaaccgcgaaagaatctcgaacgattattatcggcgtattccatgatcaaagacgatgtggactacgatttggtgatagtcggagggtacggttggtggtacgaacaaacacttcttaaggtaaacgagctgggaattgcggaaagggttatttttaccggttacgtaaacgattcggatctgccgcttttttacagaggggccgtgatcttcgcgtttccgagtttatatgaagggttcgggatcgccgcgcttgagtcggttttctccgacacgccggttttagcgtcgaacaacaccgcgttgccggaaatactgggacaagccgccgaatatgtcgatccctacgacacggaggggatagcgtccgcaatgcggcgcttgttgaaatccgaagagaccctctctctcttaagagcgaattgcgaggcggttaaaacaaagtacagctggcggaaagcggcgcaagaaactttggaattatttaaggagtctctgtaa

SEQ ID NO: 58174 - protein, 371 aa, Unknown
  Obtained from environmental sample
  DOMAIN (185)...(350): Glycosyl transferases group 1
  misc_feature (1)..(371): Xaa is any amino acid
MNIGINASALSAQKGGASFYILNIVKALAQTDADNRYFIFTTKAAKDQFSDLPSNFKIVPCAPLKTLARLLWEQSFLPLIVCKKFKIQVLFSPNYTAPLIHFGFFSVVTIHDLSFFPLSEYYPRSRRFFRQIIHLSVKSSDKVIAVSEFTKNDILKYIGEYENKIRVIYEAADVKFLSKPAAEKIDDIKKRYKINKKYILFIGFLEPRKNLERLLSAYSMIKDDVDYDLVIVGGYGWWYEQTLLKVNELGIAERVIFTGYVNDSDLPLFYRGAVIFAFPSLYEGFGIAALESVFSDTPVLASNNTALPEILGQAAEYVDPYDTEGIASAMRRLLKSEETLSLLRANCEAVKTKYSWRKAAQETLELFKESL

SEQ ID NO: 58175 - DNA, 420 bp, Unknown
  Obtained from environmental sample
  misc_feature (1)..(420): n is a, c, g, or t
atgtttttaaggaattcggcgtttcttatgtttcatatancggtttcggcgcatcgaagcccggaactgcttgccgaaattcttggcgttctggaaaccgatggtacggaagtgataattgccggcgcggggcttgcggcacaccttcccggtgtcattgccagccagacgcttatcccggttatcggtgtgccaatcggctccgccgggcttggcgggctggacgctctgctttccatcgtgcagatgcccaaacagattcccgttgcgaccgtcggcattgacaacgcggcaaacgcggcgtatcttgcctgcgaaattctcgcggtaaaatatcctgaattgaaaaaatcattaatagaattccggaagaaaatgaaagaagaccttgccaaagaaagcggaaaaacggaattataa

SEQ ID NO: 58176 - protein, 139 aa, Unknown
  Obtained from environmental sample
  DOMAIN (1)...(137): AIR carboxylase
  misc_feature (1)..(139): Xaa is any amino acid
MFLRNSAFLMFHIXVSAHRSPELLAEILGVLETDGTEVIIAGAGLAAHLPGVIASQTLIPVIGVPIGSAGLGGLDALLSIVQMPKQIPVATVGIDNAANAAYLACEILAVKYPELKKSLIEFRKKMKEDLAKESGKTEL

SEQ ID NO: 58177 - DNA, 1491 bp, Unknown
  Obtained from environmental sample
  misc_feature (1)..(1491): n is a, c, g, or t
ttgccaaagaaagcggaaaaacggaattataatgggacggtttgcatgaaccttgatgacgacaagctgtgtgaggagtgcggggttttcggggtattcctgaatgatccccagcacgacgcggcccctttgatttatcaagggctgttttcactgcagcatcgcgggcaggaaggcgccggtattgccgttgcccgtgacaatgtgatagatatccacaaaggacagggccttgtcggtgaagttttcggtcctgacgcgttggcgaaactcaaaggccacgccgccatcggccatgtgcgttattcgacatgtggcgcgaatatcatggaaaacgtacagccctttataagccatttcaaacttggttcaattgccgttgcccataacgggaatcttaccaacgcggatgtcgtgcgtgaattgctggaagacgccggcattggctttgcttcttccagcgacagtgaagtcattatcaatctgattgcgaaaaattacaaaaaaggcctggaaaaagcctttaccgatacagtcaaatttatcaaaggctcttacgcgcttatagtgttaaccggtgacgcccttgtaggagcgcgcgatccaaacgggattcgcccgctttgcctgggaaaaatcgccgatggaaaaaacggcggcaagcacggcgaccagggcggctggatgctttcaagcgagtcctgcgcgatagaagcggcgggcggtacatttgtccgtgacattgaaccgggcgagttggttataattaaccgcgagcaggtgctttcgtacagtttttgtgaaaaaacaaggcgcgctgtttgttcttttgagtatgtttattttgcccgtccggacagcgttattgacggcaacgatgtgtatcactccagaattcgcgcgggtgaaattctggccagggaattctgcgttccggcggatcttgttattggggtaccggattccggcattccggctgccatcggttacggcagggcgaccggtacgccctttggcattggtatagtaaaaaacaagtacattggccgtacttttatctatccggatcagtcaatacgggaaaagaccgtttcgcttaagcattttattattcgcagtgaagtctgcggtaagcgtgtcgtgcttattgacgactcaattgtccgcggcacaacaagccgccgcctggttgctcttcttaaaagcgcgggcgcgaaagaagtgcacatacggatttcatcgccgcctgtatgtttcccctgctattttggcatcgacacgcctcatcgcaaggaccttataagcaatgccagcagcgccgaggagctgtgtaaattcctgggagcgaacagtctggcttttataagcgcaagaggcctgcttgaatcaatcgacgcaaactgcaactccgacaacccgaacggctgcggttactgcatgggttgtttcaccggagagtacccgattgctgtcgccgggggagcgctgtaa

SEQ ID NO: 58178 - protein, 496 aa, Unknown
  Obtained from environmental sample
  DOMAIN (286)...(428): Phosphoribosyl transferase domain
  misc_feature (1)..(496): Xaa is any amino acid
MPKKAEKRNYNGTVCMNLDDDKLCEECGVFGVFLNDPQHDAAPLIYQGLFSLQHRGQEGAGIAVARDNVIDIHKGQGLVGEVFGPDALAKLKGHAAIGHVRYSTCGANIMENVQPFISHFKLGSIAVAHNGNLTNADVVRELLEDAGIGFASSSDSEVIINLIAKNYKKGLEKAFTDTVKFIKGSYALIVLTGDALVGARDPNGIRPLCLGKIADGKNGGKHGDQGGWMLSSESCAIEAAGGTFVRDIEPGELVIINREQVLSYSFCEKTRRAVCSFEYVYFARPDSVIDGNDVYHSRIRAGEILAREFCVPADLVIGVPDSGIPAAIGYGRATGTPFGIGIVKNKYIGRTFIYPDQSIREKTVSLKHFIIRSEVCGKRVVLIDDSIVRGTTSRRLVALLKSAGAKEVHIRISSPPVCFPCYFGIDTPHRKDLISNASSAEELCKFLGANSLAFISARGLLESIDANCNSDNPNGCGYCMGCFTGEYPIAVAGGAL

SEQ ID NO: 58179 - DNA, 1167 bp, Unknown
  Obtained from environmental sample
  misc_feature (1)..(1167): n is a, c, g, or t
atgacggggaagcagacatttaacatggaagatgaatttgcggggctgaattgcaactcaagccgccttgaaaagcgctttataaggacaatggaaacactgtccaaacagccggacaaatcaatatggtcctgtagcgaaaaccgggcggaggctaaagccatataccggatgcttggcaacgagaaccttgatcgcgaagaaatactgcgggcgcatcgggaggctaccataaggcgcatggtacagtcagggggaaccatcctggcagtgcaagataccacaagcctgaactacaacacccatgagaaaatggaagggatagggtatatcggcgaaaagacgctgggggtaaatatccacagctgtcttgcgcttacaaccgaaggattagtgcttggggtattggaacaaacatcgtacaaccgcactcaggcaaaggacgacagccgcagccacgacagcaaaaagacacgggcattgagagagaaagaaagttaccgatgggttcagaccctttgggaaagcaccagcggcctgcctgacggaatgcatgttgttacggtatgcgacagggaaggggacatgtatgcgctgtttgacgaagcggatcggtggggccaggcatttctaatacggatagcgcagaaccgaataaccgcagaaaaccataaaatattggataaaatccgggaaaaacagtgtatgggcaaggtaaaaacaaatatcccccgcgattcccgcaaaggccttgcggaacgcgaggcggtattgcagatacggtatggcggctttgaaataaagcgcccgcagatcctcaacaagaataaaaagctcagagacacgcaggaagcaaacataatatatgtcagggaagaacagcaggacaaagccgtagagcctttggaatggtttttgatgacgaatgaaccggtcaagagtgtcgaagacgcatacgaaaaagccgtatggtatatgcagcggtggaaggtagagcagtttcactatgtgctgaaatccggctgtacggttgagaagctgcaagaaaggagcatggaaaaaacaacgatgctggtcctgatgtattccataatagcttcggcaattatgaacataacgtatgttgcgcgaatacacccgctgcttccctgcacggtatttttttag

SEQ ID NO: 58180 - protein, 388 aa, Unknown
  Obtained from environmental sample
  misc_feature (1)..(388): Xaa is any amino acid
MTGKQTFNMEDEFAGLNCNSSRLEKRFIRTMETLSKQPDKSIWSCSENRAEAKAIYRMLGNENLDREEILRAHREATIRRMVQSGGTILAVQDTTSLNYNTHEKMEGIGYIGEKTLGVNIHSCLALTTEGLVLGVLEQTSYNRTQAKDDSRSHDSKKTRALREKESYRWVQTLWESTSGLPDGMHVVTVCDREGDMYALFDEADRWGQAFLIRIAQNRITAENHKILDKIREKQCMGKVKTNIPRDSRKGLAEREAVLQIRYGGFEIKRPQILNKNKKLRDTQEANIIYVREEQQDKAVEPLEWFLMTNEPVKSVEDAYEKAVWYMQRWKVEQFHYVLKSGCTVEKLQERSMEKTTMLVLMYSIIASAIMNITYVARIHPLLPCTVFF

SEQ ID NO: 58181 - DNA, 798 bp, Unknown
  Obtained from environmental sample
  misc_feature (1)..(798): n is a, c, g, or t
atgattgccagggatgagccttactgcctgtttctggatgaactcaacgcctgctcacaggaggtgcaaaaggcgttttacagcttgatccatgacagacggatcggcgagtattccctgccggcagggtcgatcatcatcggcgcaggcaaccgcgcacaggacaacgccattgttaagccaatgtcgtcggcgcttgttaaccgtatgttccacgttgaactgatcgcttcccatcgggactggcttgaatgggcagggcagaacggtattcatccccatattatcgaatacataggactgcgccccgatcacctttggcggcagccgcccaaaaccgaagagccgttttctactccgcgttcgtggcacatgctgtccgatgccatgaccagctatggggataatattaccgaaaagcaattggaaatcctggcttctggctgcttgtcgcctcaccacgccacgcaattccgcgcgtttgtcaaacaaatacgcaatcggtatgcgctgtcagctatcattaacggcagtcagaaatggcctaacaaaccggaagacagagacgcgctttattttcttgcccagagttttaaagcgcagcttgtcaaagaactgccgtctgacaaaaacaacctttccggtgcgtcgcaggatctggcgtttcgagcaaaatcgctgatgaaagatttggcgaatatcagcctggaaatagcacagatgacggtatcttcggaagatgcccagattctgcccgactggttcattgttgaggttatacgggatttgccgaggtag

SEQ ID NO: 58182 - protein, 265 aa, Unknown
  Obtained from environmental sample
  misc_feature (1)..(265): Xaa is any amino acid
MIARDEPYCLFLDELNACSQEVQKAFYSLIHDRRIGEYSLPAGSIIIGAGNRAQDNAIVKPMSSALVNRMFHVELIASHRDWLEWAGQNGIHPHIIEYIGLRPDHLWRQPPKTEEPFSTPRSWHMLSDAMTSYGDNITEKQLEILASGCLSPHHATQFRAFVKQIRNRYALSAIINGSQKWPNKPEDRDALYFLAQSFKAQLVKELPSDKNNLSGASQDLAFRAKSLMKDLANISLEIAQMTVSSEDAQILPDWFIVEVIRDLPR

SEQ ID NO: 58183 - DNA, 471 bp, Unknown
  Obtained from environmental sample
  misc_feature (1)..(471): n is a, c, g, or t
ttggccgagttttcaaaggcgtttagactcaatagtcttacccagcttggctgggcttcatcggttgtggaagtggaatttgatcctattggctatttgccgcgtatacggggagtttggctgtgcgtggacggcggtaaaattttatcggaggataaagcccgtaaatacctgaaaacttcgattgtccaggctttgggctgggcttatagggaacagatcagctatattgacggcacgatacctgtcgatcagtttgaaaatttcgacattatgggccttgcggagattccgccgatagctattgattttattaattgtaatagtgaagaaccaaagggaataggggctctccccttttgctgcatacccgcggcttttgtgcaggctgtttcacaggccgcgggctgtcatttccgggcaatcccgcttaaagcgcggaatattttcagcgcggggaggctgtcatga

SEQ ID NO: 58184 - protein, 156 aa, Unknown
  Obtained from environmental sample
  misc_feature (1)..(156): Xaa is any amino acid
MAEFSKAFRLNSLTQLGWASSVVEVEFDPIGYLPRIRGVWLCVDGGKILSEDKARKYLKTSIVQALGWAYREQISYIDGTIPVDQFENFDIMGLAEIPPIAIDFINCNSEEPKGIGALPFCCIPAAFVQAVSQAAGCHFRAIPLKARNIFSAGRLS

SEQ ID NO: 58185 - DNA, 645 bp, Unknown
  Obtained from environmental sample
  misc_feature (1)..(645): n is a, c, g, or t
gtgtttcccgccaaccgcgccggagtgccggttttcagccttcctgccgggaaccctaaccggcgcaaagacgcgccaagcccaagagccgcttcttccccaagccgcccgttaggcgcgtcatactccccgataaatattttcccttccataaaagttcccgcggcgagaatcacggtgcgcgccgtgatgcggtgtccgcgctttgtaattactcccgcaattttggaaagggaagcgtctcttacaactccgtccgcgtccgctccctcaataattagctccgtaaccgtatccataaaaatcgtcagatttttttgcttctcaagaacggagcgcgccgccgcgggatacgcgtgcttgtcagcctgcgctctcggagcctgtaccgcgggccctcgcgagcggttaagtacccggtactggatcattgtcgcgtccgtcagcttgcccatctctccgccgagagcgtccacttcccttacaaggttgccttttgaaaggccgccaatcgcggggttgcaggagagcgtccctatcttgtcggggttttgtgtgatgaggagggttgaaaagccgaggcggcttacagcgagagacgcctctattcccgcgtgtccgccgccgatgacaatcgtatcgtag

SEQ ID NO: 58186 - protein, 214 aa, Unknown
  Obtained from environmental sample
  misc_feature (1)..(214): Xaa is any amino acid
MFPANRAGVPVFSLPAGNPNRRKDAPSPRAASSPSRPLGASYSPINIFPSIKVPAARITVRAVMRCPRFVITPAILEREASLTTPSASAPSIISSVTVSIKIVRFFCFSRTERAAAGYACLSACALGACTAGPRERLSTRYWIIVASVSLPISPPRASTSLTRLPFERPPIAGLQESVPILSGFCVMRRVEKPRRLTARDASIPACPPPMTIVS

SEQ ID NO: 58187 - DNA, 861 bp, Unknown
  Obtained from environmental sample
  misc_feature (1)..(861): n is a, c, g, or t
atgttgatgaagacgaagggaaaactcccctatctgaacattgcgcttgaggcgttatcacgtcttaagaaactgtccgcatcctggcggatggagcgcatttatcaggaggggataacggtagtgatagcgggacgccccaacgcgggcaagtccagtctttttaacgccttgttgaaagaagaccgttctatcgtaacggaaattcccggcactacccgcgactggatagaagcgtgggtttccgttgacggactccccgtccgtcttgttgataccgccgggctgagggactcctccgaagctgtagaaaaaatcggagtagaccgcagccgcaaacttttacaggaggcggacattgttctgtatttgatagacggcgttcagggcgttacaggcgaagacagggattttattgataacgacggcaggcggtttctcatctggaacaaagctgatattgcgccatcgccgccaactcagaactatatcagcgtaagcgcgaaaaccggcgaagggctggcgcagatttacgcggcgatttcatcggcaattcgtggacaggcggcctcacagcaagcagtggcacagcaagaagcggcacagctatcatcggcgcaagtttctctgcaagacgcgcctatcacagccgccgttggaacggagaggcagaaaaagcttgtagacgccgcaatctccgcgctggaagaggcgcttgatcttgcgcggcgggaagagccgctggacttaatcgccccgctgctgagggaagcggttaattcgctgggcgagattacgggagaggtatccacagccgatatattggaagaaatgttcagccggttctgtgtggggaagtaa

SEQ ID NO: 58188 - protein, 286 aa, Unknown
  Obtained from environmental sample
  DOMAIN (39)...(153): GTPase of unknown function
  misc_feature (1)..(286): Xaa is any amino acid
MLMKTKGKLPYLNIALEALSRLKKLSASWRMERIYQEGITVVIAGRPNAGKSSLFNALLKEDRSIVTEIPGTTRDWIEAWVSVDGLPVRLVDTAGLRDSSEAVEKIGVDRSRKLLQEADIVLYLIDGVQGVTGEDRDFIDNDGRRFLIWNKADIAPSPPTQNYISVSAKTGEGLAQIYAAISSAIRGQAASQQAVAQQEAAQLSSAQVSLQDAPITAAVGTERQKKLVDAAISALEEALDLARREEPLDLIAPLLREAVNSLGEITGEVSTADILEEMFSRFCVGK

SEQ ID NO: 58189 - DNA, 624 bp, Unknown
  Obtained from environmental sample
  misc_feature (1)..(624): n is a, c, g, or t
ttgcaagacggtcatgcttacaatgacgacaatcccatcgccgctttcgccactattcccggaagcggcgccctcacgttaatccgctgttcgggcaagggcgcgatagaggcggtatcatccgtctttgccccggacaagttaaacggcgcgtccggcaattcaatcattcacggctggatagttaaagacggcgaaaaaattgacgaagtgcttgtctcggtcttccgcgccccgaaaagttacacgggcgaagacagccttgacataagctgccacggcggcgcaagcgcgggaaaagccgtaatgtccgcgctaagctcagccggttttcgggacgcgcttcccggtgaatttactttccgcgcttttgtaaacggcaaactcgatcttacaaaagccgaatccgtcatggaactggtttccgcaaagactgacataagccgccgtcacgccgtgtcgcgcctttccggctccctgcaaacggaaatcgaggagataaaaaaatcgctggtgcaggttctttccggcgcggagatttaccttgactattcggaagacgaagtaggcgcggatgttgatgaagacgaagggaaaactcccctatctgaacattgcgcttga

SEQ ID NO: 58190 - protein, 207 aa, Unknown
  Obtained from environmental sample
  misc_feature (1)..(207): Xaa is any amino acid
MQDGHAYNDDNPIAAFATIPGSGALTLIRCSGKGAIEAVSSVFAPDKLNGASGNSIIHGWIVKDGEKIDEVLVSVFRAPKSYTGEDSLDISCHGGASAGKAVMSALSSAGFRDALPGEFTFRAFVNGKLDLTKAESVMELVSAKTDISRRHAVSRLSGSLQTEIEEIKKSLVQVLSGAEIYLDYSEDEVGADVDEDEGKTPLSEHCA

SEQ ID NO: 58191 - DNA, 615 bp, Unknown
  Obtained from environmental sample
  misc_feature (1)..(615): n is a, c, g, or t
atggaaaagaataaactaatatggaaagaagaaagccggaaaaaggtttttgactgccgggtgttttccgtcctggaaagcctttgtagagcgcctaacgataaaaccggggttttctcggttatcgaagccgcggactgggcaatagtagtgccggtgctgagtaccccgtcagggaaaaaatttgtaatggtctggcagtggcggcacggctatctggatttaagccttgagtttcccggaggggtttttgagccgggcgagaacgcagaggaggcggcaggcagggaacttcttgaggagacaggctacagggcgggaaagatccggaagctgggcgagttcagccccaacccggcgattatgtcaaacaaggtacattttttccttgccgaggatcttgcggacacgggcaaacagggccttgacgccgatgaatttgtggagattgagcgcataagcgtcgacgcggtatgcaaaggcatgggcaagccgccgtatgtccacgcgctgatgggcaccgcgctggcgatgtatttgacgagagaaaagggaacagggaacggggaacggggaacggggaacagtgcttggtcattgatcttgtcgaagtga

SEQ ID NO: 58192 - protein, 204 aa, Unknown
  Obtained from environmental sample
  DOMAIN (47)...(174): NUDIX domain
  misc_feature (1)..(204): Xaa is any amino acid
MEKNKLIWKEESRKKVFDCRVFSVLESLCRAPNDKTGVFSVIEAADWAIVVPVLSTPSGKKFVMVWQWRHGYLDLSLEFPGGVFEPGENAEEAAGRELLEETGYRAGKIRKLGEFSPNPAIMSNKVHFFLAEDLADTGKQGLDADEFVEIERISVDAVCKGMGKPPYVHALMGTALAMYLTREKGTGNGERGTGNSAWSLILSK

SEQ ID NO: 58193 - DNA, 471 bp, Unknown
  Obtained from environmental sample
  misc_feature (1)..(471): n is a, c, g, or t
atgaaacatagaagaggatttaatccgctccagcgaatggcggcgcaccgcaaagcgctgcaccgcaacatggtgacaagcctgttcaggtacgagcgcgtaaaaactaccaaggcgaaagccctggaggtccggcgcaccgctgaaaaaatgatcacgcgcgccaaggttgattccgtgcataacaggcgcattgtttcgggccgcctgtacaatgagggcattgtggcgaagctgtttaccgtcatcgcgcccaggatgaaggaccggaacggcggctatacaaggatactcaagctcggccagcgtcttggggacgccgcgcagatggtgattttggaattggtcgactataagcttgacgttgaaggcggagccaaaaagaaagaagccaaggcgaaaggcaaggccgagaagaaagaaaaagacaaaaaagaaaaagaagaaaaagaagagaaagcaaagaaataa

SEQ ID NO: 58194 - protein, 156 aa, Unknown
  Obtained from environmental sample
  DOMAIN (20)...(116): Ribosomal protein L17
  misc_feature (1)..(156): Xaa is any amino acid
MKHRRGFNPLQRMAAHRKALHRNMVTSLFRYERVKTTKAKALEVRRTAEKMITRAKVDSVHNRRIVSGRLYNEGIVAKLFTVIAPRMKDRNGGYTRILKLGQRLGDAAQMVILELVDYKLDVEGGAKKKEAKAKGKAEKKEKDKKEKEEKEEKAKK

SEQ ID NO: 58195 - DNA, 537 bp, Unknown
  Obtained from environmental sample
  misc_feature (1)..(537): n is a, c, g, or t
atgaatgggtattacgttcagcctgaaaaacaaatcctgcctgaatcgccctgtttcgcaggctttttccaggtcctggtttgtcgcggctattatgcgcacgtcggtttcaatggttttctcgccgccgagtctttcgattttttgttcctgaataacccgcagtacttttgcctgcgccgaaaggctcatgtccccgatttcatcaagaaagagggttccgccgtgcgccatctcaaaacgccctttgcgggcagataccgcgtcggtgaacgcgcctttttcatgtccgaaaagttcgctttctatcagcgtttccggtattgcggcgcagtttacgtccacaaaaggatttccagcgcgcgccgaacactggtgaatcgcccttgcgattacttcttttcccgcgccgttttcgccggtgataagaatgcgcgcgtcgctttccgccgcctgttttaccgtttccctgatgccgcgtataagcgcgcttgttcccattatatcttcgcttggaacgccgcctgccccttttaa

SEQ ID NO: 58196 - protein, 178 aa, Unknown
  Obtained from environmental sample
  misc_feature (1)..(178): Xaa is any amino acid
MNGYYVQPEKQILPESPCFAGFFQVLVCRGYYAHVGFNGFLAAESFDFLFLNNPQYFCLRRKAHVPDFIKKEGSAVRHLKTPFAGRYRVGERAFFMSEKFAFYQRFRYCGAVYVHKRISSARRTLVNRPCDYFFSRAVFAGDKNARVAFRRLFYRFPDAAYKRACSHYIFAWNAACPF

SEQ ID NO: 58197 - DNA, 1083 bp, Unknown
  Obtained from environmental sample
  misc_feature (1)..(1083): n is a, c, g, or t
gtgcaaaggcaggggcagaactcaattatcgttattaattacaatcttggcgaggattttgacacgggaaaagacgctttggaaaaccaaaccgcccgttttgacacaataaatttattaagggacaatctgcgcccgcttttatttttcttttacggcgtgttttttcttcccaccctgcttatgacggtaattatcgcgatttcgtttacgcggcggattacccatcctattgtagaacttacggaagcgacccggcgcgtcgccgagggggatttcgccattcaaatactgtcccgccgcaacgacgagcttgggcttcttatccgctcttttaacgcgatggttcaggatttggaaaaatcaagggcggcattggttaaaagcgaaaaaatttctatatggcagaacatggcgcagcagcttgcgcacgaaattaaaaacccgcttactcccataaaactttcagccgaacgcgtgctgcgccgctggagtaacgagcccgacaagatcggcgagattcttgaaagttccatgatggcgataattcaggaaacagaagggctctctaccctgcttaacgaattcagaactttatcaaaacctatggaaccgtcccaaacatggacggacttacgcgaagccgcggaagaattaataaacgcctattcaacctcttacccgcaggttcaattcgacataaaccatgtggaaaaaggaataaccgtaaaaatagaaaagcaccgtatcgcccaaattcttacaaaccttattattaacgcgattgacgcgatgaacggctcgggctccattgaaattcgcacggaccttgtaaaaaaacgggatgtgctttattgtagaataagcgtaaaagatacaggcaaaggcataagcaagcaggacgcccatcttttatttacgccgtactacacgacaaaagaatcaggcacgggacttgggcttcctattgtcgagcgtatagttaacgatcacggcggcgcgatttggtttgattcggcggaaggcatgggaaccacattttacattgacctgcccgcggaaaaaaatgaggaagaaaaataa

SEQ ID NO: 58198 - protein, 360 aa, Unknown
  Obtained from environmental sample
  DOMAIN (134)...(205): His Kinase A (phosphoacceptor) domain
  misc_feature (1)..(360): Xaa is any amino acid
MQRQGQNSIIVINYNLGEDFDTGKDALENQTARFDTINLLRDNLRPLLFFFYGVFFLPTLLMTVIIAISFTRRITHPIVELTEATRRVAEGDFAIQILSRRNDELGLLIRSFNAMVQDLEKSRAALVKSEKISIWQNMAQQLAHEIKNPLTPIKLSAERVLRRWSNEPDKIGEILESSMMAIIQETEGLSTLLNEFRTLSKPMEPSQTWTDLREAAEELINAYSTSYPQVQFDINHVEKGITVKIEKHRIAQILTNLIINAIDAMNGSGSIEIRTDLVKKRDVLYCRISVKDTGKGISKQDAHLLFTPYYTTKESGTGLGLPIVERIVNDHGGAIWFDSAEGMGTTFYIDLPAEKNEEEK

SEQ ID NO: 58199 - DNA, 453 bp, Unknown
  Obtained from environmental sample
  misc_feature (1)..(453): n is a, c, g, or t
ttgatgttgtctttgaataatataaatccgggcaagtccaaagttaagggcagaaagagaattggcagaggtccgggctccggctggggaacaaccgctggcagagggcaaaagggcgcaggagcgcgcaaaagcgcaaaagctggcagagttgcctttgagggcggtcaaatgcccattcaccgccgcttgcccaagcgcggctttaaaagcaaattcccaaaagatacccaaatagtgaatttggcaaaattggaaaaggcaacagaaacaaaatttgatgccgttgttctttttgaccttggctttattcgctctgtggaaaaacccattaaaattttgggcacaggtaaaataacaagagccatagaaattaaagttaatgccattagcgaaacagcaaaaaaagctattgaagctgctggcggaaaaatagagataatagtagagtaa

SEQ ID NO: 58200 - protein, 150 aa, Unknown
  Obtained from environmental sample
  DOMAIN (112)...(143): Ribosomal protein L15
  misc_feature (1)..(150): Xaa is any amino acid
MMLSLNNINPGKSKVKGRKRIGRGPGSGWGTTAGRGQKGAGARKSAKAGRVAFEGGQMPIHRRLPKRGFKSKFPKDTQIVNLAKLEKATETKFDAVVLFDLGFIRSVEKPIKILGTGKITRAIEIKVNAISETAKKAIEAAGGKIEIIVE

SEQ ID NO: 58201 - DNA, 846 bp, Unknown
  Obtained from environmental sample
  misc_feature (1)..(846): n is a, c, g, or t
atggaagcactgaaaaaagccatagatgcctttgcgaatgcctttagggtagaagacctgcgtaaaaagctgctcttcacacttggcgttttgataatttaccgcataggttctcacataagcataccgggcgtggatccttcgcgcctcgcaagttttttctcgcaaagctcaaataatctttttggtctctacgatagctttaccggtggtgcctttgcaaaagcaaccatattcgcgctaggcataatgccatacatcagcgcaagcataataattcaaattatgggcgcggttatacctcaaattcgccttttgcaaaaagaaggcgcagagggcagggcaaaactaaaccaatggacaaggtatttcacagttttgctcgctacagtgcagggctggggtattgcaatttggctttccagcgttagagtaaatgtaggcggtgcccaaggtgtttctgtgttgctagacgattttgcaagcggtgctggaaattggggttttagattgctcgccactctcacaatgacaacaggtaccatattcgttatgtatctgggtgagcaaataaccagccgtggtgttggaaacggaatatctttgattatttttgcaggtattgttggcggtcttccacgtgctatgattatggaatacgagcaatttgcggcaggcaaccaaaaattgatgatagaagtgatgataattggaatggtgatagccattataggctttattgtgttcattgagcaggcaaataggcgcattccgcttcaagccccaaaagagttgttgggcgcaaagttatgggcggtcagtccagctatttgccattcaaggtaa

SEQ ID NO: 58202 - protein, 281 aa, Unknown
  Obtained from environmental sample
  DOMAIN (77)...(280): eubacterial secY protein
  misc_feature (1)..(281): Xaa is any amino acid
MEALKKAIDAFANAFRVEDLRKKLLFTLGVLIIYRIGSHISIPGVDPSRLASFFSQSSNNLFGLYDSFTGGAFAKATIFALGIMPYISASIIIQIMGAVIPQIRLLQKEGAEGRAKLNQWTRYFTVLLATVQGWGIAIWLSSVRVNVGGAQGVSVLLDDFASGAGNWGFRLLATLTMTTGTIFVMYLGEQITSRGVGNGISLIIFAGIVGGLPRAMIMEYEQFAAGNQKLMIEVMIIGMVIAIIGFIVFIEQANRRIPLQAPKELLGAKLWAVSPAICHSR

SEQ ID NO: 58203 - DNA, 555 bp, Unknown
  Obtained from environmental sample
  misc_feature (1)..(555): n is a, c, g, or t
atgggcggtcagtccagctatttgccattcaaggtaaataccgcaggcgttattccagttattttcgcatcttccattatgtttgttccagccatgatagcttcttggttcccaaataccggttggatagaagcatttgccggagcttttttaccaggtcacataacatatagcgttatatttgccctgctgattatattcttcacatatttctacacagcaattcaatacaacccaagcgatattgcagacaatttaaagaaatcaggtggctttatccccggcattcgcccagggcgcaaaaccgctgaatacatagataatattttaactcgcataacacttccgggcgcaatattcctagctaccataagcgttggaccattgcacctcaaagatgctttgaatatgtctttttatatgggcggaacatctgttttgattgtggtgggcgttgccctagacactttaaggcaaatagaggctcagttgcacactaagaattatgaaggtttcttaaagcacggtcgcattcgcggcaggatggcgtcttag

SEQ ID NO: 58204 - protein, 184 aa, Unknown
  Obtained from environmental sample
  DOMAIN (1)...(159): eubacterial secY protein
  misc_feature (1)..(184): Xaa is any amino acid
MGGQSSYLPFKVNTAGVIPVIFASSIMFVPAMIASWFPNTGWIEAFAGAFLPGHITYSVIFALLIIFFTYFYTAIQYNPSDIADNLKKSGGFIPGIRPGRKTAEYIDNILTRITLPGAIFLATISVGPLHLKDALNMSFYMGGTSVLIVVGVALDTLRQIEAQLHTKNYEGFLKHGRIRGRMAS

SEQ ID NO: 58205 - DNA, 369 bp, Unknown
  Obtained from environmental sample
  misc_feature (1)..(369): n is a, c, g, or t
atggctagaattgctggtatagatttgccaaagaacaagagcgttgaatatggcttaaccgctatttttggcgtgggcttgcacacttcccgcgaagtttgcggcaaacttgggatagacaaaaacaaaaaggtggaaaccctttcggaagaagaacaaggcaaaatacgccgtatgctcgaagaagagtataaggtggaaggtcagttgagggcagagataaccctgaacataaagcgtttgcaagacattggttgctatcgcggctctaggcaccgtaaaggtttgcctgcaagaggtcagcgtacccgcaccaatgctcgtactcgcaagggtccaaagaaaaccgtggctaacaagaagaagtaa

SEQ ID NO: 58206 - protein, 122 aa, Unknown
  Obtained from environmental sample
  DOMAIN (3)...(109): Ribosomal protein S13/S18
  misc_feature (1)..(122): Xaa is any amino acid
MARIAGIDLPKNKSVEYGLTAIFGVGLHTSREVCGKLGIDKNKKVETLSEEEQGKIRRMLEEEYKVEGQLRAEITLNIKRLQDIGCYRGSRHRKGLPARGQRTRTNARTRKGPKKTVANKKK

SEQ ID NO: 58207 - DNA, 438 bp, Unknown
  Obtained from environmental sample
  misc_feature (1)..(438): n is a, c, g, or t
gtgtcagaagaaaccaaagaagaaaaagcagctccggcaactgaagccgcagctcccgaagaggttaaggttaaaaaaagcaaaaagcgcatagatgtgcaaggaattgctcacatttacgcttcttttaacaataccataatttccataacagattccaaaggtaatttggtttctggcaattcccctgggcgttctggctacaaaggcagcaaaaaaagtacgccttatgctgcacaggttgcagcagaggcggccgctttgcaggcatttggacttggaatgcgcaaggttatggttcgcatcaaaggtgcaggccctgccagggaatcggctgttcgcgccataaaaaatgcgggcttagaagtgttgcaaatattggatgtaacaggcattcctcacaatggatgtcgtcctaaaaaaagaagaagaatttaa

SEQ ID NO: 58208 - protein, 145 aa, Unknown
  Obtained from environmental sample
  DOMAIN (35)...(144): Ribosomal protein S11
  misc_feature (1)..(145): Xaa is any amino acid
MSEETKEEKAAPATEAAAPEEVKVKKSKKRIDVQGIAHIYASFNNTIISITDSKGNLVSGNSPGRSGYKGSKKSTPYAAQVAAEAAALQAFGLGMRKVMVRIKGAGPARESAVRAIKNAGLEVLQILDVTGIPHNGCRPKKRRRI

SEQ ID NO: 58209 - DNA, 606 bp, Unknown
  Obtained from environmental sample
  misc_feature (1)..(606): n is a, c, g, or t
atggtgtggaaatctttaaaaatgcccaagaatttccagaaaacggaagttttggaaaatggtcgtcgtgcgaaatttgaaatagaagctttggaacgcggttggggaacaaccattggaaacgctttgcgcagggctttgctgtcttcaattcaaggtgctgccattgtttctgtgaaaatagacaaggtggtaaaggaatatgccaatattccaggcgttagagaagatgtgacagacatcattttgaacctgaagtctattcgcgttaaacttttgagcgataaagacgaaactttgcgccttgatgtttctggcaatggcgatgttgcggcaaaagacatagatgcaaatccggctgttgttattctcaatcccgatgtgcatatagcaactctcagcggagataacgcttctctttgcatagaaatgaaagtttcttcgggtcgcggttatgttcccgcagacgatccagaccgcagaagggctgctgaaaacgctccggttggcgaaattttaatagatgccaactataatcctgttttgaatgtggctatgtatgtttccgataccagagttgaggaacgcacagacttcaatcgttga

SEQ ID NO: 58210 - protein, 201 aa, Unknown
  Obtained from environmental sample
  DOMAIN (59)...(179): RNA polymerase Rpb3/RpoA insert domain
  misc_feature (1)..(201): Xaa is any amino acid
MVWKSLKMPKNFQKTEVLENGRRAKFEIEALERGWGTTIGNALRRALLSSIQGAAIVSVKIDKVVKEYANIPGVREDVTDIILNLKSIRVKLLSDKDETLRLDVSGNGDVAAKDIDANPAVVILNPDVHIATLSGDNASLCIEMKVSSGRGYVPADDPDRRRAAENAPVGEILIDANYNPVLNVAMYVSDTRVEERTDFNR

SEQ ID NO: 58211 - DNA, 2085 bp, Unknown
  Obtained from environmental sample
  misc_feature (1)..(2085): n is a, c, g, or t
atggccgaaacggtcagtatttgcgacacgccgggattgaagcgtcggagatggaaggacacgagatggagagcgtctggttgccggacaggtacccgcgattttattgcaaacgtgacaaaaacctttctcgaaggcccgcaggaatggataagcgaaatcggcgacggtattttccactcgagcgcggcgccgatgtatgacacctggggcaccatgctcggcatcgtcggcagcacggatgatgtgactgcggcggtagggctgcaacgggcactggaagccgcagtcgaagacgcgaaaatcgcaaaccgcgccaaatcaatctttctggccaacatgagccatgaaatacgcacgcccatgaacgccattatgggcattaccgaaatccagctgcaagacaaaacacttgaggcgcgcacacgggatgctttccgctccatccataccgccagcgacctgctgctcggcattatcaacgacatgctcgatatgtccaaaatcgaggcgggcaaactggaattggtgcccgccgcctacgaagtcgcaagtctgatcagtgatgccgcgcagttgaacatgatacgacgcggcagcaagccgattgagtttgaagtgcgggtggaggaagacacgccggcggcggtcgtgggcgatgccctccgcgtgaagcanattctgaacaacattctttccaacgccttcaaatatacggacgaaggaacgattaatatggccattacttccgaacagcggaacgatgataatattacgattgtatttaccgtaaccgataccggccagggaatgacacaggaacaagtgcgtaatttaggcaccgaatattcccgctttaatactgaagctaaccgtaaaaccgaaggaaccggccttgggatgaatattacaatgaatttggttcaactgatgggcggcaatatatccatagacagtacacccggccttggttcgacatttaccgtgcgtataccgcagaaatgcgttgattttgaaaccatcgggaaagaacttgccgataaccttgtgcatcacaatcttgacggcgtatccagaatgagaaccatacaggtaaaacgtgattttatgccatacggacgcgtattaattgtagatgatgtggaatcgaacctgtatgtcgccagggggcttatgtcttcgtatggattgtcaatagacgtttctacgagcgggtttgaagcgatagaaaaaatcagaagcggctcggtatatgacgttatctttatggatcatatgatgcctaaaatggacggcattgaggccgcgaaaatcatccgcggtttgggttataaagagccgattgtcgcgttaaccgcaaacgctctcgccgggcaggcggaaatatttttagataacggttttgacggatatatttccaagcccatagacatacgccagctgaacagtacgttaaataaatttgtacgtgacaagcagcctgcggaggtaattgaagaagcgcggcggcaaaaagaaagcatatccaacgcgaatcaatattcgtctttaagccggcagttgatagaatttttccttcgtgatgcgaaaaaaagcgcgtccgtgctggaaactatatacgcaaacagcggccgcagaagcggcgatttatcaatgtttatcatcaatattcacggaatgaaaagcgcccttgcaaatatagaagaggatgaactatcggaacacgcggcaaggctggaacaggcgggacgggacaaaaatatcaaatttattatggcggaacttccgtcgtttttggaaaatcttcataatttaatgaataaattagaaggtgacatcgccgcaaaagaaggttcgggcgatgaagaaataaatccccaattattaaaagaaaaactgcttgcaattaaagcttcatgcgctatattaaacaaaaaagccgcaaaaaaaatattggcggaattaaaggaaaaaatattacctgcttcgacagcgcagatgttaagcaatatttccgagaatttactgcacagtgaatttgaagaaataattaaatctatagacgactttgtgaagcagagttaa

SEQ ID NO: 58212 - protein, 694 aa, Unknown
  Obtained from environmental sample
  DOMAIN (106)...(172): His Kinase A (phosphoacceptor) domain
  misc_feature (1)..(694): Xaa is any amino acid
MAETVSICDTPGLKRRRWKDTRWRASGCRTGTRDFIANVTKTFLEGPQEWISEIGDGIFHSSAAPMYDTWGTMLGIVGSTDDVTAAVGLQRALEAAVEDAKIANRAKSIFLANMSHEIRTPMNAIMGITEIQLQDKTLEARTRDAFRSIHTASDLLLGIINDMLDMSKIEAGKLELVPAAYEVASLISDAAQLNMIRRGSKPIEFEVRVEEDTPAAVVGDALRVKXILNNILSNAFKYTDEGTINMAITSEQRNDDNITIVFTVTDTGQGMTQEQVRNLGTEYSRFNTEANRKTEGTGLGMNITMNLVQLMGGNISIDSTPGLGSTFTVRIPQKCVDFETIGKELADNLVHHNLDGVSRMRTIQVKRDFMPYGRVLIVDDVESNLYVARGLMSSYGLSIDVSTSGFEAIEKIRSGSVYDVIFMDHMMPKMDGIEAAKIIRGLGYKEPIVALTANALAGQAEIFLDNGFDGYISKPIDIRQLNSTLNKFVRDKQPAEVIEEARRQKESISNANQYSSLSRQLIEFFLRDAKKSASVLETIYANSGRRSGDLSMFIINIHGMKSALANIEEDELSEHAARLEQAGRDKNIKFIMAELPSFLENLHNLMNKLEGDIAAKEGSGDEEINPQLLKEKLLAIKASCAILNKKAAKKILAELKEKILPASTAQMLSNISENLLHSEFEEIIKSIDDFVKQS

SEQ ID NO: 58213 - DNA, 390 bp, Unknown
  Obtained from environmental sample
  misc_feature (1)..(390): n is a, c, g, or t
atgaagttatggccgaactgcgaaatacgatatcaggaaagaaatcccggaagaaaggtctgcctgatgtataaaatccattatcttccttgggcgctggatgatttaaaggatattgtacgctacatcgctcatacgctggaatcgccaaaggcggcggaagattttctatcaaaacttgacagagagatacgtaaaatagcggataatcctttccgctgccgtttatatgttacatctgaaaaattgaaatatgaatacagggttttacatattaacaactattctcttttttatgaagtagaaaataaaaaaattgaaattcaccgggtcctctactcacggagagatattgtgcaaatactaaagaagggggataccgatccctag

SEQ ID NO: 58214 - protein, 129 aa, Unknown
  Obtained from environmental sample
  DOMAIN (26)...(118): Plasmid stabilisation system protein
  misc_feature (1)..(129): Xaa is any amino acid
MKLWPNCEIRYQERNPGRKVCLMYKIHYLPWALDDLKDIVRYIAHTLESPKAAEDFLSKLDREIRKIADNPFRCRLYVTSEKLKYEYRVLHINNYSLFYEVENKKIEIHRVLYSRRDIVQILKKGDTDP

SEQ ID NO: 58215 - DNA, 792 bp, Unknown
  Obtained from environmental sample
  misc_feature (1)..(792): n is a, c, g, or t
atggattattacaaagtaaaccaaatctacccttggctttatagcataaaagatccccaaaacgtgttttgttatttggcggtgggaaacgggagcgccctgctttttgatacggtatacggcatagctagcctgcccagaacaatcaaaaaaataacggacaagcccgtatgcgtagtgctggggcacgggcatcttgatcacgcaaacggcgcctgccagtttgaagaagcctgggcgcacgaggcggattttgatgtgtgccgcagggatacatctgaagaagtgcgcagggaaaccctgaaggaattgaaggaacagggagtcgccctgcccgatgattttgatcctaaagtttatgtaaagggcggcactggtaatcttaagaaattgcccgtaggcaaggtgtttgatctgggtggcctgcgtttggaagtaatcggcatgggaggacataccacaggttccatagggcttcttgttaaagaacacaaagttctgctggacagcgattcggcgaacacccaaacatggctattcaggcttgaatccctgtctgtgaaacaatacatagccatgcttgaacgggttgtccggcttgattttgacgttttctttatggggcattccgacgcgcccatgcccaaatctgattttcataaatttatcaacgccgcgcgtcacgccacgatagaaaagtccgaacccttcccgctattgccggaattgaaagggtttatctacagggaagacggcgttgagatcgtaatcagtgaggcggccttacggtga

SEQ ID NO: 58216 - protein, 263 aa, Unknown
  Obtained from environmental sample
  DOMAIN (21)...(209): Metallo-beta-lactamase superfamily
  misc_feature (1)..(263): Xaa is any amino acid
MDYYKVNQIYPWLYSIKDPQNVFCYLAVGNGSALLFDTVYGIASLPRTIKKITDKPVCVVLGHGHLDHANGACQFEEAWAHEADFDVCRRDTSEEVRRETLKELKEQGVALPDDFDPKVYVKGGTGNLKKLPVGKVFDLGGLRLEVIGMGGHTTGSIGLLVKEHKVLLDSDSANTQTWLFRLESLSVKQYIAMLERVVRLDFDVFFMGHSDAPMPKSDFHKFINAARHATIEKSEPFPLLPELKGFIYREDGVEIVISEAALR

SEQ ID NO: 58217 - DNA, 321 bp, Unknown
  Obtained from environmental sample
  misc_feature (1)..(321): n is a, c, g, or t
atgaaaacagatgattctcgggtaaaaataaatctcgctgagcttgcaaacgccctggcaaggacggatgatccgggccttatcagggactttctgtactgccttttgacccccgcggaaatagcggatattgcggcgcgttgggcgctggtaaaggaattgaaacgcanaacaccgcagagggagattgccagagaccttggcatttccctgtgcaaaataacgcgnggctccagggagctgaaaaagccgggatcggcctttcaaaaatgttggcggtacaggagcgtgacttggtatgcacctcaaccgagcctgtaa

SEQ ID NO: 58218 - protein, 106 aa, Unknown
  Obtained from environmental sample
  DOMAIN (10)...(95): Trp repressor protein
  misc_feature (1)..(106): Xaa is any amino acid
MKTDDSRVKINLAELANALARTDDPGLIRDFLYCLLTPAEIADIAARWALVKELKRXTPQREIARDLGISLCKITRGSRELKKPGSAFQKCWRYRSVTWYAPQPSL

SEQ ID NO: 58219 - DNA, 444 bp, Unknown
  Obtained from environmental sample
  misc_feature (1)..(444): n is a, c, g, or t
atggttcatcacgcgccgccaaggccgtttttgcttagggagcatcgcttataccaggcggactggctcctccggttttacaaattcgcgcccggtgaaattcttgagggggacgatggttttcttgaaacaggacttgatccaaaaacggcctgggcgcttaggcacctggactttttccctgtggaggtgaacagcgcggactacgatgagcttttacgggttcccggcatcggcgcaaagacaggccgccggattatcgaaacccggcgttcccgcagcttgagttttgaaaacctcctccggctgggggtcgtgctaaaaagggcgcggcactttataaccgcctcaggcgcttttatcgagcggcctgagaatcccggccggatacgccgcctcctctccgatgaggattatttacagccggaactttttgagttttag

SEQ ID NO: 58220 - protein, 147 aa, Unknown
  Obtained from environmental sample
  DOMAIN (60)...(89): Helix-hairpin-helix motif
  misc_feature (1)..(147): Xaa is any amino acid
MVHHAPPRPFLLREHRLYQADWLLRFYKFAPGEILEGDDGFLETGLDPKTAWALRHLDFFPVEVNSADYDELLRVPGIGAKTGRRIIETRRSRSLSFENLLRLGVVLKRARHFITASGAFIERPENPGRIRRLLSDEDYLQPELFEF

SEQ ID NO: 58221 - DNA, 639 bp, Unknown
  Obtained from environmental sample
  misc_feature (1)..(639): n is a, c, g, or t
atggaattatttgatgaccctgcagaaacaacacaggaagtaacagacttcctgtccagacacatttttgagctttccgtagatgcctattacaccgctttatacgcgcagatgagctgtaagcccataaaaagagaaattaccgccttcatcgaaaaagtaagccgggcaaagaacagggacgaagcgaaccgcgccgccagagaccgcggcgatagcgatgtgttgactgtactgaaagaggccggcaaggtaacttacgaaattcaccgtttaaccgggatgctcaggttcagccctgaaagcgacggggtttacacagcccgctgcgctccagataattttatcctccccgctctcgcggaacactttaccctccgcttcggcgaaacgccctgggcaattatcgacgaaaagcgcggcctttgccttcgcaaagccaacggcagcgaggccgttctcgttcccttgccatcgggactttcagaggccgttgcgggaaagggcaaaacggattcatgggaagacctttggcggctctaccataagtcgataaacaatgaaagcagaaaaaatccccgtcttcagcgccagttaatgcctgagcgttaccaaaagtatttaacggagctgaactaa

SEQ ID NO: 58222 - protein, 212 aa, Unknown
  Obtained from environmental sample
  misc_feature (1)..(212): Xaa is any amino acid
MELFDDPAETTQEVTDFLSRHIFELSVDAYYTALYAQMSCKPIKREITAFIEKVSRAKNRDEANRAARDRGDSDVLTVLKEAGKVTYEIHRLTGMLRFSPESDGVYTARCAPDNFILPALAEHFTLRFGETPWAIIDEKRGLCLRKANGSEAVLVPLPSGLSEAVAGKGKTDSWEDLWRLYHKSINNESRKNPRLQRQLMPERYQKYLTELN

SEQ ID NO: 58223 - DNA, 360 bp, Unknown
  Obtained from environmental sample
  misc_feature (1)..(360): n is a, c, g, or t
ttgaagcgattgactccaaccgttaaaacggtagtggagcaggaggataatatccggaacgcaatggaggagcagggcgagggcagcaggcagatactggacggcataagcaacgtgaacgaaattacccggcaggtaaaaggcggttccgaggaaatgcttacaggcagcagggaagtgataaacgaaagccacaaccttgaaaccgtaacgcaggaaataaccggcggcatgaacgagatggcttccggggcggaacaggtaaacatagcggtacaccatgtcaacgagatatgcgttaagaaccgcgagaggattgggtctttgatgcaggaagtttcacgcttcaaagtagcttaa

SEQ ID NO: 58224 - protein, 119 aa, Unknown
  Obtained from environmental sample
  misc_feature (1)..(119): Xaa is any amino acid
MKRLTPTVKTVVEQEDNIRNAMEEQGEGSRQILDGISNVNEITRQVKGGSEEMLTGSREVINESHNLETVTQEITGGMNEMASGAEQVNIAVHHVNEICVKNRERIGSLMQEVSRFKVA

SEQ ID NO: 58225 - DNA, 648 bp, Unknown
  Obtained from environmental sample
  misc_feature (1)..(648): n is a, c, g, or t
ttgaaagatataggcaacgaccttgccggcaacatgaccgaaaccgccgcggcgatcaaccaaatcaccgccaacatccagagcatcaagggcaggattatcaaccagagcgccagcgttaccgagaccaacgccaccatggaacaggttgtaaccaacatcaacaagcttaacggccaagtggaagaccagagcagcaacatctccaaggcttcctccgccatcgagcagatggtggccaatgtcggctccgtgacccagacgctggttagaaacgccgataacgtaaaaacgctggaggaagcctccgaagtgggccgcagcgggctggagggagtcgtggcggacattaaggggatagcccttgaatccgaggatctgttgaaaatcaacgcggtgatgaaggacatagccagccagaccaacctgctttcgatgaacgcggctatagaggcggcccacgccggggaggcgggcaagggcttcgccgtcgtcgccgacgagatccgcaagctggcggaaagctcaagcgagcagtccaagaccatcggtgccgtgcttaaaaagataaagggttcaatagacaagataacccattccacggaaaacgtgcttagcgagtttgaagcgattgactccaaccgttaa

SEQ ID NO: 58226 - protein, 215 aa, Unknown
  Obtained from environmental sample
  DOMAIN (48)...(211): Methyl-accepting chemotaxis protein (MCP) signaling domain
  misc_feature (1)..(215): Xaa is any amino acid
MKDIGNDLAGNMTETAAAINQITANIQSIKGRIINQSASVTETNATMEQVVTNINKLNGQVEDQSSNISKASSAIEQMVANVGSVTQTLVRNADNVKTLEEASEVGRSGLEGVVADIKGIALESEDLLKINAVMKDIASQTNLLSMNAAIEAAHAGEAGKGFAVVADEIRKLAESSSEQSKTIGAVLKKIKGSIDKITHSTENVLSEFEAIDSNR

SEQ ID NO: 58227 - DNA, 681 bp, Unknown
  Obtained from environmental sample
  misc_feature (1)..(681): n is a, c, g, or t
ttggagtcaatcgcttcaaactcgctaagcacgttttccgtggaatgggttatcttgtctattgaaccctttatctttttaagcacggcaccgatggtcttggactgctcgcttgagctttccgccagcttgcggatctcgtcggcgacgacggcgaagcccttgcccgcctccccggcgtgggccgcctctatagccgcgttcatcgaaagcaggttggtctggctggctatgtccttcatcaccgcgttgattttcaacagatcctcggattcaagggctatccccttaatgtccgccacgactccctccagcccgctgcggcccacttcggaggcttcctccagcgtttttacgttatcggcgtttctaaccagcgtctgggtcacggagccgacattggccaccatctgctcgatggcggaggaagccttggagatgttgctgctctggtcttccacttggccgttaagcttgttgatgttggttacaacctgttccatggtggcgttggtctcggtaacgctggcgctctggttgataatcctgcccttgatgctctggatgttggcggtgatttggttgatcgccgcggcggtttcggtcatgttgccggcaaggtcgttgcctatatctttcaacgctcccgactgcctttataaatcagaacaaggtctctga

SEQ ID NO: 58228 - protein, 226 aa, Unknown
  Obtained from environmental sample
  misc_feature (1)..(226): Xaa is any amino acid
MESIASNSLSTFSVEWVILSIEPFIFLSTAPMVLDCSLELSASLRISSATTAKPLPASPAWAASIAAFIESRLVWLAMSFITALIFNRSSDSRAIPLMSATTPSSPLRPTSEASSSVFTLSAFLTSVWVTEPTLATICSMAEEALEMLLLWSSTWPLSLLMLVTTCSMVALVSVTLALWLIILPLMLWMLAVIWLIAAAVSVMLPARSLPISFNAPDCLYKSEQGL

SEQ ID NO: 58229 - DNA, 831 bp, Unknown
  Obtained from environmental sample
  misc_feature (1)..(831): n is a, c, g, or t
atgccgccgcgcttccgcatggaaaacgggcaggcaaatatcacgactaccaccgacgtggaggccgccatggcgtatttaacaggccccgacgcgaagaaagacaggtacgtgcatcccgttcccagaaatatagacgggaaagacacctggtatttcaggataatggttcccatcttaaacagacgtaacggcgaagtagtgggaggcgtgggccttctttgtgttatagacgcggtacagccgacgatacaggaaaccataagaaccagggaagaaattgccgcgatggcaatttattccagcaacgggtttattatcggacactatacgcccgatcgcgtaggcaagatgataaaagaggtggatgttatctacggcgacagtttggacaaagtcgccaaggctattgaaaacggagaagaacttgttctctcaagttactcgccgctcttgaagtcggaggtggaaattaccatacagtctttccaaatgggcaattcgggccagtcatggagcataatggtcgcgtcaacgagatcgtacatcctaagggaagtagaggcgatgaccgaatttaccttgatccttgcggcgatagccattgttatagcggcggtgattgtgtactttgtccttcacagtactaccaaaccaatcgtcacggtagcgaacacccttaaagacatttccgaaggcgaaggcgatctgacaaggagcatccccgtccgctccaaagacgaagtaggcgaccttgctttgtacttcaataaaacgcttggaaaaatcagagaccttgttctgatttataaaggcagtcgggagcgttga

SEQ ID NO: 58230 - protein, 276 aa, Unknown
  Obtained from environmental sample
  DOMAIN (194)...(265): HAMP domain
  misc_feature (1)..(276): Xaa is any amino acid
MPPRFRMENGQANITTTTDVEAAMAYLTGPDAKKDRYVHPVPRNIDGKDTWYFRIMVPILNRRNGEVVGGVGLLCVIDAVQPTIQETIRTREEIAAMAIYSSNGFIIGHYTPDRVGKMIKEVDVIYGDSLDKVAKAIENGEELVLSSYSPLLKSEVEITIQSFQMGNSGQSWSIMVASTRSYILREVEAMTEFTLILAAIAIVIAAVIVYFVLHSTTKPIVTVANTLKDISEGEGDLTRSIPVRSKDEVGDLALYFNKTLGKIRDLVLIYKGSRER

SEQ ID NO: 58231 - DNA, 807 bp, Unknown
  Obtained from environmental sample
  misc_feature (1)..(807): n is a, c, g, or t
ttggcaaccacggtaaacggtgaactggctctggtattgaaaatggcggatactccggttatcagccggtactttatgaatccatctgatccggctctaaaattgcaggcgcttactgaatttggcatttatgaggaacatttcaataataaattggttttctggatcaatgacatggataaaacattttattcgaccggaaatgttccgtacgttgtcaatccggatgatcctgataattattggtacaatttaacgctatacgagacggaaaaatttaattttaacattaactataatccggatttggatcaaatcaacctttgggtgaatgttccggtatttattgaagcggatgccgtcaaaaagcctatagggatgcttggtacaggcataaatcttactgacttttcaaattttgtagcttccagctatcgggaatttgatacacatatcacgccatatatattcaataaatacagtgaaattacttcggcgatggattatgaactggttcaaaataaagttcgcattgacgaactgcttggcgaaaccggaaaagaattgatcagaaccgcgcatgagctttctgaaggagaaagccggagtttcatctacgataaaaaaatatatctggtaaactccatccaggctatgggatggtatctgacggtgagttatccgctgccgggttttttggcgcttaatcctgccatgaataccgtatttttcagtatgctgtttcttatcctgttccttttcatcattattaatgttttcattgccccgttcgggaaaacgcgatag

SEQ ID NO: 58232 - protein, 268 aa, Unknown
  Obtained from environmental sample
  misc_feature (1)..(268): Xaa is any amino acid
MATTVNGELALVLKMADTPVISRYFMNPSDPALKLQALTEFGIYEEHFNNKLVFWINDMDKTFYSTGNVPYVVNPDDPDNYWYNLTLYETEKFNFNINYNPDLDQINLWVNVPVFIEADAVKKPIGMLGTGINLTDFSNFVASSYREFDTHITPYIFNKYSEITSAMDYELVQNKVRIDELLGETGKELIRTAHELSEGESRSFIYDKKIYLVNSIQAMGWYLTVSYPLPGFLALNPAMNTVFFSMLFLILFLFIIINVFIAPFGKTR

SEQ ID NO: 58233 - DNA, 351 bp, Unknown
  Obtained from environmental sample
  misc_feature (1)..(351): n is a, c, g, or t
gtgggcgcgtggattgaaactcatctctccgagcaaatgataatgcaggcggaggtcgcgcctttcgtgggcgcgtggattgaaacaacttatcttggccggttgacacagtcacttaggcgtgtcgcgcctttcgtgggcgcgtggattgaaacttgcatagctccagcgtctcctcatcatcatttccgggtcgcgcctttcgtgggcgcgtggattgaaaccgatccgcgcttgcgtcgcggcgtgttgtaccagtcgcgcctttcgtgggcgcgtggattgaaacgccgaagtgcgagcgcaaaaattccgtatatcggtcgcgcctttcgtgggcgcgtggattga

SEQ ID NO: 58234 - protein, 116 aa, Unknown
  Obtained from environmental sample
  misc_feature (1)..(116): Xaa is any amino acid
MGAWIETHLSEQMIMQAEVAPFVGAWIETTYLGRLTQSLRRVAPFVGAWIETCIAPASPHHHFRVAPFVGAWIETDPRLRRGVLYQSRLSWARGLKRRSASAKIPYIGRAFRGRVD

SEQ ID NO: 58235 - DNA, 336 bp, Unknown
  Obtained from environmental sample
  misc_feature (1)..(336): n is a, c, g, or t
ttgcgctttccctcttgcaatggcttcagcgtttcaatccacgcgcccacgaaaggcgcgaccgcgttgcacttggactatctggtaatccaactgcgtttcaatccacgcgcccacgaaaggcgcgaccgatatacggaatttttgcgctcgcacttcggcgtttcaatccacgcgcccacgaaaggcgcgactggtacaacacgccgcgacgcaagcgcggatcggtttcaatccacgcgcccacgaaaggcgcgacccggaaatgatgatgaggagacgctggagctatgcaagtttcaatccacgcgcccacgaaaggcgcgacacgcctaa

SEQ ID NO: 58236 - protein, 111 aa, Unknown
  Obtained from environmental sample
  misc_feature (1)..(111): Xaa is any amino acid
MRFPSCNGFSVSIHAPTKGATALHLDYLVIQLRFNPRAHERRDRYTEFLRSHFGVSIHAPTKGATGTTRRDASADRFQSTRPRKARPGNDDEETLELCKFQSTRPRKARHA

SEQ ID NO: 58237 - DNA, 459 bp, Unknown
  Obtained from environmental sample
  misc_feature (1)..(459): n is a, c, g, or t
ttgactgtgtttcaatccacgcgcccacgaaaggcgcgaccggcaaaaaaagcggcgatttgcgtctcaactttgagtttcaatccacgcgcccacgaaaggcgcgacaatatagccttgagtacaagcagtacaatcccaatagtttcaatccacgcgcccacgaaaggcgcgaccaagtgcaacgcgcaaagcatgcgtatcaagaggtttcaatccacgcgcccacgaaaggcgcgacagaaattccttacgggaatgaagcgcgatattgagtttcaatccacgcgcccacgaaaggcgcgaccaccgccacggagcctatccgcgaaaatacctaagtttcaatccacgcgcccacgaaaggcgcgaccacggaggcgggcggcaaacgtcgcccgttttcagtttcaatccacgcgcccacgaaaggcgcgaccacgcggcggcgtgaattga

SEQ ID NO: 58238 - protein, 152 aa, Unknown
  Obtained from environmental sample
  misc_feature (1)..(152): Xaa is any amino acid
MTVFQSTRPRKARPAKKAAICVSTLSFNPRAHERRDNIALSTSSTIPIVSIHAPTKGATKCNAQSMRIKRFQSTRPRKARQKFLTGMKRDIEFQSTRPRKARPPPRSLSAKIPKFQSTRPRKARPRRRAANVARFQFQSTRPRKARPRGGVN

SEQ ID NO: 58239 - DNA, 618 bp, Unknown
  Obtained from environmental sample
  misc_feature (1)..(618): n is a, c, g, or t
ttgttgaattgtaggatttgtttcaatccacgcgcccacgaaaggcgcgacctacaaactggtagactcggtccttcttgttctggtttcaatccacgcgcccacgaaaggcgcgactggtcgataccgtctaacagactttcaggagggttgtttcaatccacgcgcccacgaaaggcgcgactgaaccagcttgagtttgaccaggggcaccgacagtttcaatccacgcgcccacgaaaggcgcgaccgagcgcaacgcccgggcgggaacccggtatacagtttcaatccacgcgcccacgaaaggcgcgactagacgttcataatctaatacctcctcttgactgtgtttcaatccacgcgcccacgaaaggcgcgaccggcaaaaaaagcggcgatttgcgtctcaactttgagtttcaatccacgcgcccacgaaaggcgcgacaatatagccttgagtacaagcagtacaatcccaatagtttcaatccacgcgcccacgaaaggcgcgaccaagtgcaacgcgcaaagcatgcgtatcaagaggtttcaatccacgcgcccacgaaaggcgcgacagaaattccttacgggaatgaagcgcgatattga

SEQ ID NO: 58240 - protein, 205 aa, Unknown
  Obtained from environmental sample
  misc_feature (1)..(205): Xaa is any amino acid
MLNCRICFNPRAHERRDLQTGRLGPSCSGFNPRAHERRDWSIPSNRLSGGLFQSTRPRKARLNQLEFDQGHRQFQSTRPRKARPSATPGREPGIQFQSTRPRKARLDVHNLIPPLDCVSIHAPTKGATGKKSGDLRLNFEFQSTRPRKARQYSLEYKQYNPNSFNPRAHERRDQVQRAKHAYQEVSIHAPTKGATEIPYGNEARY

SEQ ID NO: 58241 - DNA, 2091 bp, Unknown
  Obtained from environmental sample
  misc_feature (1)..(2091): n is a, c, g, or t
atgtcagagtccaccgaaacatttatcgtagataacggcgaaatcgagggatattccgtcctgttctgcgaatggctttcacagttgttcgggattccctttaagccggctatttatgaatggggtgatttggtagagggaattaacgcgcaaaaaattgattttaccggcgaaatgaccccaactgatgaacgccgcaaaacatattttatgaccgatgccatcgtagaacgctcaataaaaatattccggcttgcggacggtaagcccattatggagattatccactcccgtccgctgcactgttgttttttggacggtactaccaccgtaagcgatgttacttcgcgtttaccgggtgaatatacaattattgaggtgaatgattatacgagcgcttacaatgagctaaaaagcggaagagctgacgtcttttttgatgaaaattcagcggaagccgctttcaatatatacgatgatgtattaatcgaaaattttttccccgtgatttatagtccgatttccctgaccacgaaaaatttggcgcttctgccgatcatttcaattgtgcaaaaatccctgtacaacggctctcagtattatctaaccggcctgtataaacagggagaaaatcaacaccggcggcataagttgtttatgcgcctgtccgaagaagaaaaagcgtatatacgcaatcacccggtaatatcacttgccgccgaatacgataattacccgataagcttttacaacaaatatgaaaagcaatggcaggggatcgtctatgacgtattgagcgaactggaggcgcttaccggtttaatatttaaggttactaacgatcggtatacggaatggcctgaattgctgcgcttgctggaaaacgggaaagtgtccatgataaccgagttattacgttcgccggagaggataggattatttctgtggccggataccgtcattatgacggataattacgcgcttatttcccgagcggactaccccgacatccatattaacgatattttacaccttanagtgggtttgattaaggaaaccgcatacacatcattgtttcagagatggtttccggataataaaaatacggagttttatgaaaacaccgactccgcctttaacgctttggagcgcggcgaagtggatatggtaatggcgaatttatgccagcttctcatgctgaccaattactacgagcgcacgggttacaaggcaaatttcgtgtttgattttacttccgaatcaacctttgggtttaaccgcgacgcggcggttctgtgttccattgttgacaaggcgctccatcttattgataccaggggaatctcgggacagtggatgcgcaaaacctatgattacagcgtaaaactggcacgctctcagcgcacatggttaatcagcgtgacggttcttttcttttgcatactgcttcttctgtccatcctgtttcttagaaaccgccgtttgggaaagtggcttgaaacgctggtacagaagcggacaaacgagctggttatccagagcgcgactattaccgccgcgtttgaagcgactctcgatctgatattttgcaaagatttgaattcgcattttatacgatgtaacaaaacttttgaaaattactttaatgtccgtgaagcggacattatcgggaaaggggatgccgaggccctgggaatatccgccgaatcggcggagctatacaaagaacgggatcgtgatgttgtaagagagggccggacgctggtatttgaagaatatataccttccgccgacggaacaacacagctttttgaaacatccaaagttccgatgatgcaggatgggcggataatcgggctgatgtctatatcgcataacataaccgagcgtaaggcgatggaagaacaggccatgagcgccagccgcgccaaatcggcgttccttgccaatatgagccatgagatacgcacgccaatgaacgccattaccggcatgaccgcgatagggaagtccgccaccgacgccgaacgcaaggattactggctttacgaaaatagaggacgccggaaaccatctgcttggcgtaattaa

SEQ ID NO: 58242 - protein, 696 aa, Unknown
  Obtained from environmental sample
  DOMAIN (236)...(455): Bacterial extracellular solute-binding proteins, family 3
  misc_feature (1)..(696): Xaa is any amino acid
MSESTETFIVDNGEIEGYSVLFCEWLSQLFGIPFKPAIYEWGDLVEGINAQKIDFTGEMTPTDERRKTYFMTDAIVERSIKIFRLADGKPIMEIIHSRPLHCCFLDGTTTVSDVTSRLPGEYTIIEVNDYTSAYNELKSGRADVFFDENSAEAAFNIYDDVLIENFFPVIYSPISLTTKNLALLPIISIVQKSLYNGSQYYLTGLYKQGENQHRRHKLFMRLSEEEKAYIRNHPVISLAAEYDNYPISFYNKYEKQWQGIVYDVLSELEALTGLIFKVTNDRYTEWPELLRLLENGKVSMITELLRSPERIGLFLWPDTVIMTDNYALISRADYPDIHINDILHLXVGLIKETAYTSLFQRWFPDNKNTEFYENTDSAFNALERGEVDMVMANLCQLLMLTNYYERTGYKANFVFDFTSESTFGFNRDAAVLCSIVDKALHLIDTRGISGQWMRKTYDYSVKLARSQRTWLISVTVLFFCILLLLSILFLRNRRLGKWLETLVQKRTNELVIQSATITAAFEATLDLIFCKDLNSHFIRCNKTFENYFNVREADIIGKGDAEALGISAESAELYKERDRDVVREGRTLVFEEYIPSADGTTQLFETSKVPMMQDGRIIGLMSISHNITERKAMEEQAMSASRAKSAFLANMSHEIRTPMNAITGMTAIGKSATDAERKDYWLYENRGRRKPSAWRN

SEQ ID NO: 58243 - DNA, 1266 bp, Unknown
  Obtained from environmental sample
  misc_feature (1)..(1266): n is a, c, g, or t
atgatggccgagctgaaaagacatatagcgaaagaaaaggaaaaagtaacggaactcgactctgtaacatcggtaacgcctcttttgcccattgcaaaaaagataaaggaagaaagacattttttatacagacttggaatagcgctcgcgatagtcgttgggcaggctctgttattatggataatttggtttttctttaaaaagttaaatacaaaaatcgttactaccggaagagagaaaataaaaccgttttatattaataaattcagagtgctttcggaaaagcatgttattagtctaatcgaagttgtattaaaattgataaaatatattgtcaccgcaattcagctttttcttacgataccgattatttttagtttgttcaccgctacaaaggatatagcgtcgttattattcggttatattttaaatccgataaaacgtatcgctataggcatgatagagtacatcccgaatctttttacgattatcatcataattaccattacccgttatgtgctaaaagcgcttaaatattttgcgtctcaaataacaaaaggcaaactgcagcttcccggtttttacgcggactgggcgtctcctacattaagaattttacaggtgcttttgtgggcgtttaccgttgcggttatatatccctatttgccgggatcggaatcaagggcttttcagggagtttcggtttttatcggtattattttttccgtcggctcgacaagcgcgattggaaatcttgtcgccggtcttgtaattacatatatgcgtccttttaaattaggcgaccgcgttcaaattaaagaggtaacaggttttgtcgtggaaaaaaatctgatggtggtgcggcaaaagacgcataaaaacgaatatgtaacatttcccaatatgattattttgggatcgaatatcatcaatcacaacacgtcgtccgatgaaaacgaggaaggattgataatttacacggaaattactttcggctatgcgactccttggcagacggtacatgacatattgataaacgccgcccttaataccgagtatatccaaaaaagacccaagccttttgtgcttcaaaccaaattggatgatttttacgcaagttatcaaattaactgttatacgaaagaagtaagcaagattccgggtatttacgcggagctttacgcaaatatccagaccggttttcaggaagccggacttgatttgactacggcgcattacagggttataactacaaaaaagaattaa

SEQ ID NO: 58244 - protein, 421 aa, Unknown
  Obtained from environmental sample
  DOMAIN (204)...(409): Mechanosensitive ion channel
  misc_feature (1)..(421): Xaa is any amino acid
MMAELKRHIAKEKEKVTELDSVTSVTPLLPIAKKIKEERHFLYRLGIALAIVVGQALLLWIIWFFFKKLNTKIVTTGREKIKPFYINKFRVLSEKHVISLIEVVLKLIKYIVTAIQLFLTIPIIFSLFTATKDIASLLFGYILNPIKRIAIGMIEYIPNLFTIIIIITITRYVLKALKYFASQITKGKLQLPGFYADWASPTLRILQVLLWAFTVAVIYPYLPGSESRAFQGVSVFIGIIFSVGSTSAIGNLVAGLVITYMRPFKLGDRVQIKEVTGFVVEKNLMVVRQKTHKNEYVTFPNMIILGSNIINHNTSSDENEEGLIIYTEITFGYATPWQTVHDILINAALNTEYIQKRPKPFVLQTKLDDFYASYQINCYTKEVSKIPGIYAELYANIQTGFQEAGLDLTTAHYRVITTKKN

SEQ ID NO: 58245 - DNA, 774 bp, Unknown
  Obtained from environmental sample
  misc_feature (1)..(774): n is a, c, g, or t
atgaatattctcctgacaaatgatgacgggataaattccgacggaattttaaaactcgctgaagccctgcgctcaaatggaaagcataaggtttcagtggtagcgccggacgcgaaccgctcgggagtttcccacgctttatcagtatttcacaacgccgtaaaacttacctgtctaggaaaagacacctggagctgtaccggctaccccgctgactgcataattgccgggattaacggcttgctctcagaacgtcccgatttaattctttcgggtataaacaacggtgaaaatttgggaaccgatattatttattccggaaccgcggcggcggcccggcanggcggccttgctggtattccatcaatagccctgtccctggcgggaaacccaccgtatcattgggacatggcaatttcctggatagccggccatttggaagaactgctgtcttactggcgtgaaaacacatacgtcaacgtaaatattcccaacaatcccgacggtccaattggtgtcatttcatcatggccggccgccaagacttacaaagatactcttacgatggcgcccgcaagcaataatatccattattgctttttggaatgcggagaggatacaacattcgctgaaacgggctccgactgcgatgtggtatccagaaattttgtttcggtaagttcgatttataattacccggcagtcgtcagggatctttgccccggcgcgccggattacgcggcggtgggcctgcgaagcggcaaagggaaatag

SEQ ID NO: 58246 - protein, 257 aa, Unknown
  Obtained from environmental sample
  DOMAIN (1)...(187): Survival protein SurE
  misc_feature (1)..(257): Xaa is any amino acid
MNILLTNDDGINSDGILKLAEALRSNGKHKVSVVAPDANRSGVSHALSVFHNAVKLTCLGKDTWSCTGYPADCIIAGINGLLSERPDLILSGINNGENLGTDIIYSGTAAAARXGGLAGIPSIALSLAGNPPYHWDMAISWIAGHLEELLSYWRENTYVNVNIPNNPDGPIGVISSWPAAKTYKDTLTMAPASNNIHYCFLECGEDTTFAETGSDCDVVSRNFVSVSSIYNYPAVVRDLCPGAPDYAAVGLRSGKGK

SEQ ID NO: 58247 - DNA, 729 bp, Unknown
  Obtained from environmental sample
  misc_feature (1)..(729): n is a, c, g, or t
atggcggaagtttcgggaaccaaaggttcgggggggaagaaacaatccagaaaaaacggctcgcttaacgagggaatcaggctttaccgccttaaacgctgggatctcgctctggcggagctgctctccgtaaataccgatcgacttggtccggaagaaaacggggaactggcttattatttgggcctttgctataccaagctggaacaatacgacgatgcccttctctttcttgagcaggtagtaacatccggaaaagatgtcatgagatcctatcagtgcagaatggcgcttgcctatatttatgtgattacaaaacgcacaaaactggccgagtttgaactcaggcggctggcgcataacggctttgaatcggcccagctttacactaccctggcttacgcttcatgggctcagaagcattataaacaggcggttgattattacgaaagggcgcttgatctggacgggagcaacgcgaccgcccttaacggccttggttttatccttgttgacacagatatggatctgctcagggggttaaggtgctgtaaaaaagcggtggatcttaaaccccagaaccccgcctaccttgactcattgggctgggcatattttaaaaacggtgaactccttgaggcaagaacatggctgcgcagggctatggatgccgcccccgaaaggatagaaattaaagcgcatttccaaactgttacgggggggaaatga

SEQ ID NO: 58248 - protein, 242 aa, Unknown
  Obtained from environmental sample
  DOMAIN (126)...(159): Tetratricopeptide repeat
  misc_feature (1)..(242): Xaa is any amino acid
MAEVSGTKGSGGKKQSRKNGSLNEGIRLYRLKRWDLALAELLSVNTDRLGPEENGELAYYLGLCYTKLEQYDDALLFLEQVVTSGKDVMRSYQCRMALAYIYVITKRTKLAEFELRRLAHNGFESAQLYTTLAYASWAQKHYKQAVDYYERALDLDGSNATALNGLGFILVDTDMDLLRGLRCCKKAVDLKPQNPAYLDSLGWAYFKNGELLEARTWLRRAMDAAPERIEIKAHFQTVTGGK

SEQ ID NO: 58249 - DNA, 2124 bp, Unknown
  Obtained from environmental sample
  misc_feature (1)..(2124): n is a, c, g, or t
atgaaaaaaattcccgaaaggggtttattctttatcattcttttcgttctggctctttctcaattacctagaaacgcattgattcacgcccaaagctttgacggctccgatatggataccgtccgcgccagggaggaattccgcataggcgtacaagcctattaccgtttttcatataacgaggctattcgttcttttgaaagggctctctcgttccggcctggagaacctttgatccttgactggcttggaaaagcctattatcgatccggtattgaaaacaccgctttcagagtctggcaggcagcagttgacgcctacggcttttcgtccggtcagggaatgttaatctccagccggatggaaacgctgcggaaccgccggatcctgcttccggtagccgatgacgaagtacgctatgtcgagtcaggcagataccccggcaaaattaacgacacaacttattaccgtcagccgtcttcgatacttgccctgaatgacggctccgcctgggtagtggcctacggaagcaacgaaattctccgtattgatccaaacggcatcatacgcgaacgaaagcggggttccgttaacggttttgacagaccttacgatctggttaagggtcctgaaggaaacctttacctttccgaattcaggggcaacaggatctccgttctttccccgtcaggagactggcagtattacataggctccaaaggccagggacagggtcagtttgtaggccctcagaatcttacagttgatgaagagggttacctctatgtagttgattacggaaacagccggatttgcaaatttgatccttccggggtttttattctgtcttttggaacaaagagagagggttttcagggttttatttctcccacaggcattgcggcccgcaacggcagggtatatgtagccgacagccttttaaagcaaatttttgtttttgatcgtaacggatcttaccttggccccctgcttcaggaaagcctttattctcctgagagccttcgttttctttctgacgggaaactgctagtcgcggattctaaccgtgttatcctgatcgatccggacacagcgataatccgcgaacttggcgttttccgcaatgcttccagcgtgaggatcaccggcgcggaaatggacataaacggcaatgtgttactggcggatttcaaaacaggggaagtagccgtcatgacccgcattgacgatatggcatcgggcctctttgttgaaattaccaagattttaagcgacgattttcccaatgtaacggtggaattggaagttaccgatcggctccgccgccctgtgaccggcctggatcagaggaatttcctgctcagcgaagggggttatgccgtaagcgaacaaagccttatctcttctttttataattcgaccaatttggatctgtcggtccttattgaaagatcccccaccaccctccccttcagggatgactttaccacggccatcaaggacatcagcgctgctggaaaaattgtctcgataatttcggctggtgaacagcctgttaaagaaaacccggcaacagcttccggcgctacgccggaagcaaggctcgcgtctgtggcgaggggaaacgcggcgttttactccgcccgctggcgttttgatcttggccttcgcctggcagccagcgatctattgcccggcgaaaaaaagcgggctgtagtttttgttggggcggggatctctccgggcgctcaaggcagcattggcagtagcctgggcaatagccctggcgcttttgaacagtacagcatttctgagcttgcctcttacctttccaacaacaatgtagctttctacgctgtcattgtcggcggcggaacagcaggcgccgacgtgcgttacctttgcgaagcaacaggcggcaaagttctttcactgttccgcaatgagggcatcacgccggaaattcgcagccaaggggaaaggccgtccggttactacgtactcagttacagatcccggctgccgacggatttcgggcgggcatacctgcctcttgaagcggaagtataccttatggaaagatcgggcagggacagcacgggttacttcccgcccctggaataa

SEQ ID NO: 58250 - protein, 707 aa, Unknown
  Obtained from environmental sample
  SIGNAL (1)...(26)
  DOMAIN (294)...(320): NHL repeat
  misc_feature (1)..(707): Xaa is any amino acid
MKKIPERGLFFIILFVLALSQLPRNALIHAQSFDGSDMDTVRAREEFRIGVQAYYRFSYNEAIRSFERALSFRPGEPLILDWLGKAYYRSGIENTAFRVWQAAVDAYGFSSGQGMLISSRMETLRNRRILLPVADDEVRYVESGRYPGKINDTTYYRQPSSILALNDGSAWVVAYGSNEILRIDPNGIIRERKRGSVNGFDRPYDLVKGPEGNLYLSEFRGNRISVLSPSGDWQYYIGSKGQGQGQFVGPQNLTVDEEGYLYVVDYGNSRICKFDPSGVFILSFGTKREGFQGFISPTGIAARNGRVYVADSLLKQIFVFDRNGSYLGPLLQESLYSPESLRFLSDGKLLVADSNRVILIDPDTAIIRELGVFRNASSVRITGAEMDINGNVLLADFKTGEVAVMTRIDDMASGLFVEITKILSDDFPNVTVELEVTDRLRRPVTGLDQRNFLLSEGGYAVSEQSLISSFYNSTNLDLSVLIERSPTTLPFRDDFTTAIKDISAAGKIVSIISAGEQPVKENPATASGATPEARLASVARGNAAFYSARWRFDLGLRLAASDLLPGEKKRAVVFVGAGISPGAQGSIGSSLGNSPGAFEQYSISELASYLSNNNVAFYAVIVGGGTAGADVRYLCEATGGKVLSLFRNEGITPEIRSQGERPSGYYVLSYRSRLPTDFGRAYLPLEAEVYLMERSGRDSTGYFPPLE

SEQ ID NO: 58251 - DNA, 744 bp, Unknown
  Obtained from environmental sample
  misc_feature (1)..(744): n is a, c, g, or t
gtgaaaatgagtttgacgcggttgcaattcgaaattctgtcggctattgaacgtggggacggcgaaaaaaatattgccggacagataggcttgccggttgacgccgttcgcaaaaccatgaacgatctgacggacggcggttttatcgaaaacggtgttttgggcgcggccgggctacgcgcccttgagccgtaccgcgtcaaacgcgcgatcttcctcgccgccggtttcggctcgcgtatggccccgctcacgctgaccgtgcccaagccgctgacccgtgtcaaaggtacgcgcattattgatacgctgcttgacgccgtatgcgccgccgagattgaggagatagtcgtcgtccgcggttatttgggcgggcaattcgattcgcttaaagacaaatacccgcaaatcaaatttttggaaaatccggactataaggaaaccaacaacatctcttcgacgctgtacgcgcgcgatttgctgcaaaacgcctacgtgatggagtctgacctcctgctatatagccccaagctcgtaatgaaataccagtataccagtaattacgtaacggttccggttgaacataccgacgattggtgttttgatacaagcggcggtattattaccgggatgcggcttggcggagataactgccaccataagttcggcatatcctattggaatcaaaccgacggcgccaggcttgccggtcacctcaaacaagcctacgagatgccgggttga

SEQ ID NO: 58252 - protein, 247 aa, Unknown
  Obtained from environmental sample
  misc_feature (1)..(247): Xaa is any amino acid
MKMSLTRLQFEILSAIERGDGEKNIAGQIGLPVDAVRKTMNDLTDGGFIENGVLGAAGLRALEPYRVKRAIFLAAGFGSRMAPLTLTVPKPLTRVKGTRIIDTLLDAVCAAEIEEIVVVRGYLGGQFDSLKDKYPQIKFLENPDYKETNNISSTLYARDLLQNAYVMESDLLLYSPKLVMKYQYTSNYVTVPVEHTDDWCFDTSGGIITGMRLGGDNCHHKFGISYWNQTDGARLAGHLKQAYEMPG

SEQ ID NO: 58253 - DNA, 558 bp, Unknown
  Obtained from environmental sample
  misc_feature (1)..(558): n is a, c, g, or t
ttggagcgaaacgggatatccgctgttataatagaggacaaggtcggcctcaagaaaaactctctctttgggacggaggtaacgcaagagcttgcgtcaatagccggtttctgcgagaaaataagcgccggcaagcgtgcgcaggttacaaaggagttcatgatagtagcgcgtctcgagagcctcatcgccggccggtctgtctccgacgcgctcgaacgggcgcgcgcgtatgtggcggccggcgcggacggcgttatgattcacagcaaggagaaaaccggcgacgatgttaaggaattttgccgagaatttcggggcgagtacaaaaatatcccgctggtgctggctccaaccacctacaaccgttttaccgaaagggaatttatggactggggcgccacgattatcatatacgccaaccatttgctccgcgcctcgtatccggcaatgatgaaagtcgcgagcgttattttagaaaaagagcgctcccttgaagctgacgatatctgtatgccgataagtgaaattttggagcttattccggggggaaagtga

SEQ ID NO: 58254 - protein, 185 aa, Unknown
  Obtained from environmental sample
  misc_feature (1)..(185): Xaa is any amino acid
MERNGISAVIIEDKVGLKKNSLFGTEVTQELASIAGFCEKISAGKRAQVTKEFMIVARLESLIAGRSVSDALERARAYVAAGADGVMIHSKEKTGDDVKEFCREFRGEYKNIPLVLAPTTYNRFTEREFMDWGATIIIYANHLLRASYPAMMKVASVILEKERSLEADDICMPISEILELIPGGK

SEQ ID NO: 58255 - DNA, 327 bp, Unknown
  Obtained from environmental sample
  misc_feature (1)..(327): n is a, c, g, or t
atgaaatacttaatttgtgcggcgcttgccgcggccttcatttccgcctgcgccggccttagaaccggaaacggggatttttatgaaggcgccgcaatgggataccgggggatgatccatgtgcgggtggtaatggataacggggctattacggagattaccgtaattgaatccaatgaagatccggctataggcggggccgctatcgaggaattgacagaccttgttctgatgtacaacaccacggagatagacgcggtttccggggcaactgaaacaagcaggggttttctgaaaggggtcgaaaatgctatatttagcccatga

SEQ ID NO: 58256 - protein, 108 aa, Unknown
  Obtained from environmental sample
  SIGNAL (1)...(18)
  DOMAIN (34)...(108): FMN-binding domain
  misc_feature (1)..(108): Xaa is any amino acid
MKYLICAALAAAFISACAGLRTGNGDFYEGAAMGYRGMIHVRVVMDNGAITEITVIESNEDPAIGGAAIEELTDLVLMYNTTEIDAVSGATETSRGFLKGVENAIFSP

SEQ ID NO: 58257 - DNA, 345 bp, Unknown
  Obtained from environmental sample
  misc_feature (1)..(345): n is a, c, g, or t
atgagcgactgtattttttgcaagatcataaagggagaaatccccggcaaaaagatctatgaagacgatgaaatgcttgccttccatgacatcacgccaatggcccctgtgcattttctgcttatccccaaaaagcacattaaaagcctcctggacttggaagcggaagacattgcccttgcgggccggcttctgggcaaggcccgggaactggcaaaggagcagggctgcgcggaaaacggcgcgcgctttgtgatcaacgcgggacgcgacggcggccagacagtggatcatctccacatccacgtcctcggcggacgcgccctcggctggcctccggggtga

SEQ ID NO: 58258 - protein, 114 aa, Unknown
  Obtained from environmental sample
  DOMAIN (4)...(109): HIT domain
  misc_feature (1)..(114): Xaa is any amino acid
MSDCIFCKIIKGEIPGKKIYEDDEMLAFHDITPMAPVHFLLIPKKHIKSLLDLEAEDIALAGRLLGKARELAKEQGCAENGARFVINAGRDGGQTVDHLHIHVLGGRALGWPPG

SEQ ID NO: 58259 - DNA, 447 bp, Unknown
  Obtained from environmental sample
  misc_feature (1)..(447): n is a, c, g, or t
atgattctcagacttgaacaaaatgcggcgcaaaatgacattgagatagtaattacatacccggtaaagaataaaattgtagatcgtattgtctcattaataaaatcggttgacgcgcagatagagtgctattcggatgacattgttaagctggtaaatgtttctgatatttattacattgaaagcgttgacgggaaaaccgttgtctgctgtgaaaaagagaattatatctttaaaagccgcctgtaccagatatatgaaaaattaagggacagcggttttatacagatcagcaaatactgcgttttgaatattaacaagctggacaaattcaggccattggacaataatcgtctggaagcggtattatccaacggggtttacctgtgcattaccagaaaatatatttccggtataaaacagatattacgggagatgaataaatga

SEQ ID NO: 58260 - protein, 148 aa, Unknown
  Obtained from environmental sample
  DOMAIN (47)...(144): LytTr DNA-binding domain
  misc_feature (1)..(148): Xaa is any amino acid
MILRLEQNAAQNDIEIVITYPVKNKIVDRIVSLIKSVDAQIECYSDDIVKLVNVSDIYYIESVDGKTVVCCEKENYIFKSRLYQIYEKLRDSGFIQISKYCVLNINKLDKFRPLDNNRLEAVLSNGVYLCITRKYISGIKQILREMNK

SEQ ID NO: 58261 - DNA, 369 bp, Unknown
  Obtained from environmental sample
  misc_feature (1)..(369): n is a, c, g, or t
atgaaaacaataaaaaaaattattaatgatataatgtttgtcaccggcgcggctttggttattctggcggcattttcgctgtttttcaatgttgaaattccttttgttccctatatttttgaaattttcgccgcgaatattgttattattcttggcctttatctgcgcgggagatttgaaatccgcaattttatcctggaatatctggttgatatcagctatataatcgctgttcttgttgtattcggcctcatatttgactggtattccgcgataccggtgtggcttcttgttgtaatggcggttgtaatctacgtgtttgccatgatattcaccgttacaaagatcaggaaagacgcggaagaataa

SEQ ID NO: 58262 - protein, 122 aa, Unknown
  Obtained from environmental sample
  SIGNAL (1)...(26)
  misc_feature (1)..(122): Xaa is any amino acid
MKTIKKIINDIMFVTGAALVILAAFSLFFNVEIPFVPYIFEIFAANIVIILGLYLRGRFEIRNFILEYLVDISYIIAVLVVFGLIFDWYSAIPVWLLVVMAVVIYVFAMIFTVTKIRKDAEE

SEQ ID NO: 58263 - DNA, 444 bp, Unknown
  Obtained from environmental sample
  misc_feature (1)..(444): n is a, c, g, or t
atggaggcgtatatgtgcagaaaattgcttttcttgtgtgtttctttttttgttgccggaagtctcttcgcggacaatatccgtacaaccatagagattaacggagtgatcgttaacggcggtttaatatatgtcgctgtttactcaaatgaaaatgattataaaacagagacggcttttgccaagttcgtcttacagccggaaaagacaattttaacgtattctctggacttgcccgaaggagaatatgtggtttccgtatttcaggattcagataatgacggggaactaaaaacaggtctttttggaatgccctcagaaccggttggtaaaacaaactacaaccttaagggggcgccgggcggctttaacaaattgaaagcgccggtaaacggcaattcggcaaaactgattgtaaatatgggaaaagtaagactgatataa

SEQ ID NO: 58264 - protein, 147 aa, Unknown
  Obtained from environmental sample
  SIGNAL (1)...(24)
  misc_feature (1)..(147): Xaa is any amino acid
MEAYMCRKLLFLCVSFFVAGSLFADNIRTTIEINGVIVNGGLIYVAVYSNENDYKTETAFAKFVLQPEKTILTYSLDLPEGEYVVSVFQDSDNDGELKTGLFGMPSEPVGKTNYNLKGAPGGFNKLKAPVNGNSAKLIVNMGKVRLI

SEQ ID NO: 58265 - DNA, 1938 bp, Unknown
  Obtained from environmental sample
  misc_feature (1)..(1938): n is a, c, g, or t
ttgaacgggatgttgacggcaaaagttgacttttcggatgtaaaattgtcgtttatccgtaattttccgaatgcctatgtggctttgactgatttagtagtaacaggtacggatgaatttgaaggggaaacgctggttgcgttcaaaagtttcagtgtaacagtcgatatcatgagcgttatcaaaatggacaatatacggttaaaatcaatactgctcgatcaggccataataaacgcccatatagcggaaaacggagacgcaaactggaatatcatgaaacccggcgaggaaaaaaagcctgccgaggaagctcccgatgataaaagcgcctctgaaaaaacctcttcgctcaagatagcccttaataaattcgagatacgcgatgcaaagctttcctttcaggacgacaagaataaaatgacggcggctgccgatgaccttgatttcattctgcagggcgatatggcgctggacaatgttgatttaaaaatgaaactggatattaccgatattaattttttgatgggcggcatccacatgctgaccaacgcgcatgtcggctttgtttcggaagttgacgccgacattaaaaacatggtattcacattaaaagataataaattcaacctgaatgaaattatccttaaatttgccggttcggcgcggatacccggcgacatcatcgttgacatgacatttgccacagaaacaatagattttaaaaatgtactgcggcttgttccgtctgtatttatgaaaggctttgaatcaataaaaacaacgggcagtttcgccctgtcaggcgacataaaaggcacatacaacaataaacagatgcccaacgcanatgtaaacctgtctattgacaatgccatgttcaaatatcccgatctgcccaaatcggtagacaatatcaacatcaaggttaacgcgttttacgacggagccgtgttcgacaatacaacgcttgatgtggacaagcttcatttcaatatggcagccaatccgttcgatgctgaagtgcacgtaaagacgccggaaagcgacatgcaagtggcggcaaagcttgcgggcaagatcgacttcaattccctggttgatatagttccgttggatgacattaccttgaagggtttactggattgtgatcttgcgctggcaggccgcatgtcaaccttccaaaacgaacggtacgaagatgttgatgcaagaggtatgcttaaacttaacggctttaattttgaaagccccgatttcccacaagcggtagaaatcgcaagcacacagcttaattttacgccaagaaaggtagaccttgtaaactttgatgccgttattggaaatacagatattgccatgaacggcacactcgaaaagttcattccctttatttttaaaggcgacacagtgcacggcaatctcagtctgagatcgaacaacattaaccttaacgagtttatgaccggagaaaaacccgaagaaaccaaagaatccgcaccgctctcggtaatcgaagtgcccaaaaacatcgactttacagtgaacgtcaacatcgctcatctcctgttcgacaaattaaacataagtaacactaccggtacgctgttggtaagcgatggtaagctgcagatgcggaacctcgccatgaacatgctggatggaagcgtggtgctttcaggtgaatataatacgcaggatattaatgttccgtcgattgattttaacgcgaacatcangcangtcgatgtcgcgtcagcgatcgcgtcgtttgatatactccgaaaaatattgcctcagccagagaactacgcgggaaaagtgtcggctaacacaacgctgaacactattcttgacgaacatctgggccccgtattaaacacggtggcttccaaaggccggctgcagacgcataacctgagcatactaaactcgtaa

SEQ ID NO: 58266 - protein, 645 aa, Unknown
  Obtained from environmental sample
  misc_feature (1)..(645): Xaa is any amino acid
MNGMLTAKVDFSDVKLSFIRNFPNAYVALTDLVVTGTDEFEGETLVAFKSFSVTVDIMSVIKMDNIRLKSILLDQAIINAHIAENGDANWNIMKPGEEKKPAEEAPDDKSASEKTSSLKIALNKFEIRDAKLSFQDDKNKMTAAADDLDFILQGDMALDNVDLKMKLDITDINFLMGGIHMLTNAHVGFVSEVDADIKNMVFTLKDNKFNLNEIILKFAGSARIPGDIIVDMTFATETIDFKNVLRLVPSVFMKGFESIKTTGSFALSGDIKGTYNNKQMPNAXVNLSIDNAMFKYPDLPKSVDNINIKVNAFYDGAVFDNTTLDVDKLHFNMAANPFDAEVHVKTPESDMQVAAKLAGKIDFNSLVDIVPLDDITLKGLLDCDLALAGRMSTFQNERYEDVDARGMLKLNGFNFESPDFPQAVEIASTQLNFTPRKVDLVNFDAVIGNTDIAMNGTLEKFIPFIFKGDTVHGNLSLRSNNINLNEFMTGEKPEETKESAPLSVIEVPKNIDFTVNVNIAHLLFDKLNISNTTGTLLVSDGKLQMRNLAMNMLDGSVVLSGEYNTQDINVPSIDFNANIXXVDVASAIASFDILRKILPQPENYAGKVSANTTLNTILDEHLGPVLNTVASKGRLQTHNLSILNS

SEQ ID NO: 58267 - DNA, 603 bp, Unknown
  Obtained from environmental sample
  misc_feature (1)..(603): n is a, c, g, or t
gtgcgcatgaacatcgcgcaagccagcctcgaactcgcaagcggacagggcctctatatgtccctgaattacaaaggaaacgcggcggtgcccgtttcggcgataggttcggccgcgtccgatattttgggcaaaatacccggaggctcaaggctcatggaaatcgaggtgacgggattaataggtggcacggttaacaaaccccttgtaactcttggcgtctccgatatggtagataatgtcgtcgacaccgttgaagaaacggtcagagaacaactactagcagttacagtacatgcgacagaagaaattgataaacagataaacgccatcatggccgaggcggaaaagcagtctcaaaacatccgtaataccgccaagcaagccgccgacaaaatacgcaaagaagccaacgccgccgccgatagactggaggcgcaggctaaatcgcctcttgaaaagaccgcggctaaagtggcagcaaaaaaactccgcgacgaaggcaatgataaagccaaaaaaacagagcaggaagctgaaagacagatcaagaacattatggacgccgcaaaaaagaaggctgacgatttaaggaagggttag

SEQ ID NO: 58268 - protein, 200 aa, Unknown
  Obtained from environmental sample
  misc_feature (1)..(200): Xaa is any amino acid
MRMNIAQASLELASGQGLYMSLNYKGNAAVPVSAIGSAASDILGKIPGGSRLMEIEVTGLIGGTVNKPLVTLGVSDMVDNVVDTVEETVREQLLAVTVHATEEIDKQINAIMAEAEKQSQNIRNTAKQAADKIRKEANAAADRLEAQAKSPLEKTAAKVAAKKLRDEGNDKAKKTEQEAERQIKNIMDAAKKKADDLRKG

SEQ ID NO: 58269 - DNA, 369 bp, Unknown
  Obtained from environmental sample
  misc_feature (1)..(369): n is a, c, g, or t
gtgctggataacgaggcagggcttgaaaatctttcacggcggattgttcaaaaggttgaccttatgatacttgtttcagacgcttccaattcaggattacagactctgctccgtctttttgagcttgcaggggaaatgaaaatggcttacggtaaacttgcgcttgtggtgaataaattgcgaagcgataaacttcccgacagaatgaaagaaataagcgagaaaacaaaagcggatattgtcatcggtcttcccgacgatgatgaagtttcagagtttgcgcaagagaataaaaattttttacagatttcagattcaaatcccgtttataaaaaagtaatggaattggttaaatgttatttgtactaa

SEQ ID NO: 58270 - protein, 122 aa, Unknown
  Obtained from environmental sample
  misc_feature (1)..(122): Xaa is any amino acid
MLDNEAGLENLSRRIVQKVDLMILVSDASNSGLQTLLRLFELAGEMKMAYGKLALVVNKLRSDKLPDRMKEISEKTKADIVIGLPDDDEVSEFAQENKNFLQISDSNPVYKKVMELVKCYLY

SEQ ID NO: 58271 - DNA, 573 bp, Unknown
  Obtained from environmental sample
  misc_feature (1)..(573): n is a, c, g, or t
atggacgaaaaactggcgcaaattcccggcaggattaaggaactgagggaaatccttgagatcagcgcgatggatatggctaatgatattcatattccgccggaaacctacaataaatatgaaaacggcgaacaggatattccgatcagcgtattgaacaatatagccggcagacttggcatagacatgaccgtaattataaccggcgaagatcccagaatgaaaagcgccgccgtgtgccgcaaggggaaaggcgttcagatcgagcgttatccgggctatgaattttccagcctcgcctataacttcaagggcaggacgatggagccgcttctggtgctgctcgattcctcgcgcccgcccgcggcgcaggtgtcacattcggggcaggaatttaattatgtggttgagggccggatgaaggtcaccgtgggcaaggcggaatatatccttgccgagggcgattcgatttactttgacgcgacgctgccccacggccagagcgcgttgtccgcctccgaaggaggcgcggatattgcccgatttatcacgatcattcaggaatggtcataa

SEQ ID NO: 58272 - protein, 190 aa, Unknown
  Obtained from environmental sample
  DOMAIN (12)...(66): Helix-turn-helix
  misc_feature (1)..(190): Xaa is any amino acid
MDEKLAQIPGRIKELREILEISAMDMANDIHIPPETYNKYENGEQDIPISVLNNIAGRLGIDMTVIITGEDPRMKSAAVCRKGKGVQIERYPGYEFSSLAYNFKGRTMEPLLVLLDSSRPPAAQVSHSGQEFNYVVEGRMKVTVGKAEYILAEGDSIYFDATLPHGQSALSASEGGADIARFITIIQEWS

SEQ ID NO: 58273 - DNA, 1710 bp, Unknown
  Obtained from environmental sample
  misc_feature (1)..(1710): n is a, c, g, or t
atgagcgaactgttatcacgatactgcccccggattgaatttgaaagctacgaggatttttacgccaattaccgctgtaacgtgccggatgattttaattttgcccgcgacgtggttgacgaatgggcgcggctgcatccggaaaaacccgcccttttgtggacggacgattccggggccatgaaatcttttaccttttccgacatgaaacggctgtctgacaaagcggctaacgcgcttatcgcgcttggaataaaaaaaggcgacgtggcgatgctgatactcaaacagcggcctcttgtttgggtgatgatgtgcgcccttgaaaaaatcggagcggtctgcatacccggcacttatcagctgacggcgaaagatttggaataccgctgtaacatcgccgaggttaagctgctggtaacgattgacgacgcgggcctgttagctgacattgcctctgtgcgccccaaatgcgctaaactggaacacgttgccgtcctgcacgacaaggaaaagcgtgtaggtacacgcggcgattacatagacctgcaggccgaaatagaaaaagcaagtgaaaactttaagtacatcacgacaaaaaccgaagaacccatgctgatatatttttcctccggcaccaccggaatgccgaagatggttctgcacaaccacagcctccctttggggcatattgtcaccgcaaaatactggcaatgcgtggaagacggcaaggttcacctgacccagaccgattcgggctgggcaaaattcgcctggggaaaaatttacggccagtggatctgcggagccgccataggcgcctatgacacggaaaaatttaccccgcagggaatgttggacgcgttacagcggctaaagccagcgactttctgcgcccccgcgacgattttccgttatctgataaaagaagatctttccggttatgacttcagtttcatccgccatacttcggttgcgggcgaacccctgagcccggaagtgtacaataaattaaaatcgttaacgggccttgaaatccgcgaaggcttcggccagtcggaaacttcggtaatggcggcggcgttcaagtggcttccggtaaggcccggttccatgggaaagcccgcccccctgttcaaacttaatctgcttgacgaagacggcggcgcttgcgatgacggcatgatcgggaacatgagcatcaccgcggcgggcaagaatatgtacgatcttgggcacacaacgcctaacacagggcttcccgtaatcggcccctcggaatttcccgggcttttcaggggttactggaaagaccaggaagctacagcctcttcatggaacggcggaacctataaaacaggcgacatggcctggcgcgacggcgacgggtatttgtggtttgtaggccggaacgacgatgtgatcaaatgttccggttaccgcataggccccttcgaggttgaaagcgccctgatggagcatccctcggttctggagtgcgccgtaaccgccgcgcccgatcccatgcgcggccaggtggtcaaggcaagcatagtgcttgcgcggggattttctccctcggacgaacttgtccgcgaactgcaaaaccacgtcaagcgcgtaacagccccctacaagtacccgcgcatagtggaattcttgcctgagcttccaaaaacaataagcggcaagatacgcactcggccataa

SEQ ID NO: 58274 - protein, 569 aa, Unknown
  Obtained from environmental sample
  DOMAIN (65)...(502): AMP-binding enzyme
  misc_feature (1)..(569): Xaa is any amino acid
MSELLSRYCPRIEFESYEDFYANYRCNVPDDFNFARDVVDEWARLHPEKPALLWTDDSGAMKSFTFSDMKRLSDKAANALIALGIKKGDVAMLILKQRPLVWVMMCALEKIGAVCIPGTYQLTAKDLEYRCNIAEVKLLVTIDDAGLLADIASVRPKCAKLEHVAVLHDKEKRVGTRGDYIDLQAEIEKASENFKYITTKTEEPMLIYFSSGTTGMPKMVLHNHSLPLGHIVTAKYWQCVEDGKVHLTQTDSGWAKFAWGKIYGQWICGAAIGAYDTEKFTPQGMLDALQRLKPATFCAPATIFRYLIKEDLSGYDFSFIRHTSVAGEPLSPEVYNKLKSLTGLEIREGFGQSETSVMAAAFKWLPVRPGSMGKPAPLFKLNLLDEDGGACDDGMIGNMSITAAGKNMYDLGHTTPNTGLPVIGPSEFPGLFRGYWKDQEATASSWNGGTYKTGDMAWRDGDGYLWFVGRNDDVIKCSGYRIGPFEVESALMEHPSVLECAVTAAPDPMRGQVVKASIVLARGFSPSDELVRELQNHVKRVTAPYKYPRIVEFLPELPKTISGKIRTRP

SEQ ID NO: 58275 - DNA, 483 bp, Unknown
  Obtained from environmental sample
  misc_feature (1)..(483): n is a, c, g, or t
atgaccggggttatcagcgctcgtggcctggacgttgggtacgacaagaagatcgttgtcagcggtgtggaaataaacgccctgaaaggccaagtcatctgcctaatcggtcccaacggatcgggcaagtctacaatactcagaacccttgcgggaatgcttgctcccgttggcggcattgtttacattggccctaatgacatacgctcgataaagcccaatgaactggctaaacaaatggcggtagtgctgacagaatcgttgaacgtcaatatgacttccgcttatgaaattgcttcgatggggaggattccatatacaggtttttttggcaggctcagcgcggacgatcatcgtattgtgcgtgaatgtatgcaaattgtcggcgcggcagatctcgccgaacgagatttttcaagccttagcgacggagagaaacaaaagatcctgattgcaagggcgctggctcaggaacggatttaa

SEQ ID NO: 58276 - protein, 160 aa, Unknown
  Obtained from environmental sample
  DOMAIN (30)...(159): ABC transporter
  misc_feature (1)..(160): Xaa is any amino acid
MTGVISARGLDVGYDKKIVVSGVEINALKGQVICLIGPNGSGKSTILRTLAGMLAPVGGIVYIGPNDIRSIKPNELAKQMAVVLTESLNVNMTSAYEIASMGRIPYTGFFGRLSADDHRIVRECMQIVGAADLAERDFSSLSDGEKQKILIARALAQERI

SEQ ID NO: 58277 - DNA, 654 bp, Unknown
  Obtained from environmental sample
  misc_feature (1)..(654): n is a, c, g, or t
ttgaccgggctttcggcgaataacggcgtgacagtgattttcgcgttgcacgaccttgatatagccgtgaagaactgtcagttcgtattgctgataaaagacggaaaggttgtggctcaggggcggcccgaagacataattggcaaggacacgattggcgatttgtacagcattgaaggcgcggtgttcaattccgtcatgggcagtctggaaatatgcaacgacaaaaccccggaggtgtttgtagcttcgggagctggtaccggcactccggtgttcaggcttttatcgcgtatgggctacggcatagcaaccggcgtattgaacaaaaacgacatcgactgcttcgttgccgaatcaatgaagctcacggtaatttccgagcagagttttgagccggtatccgaagcaagccgttcagctgccgaagcatatctgcacagcgccgcgttcgtagtcgataccaattttccggttggtacgtacaaccgctgtaatattgaaatcgtaaattatgcggcaggcttaaaacccgtacttagtatgcgttcgccggaagaaattgaacgattgtacggtaaagaatcaaaagtgataagtattacatcggtcgggcagttacagaactgtattgagaccttgaaaaaacaataa

SEQ ID NO: 58278 - protein, 217 aa, Unknown
  Obtained from environmental sample
  misc_feature (1)..(217): Xaa is any amino acid
MTGLSANNGVTVIFALHDLDIAVKNCQFVLLIKDGKVVAQGRPEDIIGKDTIGDLYSIEGAVFNSVMGSLEICNDKTPEVFVASGAGTGTPVFRLLSRMGYGIATGVLNKNDIDCFVAESMKLTVISEQSFEPVSEASRSAAEAYLHSAAFVVDTNFPVGTYNRCNIEIVNYAAGLKPVLSMRSPEEIERLYGKESKVISITSVGQLQNCIETLKKQ

SEQ ID NO: 58279 - DNA, 960 bp, Unknown
  Obtained from environmental sample
  misc_feature (1)..(960): n is a, c, g, or t
gtggttttattttcttatggcggtactgctggcgttaattttttttggttgtacaaaaaacaacaccccgcaaaatccacggctgtctcgaccggagcaaagcttggtattaagtatgcgcagaatttcagcattgattatctgggaaacggagtaaaagtcgtaaccgattccgacaagaacaagctccttttggttccaaaaggggtagccgccccatcggggtacaatgacgctttactgatcgagacgccgattacaaacgcgctttacacctcaacaacctatgtcggacttctgggcgcgttggaaaacgattcggtttacaattctgttaccgctgtctgcagccctatggaagattggactacccctcaaatacttgccagattcaggaatggcacaactcacttcattaaccatagccagatggctgtcggcgacatagaggagatcgttaaaacaggaaccagcttcgcgtttacaggcggcaatgatgattccgatatgcggcttcgcagtttaatggacgaggtgaatatcaaacacacgaccctacttgagtggatggaagatggaaacccagcgtatctggaatggatcaaattctttgccgcgttttttaaccttgacgaagaagcggatcgcatttttgaaagcaagctggcgcggttggacgagttgtatgaaaaagccagtctcacttcaaatagaccgacagtggtatatggaatgatttggggcgggactgtatatacgcaagctggagactcaaccctggcccagcaatttgagaaggctggcggtacttatgcgcttaagagccttgagggatcgggcagtatcactattactatggaagaattccttaagcattgcagggacactgatataatatttacggcagtttgccgcagtattgccccgatnaagcttttctgctggaaacagagccattaa

SEQ ID NO: 58280 - protein, 319 aa, Unknown
  Obtained from environmental sample
  misc_feature (1)..(319): Xaa is any amino acid
MVLFSYGGTAGVNFFWLYKKQHPAKSTAVSTGAKLGIKYAQNFSIDYLGNGVKVVTDSDKNKLLLVPKGVAAPSGYNDALLIETPITNALYTSTTYVGLLGALENDSVYNSVTAVCSPMEDWTTPQILARFRNGTTHFINHSQMAVGDIEEIVKTGTSFAFTGGNDDSDMRLRSLMDEVNIKHTTLLEWMEDGNPAYLEWIKFFAAFFNLDEEADRIFESKLARLDELYEKASLTSNRPTVVYGMIWGGTVYTQAGDSTLAQQFEKAGGTYALKSLEGSGSITITMEEFLKHCRDTDIIFTAVCRSIAPXKLFCWKQSH

SEQ ID NO: 58281 - DNA, 603 bp, Unknown
  Obtained from environmental sample
  misc_feature (1)..(603): n is a, c, g, or t
atgacgctcaattataactccgcctccgccttgcgcgcctttcttgatcaggaaggacttggaatgcagaaaaagttcgggcagaattttttaattaaccccgaaacaagaaaggcgcttgtgcaagctcttgacgcaaaaagcggcgacgaggtttgggagattggtcccggtctcggcgcaatgacggctatgcttcttgaaaacgggttaaaggtaaaagcgtttgaaatcgacatgggatttatccgagtcttgaaaaatatttttgccgagaataaaaattttatccttgttgaaggcgatgtaatgaaaacttggcggacgcatcagcctgcgccgttcctttttggaaatcttccgtacaatgtagcggcggctctgctggcggacttaattgaaaatgactgtattttttcacgcatggttgttaccgttcaaaaagaagtcgcccagcgtatggcggcgtcggcggggaagcccgactattcatcattttccgtgctttgcgcatcggcttacaaagttaaaccgttgatgacgatccgcccgtcgtctttttatccccagccgaatgtggacagcatggcgggttcttcttga

SEQ ID NO: 58282 - protein, 200 aa, Unknown
  Obtained from environmental sample
  DOMAIN (19)...(200): Ribosomal RNA adenine dimethylase
  misc_feature (1)..(200): Xaa is any amino acid
MTLNYNSASALRAFLDQEGLGMQKKFGQNFLINPETRKALVQALDAKSGDEVWEIGPGLGAMTAMLLENGLKVKAFEIDMGFIRVLKNIFAENKNFILVEGDVMKTWRTHQPAPFLFGNLPYNVAAALLADLIENDCIFSRMVVTVQKEVAQRMAASAGKPDYSSFSVLCASAYKVKPLMTIRPSSFYPQPNVDSMAGSS

SEQ ID NO: 58283 - DNA, 690 bp, Unknown
  Obtained from environmental sample
  misc_feature (1)..(690): n is a, c, g, or t
atgtcagttgccgataatatagcaaagctggaagaacggatacaaagagcctgtaattccgtccgcaggaaaagggaagaagttacgctgatgggcgtgtcgaagtttgtgcccattgaacagatagatgaagcgtaccgctgcggcattcgctgttttggagagagcagggtaaaggacgcagaggaaaaacttgcttcctttaagggcgagcgctccgatgcgcggtttcatttaataggttctttacagcgcaacaaggcaaaacaggcggctcttttttttgactgtgttcaatcggcggacagggacgagattattattgagcttgcaaagcattcgtcccagcggcaggagccgcttgaaatattgcttgaactgcatacgggagaggaaacgaagagcggctaccaaaacatagatgcgcttcttaaagcggcggagttggttttgggaagccccaagttgaagcttacggggcttatgacaatggctccttttacagcggataccgcattggttcgttcttctttcaggcggcttgcaagcgcaagagatgaacttgaaaagcgtttccccggaaatgcgccgtgtctttctatgggaatgtcaaacgattttgagacagccatagaagaaggttcaaccatgctgcgtattggcagcgcgatttttggagaacggatttga

SEQ ID NO: 58284 - protein, 229 aa, Unknown
  Obtained from environmental sample
  DOMAIN (1)...(229): Alanine racemase, N-terminal domain
  misc_feature (1)..(229): Xaa is any amino acid
MSVADNIAKLEERIQRACNSVRRKREEVTLMGVSKFVPIEQIDEAYRCGIRCFGESRVKDAEEKLASFKGERSDARFHLIGSLQRNKAKQAALFFDCVQSADRDEIIIELAKHSSQRQEPLEILLELHTGEETKSGYQNIDALLKAAELVLGSPKLKLTGLMTMAPFTADTALVRSSFRRLASARDELEKRFPGNAPCLSMGMSNDFETAIEEGSTMLRIGSAIFGERI

SEQ ID NO: 58285 - DNA, 564 bp, Unknown
  Obtained from environmental sample
  misc_feature (1)..(564): n is a, c, g, or t
ttgattaaaataaaacgagctgtatttttctttctcctgctgacaatgactgttttccttgtcccggcgcaaacaaacacaaacagcaacttttttgatttaagcggctccccccagtgggtgagggatctgcgccgatgggaaatcgtcgcgtttggaacgattccctttgccatgttttcggcgacattcggaatggatatgtacaggtggagcaaggccaacggcatggactttagcgataacggacggaaatatgccccctggcccttgaaatcagccggcgctttcgcgatggagcccgatgaaattgaaaagacgctgattattgccgccagcctgtgcgtatcagtcgcgtttaccgatcttattataactcaaattaaacgatataaggctaaaagacgggctgaagccctgccccacaatgcaaccacgattaaccggaggcccttgtacgaggaaaaaccgcaaatacaggaagagccgcaggcctcacatgaagccaaagatggccctgccgaaaatttggaaactccccccctgcctgctcctgtgtcataa

SEQ ID NO: 58286 - protein, 187 aa, Unknown
  Obtained from environmental sample
  SIGNAL (1)...(25)
  misc_feature (1)..(187): Xaa is any amino acid
MIKIKRAVFFFLLLTMTVFLVPAQTNTNSNFFDLSGSPQWVRDLRRWEIVAFGTIPFAMFSATFGMDMYRWSKANGMDFSDNGRKYAPWPLKSAGAFAMEPDEIEKTLIIAASLCVSVAFTDLIITQIKRYKAKRRAEALPHNATTINRRPLYEEKPQIQEEPQASHEAKDGPAENLETPPLPAPVS

SEQ ID NO: 58287 - DNA, 948 bp, Unknown
  Obtained from environmental sample
  misc_feature (1)..(948): n is a, c, g, or t
atgccgtctttcaatagtaccattaataacatagaacccgtggggctgcgcctggatcgctacattgcggagaatttatgcctgctttcccgatcccagataaaggcgagggaattggaagcgcgggttaacggcaaaccagtaaagatttccagaatagtaaaaaacggcgacaagatagaactttcatggaatgaggcggagccggttaaccttattccggaaaatatcccgctggatattatttttgaaaatgaccgggccgtggtaataaacaaaccgcaggggatggtggttcatcccggcgcgggcaattggcaagggactctcgcaaacgcgctgtatcaccgcaggctggaattatgtcgcataacagaaaacgaggctcatgcgtccgggttaaggcccggaatagtccaccggctggacaaggacacctcaggcgtaataatcgccgcctatgacgatgaaaccctcgcgtttttggcggaacagttcaagtcaagaaaggcaaaaaaaacgtacattgccattgtcagcggaattccaaaagaaaaaaaagggcgcatagagaccttcatcgccagagaccaaaaagatcgcaagcgtttcacggtaagccctcatggcagggcttcgctgacgctttactcggtaataaagacatggaacggccattcgctgctgctcttaaggccaaaaacaggacgcacccaccagattcgcgtgcacctccgctatcttgggcatcctgtcatgggcgatacaatttacggctttccggaatccgccttcccaaacgcgggactgatgctccactcaagaagcctcgcgatcaccctgcccggcgaaaccgaacagcgggttttcaaggcgcctctgccggagcgttttacagcgataattaaactgttaacaaatttatcaaaaaccccaaagagtaaataa

SEQ ID NO: 58288 - protein, 315 aa, Unknown
  Obtained from environmental sample
  DOMAIN (87)...(247): RNA pseudouridylate synthase
  misc_feature (1)..(315): Xaa is any amino acid
MPSFNSTINNIEPVGLRLDRYIAENLCLLSRSQIKARELEARVNGKPVKISRIVKNGDKIELSWNEAEPVNLIPENIPLDIIFENDRAVVINKPQGMVVHPGAGNWQGTLANALYHRRLELCRITENEAHASGLRPGIVHRLDKDTSGVIIAAYDDETLAFLAEQFKSRKAKKTYIAIVSGIPKEKKGRIETFIARDQKDRKRFTVSPHGRASLTLYSVIKTWNGHSLLLLRPKTGRTHQIRVHLRYLGHPVMGDTIYGFPESAFPNAGLMLHSRSLAITLPGETEQRVFKAPLPERFTAIIKLLTNLSKTPKSK

SEQ ID NO: 58289 - DNA, 669 bp, Unknown
  Obtained from environmental sample
  misc_feature (1)..(669): n is a, c, g, or t
atgaataaagtgccttttatctgccatgagacaggggatttcgcggtagtgttcaaaccgccccggatgcatactgccccgattgggcaggacgctccgccggggcgggacagtaacacaaaaacaaacggtgttgaaaccctccttgactggtacgcgaatatttttcccccaatcatggatctttccggcagaaaagaaaacgaaggcggccttctgcaccgtcttgattttgaaacccagggactggtgcttttcgcaaagaaccaacagacgctggaaaatttgctgatacagcagaaacagggaaatttcatcaaggagtacggcgcgatttgccaaaaatccgagcctcagcccggcgctgttgatttttctgtcgaccaacaaggcggccttgccgccatcccgctggtaattgaaagttatttccgcccttacggccccggcagaaagcaggttcgtccggtgacaaaagaaaagttaagaagaaaagaaatcgccaaagacggggactcttattatcgaacagaagttatcggcgtggaaaaaaaacaggaagaattatatcatttcaccgtgaggctcaaacgcggattcaggcatcagatacgctgccaccttgcgtggattggcttccgcggtgttaaacgatccgatttacggtaa

SEQ ID NO: 58290 - protein, 222 aa, Unknown
  Obtained from environmental sample
  DOMAIN (13)...(210): RNA pseudouridylate synthase
  misc_feature (1)..(222): Xaa is any amino acid
MNKVPFICHETGDFAVVFKPPRMHTAPIGQDAPPGRDSNTKTNGVETLLDWYANIFPPIMDLSGRKENEGGLLHRLDFETQGLVLFAKNQQTLENLLIQQKQGNFIKEYGAICQKSEPQPGAVDFSVDQQGGLAAIPLVIESYFRPYGPGRKQVRPVTKEKLRRKEIAKDGDSYYRTEVIGVEKKQEELYHFTVRLKRGFRHQIRCHLAWIGFRGVKRSDLR

SEQ ID NO: 58291 - DNA, 975 bp, Unknown
  Obtained from environmental sample
  misc_feature (1)..(975): n is a, c, g, or t
atggaatatgtatccgctttcgcgccgtatataaccggcctgattgagcaaaaaagggcgcttggctacaaatacggcagtgaagctgtaatgctaagaaggtttgacgtattctgtcaggaacgtcatccgcgtgaaaccgttctgaaccgggaagttatgacggattgggcggcaaagcgtcccggggaacacccggcaacggtacagaacagactcacccccgtaagagagcttgccaaatacctgtcccgccaagggcttcaggcctacataatgccgaagggcttgttaccgaggataccgcgttatacgccgcatatttactcaaacaacgaattacagcgtattttcagacaaaccgatacgtgccgttattgctcagaagtcccattccgccatctggtgatgcctgtctttttcaggctgctgtactgcaccgggatgcggctgtcggaggcgcgccttctgaaagtcggcaatgtggatttagacggcggggttataacggtggccaacgccaaacttgacaaacaccgtctgttacccgtgtcccccgaaatgctggcgcgtcttgtgtcataccataggaacgcccgcccgctgtcaaaaccggaagactggttcttccccggatacggcagcaggccggtgactgcgggcaatatagaaaaaaaccttcggagattcctgtggcgggccgggatatcccacggcggtcggggaaagggcccgcgtgtccacgattttcgccattcctgcgcggtacattgtttgcggcgctgggttctggatggaaaggacttgaacgcgtatctgccagttttgcaggcctacctcggccacgcctcatttgccgataccgcgtattacctgcatcttaccgccgacttgttccctgacataacgaaaaaagttgaaagcgcgttcggcttcattttaccgcaaggaggcgaccgctatgaaaccgactga

SEQ ID NO: 58292 - protein, 324 aa, Unknown
  Obtained from environmental sample
  DOMAIN (118)...(301): Phage integrase family
  misc_feature (1)..(324): Xaa is any amino acid
MEYVSAFAPYITGLIEQKRALGYKYGSEAVMLRRFDVFCQERHPRETVLNREVMTDWAAKRPGEHPATVQNRLTPVRELAKYLSRQGLQAYIMPKGLLPRIPRYTPHIYSNNELQRIFRQTDTCRYCSEVPFRHLVMPVFFRLLYCTGMRLSEARLLKVGNVDLDGGVITVANAKLDKHRLLPVSPEMLARLVSYHRNARPLSKPEDWFFPGYGSRPVTAGNIEKNLRRFLWRAGISHGGRGKGPRVHDFRHSCAVHCLRRWVLDGKDLNAYLPVLQAYLGHASFADTAYYLHLTADLFPDITKKVESAFGFILPQGGDRYETD

SEQ ID NO: 58293 - DNA, 390 bp, Unknown
  Obtained from environmental sample
  misc_feature (1)..(390): n is a, c, g, or t
ttgaaagcgcgttcggcttcattttaccgcaaggaggcgaccgctatgaaaccgactgatttcgccaagcacttgaccgctttcttctcggactatttgcccggcgttagaaatctgagcggtgacactatcctctcgtatcgcgacacgttccggttattattggcgtattgccgggaccgcgaaaatacggcgccggaaaaattacggcttgaatccttcagtgacaaactcttactgcgtttccttgactggctgcaaaaagaacggggatgttccgtcgctacaaggaataacaggcttgccgccgtccacgcgttttccgctacgttcatcgctggaaccggggctgctgcttacatgccagcaaatacttctcctgccgcttaa

SEQ ID NO: 58294 - protein, 129 aa, Unknown
  Obtained from environmental sample
  DOMAIN (25)...(114): Phage integrase, N-terminal SAM-like domain
  misc_feature (1)..(129): Xaa is any amino acid
MKARSASFYRKEATAMKPTDFAKHLTAFFSDYLPGVRNLSGDTILSYRDTFRLLLAYCRDRENTAPEKLRLESFSDKLLLRFLDWLQKERGCSVATRNNRLAAVHAFSATFIAGTGAAAYMPANTSPAA

SEQ ID NO: 58295 - DNA, 936 bp, Unknown
  Obtained from environmental sample
  misc_feature (1)..(936): n is a, c, g, or t
gtgacactatcctctcgtatcgcgacacgttccggttattattggcgtattgccgggaccgcgaaaatacggcgccggaaaaattacggcttgaatccttcagtgacaaactcttactgcgtttccttgactggctgcaaaaagaacggggatgttccgtcgctacaaggaataacaggcttgccgccgtccacgcgttttccgctacgttcatcgctggaaccggggctgctgcttacatgccagcaaatacttctcctgccgcttaaaaaatatcaaacgcccattgtccggcacttgacgccggagcaaacacgcgacctgcttgccgcaccgggttttgcaacacgctcaaaccgccgtaatacgacactattgagcgtactgtatgattccggcgcgcgggtacaggaattttgtgatttgcgcgtccgtgacattcgtctcgaccacccgtccgtgattacactgacaggcaaagggcgtaaaacaagacatgtgcccctcatggcagacaccgtgaaactgctgcgatcctacatggaagaaaactccctgttccataacggctgtcaagacgcgccgctgttctgtaaccagcgccgttcaaaactgacccgcggaggcgttaatcacattctgtgcaaatattccagtacattgtcgataaaatatcctgatatatcaaaaaggcttacgcctcatgtgctgaggcattcaaaggcaatgcatctatatcaagccggcgtgagtcttgtatatatacgcgatatcctcggacacgttgatatcgctaccactgatatctatgccagagccgacaccgagtccaaacgcaaggcgcttgagaatatttacccgggtataacgccggttgcttcgttgccagactggaaccgcgatctgaacttgcttgattacttgaacggcctttaa

SEQ ID NO: 58296 - protein, 311 aa, Unknown
  Obtained from environmental sample
  DOMAIN (108)...(280): Phage integrase family
  misc_feature (1)..(311): Xaa is any amino acid
MTLSSRIATRSGYYWRIAGTAKIRRRKNYGLNPSVTNSYCVSLTGCKKNGDVPSLQGITGLPPSTRFPLRSSLEPGLLLTCQQILLLPLKKYQTPIVRHLTPEQTRDLLAAPGFATRSNRRNTTLLSVLYDSGARVQEFCDLRVRDIRLDHPSVITLTGKGRKTRHVPLMADTVKLLRSYMEENSLFHNGCQDAPLFCNQRRSKLTRGGVNHILCKYSSTLSIKYPDISKRLTPHVLRHSKAMHLYQAGVSLVYIRDILGHVDIATTDIYARADTESKRKALENIYPGITPVASLPDWNRDLNLLDYLNGL

SEQ ID NO: 58297 - DNA, 900 bp, Unknown
  Obtained from environmental sample
  misc_feature (1)..(900): n is a, c, g, or t
atgaaaaaacataatacaagtttgctcttactctttttatctgtgttttttctgatatgcgcctgtagtaatgggtacaaagccgcgcctgccgcgtcttatggagcgcagagagccgtgttttctaccgctgattatgccgcggaaaacaacgaggccgtcaagatggatgccggtgggtctgtgtatagcgaaggaaatctcgctcagacggaagcctcgggccaaagccgcaagctggcaaaaagcgcgtatcttagtttaagggtggatgatcctgccgctacagaaaagcctttgtcagagctaatggataaattcggcgcctggtcggcttcaacaacaatttacgagaactcccgcaattacagcatacgggtcccttcggattcctatgacgcattgttggcagagctggccggtctgggcagagtaaccagtcgctcagaaaacaccgaggatgttactctccgttactatgaccttgaggggcggcttgctgtaaagcgtgagctgcttaatacctatcagggttatctgggtaaggccagaaacatcgatgaggttatgaccgtagaaagccggatagcggatttgcagcaggaaatagattggacaggcacccagttgcgaaacctttcgaacctgatagattattctaccgttaatttggatattgccgggcctgcgggagcgtcctattccgcgccaactctcgctgagagattcggagatcttttcggttcctttggggatgtcttttcaacggcgctggttgtgattacggggatcgtcatgtacggcgtgcctgtgcttcttgttattgttttgcttttttgggtgcttttcgggcgtatcggcctaatcaagaagctttggcgacttgtcaccaaggaataa

SEQ ID NO: 58298 - protein, 299 aa, Unknown
  Obtained from environmental sample
  SIGNAL (1)...(27)
  misc_feature (1)..(299): Xaa is any amino acid
MKKHNTSLLLLFLSVFFLICACSNGYKAAPAASYGAQRAVFSTADYAAENNEAVKMDAGGSVYSEGNLAQTEASGQSRKLAKSAYLSLRVDDPAATEKPLSELMDKFGAWSASTTIYENSRNYSIRVPSDSYDALLAELAGLGRVTSRSENTEDVTLRYYDLEGRLAVKRELLNTYQGYLGKARNIDEVMTVESRIADLQQEIDWTGTQLRNLSNLIDYSTVNLDIAGPAGASYSAPTLAERFGDLFGSFGDVFSTALVVITGIVMYGVPVLLVIVLLFWVLFGRIGLIKKLWRLVTKE

SEQ ID NO: 58299 - DNA, 864 bp, Unknown
  Obtained from environmental sample
  misc_feature (1)..(864): n is a, c, g, or t
atgaatataagtcctggaaaaaagctcaaccgatggcatagggtcttaaagaacgagcgtcacaaggcggaggcgtttcttagggaaagggaaaaatactgcgtcagcgcgtcagcgcgttttctgggcatgaaagaaagcgcgatcacgtctggtatatgccgggggcggaaggtgaaatttcggccttgcttatacacagccgccaaactcttttcccccgtgttttataagaactcgcaaattcccgcgccccgttttctaaaccgttttcttggcaaagtttacattcatgcccttcagggccttcgggaggacgccgagcgtctggaaacccttatggaagaccaaggctattacgctgccgagaggattgagtacgaacttatgaacctggacggcgcgataaagtacggaactcaaagggtgcgcctcgcttctcttgccttgcgtcctcccttacccaaagacgaggacgttctttttgcgcttcaagccgcttacgagcaggaggaggttcttccctcaaacgcggtttttaatccggcggctgcccgtttaaatatacggaacatcattgatcgggagcaggttcttgtggcggagctggacggccaggttgtgggaaagataaacaccagcgcgaaatcctttacacgctgccagataggcggagtgtatgtgcgccctgactgccggaaccttggcataggctcaaagatgacagcggtttttgccgaggggcttttagctcagggtaaagggctttccctttttgtcaaaaagcgcaacgccgccgcctgcaaagtctaccgaaaaatcggttttagcgttaccgcggattacaggattacttattactaa

SEQ ID NO: 58300 - protein, 287 aa, Unknown
  Obtained from environmental sample
  DOMAIN (207)...(284): FR47-like protein
  misc_feature (1)..(287): Xaa is any amino acid
MNISPGKKLNRWHRVLKNERHKAEAFLREREKYCVSASARFLGMKESAITSGICRGRKVKFRPCLYTAAKLFSPVFYKNSQIPAPRFLNRFLGKVYIHALQGLREDAERLETLMEDQGYYAAERIEYELMNLDGAIKYGTQRVRLASLALRPPLPKDEDVLFALQAAYEQEEVLPSNAVFNPAAARLNIRNIIDREQVLVAELDGQVVGKINTSAKSFTRCQIGGVYVRPDCRNLGIGSKMTAVFAEGLLAQGKGLSLFVKKRNAAACKVYRKIGFSVTADYRITYY

SEQ ID NO: 58301 - DNA, 705 bp, Unknown
  Obtained from environmental sample
  misc_feature (1)..(705): n is a, c, g, or t
ttgccggcaacgacatcatcatggctttcaaaaaccccaagcctgaacgacgccgtatggacatatctgctttcttcaatgaaggatgagccggaatttcgggaccgtgtgcgggacgcctgtcgccgtatactggtattaaaactggagtaccttcggggagaaaaaaaagttccctacattcccgatttaaaaaagatagatgacggccttgttgatccggaagggacggctttttttctcggcctggcagcccgtagcgttacccttgtggatagcagagacgtttttccccttagcccggaaaaggcgggcagggtgcttctggcggggaactttactgattttttcacttatggaagaaaagcttttcctggagctgtttcgtattggtacgatacgagtcaggccgccacagatattatttcgtacgccaggaatgtcgatactgtgatcttctgcctttccagcaaagccggaatcagaataattcagcagttgcggagtttaaataaaagggtgattgttttttcagtcctgagtccggcttatcttgacgaggtttcctgggcggatggcgcggtggcggtttacagttacgccccggaatcgtttatagcgggtttttcggccatccttggcaggataaaagcagaagggaaactccctttcgcgttgaatacgcgcccttcatccggaaactag

SEQ ID NO: 58302 - protein, 234 aa, Unknown
  Obtained from environmental sample
  misc_feature (1)..(234): Xaa is any amino acid
MPATTSSWLSKTPSLNDAVWTYLLSSMKDEPEFRDRVRDACRRILVLKLEYLRGEKKVPYIPDLKKIDDGLVDPEGTAFFLGLAARSVTLVDSRDVFPLSPEKAGRVLLAGNFTDFFTYGRKAFPGAVSYWYDTSQAATDIISYARNVDTVIFCLSSKAGIRIIQQLRSLNKRVIVFSVLSPAYLDEVSWADGAVAVYSYAPESFIAGFSAILGRIKAEGKLPFALNTRPSSGN

SEQ ID NO: 58303 - DNA, 315 bp, Unknown
  Obtained from environmental sample
  misc_feature (1)..(315): n is a, c, g, or t
ttgagtgggaatagggaaagaaggaattttgctttgatagaaaccttatcggccacagatcgtatcgggaaaaaacctatcggccgcctgttactcgatttttccattccggcaataatcggaatgctggtaaacgctatttataatattgttgaccgtatctatatagggcaaggcgtagacgcgctgggtatagccggtgtcggccttgttatgccggtgatgatgataatacaatccgtctccatgcttgtaggcataggcgcgaattcgctcttttccatacgttgggccagggccgttccgatgaagtga

SEQ ID NO: 58304 - protein, 104 aa, Unknown
  Obtained from environmental sample
  misc_feature (1)..(104): Xaa is any amino acid
MSGNRERRNFALIETLSATDRIGKKPIGRLLLDFSIPAIIGMLVNAIYNIVDRIYIGQGVDALGIAGVGLVMPVMMIIQSVSMLVGIGANSLFSIRWARAVPMK

SEQ ID NO: 58305 - DNA, 1584 bp, Unknown
  Obtained from environmental sample
  misc_feature (1)..(1584): n is a, c, g, or t
atggaccgaattttaattttagattttggaagccaaaccactcagttaatcggacggcgcatccgcgatctcggcgtatacacggaaattatcccgggcgatacgccgcttgtgtccgctattacaaaagatgttaaaggaataattttatccggttcccccgaatccgtttacgacaagggagccgctcccgataaaaaagtctacgactgcggcctgcccctgcttgggatttgttacggcctgcacaggatgacgcatgatctcggcggcaaagttgagcctctgccggaaaaggagtatgggcggattgaggttaaaatttctcaaaccgaaaataataattgctcaaaatttttaaaaggctttcgcccctctttcaccgcgtggatgagccacggcgatactctgacaaaacttgcgcccggttttaaggaatacggttccagcgcgacaggttatcccgctgttgtggcgcatgaggaaaagccctggttcgggcttcagttccatcctgaggttacccactgcgagggcggtgacgacatgcttggcgcgtttgtgtttaacgtgtgcggctgcggcaaaggctggagcatggagcgttatatagaagaattgaataaaacgcttaaagaacgcgcgggagagaacccggttttgcttttgatttccggcggcgttgactccacagtcgccggagcggcgctgttaaaaacattgaagagcgaacaggttcatttgatgtatatggataccgggcttatgcggaagaatgagacggcggccgttagcgcgaatctggaaaaacttggggctaaaaatttgcacataatcatgtgcgaggacgaattcttgactgcgctaaaaggtaagacggagcctgaagaaaagcgcaggataatcggcgatttgtttataacgatacaggagagggaagttgcccgcttgaaattgccggaaagttatttgcttgcgcaggggacgctgtacacggatttaattgagagcggaaaaggcgtaggcaagaaagcccatgtgataaaaagccatcacaatgtggcaagcccgcttgtggacgcgaagcgcaaagcgggaaaaattattgagccgctggatcgtttgtacaaagacgaagtgcgcaaactcggcagaataatcggcgttgacgaagaaattgtaaggcgacacccgtttccgggaccgggtcttgccgtgcgcatacttggagaagtaacaagggaaaagtgtgacattctgcgcgaagcggacgccatatacatagaagaattgaaaaaccgtcgcggcccgtcgggaaagagcctgtatgacgaaatctggcaggctttcgctatccttctgccgatacgctccgtcggcgtggcgggcgacattcgcaaatacggctgggttctcgcgttacgcgctatcacaagcgccgacggcatgaccgcggatgtctacccgttcgaaacccgcgatctattggaaatatccacgcgcattaccaactcggtaaaagacataggtcgcgtaacctacgacatttcaagcaagccgccggctacgattgagtgggaatag

SEQ ID NO: 58306 - protein, 527 aa, Unknown
  Obtained from environmental sample
  DOMAIN (203)...(437): NAD synthase
  misc_feature (1)..(527): Xaa is any amino acid
MDRILILDFGSQTTQLIGRRIRDLGVYTEIIPGDTPLVSAITKDVKGIILSGSPESVYDKGAAPDKKVYDCGLPLLGICYGLHRMTHDLGGKVEPLPEKEYGRIEVKISQTENNNCSKFLKGFRPSFTAWMSHGDTLTKLAPGFKEYGSSATGYPAVVAHEEKPWFGLQFHPEVTHCEGGDDMLGAFVFNVCGCGKGWSMERYIEELNKTLKERAGENPVLLLISGGVDSTVAGAALLKTLKSEQVHLMYMDTGLMRKNETAAVSANLEKLGAKNLHIIMCEDEFLTALKGKTEPEEKRRIIGDLFITIQEREVARLKLPESYLLAQGTLYTDLIESGKGVGKKAHVIKSHHNVASPLVDAKRKAGKIIEPLDRLYKDEVRKLGRIIGVDEEIVRRHPFPGPGLAVRILGEVTREKCDILREADAIYIEELKNRRGPSGKSLYDEIWQAFAILLPIRSVGVAGDIRKYGWVLALRAITSADGMTADVYPFETRDLLEISTRITNSVKDIGRVTYDISSKPPATIEWE

SEQ ID NO: 58307 - DNA, 1212 bp, Unknown
  Obtained from environmental sample
  misc_feature (1)..(1212): n is a, c, g, or t
atgcggatcgagatagtacgatatattgtggtattgaggtgctgggcttttattgtcctccctcaaaacagtgattcggtgggccgcaggggcgaacgttgcgcaaagtgttggcgtgtacgcgtagcgaacgcacaggctttcatagagtacttaatgagcgagccccaaaaaatttcaatcatgggcgccgccatggttatcgatcccaaggcgttattcgacgagattaaaatgctggaagaccgcggcatagacacaaagggcaggctttttatttcggaccgcgcccatatcgttcttcccaaatacattcagatagacaaagagcgcgatgccgcgcggaaaaagccaataggcactaccggccgcggcatagggatcacatattcaatgaagagcgaaagggacagcatccgtattgccgaccttaactggaaagaaaaaatggacgagcttgacaaagccgaccgcgattttctcgcgccttacattgacaggctccttgaaatgtcggtcgatttaagcacctaccttaatcaccgaaaaaattcgcaggtgctttttgaaggcgctcaggggacactccttgatcttgatcttggaacatatccctatgtgtccagcggaatgtcatgcgctgccggcgcggcggttggcggctgtataggcccgcgctccatcgacaaggtgttaggtgttttcaaagcctattccacccgcgtcggaaacggccccctcccctcggaattcgatcccgcgtccgaggacgaactttgccgctttgtccgcgagacaggccgcgagtacggcgtaacaacaggaagaccgcgccgctgcggctacctcgaccttgtttccctgcgctatgcctgccttaccaactctatcgacagccttgttatgacccacctcgacgtatacgacacttttgaggaaatcaaagcgtgcatagcctaccgcataggcgataaaatcgtggaaaattttccggcctcgattgaagaccttaattcggcgaaacctgttctgcggtctttttccggctggaagaaatccctcgctaacgcgcttacttacgaagaattccccgaccatgcgctggaatacataagttttatagaacgtttctgcgaaactccggttgacattgtttctgtcggctatgaccgcaaagcgacgataatacgcaaaagcccctgggtacgttaa

SEQ ID NO: 58308 - protein, 403 aa, Unknown
  Obtained from environmental sample
  DOMAIN (48)...(396): Adenylosuccinate synthetase
  misc_feature (1)..(403): Xaa is any amino acid
MRIEIVRYIVVLRCWAFIVLPQNSDSVGRRGERCAKCWRVRVANAQAFIEYLMSEPQKISIMGAAMVIDPKALFDEIKMLEDRGIDTKGRLFISDRAHIVLPKYIQIDKERDAARKKPIGTTGRGIGITYSMKSERDSIRIADLNWKEKMDELDKADRDFLAPYIDRLLEMSVDLSTYLNHRKNSQVLFEGAQGTLLDLDLGTYPYVSSGMSCAAGAAVGGCIGPRSIDKVLGVFKAYSTRVGNGPLPSEFDPASEDELCRFVRETGREYGVTTGRPRRCGYLDLVSLRYACLTNSIDSLVMTHLDVYDTFEEIKACIAYRIGDKIVENFPASIEDLNSAKPVLRSFSGWKKSLANALTYEEFPDHALEYISFIERFCETPVDIVSVGYDRKATIIRKSPWVR

SEQ ID NO: 58309 - DNA, 639 bp, Unknown
  Obtained from environmental sample
  misc_feature (1)..(639): n is a, c, g, or t
atgcattacaaaaactttgtaacggtaacatacgcgccggccggttatctgaacgataattccattgagcagataaaggctgacattgaaaaagtaggcaagtatatcaagcttgacaagatctaccttgaaacataccgctcggaagttttaatagaacgtgaaaaaatggaagctgtaaaagccctttttatagaaaagggctatactgtttcgggtgggattacaaccacggtaaaacgcacgctgatgggcagtatgtgttttacagatccggaaaaccgcaaaaggcttggagaaatcgccgcctacaccgcgacgctttttgatgaactcatactggacgatttttactttaccaactgccgctgtgaatcctgcatcaaggcaaagggagaccgcgattgggcggcattccgcctcgcgctgatgaacgatatttccgaaaatgtgattattaaaaacgcgaaagcggcgaatccgaaggtaaactgcattatcaagtaccccaactggtacgacagttttcaggctaacggctataacctcgaagacgaatcgaaaatgtttgatatgatctacaccggaaccgagacccgcgatccccattacacgcatcaaaacctgccccgttattga

SEQ ID NO: 58310 - protein, 212 aa, Unknown
  Obtained from environmental sample
  misc_feature (1)..(212): Xaa is any amino acid
MHYKNFVTVTYAPAGYLNDNSIEQIKADIEKVGKYIKLDKIYLETYRSEVLIEREKMEAVKALFIEKGYTVSGGITTTVKRTLMGSMCFTDPENRKRLGEIAAYTATLFDELILDDFYFTNCRCESCIKAKGDRDWAAFRLALMNDISENVIIKNAKAANPKVNCIIKYPNWYDSFQANGYNLEDESKMFDMIYTGTETRDPHYTHQNLPRY

SEQ ID NO: 58311 - DNA, 324 bp, Unknown
  Obtained from environmental sample
  misc_feature (1)..(324): n is a, c, g, or t
atggcttacgggaaccgccgcgtggaccttgtcagcatctcccagtacattctcggggtacgcccttgttttgacggccttatgctcgacccgtgcataccctcaaacatgaaaggctttgccgtcacccgccacttccggggcgcggattatcacataacggtggacaacagcgcgggcgtggaaaagggaataaagtccattacggttgacggtaaaccgctaaacggaggcgcgtcgaacaacgcggcgttaaaaaacgcgctgttacccgtctttggtgataataaagttcataaaatcgttgtaataatggggaggtaa

SEQ ID NO: 58312 - protein, 107 aa, Unknown
  Obtained from environmental sample
  misc_feature (1)..(107): Xaa is any amino acid
MAYGNRRVDLVSISQYILGVRPCFDGLMLDPCIPSNMKGFAVTRHFRGADYHITVDNSAGVEKGIKSITVDGKPLNGGASNNAALKNALLPVFGDNKVHKIVVIMGR

SEQ ID NO: 58313 - DNA, 1794 bp, Unknown
  Obtained from environmental sample
  misc_feature (1)..(1794): n is a, c, g, or t
atgaccaacttccagcgcaacttcagcatcggcgaggttgagattgacggttcgcgcatttaccacaagaccgaataccgcgagcggcgcaaccactacgcggtgtgggcggttaacgttcccgtcgagggctttgacacggacaggcaggcttttctcggcctttacaacggctttgaccatccgcaggttgtttttgagggtaaggcaagaaactccgtcgcgtcaggctgggcgcctattggctcgcaccatataaaaacggaacttggccccggagaatccggaacctttgtgtttgtccttggttactgcgaaaatcccgaagatcaaaaatgggaacgtgtggttcccggtgggaaccatggtattatcaataaaaaaccggcgaatactctccttgcgaaatacggcacggctgaggcggcggacaaggcctttgccgcgcttaacgaatactggaaaaaccttctcggccgctttaccgttgaagcggaagacaagaaaatggcgcgtatggcgggcgtttggaaccagtaccagtgtatggttacatttaacatgtcgcgcagcgcgtcctattttgaatccgggatagggcgcggcatgggtttccgcgattcaaaccaggacctgctgggctttgttcatcttgttcccgaacgcgcccgaacgcgcattctggacatcgcggcgacgcagtttccggacggaagcgcgtatcatcagtaccagccgcttacaaagaggggcaataacgagattggttcagggtttaacgatgatccgttgtggctcatttgcggagtcgcggcgtacatcaaagaaacgggcgactacggcatactcaatgaaaaagtgccgtttgacaacgacgaaaacttagccgacaccctctttgtccacttaaagcgttcttttgattacaccgtaaaccataaaggcccgcacggcctgcctttaatcgggcgcgccgactggaacgactgcctgaaccttaactgtttttccaaaacaccaggcgaatcttttcagacgacagccaactttgagagcggcgtggcggaatcggtgttaatcgcggcgattttcgcgtttaccggccccgattatgccgaaatctgccgccgcaccaaccgcgccgccgaggccgaatacgcggaaaaagaaattgccaaaatgatagaggctgttgatcagcacggctgggacggggactggttcgtccgcgcctatgacgcctacggcaaaaaaatcggcagccgcgagtgcgaggacggaaaaatatttatcgaatcaaacggcttcgcggtaatggcggacataggcataaaggacggacgcgcgcaaaaagccctcgattcagtaaaggaacaccttgattcaaaatacggcattgtcctgttacagcccgcttacaaggattaccatattgagttaggcgaagtttcttcgtatccgcccggatacaaggagaacgccggcatcttctgccacaacaacccctgggttaccatagcggaaaccaggcttggcagggggaaccgggcgtttgagacctacgcgaaaatctgccccgcctaccgggaggacgacagcgatctgcgcagaatggagccctacgtgtacgctcaaatggtagccggcaaagacgcggttaaccacggcgaggccaagaattcatggcttacgggaaccgccgcgtggaccttgtcagcatctcccagtacattctcggggtacgcccttgttttgacggccttatgctcgacccgtgcataccctcaaacatga

SEQ ID NO: 58314 - protein, 597 aa, Unknown
  Obtained from environmental sample
  DOMAIN (22)...(110): Glycosyltransferase 36 associated family
  misc_feature (1)..(597): Xaa is any amino acid
MTNFQRNFSIGEVEIDGSRIYHKTEYRERRNHYAVWAVNVPVEGFDTDRQAFLGLYNGFDHPQVVFEGKARNSVASGWAPIGSHHIKTELGPGESGTFVFVLGYCENPEDQKWERVVPGGNHGIINKKPANTLLAKYGTAEAADKAFAALNEYWKNLLGRFTVEAEDKKMARMAGVWNQYQCMVTFNMSRSASYFESGIGRGMGFRDSNQDLLGFVHLVPERARTRILDIAATQFPDGSAYHQYQPLTKRGNNEIGSGFNDDPLWLICGVAAYIKETGDYGILNEKVPFDNDENLADTLFVHLKRSFDYTVNHKGPHGLPLIGRADWNDCLNLNCFSKTPGESFQTTANFESGVAESVLIAAIFAFTGPDYAEICRRTNRAAEAEYAEKEIAKMIEAVDQHGWDGDWFVRAYDAYGKKIGSRECEDGKIFIESNGFAVMADIGIKDGRAQKALDSVKEHLDSKYGIVLLQPAYKDYHIELGEVSSYPPGYKENAGIFCHNNPWVTIAETRLGRGNRAFETYAKICPAYREDDSDLRRMEPYVYAQMVAGKDAVNHGEAKNSWLTGTAAWTLSASPSTFSGYALVLTALCSTRAYPQT

SEQ ID NO: 58315 - DNA, 1848 bp, Unknown
  Obtained from environmental sample
  misc_feature (1)..(1848): n is a, c, g, or t
ttgattaaaaatgaaaataaaattatgaggggcaacataattggagcgccgtcaaatatatcggacatcgcctatacttttgaagacgaggggatcgccggcatgactccccagggattggaagttctgttaaaagggctggaagcgggacagacgttcctgacggtcacttcttcacggtttaattattacaaaaaaatactggttatatgcctcaacagcccggaggaactggaaaagctgtattattttactgttgacaaaatgctgtaccgtatcaggaaaaatgaagaaataaaaattaatttaactttcggcgggaacggatttccagaaagcgaaaaggctttgattgaatggagcgacaagagcaacaaccagactgttttattaacgtccccgctgggagcctccaacacaattgtcggcaggaacgaagggcaggctgttgttcaggtaaaaagcgcattaatggccaaacccgtggaaataacaatagaagttactgaagaagccgtaggttccgatttttacaaatttgtgtatacgccgatacagcagttaaccaaaaacaaagtggaaatgatccccgtttccatttattacggcaaccagttttataatgattacgacatttacaagcccggcataaagctggagcaggggtattcagccgtcaaagtcgatgtaagcgacacgtcggtggcggaagcggcaatggcgggacaatcgctgcgggttacagcaaaaagcgcggggaagacaacagttacgctgtcgcatgaaatgatacacgaggacgcgaagctgctgattgtcgtatacgaaggcgccgtgccgccatcgtcttcagaaccggttgttttcataccgaaaacccattggctaataccggaggggcatacaagggaaatcgcgttacagactaattccgccgcaggcttaaacggcattatatggaacaaccataacgccgctttgttttccgttgattcaagcgataagtcaaacgcaacggtaacggcaattaaggaaggttcggggacaataaccattgaagcgggcggaaaagttttagacacaatatatgtttcggtttcgtcaacagacaatgtttcaacggtcagcgcggctaccgaaagcattatagtactgtcattggaagacagggattatgggttatatacgacaaaaataataacgaatgggagcggcgaaacaaatatagtatgggaaattgaaaatgaaggaatagcggaaataacgagaaacggaactaaatgttcattatccccggttaattgcggcataaccgaattgaacgtcagggggaaaggatttaacaaaaccattattgtaaaagttgttgagacagaagccgaaaagctgtcggcgaggattatgaatcttgaccagcggtattataaaatcaggaaaggcgggacctatatattaaatccatattacagggtaaaaaaaccaacttgcccggcgtcggcaactccggtgtatgacaatagagttatacagtgccagcagacaagcgcgggcatcacggtaaccggaaagaacgtcggcatggagcggttaagaatatataacggcgactgtgaaaacaacgtggagattgtatttgaagttgacgaaacggcgtcgggcggtttcacggaagtaaaaaatatagcgtatatgaccacggatacaccggctgttattatccagcctggccaggttgatcactatgtttttattaatgtaataggcgaatacaagggcggcgagaatgattttcagtggagaagcgattcaagctggataacgcttaacgctttcggcaggtacgcctga

SEQ ID NO: 58316 - protein, 615 aa, Unknown
  Obtained from environmental sample
  misc_feature (1)..(615): Xaa is any amino acid
MIKNENKIMRGNIIGAPSNISDIAYTFEDEGIAGMTPQGLEVLLKGLEAGQTFLTVTSSRFNYYKKILVICLNSPEELEKLYYFTVDKMLYRIRKNEEIKINLTFGGNGFPESEKALIEWSDKSNNQTVLLTSPLGASNTIVGRNEGQAVVQVKSALMAKPVEITIEVTEEAVGSDFYKFVYTPIQQLTKNKVEMIPVSIYYGNQFYNDYDIYKPGIKLEQGYSAVKVDVSDTSVAEAAMAGQSLRVTAKSAGKTTVTLSHEMIHEDAKLLIVVYEGAVPPSSSEPVVFIPKTHWLIPEGHTREIALQTNSAAGLNGIIWNNHNAALFSVDSSDKSNATVTAIKEGSGTITIEAGGKVLDTIYVSVSSTDNVSTVSAATESIIVLSLEDRDYGLYTTKIITNGSGETNIVWEIENEGIAEITRNGTKCSLSPVNCGITELNVRGKGFNKTIIVKVVETEAEKLSARIMNLDQRYYKIRKGGTYILNPYYRVKKPTCPASATPVYDNRVIQCQQTSAGITVTGKNVGMERLRIYNGDCENNVEIVFEVDETASGGFTEVKNIAYMTTDTPAVIIQPGQVDHYVFINVIGEYKGGENDFQWRSDSSWITLNAFGRYA

SEQ ID NO: 58317 - DNA, 621 bp, Unknown
  Obtained from environmental sample
  misc_feature (1)..(621): n is a, c, g, or t
gtgtacattgccggggactgcaaacagggagccgccaccgtggtaaaggccattgcagacgccaagatcgcggcggcggacattctgcaaaagcttaaactggaagccgatttttcaacaaagccctcatgcgccacggtcactgatatttccggtctctaccataagaagggggtgatcagcgaattaaaaccggacaacaccgacgcttaccgctgtctttcgtgtaacagcctctgcgaggtctgcgttgacgtgtgcccgaacagagccaatgtgatggcggaactgccattggaaagcggcttggggggtcatcaggttctgcatgttgacagaatgtgcaacgagtgcgggaactgcgccgttttctgcccccatgccggaaagccgtataaggacaaattcacgatcttctgctgtgaagaggatttttccgaaagcgaaaaccccggcctgcttaaaacaggcgcggatactttcaggattcgtctggaagataaatccacgcttgactaccgcaggggagaggacacgatccccaaacaatggatagcgttgattgatgttattctgtcaaagtatgagtatttgctgattgctcatttttccatgccctga

SEQ ID NO: 58318 - protein, 206 aa, Unknown
  Obtained from environmental sample
  misc_feature (1)..(206): Xaa is any amino acid
MYIAGDCKQGAATVVKAIADAKIAAADILQKLKLEADFSTKPSCATVTDISGLYHKKGVISELKPDNTDAYRCLSCNSLCEVCVDVCPNRANVMAELPLESGLGGHQVLHVDRMCNECGNCAVFCPHAGKPYKDKFTIFCCEEDFSESENPGLLKTGADTFRIRLEDKSTLDYRRGEDTIPKQWIALIDVILSKYEYLLIAHFSMP

SEQ ID NO: 58319 - DNA, 1290 bp, Unknown
  Obtained from environmental sample
  misc_feature (1)..(1290): n is a, c, g, or t
gtggcgactacgatcctcaaacccggcggctatgagaggctgcttcaattggccgagcttgcggctgaaactgtgagcgacatatctgtcgccgcgcccattaatgtaaatgcccttaacgcattaacggaatccctgccaaaaaaaagcagataccgcaaagagtaccgccagattggtttgcggaaaaccgagagcgctttacccctgtttgactgcgccaaggctccctgcatggatggcggctgtcccattcaccagcgtatacccgaataccttgccgctgtcgcagccggtaattatgacgaggctttcaggatcatcgcggttgacaacacggcggtttcaattaccgggacgatctgcgatcaccagtgccagtacaggtgcacgcggcaggattatgaggatcccctgcaagtaaggaaggccaagctcattgccgcggacaaggcgcaggcggcgtttacttcttcgctgcaaagcccgaaaaccaaaacagataaatcggcggcggttataggcgcgggaccggcgggtatcgccgcggctgtttttctgcggcgcaacggcgtgcctgtgacggtgtatgaaaaacgggataaagccttcggcattgtgcgttatgtgattccttcattcagaattcctgaagaagctatcaaccgcgattttctgacggctgaaaaactcggcgttgaattcctgtttaaccaggcggaagattattccattacagaactgcaaaaaaaacataattttgtcgtcattgccacaggggcctggaaaacaggctctgccgtggtaaaacagggccaggaaaaaatcattgatgcgttacgtttccttgaggactccaaaaaaacaaattgcggccttgacctgggaaaaagggtcgcagtcataggcggcggggacgtggcaatggactgcgccagggccgcgaaacggaacaagggcgtggaatctgttacaatcgtttaccggcgtaccagggaattcatgccctcccaatacgaggagcaggaactggccatcgcggacggagtggaaatcaaagaacttttagctcccgaaatctgggttaacgggattctcagttgcgaggtaatgcgcctcggcgattacgattcgtccggcaggcggggtattgaggggacgggcaaaaaagaacgcttgagttttgatacggtaataggcgcggtgggcgcgagggttgatactgaagcctttacgcgtaacggcataaaactaacggggaatggtttgccgaactcggcgataacctga

SEQ ID NO: 58320 - protein, 429 aa, Unknown
  Obtained from environmental sample
  DOMAIN (170)...(376): Pyridine nucleotide-disulphide oxidoreductase
  misc_feature (1)..(429): Xaa is any amino acid
MATTILKPGGYERLLQLAELAAETVSDISVAAPINVNALNALTESLPKKSRYRKEYRQIGLRKTESALPLFDCAKAPCMDGGCPIHQRIPEYLAAVAAGNYDEAFRIIAVDNTAVSITGTICDHQCQYRCTRQDYEDPLQVRKAKLIAADKAQAAFTSSLQSPKTKTDKSAAVIGAGPAGIAAAVFLRRNGVPVTVYEKRDKAFGIVRYVIPSFRIPEEAINRDFLTAEKLGVEFLFNQAEDYSITELQKKHNFVVIATGAWKTGSAVVKQGQEKIIDALRFLEDSKKTNCGLDLGKRVAVIGGGDVAMDCARAAKRNKGVESVTIVYRRTREFMPSQYEEQELAIADGVEIKELLAPEIWVNGILSCEVMRLGDYDSSGRRGIEGTGKKERLSFDTVIGAVGARVDTEAFTRNGIKLTGNGLPNSAIT

SEQ ID NO: 58321 - DNA, 1395 bp, Unknown
  Obtained from environmental sample
  misc_feature (1)..(1395): n is a, c, g, or t
atgcgggagatacttcttgccgtaatcaacgccaagtggatacacccctcgcttgccctgcggcttcttaaagcgaacctgggccagctggaaaaccgctgtgaaatagtcgaatttgccctgcgccagcccttatgcgaaaagaccgccccaatcctcgccgcgaagccaaaaatactcggcctttcggtgtcaatctggaatcacctcgccacgctggaactgctgaaaaaactgcgggaagcgtgggggactgatcgaaagccagtcatcatcctcggcgggccggaagcgtcgtatctgccccaagcctctgaaatatttcagtttgccgattattgtatccggggtgaaggggaaaccgcgtttcgggaattatgcgagaaaattttaaatgaggatgatgtaattgttaataacgaatttaatacagttaacgtaacgaaaattaaaagcggctatagcttgtataccgatgaggatttacgcaaaaaacttttatatgttgaagcaagcaggggctgtccctttggctgcgagttttgccaaagcgccatagtcgccagcgccatctgcggcaccatggtgcgggaatttccattggagccgtttttctctgaaattgaggatctaatacgccggggcgcgaaaacatttaaattccttgacaggtctttcaatcttaatattgaaagaagcataaaaattatggaattttttttatataatattaacgaacaaagcaaacaaaacaaaaagccccttgtcgtccattttgaaatggttccctcccgctttccgcccgaactgatagatataatagcacgcttccccccggacaccctcaggctggaaatcggcatacagacgctcaaccctgaagtttcagcccgaataggcaggccctcaaaaccggaacaggaacttgagacgctccgcgtccttgcggaaaaaaccaacgccattatgcatgttgatcttatcgccgggctgccggcagagggcatggaatcctntggcaaaggctttgacgcgctgtgggccgcgcttgcgtccggcactcattacagcagagttgaaatacaactgggcattttaaagctgctgcccggcgcgccgattgcgcggcatatagaaccctttagcttgatgtttaattcattgccgccctatgagctcattgagagcgccgccattcccgcgtccagtctggatcggataaaaaatttcgcccggttttgggaactgatcgtcaaccgggggcttttggatataggcccatccccggtttttgaccgcttcatggcgctctctgactgtcttttagccaagtttggccgcaattggggcatagacaaatgtcagttgcaaaaacagataacaggtaacaggtaa

SEQ ID NO: 58322 - protein, 464 aa, Unknown
  Obtained from environmental sample
  DOMAIN (3)...(129): B12 binding domain
  misc_feature (1)..(464): Xaa is any amino acid
MREILLAVINAKWIHPSLALRLLKANLGQLENRCEIVEFALRQPLCEKTAPILAAKPKILGLSVSIWNHLATLELLKKLREAWGTDRKPVIILGGPEASYLPQASEIFQFADYCIRGEGETAFRELCEKILNEDDVIVNNEFNTVNVTKIKSGYSLYTDEDLRKKLLYVEASRGCPFGCEFCQSAIVASAICGTMVREFPLEPFFSEIEDLIRRGAKTFKFLDRSFNLNIERSIKIMEFFLYNINEQSKQNKKPLVVHFEMVPSRFPPELIDIIARFPPDTLRLEIGIQTLNPEVSARIGRPSKPEQELETLRVLAEKTNAIMHVDLIAGLPAEGMESXGKGFDALWAALASGTHYSRVEIQLGILKLLPGAPIARHIEPFSLMFNSLPPYELIESAAIPASSLDRIKNFARFWELIVNRGLLDIGPSPVFDRFMALSDCLLAKFGRNWGIDKCQLQKQITGNR

SEQ ID NO: 58323 - DNA, 462 bp, Unknown
  Obtained from environmental sample
  misc_feature (1)..(462): n is a, c, g, or t
gtgcctggaagcggcgaggaaatcgcggaaatccgcaaagtgaataccgttcttttgcgccaatcgatacgcggcgcctcccagattagcttctcccggtccggcggacccggcgggcagaatgtcaacaaacttaatacaaaagtgacgctgcgcctgcgcctgaccgatattgcgggcctctcggacgccgaactggaaagggcgagggtagtgctggcaaaccggattagcggcggggacgagattgttatcagctctgacgaggagcgctcgcagcgtaccaatctggaaagggcgtattttcgcgttgaggcgctaataacccaggcggctcggctgcccaaacaccgccgccctacaaaaccgtcaaaggccagccgcgagaaaaggctccgtgtaaagcaactgcaaagccgcaaaaaagagttaaggcgtccggagcatacgccggaagattaa

SEQ ID NO: 58324 - protein, 153 aa, Unknown
  Obtained from environmental sample
  DOMAIN (7)...(145): Peptidyl-tRNA hydrolase domain
  misc_feature (1)..(153): Xaa is any amino acid
MPGSGEEIAEIRKVNTVLLRQSIRGASQISFSRSGGPGGQNVNKLNTKVTLRLRLTDIAGLSDAELERARVVLANRISGGDEIVISSDEERSQRTNLERAYFRVEALITQAARLPKHRRPTKPSKASREKRLRVKQLQSRKKELRRPEHTPED

SEQ ID NO: 58325 - DNA, 651 bp, Unknown
  Obtained from environmental sample
  misc_feature (1)..(651): n is a, c, g, or t
gtgcgttcgggtctgggcctgccgccgcggccctcagccgctgttgccggcctcgacccagcctctcttcccggccgcccgccccagctctgcaagggctgcccccacgctgacagttatgagactatcaagaaagtggtggaggaactggatccgagggaaggccaccccgatgtggggattaactcggacatcggctgttattcgctcggcgccgctccgccctaccaggttcccgaaagcatagtctgcatgggcgcgtcggtgggcatggcaaaaggcgcggccgacgcggggttgcgctacagtatcgcggtaatcggcgactccacgttcatccattccggtataaccgcccttattgacacggttgcgtctgacacccccatgacccttatcatacttgataattccatcgtggcaatgacaggctgccagccgaccatggtcccttcggataagctccgcagtctgctccttggctgcggcgtaaaagaggaacacctgttggaactggaagcgaaaaaacagcttgtcggagagaacgccgcgaggcttaaaagagaaattgaataccgcggcctttcggtagtggtattcaaacgcgagtgcctggaagcggcgaggaaatcgcggaaatccgcaaagtga

SEQ ID NO: 58326 - protein, 216 aa, Unknown
  Obtained from environmental sample
  DOMAIN (64)...(200): Thiamine pyrophosphate enzyme, C-terminal TPP binding domain
  misc_feature (1)..(216): Xaa is any amino acid
MRSGLGLPPRPSAAVAGLDPASLPGRPPQLCKGCPHADSYETIKKVVEELDPREGHPDVGINSDIGCYSLGAAPPYQVPESIVCMGASVGMAKGAADAGLRYSIAVIGDSTFIHSGITALIDTVASDTPMTLIILDNSIVAMTGCQPTMVPSDKLRSLLLGCGVKEEHLLELEAKKQLVGENAARLKREIEYRGLSVVVFKRECLEAARKSRKSAK

SEQ ID NO: 58327 - DNA, 1095 bp, Unknown
  Obtained from environmental sample
  misc_feature (1)..(1095): n is a, c, g, or t
atgtcggtaatcaaagccgttgggcaccgcgttctgcacggcggaatgaaatttacaaaaagcgtcatagttgatgacgcggctatggcggcttttaacgaggttaaggatttggggccgcttcacaaccccgcgaatattatgggcatagaggcggcgcagaaagttctgccgcatgtgccgcattgcgcgattatggacaccgcgtggcatcaaaccatgccgcccgagtcctttatgtacgcggtgccgaaagaatggtacgaaaaatttcaggtgcgccgctatggtttccacgggacaagtttcctttataccgcaaaacgcgcggccgttttattgggacaggatcctttcaaaacaaatgtggtaatctgccacatcgggaacggcgcttcggtgaacgctgtcaaggacggctgctcttttgatacgtctatgggcattacccctcttgagggacttgtcatgggtacgcgctcaggcgatattgacgcggccctgcccttctacgttatgcgaaaaacaggcatgaacgacgttgaaatggaagccgctcttaataaaaaatcggggcttttgggattgacgggcaaattcgcggacaggcgcgatattcaggcagccgctgtcggcggcgataaacaggctctgctcgctcaatttatcgaagcgcaccgtgtaaaaaaatacattggcgcttactgggcggttctgggcagggtggacgctcttgtccttaccgcgggtgtcggcgagttcgcgtggttcatgagggaaaaaattcttgacggactggaaggcatcggcatcgtttacgatccgcgcaagaataaaatatcatgcacaagaaataccgagaccttgatcagcaagccggaatcaaaaataccgatttttgttattccgactgatgaagaattggtaatgacagaggacgcatttgcgcttatgcagggaacttatgacactcacacgaattttacttactccttccagagcaaagactatgtgaataagggacgagccgaaggattgaaacacgatcttgaaaagaatcccgacattgccgagataattgccaaaccaaaatga

SEQ ID NO: 58328 - protein, 364 aa, Unknown
  Obtained from environmental sample
  DOMAIN (1)...(312): Acetokinase family
  misc_feature (1)..(364): Xaa is any amino acid
MSVIKAVGHRVLHGGMKFTKSVIVDDAAMAAFNEVKDLGPLHNPANIMGIEAAQKVLPHVPHCAIMDTAWHQTMPPESFMYAVPKEWYEKFQVRRYGFHGTSFLYTAKRAAVLLGQDPFKTNVVICHIGNGASVNAVKDGCSFDTSMGITPLEGLVMGTRSGDIDAALPFYVMRKTGMNDVEMEAALNKKSGLLGLTGKFADRRDIQAAAVGGDKQALLAQFIEAHRVKKYIGAYWAVLGRVDALVLTAGVGEFAWFMREKILDGLEGIGIVYDPRKNKISCTRNTETLISKPESKIPIFVIPTDEELVMTEDAFALMQGTYDTHTNFTYSFQSKDYVNKGRAEGLKHDLEKNPDIAEIIAKPK

SEQ ID NO: 58329 - DNA, 1053 bp, Unknown
  Obtained from environmental sample
  misc_feature (1)..(1053): n is a, c, g, or t
ttgagttataaaacagaattgttatgtatcggcaatccgattgtcgatgtatttgtaaacattgataaaagtcttgcgttaaagtacggcattctcgatcctgttcagcatatcgacagcgataaagttgaaaagctgctgaaagaaccgactgttaaatttgccaacgctgtaaaaagttctggcgggggagcggcgaatgtcgcgaaaatcgccgccatgcttggaatggacgccgtgttttgcggctgtgccggacaggacgaacttgcggcaatttttgaggaagagataaaagacgcaggcgtttcttccatgctgataaaatccaatgaaaagacagggttgtgttttgcatgtaacgtcgagggggaaatgcgttttgccgcaagtccccgcgcggctcttgagtttaacgaaacccatgtaagcgatgaattggtagtcggcgcggaagccattgttctggacggctttatcctcgaccgccgtccgctagtgcagtctattttattgaagtcaagccacttgggaatacccgtcgccctagacgttgcttcaatcatgcaggtaaaaagcaaagccgaagaaatactgacatacagcagacagtttcccctatttatttttatgaacgccgatgagacaattactttttataacacgataaaaaaaggtcctgaagaaagactcgatattacagatagggaaaaggaagcgttaatcatgcgagacatttgccctatgctgaaaatgatcacagacggtgaattatatccgattatcgtcataaaactcggcggcagaggagcgctggtagttgcaggcggaaacatataccgcgaagaaacctataatgtcgcttcgccgaaaaacgcagtaggagcgggcgacgctttttgcgccgcctttatttccgcatggataaggcaaaaatccctctccgattgcgccgcccttggaaacaaagtcgcaagggaaatacttgaagtcccgggaacgcacatcaagatcggaaaattaaaatcgttcgcgaagactttgcaaagataa

SEQ ID NO: 58330 - protein, 350 aa, Unknown
  Obtained from environmental sample
  DOMAIN (23)...(341): pfkB family carbohydrate kinase
  misc_feature (1)..(350): Xaa is any amino acid
MSYKTELLCIGNPIVDVFVNIDKSLALKYGILDPVQHIDSDKVEKLLKEPTVKFANAVKSSGGGAANVAKIAAMLGMDAVFCGCAGQDELAAIFEEEIKDAGVSSMLIKSNEKTGLCFACNVEGEMRFAASPRAALEFNETHVSDELVVGAEAIVLDGFILDRRPLVQSILLKSSHLGIPVALDVASIMQVKSKAEEILTYSRQFPLFIFMNADETITFYNTIKKGPEERLDITDREKEALIMRDICPMLKMITDGELYPIIVIKLGGRGALVVAGGNIYREETYNVASPKNAVGAGDAFCAAFISAWIRQKSLSDCAALGNKVAREILEVPGTHIKIGKLKSFAKTLQR

SEQ ID NO: 58331 - DNA, 2211 bp, Unknown
  Obtained from environmental sample
  misc_feature (1)..(2211): n is a, c, g, or t
atgaatcacgcggagaccacacagacggccgcaacgacggctttcctcttcccgctcgacgggcgcgaactcaagatcgggcgcgacgcgtcgtgcgacataatcctcacgggcatcggggtgtctggccgccacgccgttgtacgatgcgacgctacgcggcctacgattacagactccaacagcaaatgcggcacctctttagacggcgaacccattacggaagcggttttacggagcaattcggcgctgacgataggcgtaaacgtgctacgggtcgacatcgacgaggtttctatcagttttacgcttttgaactccaacgtcgacgactcggcgcctgacggcgcagtgggcgacctaataaggatcgggcgcgacgcggctaacgacatctgcctgccccaccccatggtatcacgcttccacgcagtcgtcaagaggggcgctgacgaactcaccgtcattgaccagggcagcgccaactcaacctacgtcaacgggcgctcggtgggaacgcgttcgcttcgcgagggcgacgtcgtacatatcgggccgttcaggttctacgtgacgggcggagagttccgcagagcagacgacataagcaagatacgcatagaggcccacgctctgggggtgagactaggtggaaagagactattagacaatgtaaacttgacgatagagccgggctatttcgtcgctctcttggggccgtcgggcgcggggaagtccacgctctgcaaggtgctttcgggacagctcgccccgacgaccgggcggctgtttatgaacggtttccccgcagcgaagttcggcgcggtcttcgcccgcagcatggggtacgtgtcgcaacagatattgctacggccggaactgacggtgtgggagacgctctccgaccaaagcctgatccgcctccccgacgacagcaccgagaaagagcgccactgccgcgccgccgaggtgcttgaactcatggaactaacgaaccggcgcgacacccgcgtgtctaacctgtctggcggcgaggcgcggcggctgcacgtgggcgtggagcttttggcgtcgccctccgtggtgatcctcgacgaaccgctcgccgggcttgaccccggactgatcggaaagttcatgcagatattcaggcgcataagcgacaaggggcacacgctcatcctcatcacgcacacgcttgagcggcttgagctttgcgacaggttagtgtacatacagaccggcaagatactcttttccggcgcgcccgacgctatttgcgggcatttcggcgtaccgtccctatcgcaggtctacgagaagtccggcgacggcactgtcgtcgacgccgccgatggcggccggccggcgggcgacgctgacgcgtcaactcacgccgcagccgcgtccgcgcaggatttgccccgccgcgattggacggcgacgctgcgacacccgcttcgggcgctgagattcttctcccgccaatcgtacacgctcgcggagcggtacgcgaaggtatacgtgagggataagcgcaacatgctgcttttgatggcgcagacgccgctcattacgctgcttctcggctttgtatacaagatgtccataatgctgttcccgatgagtttctacttctgcctcacggtgacgggcatctgggtgggcggactcgacgcggtgcgcgaggtggcggcggagctgccgctcttggcgcgggaggcgaagtgcgggatgaaccgctgggcgtacatcatagcgcggataaccgtcgccgccgccctatccgccgcgcaggcgatactgtttacggcgtcggcggtcgtcatctttaaacaactggagttttcgtggccgctgctgatactgctctacgtatcgatattcgccggaaacctcctggggcttgccgtcagcgtatgcagcggcagcgtggggcgggctataagcacgcttcccatagtcctcatcccgcagatattcttttcggggatattagtactgttcgaacaaatggccgaactcggccggcatatctcgcgcctgacgatctcgcgtccggtctccggaattatgaacaaggtcttcttcttggacaggccgcttttctggcacagcgattggacggagttaattttgctttgcgccgggttaattactatattttggatagcgctaaggagccgcaccggccgccgcggcgcagcttag

SEQ ID NO: 58332 - protein, 736 aa, Unknown
  Obtained from environmental sample
  DOMAIN (495)...(697): ABC-2 type transporter
  misc_feature (1)..(736): Xaa is any amino acid
MNHAETTQTAATTAFLFPLDGRELKIGRDASCDIILTGIGVSGRHAVVRCDATRPTITDSNSKCGTSLDGEPITEAVLRSNSALTIGVNVLRVDIDEVSISFTLLNSNVDDSAPDGAVGDLIRIGRDAANDICLPHPMVSRFHAVVKRGADELTVIDQGSANSTYVNGRSVGTRSLREGDVVHIGPFRFYVTGGEFRRADDISKIRIEAHALGVRLGGKRLLDNVNLTIEPGYFVALLGPSGAGKSTLCKVLSGQLAPTTGRLFMNGFPAAKFGAVFARSMGYVSQQILLRPELTVWETLSDQSLIRLPDDSTEKERHCRAAEVLELMELTNRRDTRVSNLSGGEARRLHVGVELLASPSVVILDEPLAGLDPGLIGKFMQIFRRISDKGHTLILITHTLERLELCDRLVYIQTGKILFSGAPDAICGHFGVPSLSQVYEKSGDGTVVDAADGGRPAGDADASTHAAAASAQDLPRRDWTATLRHPLRALRFFSRQSYTLAERYAKVYVRDKRNMLLLMAQTPLITLLLGFVYKMSIMLFPMSFYFCLTVTGIWVGGLDAVREVAAELPLLAREAKCGMNRWAYIIARITVAAALSAAQAILFTASAVVIFKQLEFSWPLLILLYVSIFAGNLLGLAVSVCSGSVGRAISTLPIVLIPQIFFSGILVLFEQMAELGRHISRLTISRPVSGIMNKVFFLDRPLFWHSDWTELILLCAGLITIFWIALRSRTGRRGAA

SEQ ID NO: 58333 - DNA, 1554 bp, Unknown
  Obtained from environmental sample
  misc_feature (1)..(1554): n is a, c, g, or t
ttggatctgccttttgacgaccttcccctgccggacaaagagtctgcaaatgaaccgcctccagccgccgagcccgaaagcgtagaagcggcgccaccagaggatgcaggcggcgaaccatatcagcagcctgaagcagaaccctcaggcggaacggatatttttggcgatcttagcgacctattgggagggggtgcagaaaatcttcctgttgatgaagttccggtcgaaacggatttaggcgaaccttttccttccagtcaagaggacactgattttggcaatttcattgacacaataccggatgattttgccaacgaagaaccccctacagaagccccaggtgccgaagcctcaggtatagatgatattccaccggacactgaaatctccaacggcgaaggggtagtcccccatgaacttttaaacggctttgccgaggaagtggaggctgaacgggcctctaaggggaaaaagggagccaaaaatgaagtccctgatgaagatttctcagaccagagttttgacgatcttgatttatccaatcttggccagactaacgaagatactgatagtcaaaacctggacgactttgctttgcctgaccaggggcaagaagaccaggacacgggccttcccgattttgacctggatagccttatgtcttccgaggatgaaaccgcgacggaagattcgggagaagccgacagtactgataacgccgatatgggcctgccggattttcctgattttgaaaccggcgaaaacatggagctctacggagaagataccccagacagtcatgaaaaggctgaaacagattcagcaaactttgacctgggggatattcctgattttggcgacattgaaagccaggaacaacccgccgagtccgaaggggaagctgtttcagaggaagcgggagataccggatcgtctgatttgccggagtttgacctggtggacattcctgattttgaagataccggaagccccgtgtcttcctcggacgtagaatcttcttcatttgattatacgggtacagaaagtgatgaagatagttttgattttggcagcgaacctcctgattccggcactgaggcgacactggaagacatatctgaagatggttttgacagtttcagtccggattccggttcactgggcgatggctttgatgatataggcagtttagatgacttcggcaacctggatgatcttgggattccgagtttagacaccggttttggtgcaaaaacaatgggaaaaggcaaaacaccggtcaagaaaggcaagacctcaaagggcggggcggacgatgttgaggaaataagccttactatggaagagctggaacaattccaggaaacactttcatcataccccctgaacctgagaatagcctgcgaagagctaattgctgaaaaagccgttgtaccggaacagatgtcccgcttgattagtctactgatagagggagcgccagccactgaaaccgccgctctggcagggaaattactggaaaaaaaccataactattccaaaaggctatga

SEQ ID NO: 58334 - protein, 517 aa, Unknown
  Obtained from environmental sample
  misc_feature (1)..(517): Xaa is any amino acid
MDLPFDDLPLPDKESANEPPPAAEPESVEAAPPEDAGGEPYQQPEAEPSGGTDIFGDLSDLLGGGAENLPVDEVPVETDLGEPFPSSQEDTDFGNFIDTIPDDFANEEPPTEAPGAEASGIDDIPPDTEISNGEGVVPHELLNGFAEEVEAERASKGKKGAKNEVPDEDFSDQSFDDLDLSNLGQTNEDTDSQNLDDFALPDQGQEDQDTGLPDFDLDSLMSSEDETATEDSGEADSTDNADMGLPDFPDFETGENMELYGEDTPDSHEKAETDSANFDLGDIPDFGDIESQEQPAESEGEAVSEEAGDTGSSDLPEFDLVDIPDFEDTGSPVSSSDVESSSFDYTGTESDEDSFDFGSEPPDSGTEATLEDISEDGFDSFSPDSGSLGDGFDDIGSLDDFGNLDDLGIPSLDTGFGAKTMGKGKTPVKKGKTSKGGADDVEEISLTMEELEQFQETLSSYPLNLRIACEELIAEKAVVPEQMSRLISLLIEGAPATETAALAGKLLEKNHNYSKRL

SEQ ID NO: 58335 - DNA, 1221 bp, Unknown
  Obtained from environmental sample
  misc_feature (1)..(1221): n is a, c, g, or t
ttggaagccgaacattccagttttgcttatatttttgttcataacttccttcccgtttttaggctccttatggctattgctttagtcgccctttccgccggctacctttgctggcggtatatctatatgcccataaaggccgaaagaatatataaacttggaatagagcggattgaagccggagaatactccagggcgaatgaacggtttgtagaggcctataaaatacaccaaaagaagccgtggttttacacttacgccagggccttcagagacgcaaggcaatataccctcgcggaagaaaagtacaaagaactgcttaattttacagcctcaaaaaacaagcgtggaattcctgaaaaagcggccgttttggaatatgccgacctggaaacaaattacataggggattatcagacagccgacagcataataaggcgcaatattttggattactttcctatggacaaggacggccttcttgccctgggggataacaaccttatctggggtgaatacgataaggaccgccttgaggacgcccgtgaagcgtacgccaagctgatagaacgttatggccgcaccgatccgcttttggaaaggatgctgaagtattttatccgtacggatgatctgggacaggtgctggccctccaaaactattttatgttctctgagaaaaggatcatatccgccgccacactggccgaaatgggaggttaccttctggacaagcggcttgaaaaagtccgcggcgtcccgaatgagtatctcgatcaaattggcggaatcagacagatactcttacgcgcaataaagcaggatcctatgcttccagagtcttattatcatctcgccaggtactacaactattatgaaaatcctacggacgaaaggcttacacttgaagtagctgtgcgcgtttttgattttgcaaaggaagaaagcgcaaaacgaatcggctatcatattaataccctgcgccgttatgcggaagttctgattaacagtaaggaatttttccccgccgaagaaaaccttattaaggggattaatatataccagaacgggctgtcccgcaggctgctgacaccctcccctgaatatggcaagttatacgccgaccttggggatttggaattctttgtaaaagacnggggacatgcagactgctctggactattacaactacagcgaacaaaacggctgggctcctcctga

SEQ ID NO: 58336 - protein, 406 aa, Unknown
  Obtained from environmental sample
  misc_feature (1)..(406): Xaa is any amino acid
MEAEHSSFAYIFVHNFLPVFRLLMAIALVALSAGYLCWRYIYMPIKAERIYKLGIERIEAGEYSRANERFVEAYKIHQKKPWFYTYARAFRDARQYTLAEEKYKELLNFTASKNKRGIPEKAAVLEYADLETNYIGDYQTADSIIRRNILDYFPMDKDGLLALGDNNLIWGEYDKDRLEDAREAYAKLIERYGRTDPLLERMLKYFIRTDDLGQVLALQNYFMFSEKRIISAATLAEMGGYLLDKRLEKVRGVPNEYLDQIGGIRQILLRAIKQDPMLPESYYHLARYYNYYENPTDERLTLEVAVRVFDFAKEESAKRIGYHINTLRRYAEVLINSKEFFPAEENLIKGINIYQNGLSRRLLTPSPEYGKLYADLGDLEFFVKDXGHADCSGLLQLQRTKRLGSS

SEQ ID NO: 58337 - DNA, 2487 bp, Unknown
  Obtained from environmental sample
  misc_feature (1)..(2487): n is a, c, g, or t
gtggtttggcaggtgcaatccatagaagattatcttcatgttttacgtccgtatatcaggcaggcaaaacaggacaggcgcaggcttgtttacttccggttcgggaatcatgagccgttaatggcggataacgaaccttccgttgtatatcagttagataaatcggaaggttttgaactattcgccctgaaagtccatgatattattgaccgcgaaggactaaaggctttctatgtgtttgactgccttagcgacctgcttacaagctggtgttccgacatgatggtaggcaatttttttcgcataacctgtccttttctgtttatacttgataccatcgcatatttcgcccttatccgcggcgctcatacccacgacacgattgcccgtatacgcgataccacccagcttttactggatgtgtacaatgttgacgataaattttacattcacccgctcaaggtatgggaacgttattcaccaacgatgttttttccgcatttaatagacggcgataaagctttttcaattacctccagcgcagatgccgcaacattgttttcacgtgtcagccgaggaggaaatcccagagatcattggcatattacatttgatcacgcgcgctcatttctaacccgcgatgaaaattctaaggaagaaatgaaaaaacttcttgcgggctggattatcggcaaggaattacgcataacaaatttgattatcaagtatttcaccctcgctgatattctggacattgcggagagggaaataggaacaggttttatcggcgggaaaagcgtcgggatgcttcttgcaagaaaaatccttgaaaaggacgccggtgatgctatacgaaatcattgggagccgcacgattcatattacctgggttctgatattttttatacttacattgtacataacggattatgggatttacggattaaacaaaaaacaacagaaggttattttaccgtagcgaaagaactgcaggaaaagataaggcagggcaaatttcctgataatatcagggaacagtttatacagatgctggaacatttcgggcaagcgccgattattgtccgctcaagctccctgcgcgaagatacttccgtaacgcgttgccgggaaaatacgagagcgtcttctgcgcaaatcaggggacaccgggacgagcgatactccgcgtttgagcaggcggtacgcacggtatacgccagcaccatgaacgacgacgctcttgcgtaccgccaaagacgcggacttacgaatcaggacgaacaaatggcgattcttgtacagcgcgtatcgggcaaccactacaacgaattattttttccgcacattgcgggcgtcggcaactcaaccaatttgtatgtgtgggacaagtcgatgaacccggaagccggaatgttaaggcttgtattcggtcttggaacgcgcgctgtggatcgcgtatccggcgattacgcgaaaattgttccgctggattgcccgaacaagggaccgccagtaagctacggcgatgaaaaaaagttttcccagcataaagccgacgtgcttgatttagccaacaacaaattgacagacgcgcctcttgagaaactggcggacggagatttaaaaaccgacaaagaaatattttttacgacggataccgaggcgataaaccgaatgcgcgaattaagaataaattccgcgtcaactccgcgaattcctgattttagaaaactgttaaacgaaacgggctttcccgaatttgtccgctccgcgcttttaacattacgcacggcatacaactaccctgtcgatattgaatttaccgccaactttacgccggagggagaattcaggtttaatcttttgcaatgccgcccgttacagacaaagggaatcggaagagtcatggaagcccctcagccaagacaggagcatattttcttctcgtctacgggcgactttatgggcggcaatgtaaggctgtattttgattatgttgtttttgtaaaagtgacggaatatcttgagctgacagatcaggataaatatcaggcggcgcgtacggtcggacttatcaatcagaaattaaaagataaaacggttttattaatgggaccgggaagatggggaacaactacgccttcccttggggttcccgttcatttcagcgagttatgcaacatggcggccctgtgcgaggtatcgtatctgaaagccggcatagtgccggaattgtcttttggcagccacttttttcaagacatcgtggaatctgatattttctatgccgctgtttttgacggcgaaccgggtatcacgttctgtcccgatcaaattttatcgaaacaaaatctgcttgcggaaattctgccggaagaaaaaaaatgggaatcggtaatacaaatagcgcaaacgcccggtttgatattacattctgatattactaatcaaaaactacttatatattgggataaagatgcagtataa

SEQ ID NO: 58338 - protein, 828 aa, Unknown
  Obtained from environmental sample
  misc_feature (1)..(828): Xaa is any amino acid
MVWQVQSIEDYLHVLRPYIRQAKQDRRRLVYFRFGNHEPLMADNEPSVVYQLDKSEGFELFALKVHDIIDREGLKAFYVFDCLSDLLTSWCSDMMVGNFFRITCPFLFILDTIAYFALIRGAHTHDTIARIRDTTQLLLDVYNVDDKFYIHPLKVWERYSPTMFFPHLIDGDKAFSITSSADAATLFSRVSRGGNPRDHWHITFDHARSFLTRDENSKEEMKKLLAGWIIGKELRITNLIIKYFTLADILDIAEREIGTGFIGGKSVGMLLARKILEKDAGDAIRNHWEPHDSYYLGSDIFYTYIVHNGLWDLRIKQKTTEGYFTVAKELQEKIRQGKFPDNIREQFIQMLEHFGQAPIIVRSSSLREDTSVTRCRENTRASSAQIRGHRDERYSAFEQAVRTVYASTMNDDALAYRQRRGLTNQDEQMAILVQRVSGNHYNELFFPHIAGVGNSTNLYVWDKSMNPEAGMLRLVFGLGTRAVDRVSGDYAKIVPLDCPNKGPPVSYGDEKKFSQHKADVLDLANNKLTDAPLEKLADGDLKTDKEIFFTTDTEAINRMRELRINSASTPRIPDFRKLLNETGFPEFVRSALLTLRTAYNYPVDIEFTANFTPEGEFRFNLLQCRPLQTKGIGRVMEAPQPRQEHIFFSSTGDFMGGNVRLYFDYVVFVKVTEYLELTDQDKYQAARTVGLINQKLKDKTVLLMGPGRWGTTTPSLGVPVHFSELCNMAALCEVSYLKAGIVPELSFGSHFFQDIVESDIFYAAVFDGEPGITFCPDQILSKQNLLAEILPEEKKWESVIQIAQTPGLILHSDITNQKLLIYWDKDAV

SEQ ID NO: 58339 - DNA, 315 bp, Unknown
  Obtained from environmental sample
  misc_feature (1)..(315): n is a, c, g, or t
atggtttccttaaaaagttttctgtcctccgccttgtcaattgtttcgggcgaggacccaagaaggcgcacgttcattttatcaaggaaaccgtcgcgggctaactgcatacaaagcgttagtccggtttgtccgccaagccccgataaaatgctgtcggggcgttctttttcgataatgcgttttacggttgtaagcgtaagaggttcaatgtatattttgtcggcgatgttgttatctgtcattattgtcgcggggtttgaattgacaaggacaatctcaattccgtcctgcctaagcacgcggcaagcctga

SEQ ID NO: 58340 - protein, 104 aa, Unknown
  Obtained from environmental sample
  SIGNAL (1)...(17)
  misc_feature (1)..(104): Xaa is any amino acid
MVSLKSFLSSALSIVSGEDPRRRTFILSRKPSRANCIQSVSPVCPPSPDKMLSGRSFSIMRFTVVSVRGSMYILSAMLLSVIIVAGFELTRTISIPSCLSTRQA

SEQ ID NO: 58341 - DNA, 684 bp, Unknown
  Obtained from environmental sample
  misc_feature (1)..(684): n is a, c, g, or t
atgaactaccgggattcaagcggtaaatggataggttttgataccgagcttgcccagcttgtcggacagaagctgaagatgacggtggaatttacagaaatagagtgggcaaacaaatacaacgagttgaattcgggaaccatcagttgtatttggaacggcttcacggccaatgcttccgaatcggacggtaccggccggaaagatttggttgactttagctatagctatttccttaaccagcagtgtgttgtggtcaaggccgaaagaaagggtgagttcaagtacgaaaaggatcttgcgggtaaaactgcggcggcggaaaccggctcggcgggtgaaagcgccgcgcaggaacttgtcggggataccggaaaaatagtcggaaccgccgctcaggtcaataccttcatcgaagtaaaatccggcgcggtagattgcgcggtggtcgatatccttttggcgcaaagacttgcgggttcaggggattattccgatttaactattgcggatattatgctggattacgaagtgtatgccgttggctttaagaagggagacattttaagggataaagtcaacaaagcccttaaagaattgttcgatgagggaaagatgctggaacttgcgaaaaaataccatattgaggattcgcttgttctgaatacaaactttaatggataa

SEQ ID NO: 58342 - protein, 227 aa, Unknown
  Obtained from environmental sample
  DOMAIN (1)...(217): Bacterial extracellular solute-binding proteins, family 3
  misc_feature (1)..(227): Xaa is any amino acid
MNYRDSSGKWIGFDTELAQLVGQKLKMTVEFTEIEWANKYNELNSGTISCIWNGFTANASESDGTGRKDLVDFSYSYFLNQQCVVVKAERKGEFKYEKDLAGKTAAAETGSAGESAAQELVGDTGKIVGTAAQVNTFIEVKSGAVDCAVVDILLAQRLAGSGDYSDLTIADIMLDYEVYAVGFKKGDILRDKVNKALKELFDEGKMLELAKKYHIEDSLVLNTNFNG

SEQ ID NO: 58343 - DNA, 648 bp, Unknown
  Obtained from environmental sample
  misc_feature (1)..(648): n is a, c, g, or t
atgggtttttgggcggtaacgctaaggctattacagggcttccagaccacattttttattttcggtctgacgctcctgtttgcgttaccgctcggacttttaatttcattcggttccatgtcaaagatactgccgcttaaatatattgtcaaaatctttgtatggatgatccggggcgtacccctcatgctccagatatttatcgtgttttatgttcccggatttgtctttggcgcgccgatatcgtcgcggattaacgcggcgattatcgccttttccattaattatgcctgttatttcagcgagatattccggggcggaatagaaagcatttcccacagccagtacgaggcggggcaggttttggggatgacaaagtctcaggtattttttcgcgttgtgcttctccaggtgataaaacggatcaccgcccctatgtcaaacgagatcatcaccctggtaaaggataccgcactggcccgcgtaataatggttgtcgagataattaaggtcgctgaaacttttgccgctaccagggcgatgatctggcccctgttctacacgggtgcgttctatttgctgtttgttggaatcctcactttattgtttggatatatagaaaaaaaattgggttatttcagggcttag

SEQ ID NO: 58344 - protein, 215 aa, Unknown
  Obtained from environmental sample
  DOMAIN (10)...(212): Binding-protein-dependent transport system inner membrane component
  misc_feature (1)..(215): Xaa is any amino acid
MGFWAVTLRLLQGFQTTFFIFGLTLLFALPLGLLISFGSMSKILPLKYIVKIFVWMIRGVPLMLQIFIVFYVPGFVFGAPISSRINAAIIAFSINYACYFSEIFRGGIESISHSQYEAGQVLGMTKSQVFFRVVLLQVIKRITAPMSNEIITLVKDTALARVIMVVEIIKVAETFAATRAMIWPLFYTGAFYLLFVGILTLLFGYIEKKLGYFRA

SEQ ID NO: 58345 - DNA, 786 bp, Unknown
  Obtained from environmental sample
  misc_feature (1)..(786): n is a, c, g, or t
atggctattctggaagcgcgtaacattgcaaagcggtttggttcaacccatgtgttaaacgacattaattttacgctggaagaaggcgaggtccttgccataatcggttcatcgggcagcggtaaaaccacgcttctgcgctgcctgaatttcctggagcgtctggattcggggcgtattattctgcgcggcgaaacactgtatgacgcgtccgagaaagtccattatgacgagcagaccatcaggcggaagaggctgcatttcgggcttgtgtttcaatccttcaacctgttcccccaatacacggcgtttgataacgtggtgcttgcgtgtaaactggccgctcaaaaacagccggatttcaaaaaaaataaaaaattgattcttgatgaaatagaccgggaaggaatgcagcttctggatcagatcgggcttgccgccaaacgtgatttttatccctaccagttgtcaggcggccagcagcagcgggttgccattgccagggcttgggcgctaaaaccggatattctatgctttgacgagcctacctccgcgcttgatcctgaactgacgggcgaagtgttaaaggttattaagggcctggccgaaaaaaacacaacgatgatcatcgtgacgcacgagatgcaattcgcccgtcaggttgccgatactgtcctgttcatggacgaggggcttgtggttgaatacggttccccccatgatgtttttgataatccctcaagcgagcgtatcaagcgttttcttgagcattacgcgtcagtttaa

SEQ ID NO: 58346 - protein, 261 aa, Unknown
  Obtained from environmental sample
  DOMAIN (29)...(231): ABC transporter
  misc_feature (1)..(261): Xaa is any amino acid
MAILEARNIAKRFGSTHVLNDINFTLEEGEVLAIIGSSGSGKTTLLRCLNFLERLDSGRIILRGETLYDASEKVHYDEQTIRRKRLHFGLVFQSFNLFPQYTAFDNVVLACKLAAQKQPDFKKNKKLILDEIDREGMQLLDQIGLAAKRDFYPYQLSGGQQQRVAIARAWALKPDILCFDEPTSALDPELTGEVLKVIKGLAEKNTTMIIVTHEMQFARQVADTVLFMDEGLVVEYGSPHDVFDNPSSERIKRFLEHYASV

SEQ ID NO: 58347 - DNA, 537 bp, Unknown
  Obtained from environmental sample
  misc_feature (1)..(537): n is a, c, g, or t
atgggtctcttagccgtaatcgccgcttttgcggtattgtttgttctggttattctcattctggttaagctgtattctgaaaaagcggcggacgtatcgccgcagctgctcgatcttaaaaatgaattaaatgaacttaaaaccaaacaacttgaaagccagcagagcgcgctggcacaacagcagcagctctttttaaattcacaaaaccagcttggctcccagttaaaccagatgatgaaccgcatggatcagaattataattcctcacaaagcaatattacaaagcagcttgacaactccaaccgcgtgattaacgacatacacacaaaactcggttcgctggaacagaccgcgaaaaacattcaggatataggaaataatatttccactcttagggatttattgcagccgcccaaactaaggggtaatcttggcgaatatcttttggaagatcttttgcggcagatatttccggctaagaatttcgagactaaatatagtttcagaaacggtacccaggtagacgccgtataa

SEQ ID NO: 58348 - protein, 178 aa, Unknown
  Obtained from environmental sample
  misc_feature (1)..(178): Xaa is any amino acid
MGLLAVIAAFAVLFVLVILILVKLYSEKAADVSPQLLDLKNELNELKTKQLESQQSALAQQQQLFLNSQNQLGSQLNQMMNRMDQNYNSSQSNITKQLDNSNRVINDIHTKLGSLEQTAKNIQDIGNNISTLRDLLQPPKLRGNLGEYLLEDLLRQIFPAKNFETKYSFRNGTQVDAV

SEQ ID NO: 58349 - DNA, 1290 bp, Unknown
  Obtained from environmental sample
  misc_feature (1)..(1290): n is a, c, g, or t
ttgaaattaaaaaacgcaaaaaaaagcccattaataaaaacccgtctaaaaaggagaaatagtatggaatgttttataatcgaaaatggcgcggaaagaaaagcggaactggaagatatacttcctttgcttggaatttctctgcagtttgttcttagggatacatttaaatacaactacctgccgtatgctatcgcgcacctgccggatgaaatgaagaaacttgttcatgacaatatgttattgcggattcgcggcaggcttgaaaaagaagtattagaaattgaatccaaatatgaaaagaatgacagccgtatacagaacgcgaggacaaaattaatttcctttatcggagaaaacaaaaaattgccgtattggtattctcaaaaagttatttggaaaaaaattcaagaaaagccggtcagcgcttttttgaatttgataaacaaaattgagacagcatgctcttcaggatgcttttatttatcatcttctgatacgaataaaatgacgaatgatgatgtaaaaaacgcctttatgacatttaatgaccgaaaagatgaattgaaaaagatacgtacccttgatatagaagcgaaagttttaccatttaccgccattatttttgaagccggcggaattgacaaactgaggatttacggaaaattcgccggtacatggccggagtttttggaaaattacaagaatttaacatcaatagatttaggggttagcggattaaccgaatttccgtcatggatacgcgataatatttccctgagttgtttgcgtttatatgttggtacagtattacccgattggatcggcgatatgcagtccctaacggagattcacatatatcatgacaacaaaaatttaacaactttacctgacagcatttggaacctgaaaaacttgaccgaattaaatcttcaatttacacccttgaaagcattgcacgactgtattggaaatttacaaaatctgaccaaactttcattgcttggaaatgaaatagaaaaattaccggatagtattggaaatcttgacaatctgcgaatactttctcttcagaattgcaaaaatataaaatatcttcccgacagcataggaagtttgaaaaatcttgttatgcttaatctttccggttccggtatagaaaaactgccggatacaatatcaaattgctcttccctggaatgtcttgatgtacgtaaaacaaagattaattcatttcctgattttattttttctgtaaagaattatatgaccaccggaagttatgcctaa

SEQ ID NO: 58350 - protein, 429 aa, Unknown
  Obtained from environmental sample
  misc_feature (1)..(429): Xaa is any amino acid
MKLKNAKKSPLIKTRLKRRNSMECFIIENGAERKAELEDILPLLGISLQFVLRDTFKYNYLPYAIAHLPDEMKKLVHDNMLLRIRGRLEKEVLEIESKYEKNDSRIQNARTKLISFIGENKKLPYWYSQKVIWKKIQEKPVSAFLNLINKIETACSSGCFYLSSSDTNKMTNDDVKNAFMTFNDRKDELKKIRTLDIEAKVLPFTAIIFEAGGIDKLRIYGKFAGTWPEFLENYKNLTSIDLGVSGLTEFPSWIRDNISLSCLRLYVGTVLPDWIGDMQSLTEIHIYHDNKNLTTLPDSIWNLKNLTELNLQFTPLKALHDCIGNLQNLTKLSLLGNEIEKLPDSIGNLDNLRILSLQNCKNIKYLPDSIGSLKNLVMLNLSGSGIEKLPDTISNCSSLECLDVRKTKINSFPDFIFSVKNYMTTGSYA

SEQ ID NO: 58351 - DNA, 1002 bp, Unknown
  Obtained from environmental sample
  misc_feature (1)..(1002): n is a, c, g, or t
atgacgattttcataaagaaccgcccgaaacgcttttcaaagaaagcgagctgttccgaatgttcccccgcccaggctgatgaagcgatacgccttgttcagacccttgaccccgcgggctgctgcgccgccaattacaaagaatcgctgaaagcgcaagtttccatgctccggggcgccccggattgccttgaatgttccctggatcaccttgagttgtttgagaagggtaaattttccgcagcggcaaaaaaaatgaactgcgaagaaggcgaggcgcgcgcctgctataaactaatgcaaaaactttcacccttccccggcaggcgctttgccgcggccgaagtccgttttgtaattcccgatatacaggtcgccagggatccaaactcggagaagggggactttgttatcatccttaacaacgagatggttcccgttctggggatcagccccttcttcaaagaacttgaaccgggaaaccgtaaaagcgggagggcgaattccgcccgcgttaaagcaagggaatttgcccgtgaaaacatcagggaggcgcgtacatttattaattcgcttgccatgcggaaccgcacgctgatgctggtaagccaggcgctgctggaattccagaaacccttctttgaaagggggccccaataccttgtccccctgactctgggcgacattgcctccaggctgggcatccacgaagcgacggtatccagggcggcaaacggcaaatacatgcagaccgaatgggggatatttgagctgcgctacttttttaccaattcgataagcggaaccggttccggcggttcacatttttcaaaaggaggcgtcaaggccatcatacaggaaattgtcaacgccgaggaaacacatctttcggatttggatattacggaattgctggctcagcggggcataccgctcgcccgcaggactgtcgcgaaataccgcaaagagcttgatctaggctcatcatactcccgccggtaa

SEQ ID NO: 58352 - protein, 333 aa, Unknown
  Obtained from environmental sample
  SIGNAL (1)...(26)
  DOMAIN (6)...(153): Sigma-54 factor, core binding domain
  misc_feature (1)..(333): Xaa is any amino acid
MTIFIKNRPKRFSKKASCSECSPAQADEAIRLVQTLDPAGCCAANYKESLKAQVSMLRGAPDCLECSLDHLELFEKGKFSAAAKKMNCEEGEARACYKLMQKLSPFPGRRFAAAEVRFVIPDIQVARDPNSEKGDFVIILNNEMVPVLGISPFFKELEPGNRKSGRANSARVKAREFARENIREARTFINSLAMRNRTLMLVSQALLEFQKPFFERGPQYLVPLTLGDIASRLGIHEATVSRAANGKYMQTEWGIFELRYFFTNSISGTGSGGSHFSKGGVKAIIQEIVNAEETHLSDLDITELLAQRGIPLARRTVAKYRKELDLGSSYSRR

SEQ ID NO: 58353 - DNA, 1152 bp, Unknown
  Obtained from environmental sample
  misc_feature (1)..(1152): n is a, c, g, or t
atggcctccaagttccgtggaatctcaaaaattctcttttttattgccgccgcgctttatccggggctggttttttactttctggtaatccgtaaaactccgttacggctgttttccctttttgtcgtcgtatttgccctttttgtctttatcaccggaacatccgcaaaaatcaaaactaagggcgtttccttcttttggaattcagccctgcttttggggcttgggggcttatgccttattattaactccgcaattatcctgaaactctaccccctgctgatgaatattctgttcctgacggcttttggaagcacccttttttccccccccaccatgattttccgtttcgccgtaatgcaggacaaatccattaagggttccctgaatgaaaaaagggtcgccgcctactgccgtaaagtaacctatgtctggtgcggtttttttattattaacggaagcattgccgcatggactattttttccggttccgacgcgctgtggtctgtttataacgggggaatttcctatatactgataggaaccctctttgcgggggaattcatggtgcgaaagatggtacagaaaaagatgccccaaagcgttccgttttcggcgtttaaaaataaatcccggcctctttccacgatcctgtgctacgagggcgcatggagcgacgctgtttacaagacatggggggattttcttgaaggcgccgcaaaactgcgcagcgtaattaattcgcaaagcggcgataaatggctgcttcactgcgaggattactggtactttcttctggcctttaccgccctgctccagtgtaaaaaagagatactcttaagcgccaatgtaagccccgcttatatcaaagaaatccgcggtgtcgcgcctggcggcggcgcgtctgacggtggcgtatctaacggtgcggcgcctttccttaccgaccaggttttttccgaaggagaatggctgccaaacaccttttacatcccttcgcttttaaagacggcgcanaaaacggaaagcccggtaacgggcgctgaggcggaagaagcgccggcgattgacgcggatgggacctctatcatcatgtatacatcgggaagcacggaaaaccaaagcggtacaacagcggctgacggaatttga

SEQ ID NO: 58354 - protein, 383 aa, Unknown
  Obtained from environmental sample
  misc_feature (1)..(383): Xaa is any amino acid
MASKFRGISKILFFIAAALYPGLVFYFLVIRKTPLRLFSLFVVVFALFVFITGTSAKIKTKGVSFFWNSALLLGLGGLCLIINSAIILKLYPLLMNILFLTAFGSTLFSPPTMIFRFAVMQDKSIKGSLNEKRVAAYCRKVTYVWCGFFIINGSIAAWTIFSGSDALWSVYNGGISYILIGTLFAGEFMVRKMVQKKMPQSVPFSAFKNKSRPLSTILCYEGAWSDAVYKTWGDFLEGAAKLRSVINSQSGDKWLLHCEDYWYFLLAFTALLQCKKEILLSANVSPAYIKEIRGVAPGGGASDGGVSNGAAPFLTDQVFSEGEWLPNTFYIPSLLKTAXKTESPVTGAEAEEAPAIDADGTSIIMYTSGSTENQSGTTAADGI

SEQ ID NO: 58355 - DNA, 609 bp, Unknown
  Obtained from environmental sample
  misc_feature (1)..(609): n is a, c, g, or t
atgggcaggggaataaagcaagcagaagcagatttggactatgccatgattttgcagggcataaaagaccaattagataccaccaaaccagcccttatgaacgatagcgaggtcacagcagccctgcaagagtttatgatggaaatgcgcaaagcccgcatggcaaaagattccattgctatggaagagagaaagcaaaaagctgctgaaaaccttgttaagcaaaacgaatttcttgaaaagaacaagggcgaagttggcgttgttgtaaccgaaagtggcttgcaatacataattttaaaagaaggcgaaggcaaagtcgccaaagacggcgatacaataaccgtccattacaccggaactttcttggatggcaccaagttcgacagctccctagaccgcaaccagcctctatccataactctgggcgaaggacagcttataccaggctgggtggaaatgattcgcttgatgcaaaaaggcgaaaaggtaaaaacttgggttccaagccgtttgggatatggagaatatggcaatcacgcaataccaggcaattcaatacttatttttgaaatggaattgctagacatcaagccggctaaaaaataa

SEQ ID NO: 58356 - protein, 202 aa, Unknown
  Obtained from environmental sample
  DOMAIN (1)...(99): Domain amino terminal to FKBP-type peptidyl-prolyl isomerase
  misc_feature (1)..(202): Xaa is any amino acid
MGRGIKQAEADLDYAMILQGIKDQLDTTKPALMNDSEVTAALQEFMMEMRKARMAKDSIAMEERKQKAAENLVKQNEFLEKNKGEVGVVVTESGLQYIILKEGEGKVAKDGDTITVHYTGTFLDGTKFDSSLDRNQPLSITLGEGQLIPGWVEMIRLMQKGEKVKTWVPSRLGYGEYGNHAIPGNSILIFEMELLDIKPAKK

SEQ ID NO: 58357 - DNA, 1068 bp, Unknown
  Obtained from environmental sample
  misc_feature (1)..(1068): n is a, c, g, or t
ttgagcgcgctttctatttcgcaaggggttgcagaaaaatccgttgtgaaccctgatatggaggctgtgcttgcaaagcgccgccgcagggagcctagcgttgaagaacttttcaaaggcattttaaaaggcgaccgttccgtgcttgcccaaggcataacacttgtggaaagcaacctgccgcagcaccagagcaaggcgcaggaactaattcaaaaatgcctgcctcattcagggaattctttgaggataggcataacgggaagcccgggtgctggcaaaagttcattcatagaaacatttggcgtctatttaatagaagagcataaaaaaaaattagcagttctggcaatagacccaacaagccagcgcacaaagggcagcattttaggcgacaaaacccgaatgaattgcctctctgcaaaagatgaggcttttatacgcccttctccctctggttcttctttgggtggggtggcacaaaaaactcgcgaatcaattctgctttgcgaagcggcaggctactccacaattttaatagaaactgtgggcgttgggcaaagcgaaaccgctgtgcacggaatgacagatttctttttgcttttgatgcttgcgggcgcaggcgatgaactgcaaggtataaagcgcggcataatggaaatgtgcgatggcatggcaataacaaaatgcgatggacaaaatatcacgaaagcccttgctgcccgtagcgaataccaaaacgctttgcacctattccccgcagcgcaaagcggttggcctccaaaagtgatagccacatcttctgtcaccaaagaaggactcccagaagtttggcaaatgataaccgaatttgaaaacaccgttaagcaaaacaactggttttatcaaaacagaaaagaacagcaaaaaaactggatggaaaacacaatacacgatagtttgatgttcaacttttacaaacatcccgatgtgcaaaaagaacttcccttggcagagcaagccgttttggaaggtagagaaagtccattcaaggcggcgaatagattgctcagttatttttctcgctaa

SEQ ID NO: 58358 - protein, 355 aa, Unknown
  Obtained from environmental sample
  DOMAIN (49)...(323): ArgK protein
  misc_feature (1)..(355): Xaa is any amino acid
MSALSISQGVAEKSVVNPDMEAVLAKRRRREPSVEELFKGILKGDRSVLAQGITLVESNLPQHQSKAQELIQKCLPHSGNSLRIGITGSPGAGKSSFIETFGVYLIEEHKKKLAVLAIDPTSQRTKGSILGDKTRMNCLSAKDEAFIRPSPSGSSLGGVAQKTRESILLCEAAGYSTILIETVGVGQSETAVHGMTDFFLLLMLAGAGDELQGIKRGIMEMCDGMAITKCDGQNITKALAARSEYQNALHLFPAAQSGWPPKVIATSSVTKEGLPEVWQMITEFENTVKQNNWFYQNRKEQQKNWMENTIHDSLMFNFYKHPDVQKELPLAEQAVLEGRESPFKAANRLLSYFSR

SEQ ID NO: 58359 - DNA, 690 bp, Unknown
  Obtained from environmental sample
  misc_feature (1)..(690): n is a, c, g, or t
ttgctcggcaatggaagccaatggggtttaaatattcaatatgccgctcaaccaaaaccagaaggcatagcgcaggcttttttgatagctgaaaattttattaaagaccaagcttgtacactgattttaggcgataatattttttatggggcttttgatttatacggcataatggcagatgcaaaaaatttcacaggtgcgcgcatattgggctatgcggttaacgaccctgagcgttatggagttgttgaatttgatgcaaacggcaaagctctttctttagaagaaaaacctgcaaagccaaaaagcaattacgcagttccgggtttatatgtttacgacaaaacagttttaggaaaagccaagtctctaaaaccaagcgcaagaggcgagcttgaaataacagatataaataaaatgtatttgcaagagggaaccttgtttgtgaaaaaaatagggcgcggagttgcgtggctagatacaggcacacacgcatcccttttggaagcgagcaattttgtttatacccttgaatccagacaaggtcttaaaatagcctgcatagaagagatagccgttgaccgcggatttgttccttgggaaaagatgaaaacttatttagaaagcaatatgcccaaatgtccatatagggattatattttcaaaagatttagcgagaaaaataactga

SEQ ID NO: 58360 - protein, 229 aa, Unknown
  Obtained from environmental sample
  DOMAIN (1)...(177): Nucleotidyl transferase
  misc_feature (1)..(229): Xaa is any amino acid
MLGNGSQWGLNIQYAAQPKPEGIAQAFLIAENFIKDQACTLILGDNIFYGAFDLYGIMADAKNFTGARILGYAVNDPERYGVVEFDANGKALSLEEKPAKPKSNYAVPGLYVYDKTVLGKAKSLKPSARGELEITDINKMYLQEGTLFVKKIGRGVAWLDTGTHASLLEASNFVYTLESRQGLKIACIEEIAVDRGFVPWEKMKTYLESNMPKCPYRDYIFKRFSEKNN

SEQ ID NO: 58361 - DNA, 432 bp, Unknown
  Obtained from environmental sample
  misc_feature (1)..(432): n is a, c, g, or t
ttgtacatacgcccggattttacggaaattcacggccttacggttgatgacgtaagggacgcgcctgattttggttatctttggaaaaaggaaataaggggatttattggaaatactatgcttgcggctcataacgcgccttttgacatgagggttcttaaagcggttcttgaatggtacgggcttcccgttccgaaactgcactatttttgtacgcttaatttagcgcgtctcgcgtggccgaaatttgaatctcacgcgcttgctgatttagccaaaagattcgggattgtttacaacgcgcacaacgctcttgacgacgctctaacatgcgggaaacttgtgcagatggcggctgaagaatttgatcctgaaaagagtattgaggagtttttggaattcatgggagttgagataaagtgtttggggtga

SEQ ID NO: 58362 - protein, 143 aa, Unknown
  Obtained from environmental sample
  DOMAIN (1)...(115): Exonuclease
  misc_feature (1)..(143): Xaa is any amino acid
MYIRPDFTEIHGLTVDDVRDAPDFGYLWKKEIRGFIGNTMLAAHNAPFDMRVLKAVLEWYGLPVPKLHYFCTLNLARLAWPKFESHALADLAKRFGIVYNAHNALDDALTCGKLVQMAAEEFDPEKSIEEFLEFMGVEIKCLG

SEQ ID NO: 58363 - DNA, 675 bp, Unknown
  Obtained from environmental sample
  misc_feature (1)..(675): n is a, c, g, or t
atgaaaaaaagcgatattataattcctagcgacgctgaaagagtaaattttcgtgaaatccgtatggggaatattgcgcctaacacattgtaccgcagcagtcatcccataatggacgacaaacaagacaaaattatttcgctgttggcggcgcaaaataagattaaaacaataataaatttgagcgatacaatcagcgaaattaagataaagtcgatgtttgctccttggtacgataaactgcttaaaaataaccgtgtagccgcccttggcatggacttaaataataacagtgaaagtttcagtaaaaaatttaagaaaggcttacaatttattattaatactgaaggaccttggatgattcattgccacgccggagtagaccgcaccggttttgtttcaatagtactggaaacgcttatgggagcgaagttagccgatattatcggcgattatcttaaatcatttaacagtatgtttgattcaagcatttacggcaatctaaacaaagaagaggtgtttcagcttatattcgctatgggtgataatatgccggtaaacgataaaaatttagaagctattgcggaatactatctgcttaaaaggattaaattgtccgccgcagagatagagcttctaaaaaataaattggcagggaaagctgtatcaatttaa

SEQ ID NO: 58364 - protein, 224 aa, Unknown
  Obtained from environmental sample
  misc_feature (1)..(224): Xaa is any amino acid
MKKSDIIIPSDAERVNFREIRMGNIAPNTLYRSSHPIMDDKQDKIISLLAAQNKIKTIINLSDTISEIKIKSMFAPWYDKLLKNNRVAALGMDLNNNSESFSKKFKKGLQFIINTEGPWMIHCHAGVDRTGFVSIVLETLMGAKLADIIGDYLKSFNSMFDSSIYGNLNKEEVFQLIFAMGDNMPVNDKNLEAIAEYYLLKRIKLSAAEIELLKNKLAGKAVSI

SEQ ID NO: 58365 - DNA, 657 bp, Unknown
  Obtained from environmental sample
  misc_feature (1)..(657): n is a, c, g, or t
atgatacaaatctccaatttaaacaaaacctatttcggcgcacaacctctacatgtgctgaaaggcatcgatttgcgcatcaagacgggcgaatatgtggccattatgggggcatccggttcgggaaagtccacactgctcaacatcttgggcattttggataattacgacacgggctcgtattacctcaacggcaaacttatcaaggatttgaccgaaacccaatcggcacgcttgcgcaacgaaatgatagggtttgtgtttcaatcgttcaacttgattgggtttaaaaacgcacaggaaaatatcgcacttccgctgtattaccgcaatgtttcccgaaaaaaacgcaatgccatcgctttggattatttagacaaagtgggattgaaaaattgggcgcatcatttgcccaacgagttgtcgggcggacagaaacagcgtgtagcgattgcccgcgccttgatttccaatccgagcatcatccttgccgatgagccaaccggcgcattagacagcaaaacctccgccgaagtcatcgaacttctaagcgaagtcaaccgcatgggcaaaaccgttatcatcgtcacccacgagcgggaggtggcggagaagacgcagcggattatacacatcaaagacggcgttattgagtaa

SEQ ID NO: 58366 - protein, 218 aa, Unknown
  Obtained from environmental sample
  DOMAIN (30)...(215): ABC transporter
  misc_feature (1)..(218): Xaa is any amino acid
MIQISNLNKTYFGAQPLHVLKGIDLRIKTGEYVAIMGASGSGKSTLLNILGILDNYDTGSYYLNGKLIKDLTETQSARLRNEMIGFVFQSFNLIGFKNAQENIALPLYYRNVSRKKRNAIALDYLDKVGLKNWAHHLPNELSGGQKQRVAIARALISNPSIILADEPTGALDSKTSAEVIELLSEVNRMGKTVIIVTHEREVAEKTQRIIHIKDGVIE

SEQ ID NO: 58367 - DNA, 1323 bp, Unknown
  Obtained from environmental sample
  misc_feature (1)..(1323): n is a, c, g, or t
atgaacgaggatagctgtgatgtttgggctcatcctgaaatttttattcaaaacctgtcggcgggcgcgcctccggatatgtacagcccgtccggccagaattggggttttccggtttataactggaaagctcaggaaaaagacaattattcatggtggcgcaaacggctgaagatagcggaaaaatattacagcgcttaccgtatcgatcatgtactgggatttttccgtatatgggcaagttcccgcaacgattattcctcaactttgggacgttatgtgccatatactccggttacttccgctgatttgatggggcttggctttgataaaggcagaatacgctggctttccaggccgcatattcccacaggagaaatttttgacgttctcagaaataactgggacggtcctttcagcgacggagatatttccgcggcggcggaaataatattttccaaagcgctttcaagagttaataacgaagaactgtggcttttcaataataaaataaagggagagaaagacatcgacaggcttgaccttcatccggcaagtcataattatctttatgaaaaatggagcgacagaacgttttttgaatatgcaaaagggaaattttttcctatttggtattacagggaatcaaaagcgtataaatccctgtcaagtgaggagaaaaataaccttgaagccctgctggaagaacggcatagaaaatcggaaaaaatctgggcgcggcacggcagaaagcttctttccgtattggtagattcatcggatatgcttccgtgcgccgaagaccttggagctgttcccgcgtgtgttcccagagtgctttccaaattgggaatcctcggccttagagtgatacgctggcatcgccattgggatagagaaggacagccttatgttccttttgatgaatatccaaggttaagcgtctgcaccctgtctgttcatgacagctctaccattcgcgaatggtgggagaatgaagccgatcaaatgcaattctccggttttatcggagtcccgtctttgcctaaaaaatttaatccgggaagcgcaagaattattctgtcaaaagcggcatccgcccgttcgcgtttccgtgtttttcagatacaggatattttacacctttcaagcagatggtattcgcaggacccctctcaggagagaattaacattccgggaacttcaaatgaatttaactggacctaccgccttcctgccaggatcggggagattgccaaagacagagaactgatcctcgcggtcagagagttaagcagggtcaaacctgtgaagaaaaaataa

SEQ ID NO: 58368 - protein, 440 aa, Unknown
  Obtained from environmental sample
  DOMAIN (1)...(432): 4-alpha-glucanotransferase
  misc_feature (1)..(440): Xaa is any amino acid
MNEDSCDVWAHPEIFIQNLSAGAPPDMYSPSGQNWGFPVYNWKAQEKDNYSWWRKRLKIAEKYYSAYRIDHVLGFFRIWASSRNDYSSTLGRYVPYTPVTSADLMGLGFDKGRIRWLSRPHIPTGEIFDVLRNNWDGPFSDGDISAAAEIIFSKALSRVNNEELWLFNNKIKGEKDIDRLDLHPASHNYLYEKWSDRTFFEYAKGKFFPIWYYRESKAYKSLSSEEKNNLEALLEERHRKSEKIWARHGRKLLSVLVDSSDMLPCAEDLGAVPACVPRVLSKLGILGLRVIRWHRHWDREGQPYVPFDEYPRLSVCTLSVHDSSTIREWWENEADQMQFSGFIGVPSLPKKFNPGSARIILSKAASARSRFRVFQIQDILHLSSRWYSQDPSQERINIPGTSNEFNWTYRLPARIGEIAKDRELILAVRELSRVKPVKKK

SEQ ID NO: 58369 - DNA, 879 bp, Unknown
  Obtained from environmental sample
  misc_feature (1)..(879): n is a, c, g, or t
gtgattgtcggcctttacgaaggctcaaaatcgtggaaaaaagccgaagaagcaggctttcaggtgatgaccgcgaaggacgcggcgcaggcggcggactttatcatgatcctcatcaacgatgagaaacaggccgccctttacaaagaatcaatcgccccggttcttaaaaagggaaaaacactttcctttgcccacgggttcaacatccactacgggcagataattccgcctgcggacgtcaatgtcgtgatgatagcgcccaaggggccgggtcatacggtacgcgagcagtataagaacggcgcaggggtaccctgccttatcgcgattcaccaggatccgggcggagacgcgaaaaaattggctatggcttacgcggccggtatcggcggcgcgagagccggcatattggagacgacatttaaggaagaaaccgagaccgacctcttcggtgagcaggccgtcctctgcggcggtgtctcggcgctgatgaaggccggctacgaggtgcttgtggaagcgggctatcagccggagagcgcctactttgaggtaatgcacgaaatgaaactcatcatcgatcttgttaaccgcggcgggctttccttcatgcgttattcgatctccgacacggcggaatacggcgactatatttcagggcccaagattatcaccaaagaaacaaaggacacgatgcggcagatattgaaggatattcaaaccggcagtttcgcgcgggactggatacttgaaaaccaggtgaaccgccccttctttaaccgcatgagggcgcttgaacaggaacacccaatcgaaaaaaccggaaatgaactccgcgccatgatgacctggttaaagaaaaacgaggaaaaataa

SEQ ID NO: 58370 - protein, 292 aa, Unknown
  Obtained from environmental sample
  DOMAIN (2)...(136): Acetohydroxy acid isomeroreductase, catalytic domain
  misc_feature (1)..(292): Xaa is any amino acid
MIVGLYEGSKSWKKAEEAGFQVMTAKDAAQAADFIMILINDEKQAALYKESIAPVLKKGKTLSFAHGFNIHYGQIIPPADVNVVMIAPKGPGHTVREQYKNGAGVPCLIAIHQDPGGDAKKLAMAYAAGIGGARAGILETTFKEETETDLFGEQAVLCGGVSALMKAGYEVLVEAGYQPESAYFEVMHEMKLIIDLVNRGGLSFMRYSISDTAEYGDYISGPKIITKETKDTMRQILKDIQTGSFARDWILENQVNRPFFNRMRALEQEHPIEKTGNELRAMMTWLKKNEEK

SEQ ID NO: 58371 - DNA, 1422 bp, Unknown
  Obtained from environmental sample
  misc_feature (1)..(1422): n is a, c, g, or t
atggataatttggaaattctggacaccaccctgagggacggcgcccagggcgagggaataactttttccgtgcaggacaaactggcggtcgtccgcgcgttagacgatctgggaatctcatggatcgaggcggggaaccccggaagcaaccccaaggacatggaatttttccgccttgccgaaaacctgaaacttgacaacgcgaaactctgcgccttcggctccaccagaaaaaagggagtcaaggcgggcgaggaccccggcgtactcagcctgcttgacgcgcggactcaggccgtcgtgatcttcggcaagagctgggatttccatgtgacggaggtgttacgcgtaagccacgaggaaaacctcgccatgattgcggaaacaataatgtttcttaaagaaaatggacggcgggttttttacgacgcggaacatttttttgacggctggaaggcgaaccccgaatacgcccttactaccctgaagaccgcgatggaagcgggggcggaacgcataattctgtgcgacacaaacggcggcacgtttcccgacgccatagagaaggccgttaaagaagccgtgaagataatatgcgttaacggcgcgtcgttaaacgacgcgaacgcccttctcggcattcacgcgcacaacgacatggatatggcaagcgcgaataccgtaaccgccgtccttgccggatgccgccatgttcagggaacccttgtcggcttcggcgaacgctgcggcaacgcaagcctcgcggctgtcatgcccagccttgaactcaaactgggattccgctgccttgttgaaggaaaaatggaaatgctctccgaaataacccgcattgtcgcggagacggccaatgtcgccgtgccgggcaatatgccttatgtgggaagccacgcctttacccacaaggcgggaatgcacgcggacggaattttaaaggtaagccgttcatttgaacatatagccccttcgcttgtggggaacgacaggcactttataatgagcgaagtcggcggacgctctgccattgcggagagggcgaaaaaaatcgacgcgtccattacaagggatcaccctgttacaaccgccctcgcgcaaaaattaaaaaaccttgaggcggagggctggcagtttgagggcgcggacggcagttttgatcttatggtccgccgcgaacttggccgctacaagccgctgttcaacattgaggcttaccgcgtggtaagcgaacaccccactggcgagactatagcctgttcccacgcgtgggtcaaagtccatgttgacgacaaggaggaaatggccgccgccgagggggacggccccgtcaacgcgatggacggagcgcttcgcagggccttaaaacattttctcgtgccgctcgtgccgattctgatcattcggtaa

SEQ ID NO: 58372 - protein, 473 aa, Unknown
  Obtained from environmental sample
  DOMAIN (384)...(473): LeuA allosteric (dimerisation) domain
  misc_feature (1)..(473): Xaa is any amino acid
MDNLEILDTTLRDGAQGEGITFSVQDKLAVVRALDDLGISWIEAGNPGSNPKDMEFFRLAENLKLDNAKLCAFGSTRKKGVKAGEDPGVLSLLDARTQAVVIFGKSWDFHVTEVLRVSHEENLAMIAETIMFLKENGRRVFYDAEHFFDGWKANPEYALTTLKTAMEAGAERIILCDTNGGTFPDAIEKAVKEAVKIICVNGASLNDANALLGIHAHNDMDMASANTVTAVLAGCRHVQGTLVGFGERCGNASLAAVMPSLELKLGFRCLVEGKMEMLSEITRIVAETANVAVPGNMPYVGSHAFTHKAGMHADGILKVSRSFEHIAPSLVGNDRHFIMSEVGGRSAIAERAKKIDASITRDHPVTTALAQKLKNLEAEGWQFEGADGSFDLMVRRELGRYKPLFNIEAYRVVSEHPTGETIACSHAWVKVHVDDKEEMAAAEGDGPVNAMDGALRRALKHFLVPLVPILIIR

SEQ ID NO: 58373 - DNA, 1644 bp, Unknown
  Obtained from environmental sample
  misc_feature (1)..(1644): n is a, c, g, or t
gtgttatccgggcaagactcagcgcctcaaatccaatcctgtacactggcttatcagacagtacaggaggacataatgaggtatgaggaacctatgaagatcatcgaactattacggctctgggaacaagggtatacccagagggagatcgcggcgagcgttaattgctcaaagactacggtagccgggctgcagaagcggctgaaggaaatcggcctgttatacgaaacggctaaagggatgaccgacgaggctgttgccaaactggcgtatccggcctgccggggcgggcgcccggccaggaacgagccagactgggaagccatccagaaacggcttgacgggaacaaacggcttaacctgcagtacctgtacgaagagtaccgggatacggtgaaagaccctctggggcgcagccagttctacgcacgttatacgacatggaaagctcaggcggggaaagacgtggtaatggtgcaggagcgggagccggggaaggaactgttcgtggactggatgggggacacccttgaatgcgtccgggacagcgagacgggaaagctgctgaaggcgcacttctttgtggcggcgttgggtgattcaggatacccggtggtactggcctacccgaatgagaagagcgagaactggatacatgcgcatgtggaaacattcaaccggcttggcgggctgccacaagtcgtagtgccggataactgcaagaccgcggtcagcaaggcaaactattacgacccccagttgaacaaggcgtactacgacctggcgctgtattataacattgcggttatccccgcgcgggtccgccggccgcaggataaaagtttggtggaaggcagcatcgggtggcttgagacctggctcgtcgaatggctgaaaggcggcgggccttcgccccgacagttttcaagtttcgccgagcttaacgcggccataaaaacccgcctcgcggaactggtgaagcggccgttccagaaaagggcgggcagccgggaaagcgtgttcctggaacttgaccgccccgccctgcgcccgctgccgggcaccccttatgaacaccccagttacgtcgaaaggcgggtgcccaacaactaccacgtcgaatatatgggcttttactactcggtcccccaccggtactacaaacagcaggtaaccgtaaaagcgacatattcggtcattgaagtgtatgcggacaggcttaaccggatagccatccacgaacggcgctacaccgggagccggtatagtacggagcgcagccacatgccgcccgcccaccaggcgcaacaggacgcgaaccgctttgacgggaagcggttcaggaactgggcgtcgtcaataggcgttaacactttttatgtcattgacagcctgctgaaagaacgggaggcggaacagacggcctaccgcgcctgtatggggatacttcagttctcgcgaaaggacgggaatgcgcgccttgaggcggcgtgccggaaggcccgggaactggggacaatttcttacgccgtcatcaaaaacattttaaaaaacaaacaggaaggcaccccgttattgtttgaggcgggccaagtggcaaccgctgcccatgagaacatcaggggccagaaggcgtttgggtga

SEQ ID NO: 58374 - protein, 547 aa, Unknown
  Obtained from environmental sample
  DOMAIN (160)...(342): Integrase core domain
  misc_feature (1)..(547): Xaa is any amino acid
MLSGQDSAPQIQSCTLAYQTVQEDIMRYEEPMKIIELLRLWEQGYTQREIAASVNCSKTTVAGLQKRLKEIGLLYETAKGMTDEAVAKLAYPACRGGRPARNEPDWEAIQKRLDGNKRLNLQYLYEEYRDTVKDPLGRSQFYARYTTWKAQAGKDVVMVQEREPGKELFVDWMGDTLECVRDSETGKLLKAHFFVAALGDSGYPVVLAYPNEKSENWIHAHVETFNRLGGLPQVVVPDNCKTAVSKANYYDPQLNKAYYDLALYYNIAVIPARVRRPQDKSLVEGSIGWLETWLVEWLKGGGPSPRQFSSFAELNAAIKTRLAELVKRPFQKRAGSRESVFLELDRPALRPLPGTPYEHPSYVERRVPNNYHVEYMGFYYSVPHRYYKQQVTVKATYSVIEVYADRLNRIAIHERRYTGSRYSTERSHMPPAHQAQQDANRFDGKRFRNWASSIGVNTFYVIDSLLKEREAEQTAYRACMGILQFSRKDGNARLEAACRKARELGTISYAVIKNILKNKQEGTPLLFEAGQVATAAHENIRGQKAFG

SEQ ID NO: 58375 - DNA, 1572 bp, Unknown
  Obtained from environmental sample
  misc_feature (1)..(1572): n is a, c, g, or t
ttgatattgatgataaaaaagaaattaaagtatacgttaaaatttatctttagaagaagggttcttgtcatcatgtcccttctggcgcagattttactttttattttccttgtagggggaaccggcttatatgtaaaattttcttactgggttctttctgttcttagcattattgtcagtatttatattattaataaacatgaaaaagccggctttaagcttacatggatatttatatttttactgtttcccctttttgggggaatcctttatataatgttaaatatctggtcaaacccgcgaagaataagaaaatccctgtttggaaatatcgcaaaaagccgcgaggctttttatctttcgggaaaccggcttaacgaacttaccgacatctatccggattttaaaactcaggctcattatttgcaggaatacgcaggttttcccgtatacggaaatacaagacaggaatatttcccgtcaggcgaatctttttataagagagtgcttgaagaccttgaaaaagcgcaaaaatatatttttctggaattttttattttgaaagaagggcaaatgtttaattcgatattgaatattttggaaagaaaagccgcagaagggattgaggttcgcataatgtacgacgacatgggctgtttttttactttgccgtccaattttccaaaaatacttaaacaaaaaggaataaaatgttttgtttttaataagttcagaccgattgtttcgtcattgcagaacaaccgcgaccaccgtaaaattatttcgatagacggcaaaatagcgttcacaggcggacttaaccttgccgacgagtatattaacgctgttgaacgctttgggcactggaaggacgccgcgataaaaattgagggagacgcggcttggtctttaacgataattttcttgcaaatgtggaatctcggttttaaacaaaaagacgattacgcgtcatttttcccgggtaatgaaaacaaggaaaacagcaggggcgaaaatttcaaaaaatggggttatgtgcagccctatgccgacagcccaattgataaagaaaacgtaggggaacatgtatatattcaaataataaatcacgcaaaaaaatatgtttatataaacaccccgtacctgattgtggacgacaatcttctttccgctttaatacttgcggcaaaaagcggcgttgatgtgcgcataataacaccgcaccgctgggataaatggattgtggcgattacttcccgttcatattaccgcaggctcattaaagccggcgtaaaagtttatgaatacacgtcaggttttaaccacggcaagacttttgtttccgacgacaaaatagcgactgtaggcacgacaaatctggattttaggagcctttatcttcactttgagtgcggcgtgttaatttacgccagtgaaacagtcgccgccgtaaaggaagattttcttcgcactctgcccagttcacaggaaatcactcttaaagaatgtgccgataaaaaattcaggagtgttgtttcagatattttgcgtattttcgcgccgttgatgtga

SEQ ID NO: 58376 - protein, 523 aa, Unknown
  Obtained from environmental sample
  DOMAIN (437)...(464): Phospholipase D Active site motif
  misc_feature (1)..(523): Xaa is any amino acid
MILMIKKKLKYTLKFIFRRRVLVIMSLLAQILLFIFLVGGTGLYVKFSYWVLSVLSIIVSIYIINKHEKAGFKLTWIFIFLLFPLFGGILYIMLNIWSNPRRIRKSLFGNIAKSREAFYLSGNRLNELTDIYPDFKTQAHYLQEYAGFPVYGNTRQEYFPSGESFYKRVLEDLEKAQKYIFLEFFILKEGQMFNSILNILERKAAEGIEVRIMYDDMGCFFTLPSNFPKILKQKGIKCFVFNKFRPIVSSLQNNRDHRKIISIDGKIAFTGGLNLADEYINAVERFGHWKDAAIKIEGDAAWSLTIIFLQMWNLGFKQKDDYASFFPGNENKENSRGENFKKWGYVQPYADSPIDKENVGEHVYIQIINHAKKYVYINTPYLIVDDNLLSALILAAKSGVDVRIITPHRWDKWIVAITSRSYYRRLIKAGVKVYEYTSGFNHGKTFVSDDKIATVGTTNLDFRSLYLHFECGVLIYASETVAAVKEDFLRTLPSSQEITLKECADKKFRSVVSDILRIFAPLM

SEQ ID NO: 58377 - DNA, 1005 bp, Unknown
  Obtained from environmental sample
  misc_feature (1)..(1005): n is a, c, g, or t
ttgnnnnnnnnnngggttgatggcacgagatgtagggtaaaaaaggagttacttatgaaaaaccagtggaaacttttagggataatagctcttatttcaacaattgcgctttcaatagcagactgccgccatgatgattcaccctcacccccatctacacctagacccatatacggtattgagttgaaagatggcgaattgccgctgaaagacacgacctacacgtttgaaggccgcggggccttatccgtaacggtgaaaaacaccggtaataagccgaccggcgccctgaagatagagataagcggaaaaaacgccgattcctttatagtatttccggaatcagcatcaacagtatccccggaatcagtatcattaaagagtattgccgcgggcgataaggctgttttcacggtaaaacccggtgccggactgaccggaggcgagacatatgaagcaactataacggtaagcggcgacaataaaatcagcgagaagtttaacgtggaattcacagaatccgacgaacttacctatggtgtctcgctattgaataacgccgaacaactggaagactacacgttcaataaccatggggccttaaccgtaacggtggataacatcggcaatcaaccgacgggcgagttgaccatagagataagcggagacaatgccgattcctttacagtgtcaacaaaggtattagagagtattgtcgtgggcggcaaggctgctttcacggtacaacccggtgccggactgaccggaggctggaactataaagcaaccataacggtaaccggcggcaatgagattagcgaaagttttaatgtggaattcacagaatccgacgagttcatctatgatgtttcgctgaagaacggcggcttgacgcttgcaaacacaacctacccatttaccgaaagcacagcgttaaccgtaacggcggaaaacaccggcaatcagcccgaccggcgaactggccgtagcgagcagcaccgatga

SEQ ID NO: 58378 - protein, 334 aa, Unknown
  Obtained from environmental sample
  misc_feature (1)..(334): Xaa is any amino acid
MXXXXVDGTRCRVKKELLMKNQWKLLGIIALISTIALSIADCRHDDSPSPPSTPRPIYGIELKDGELPLKDTTYTFEGRGALSVTVKNTGNKPTGALKIEISGKNADSFIVFPESASTVSPESVSLKSIAAGDKAVFTVKPGAGLTGGETYEATITVSGDNKISEKFNVEFTESDELTYGVSLLNNAEQLEDYTFNNHGALTVTVDNIGNQPTGELTIEISGDNADSFTVSTKVLESIVVGGKAAFTVQPGAGLTGGWNYKATITVTGGNEISESFNVEFTESDEFIYDVSLKNGGLTLANTTYPFTESTALTVTAENTGNQPDRRTGRSEQHR

SEQ ID NO: 58379 - DNA, 327 bp, Unknown
  Obtained from environmental sample
  misc_feature (1)..(327): n is a, c, g, or t
gtgtatttgatggcatatgtaaccgccgccgatgaggatgaagcgcgccgtatcgccagggcgctcgtggaagagcggcttgcggcctgcgcgaatgtccttgggcgaatagagtccgtatatcattgggaaggcgaggtacagtcctccacggagaccgcctttctcgccaaaaccaccgaagcgtgttttgacgcgcttgcggcgcgagtccgcgaactgcacagctacgagctgccatgtatcgtcgccgtgccgctggcgcggggtgaggccgcctttttggactggataggggaaaatgtccgcaacgccaacgcaaaataa

SEQ ID NO: 58380 - protein, 108 aa, Unknown
  Obtained from environmental sample
  DOMAIN (2)...(103): CutA1 divalent ion tolerance protein
  misc_feature (1)..(108): Xaa is any amino acid
MYLMAYVTAADEDEARRIARALVEERLAACANVLGRIESVYHWEGEVQSSTETAFLAKTTEACFDALAARVRELHSYELPCIVAVPLARGEAAFLDWIGENVRNANAK

SEQ ID NO: 58381 - DNA, 582 bp, Unknown
  Obtained from environmental sample
  misc_feature (1)..(582): n is a, c, g, or t
atgtccatgtacatcgcgggatcaatcgcctatgaccgcattatgacgttccccggagcctttgaggaacacctgctgccggatcaactgcatatcctgaacgtctgctttctgattgaccgcgtggacctcaaacgcggcggcaccgcgggcaacatcgcctacagtcttgccctgctgggagaaaaaccgcttatcctcgccacggcgggccgggactttgctctttatgaagccgcgctcaaaaaactgaagctgccgcgcgacggcatccgcatcgtcaaggacgaccttacagccgccgcctttatcatcaccgatcaacacaacaaccagattaccgccttttcgccttccgccatgcgtttcccctgcgaatacgcgtttcccgcgttggatgccgcgaacgatatcgcgataaccgggccccggcaccttgaggatatggtccgtctgccggccttttccggcaagcacggcatccggtatattttcgatccgggacagcagattcccgctcttttcggcgccgaactgacggacgcgcttaccggcgccttgcatgcatcaccacgactatga

SEQ ID NO: 58382 - protein, 193 aa, Unknown
  Obtained from environmental sample
  misc_feature (1)..(193): Xaa is any amino acid
MSMYIAGSIAYDRIMTFPGAFEEHLLPDQLHILNVCFLIDRVDLKRGGTAGNIAYSLALLGEKPLILATAGRDFALYEAALKKLKLPRDGIRIVKDDLTAAAFIITDQHNNQITAFSPSAMRFPCEYAFPALDAANDIAITGPRHLEDMVRLPAFSGKHGIRYIFDPGQQIPALFGAELTDALTGALHASPRL

SEQ ID NO: 58383 - DNA, 402 bp, Unknown
  Obtained from environmental sample
  misc_feature (1)..(402): n is a, c, g, or t
atgcatcaccacgactatgaactggaactcatcctgaagcgcaccggccttacggaaaaagcgctgaccgggcgcgtgaagtggctcatcaccaccttgggcgacaaaggctcccgcatacagggtgaggggcggcagcacacggtcgggattgccgaacccgtgcgggtggttgatcctaccggcgcgggcgatgcctaccgggctggcctgatcaaaggaatcgtctccgggctgcctatgccggaagcggcggctctcggggccggctgcgccagcttctgcgtggaacacagcgggacgcaggaacattccttcacgaagcgcagcttcctggcccgccacaagaaaaatttcggccggacgagcaaggcgattttcgatcctccgggaacgcgataa

SEQ ID NO: 58384 - protein, 133 aa, Unknown
  Obtained from environmental sample
  misc_feature (1)..(133): Xaa is any amino acid
MHHHDYELELILKRTGLTEKALTGRVKWLITTLGDKGSRIQGEGRQHTVGIAEPVRVVDPTGAGDAYRAGLIKGIVSGLPMPEAAALGAGCASFCVEHSGTQEHSFTKRSFLARHKKNFGRTSKAIFDPPGTR

SEQ ID NO: 58385 - DNA, 411 bp, Unknown
  Obtained from environmental sample
  misc_feature (1)..(411): n is a, c, g, or t
gtgtgccggaagaaggccgtaccgtggaaaaagtatgggaattttggccttcggatatgcagcgcattttccggcgggccggaatccacaagccccctccccccgcctgggaaccgggctgcgcgcacgcccaggccggttcccagggggccgcgcatcttgatccccaaggaacacgtcacctaccgggtgcgcctctccgcgccggagcggaacatgattgcgcttaccgccggcgctgacgcggaaagcggcgtcctgttctggtttgcggacaaagaatttttgggccggagcgcgccggaagaagccctcttgtggcaggcgcgcgcgggtctgcatcacctgcgcgtagtggacgacaaaggccgttcgcacagccggacggtactggtcgaggccgtgccatag

SEQ ID NO: 58386 - protein, 136 aa, Unknown
  Obtained from environmental sample
  DOMAIN (40)...(130): Penicillin-Binding Protein C-terminus Family
  misc_feature (1)..(136): Xaa is any amino acid
MCRKKAVPWKKYGNFGLRICSAFSGGPESTSPLPPPGNRAARTPRPVPRGPRILIPKEHVTYRVRLSAPERNMIALTAGADAESGVLFWFADKEFLGRSAPEEALLWQARAGLHHLRVVDDKGRSHSRTVLVEAVP

SEQ ID NO: 58387 - DNA, 1128 bp, Unknown
  Obtained from environmental sample
  misc_feature (1)..(1128): n is a, c, g, or t
atgatcagatcggccgagccccctcagccgttcatctatgcgctggccctggatcagggtctcattcattccatgagcatgctcatggacagcccgcgcagcttcggcggctatgatccggaaaatttcgacaaaaactttcgtggtccgctcgcggccaaggacgccctggccgcgagccgcaacctccccgctctcagcctggcggcgcgtctggcgaatcccgacctctacgcctttctgcgccgcgcagggacggaatttccttacgatgccgaacactacggcttgagcctcgtgcttggcggggccgaactgaccatgcgcgaactcggcgcgctctacgccatgctggccaataaaggcttgtggcgtccggcgcgcctgcgcgcggacaacccgccgccgcccgtgtccctgctgtcgcccgaagcggccttcatcactcgcgatatgctgcgcgatccgacccagaccgtgcgcagccggaccggacatctgccgctctatctcaaaaccggcacatccaacggcttccgcgatgcctggacggccggacttgtaggcccctatgcgctggtggtctgggcgggcaatttcgacaacagcgcgaatcccctgcttgtcggcgcggaaacggcgctcccgctctttgtcgatatagcccaaagcctcgcggaccacgaaaaacttgaggacatgacgcgggctttgcgccaggggttgcatgtgacacgcattccggcatgcgtggacagcggggacattgacatctccctgtgcccgcggacggcggaaacctggtttatccccggcacatcccccatcgcgtcctccggcgtcttcaggaaaattctggtggacgtgaactccggtctgcgcgcctgtgtgccggaagaaggccgtaccgtggaaaaagtatgggaattttggccttcggatatgcagcgcattttccggcgggccggaatccacaagccccctccccccgcctgggaaccgggctgcgcgcacgcccaggccggttcccagggggccgcgcatcttgatccccaaggaacacgtcacctaccgggtgcgcctctccgcgccggagcggaacatgattgcgcttaccgccggcgctga

SEQ ID NO: 58388 - protein, 375 aa, Unknown
  Obtained from environmental sample
  misc_feature (1)..(375): Xaa is any amino acid
MIRSAEPPQPFIYALALDQGLIHSMSMLMDSPRSFGGYDPENFDKNFRGPLAAKDALAASRNLPALSLAARLANPDLYAFLRRAGTEFPYDAEHYGLSLVLGGAELTMRELGALYAMLANKGLWRPARLRADNPPPPVSLLSPEAAFITRDMLRDPTQTVRSRTGHLPLYLKTGTSNGFRDAWTAGLVGPYALVVWAGNFDNSANPLLVGAETALPLFVDIAQSLADHEKLEDMTRALRQGLHVTRIPACVDSGDIDISLCPRTAETWFIPGTSPIASSGVFRKILVDVNSGLRACVPEEGRTVEKVWEFWPSDMQRIFRRAGIHKPPPPAWEPGCAHAQAGSQGAAHLDPQGTRHLPGAPLRAGAEHDCAYRRR

SEQ ID NO: 58389 - DNA, 1626 bp, Unknown
  Obtained from environmental sample
  misc_feature (1)..(1626): n is a, c, g, or t
atggctgttaaagcaaaaaaaacaggaaaacaaagcccaactaaggttgtcgccaaaaaaggcaaagaaaagatcagcggcgcccccgccaccgctggcgccgagagcgcccccggagtatacgacgaatctaaaataaaaaccctctcgtcgcttgagcatatccgcctgcgtaccggaatgtatatcgggcggcttggcgacggctccaacccggacgacgggatttacgtgctgctcaaggaagttattgataacggcattgatgaattcatcatgggcaacggtaaaaatattgaggtggcgataaaagacggcgcgaagcagggcgcggcttctgtgaaggtgcgcgactatggccgcggcattccgctggggaaacttgtcgaatgtgtctcggtgatcaataccggggcaaaatacaatgacgacgtgttccagttttccgtagggcttaacggcgtgggaaccaaggcggtaaacgccctgtcggtacatttcagggtggtcgccatgagaaacggcgaatttgccgaggcggtattcgagcgcggcaaattaaaaagcgaccgcaagggcaaactgaaggacaagcagaaagacgggacttatgtcgaattcaccccggatcccgaaattttcaaagattatcagtttaacgtcgagtttattgaaaaacggatgcaaaattacgcctacctgaacgcgggcttgaccctgtcgtttaacggcaagcattttgtttcaaagcggggcctgtatgatctgctctgcgaggagactggcgatgactgcctctatccgcttggctactacaagggcgaacattcgcctaacggacagcttgagtttgcctttacccataccaataactacggcgaggaatatttttcgtttgtcaacggacagtttacctccgacgggggaacccatctttcggctttcaaggaaggttttctcaagggaatacagacctactttaaaaaagactaccgcagcgaggacatccgcgaagggacggcctcggctatagcgataaaactcaagaacccggtttttgaaagccagacaaagaacaagctgggcaattcggacatccgcgcatgggtagtgcaggaaacccgcaacgccgtggaggactggctgcacaaaaaccccgaggcgggaaagaaacttgaacaaaaaataatttcaaacgagagcctgcgaaccgagcttaacgccgtcaagaaagaggcgagggaagcggcgaaaaaaatcgctttgaagatacccaagctgaaagactgcaagtaccaccttgaggacggtaaagacggcgcggaatcgacgatattcataaccgagggggattccgcgtccggttccattgtttccagccgcgacgtgatgactcaggcgattttctccctgcgcggcaaagttgagaacatgtacggcaaaaaacgcgcggccatctacaaaaacgaggaactttacaatatgatgatggccctgggcatagaaaacgacgttgagggcctgcgttacgcgaaaatagtccttgctaccgacgcggattttgacggctttcacatacgcaacctcctgctgactttctttctttcgtttctcgtgccgatctga

SEQ ID NO: 58390 - protein, 541 aa, Unknown
  Obtained from environmental sample
  DOMAIN (71)...(212): Histidine kinase-, DNA gyrase B-, and HSP90-like ATPase
  misc_feature (1)..(541): Xaa is any amino acid
MAVKAKKTGKQSPTKVVAKKGKEKISGAPATAGAESAPGVYDESKIKTLSSLEHIRLRTGMYIGRLGDGSNPDDGIYVLLKEVIDNGIDEFIMGNGKNIEVAIKDGAKQGAASVKVRDYGRGIPLGKLVECVSVINTGAKYNDDVFQFSVGLNGVGTKAVNALSVHFRVVAMRNGEFAEAVFERGKLKSDRKGKLKDKQKDGTYVEFTPDPEIFKDYQFNVEFIEKRMQNYAYLNAGLTLSFNGKHFVSKRGLYDLLCEETGDDCLYPLGYYKGEHSPNGQLEFAFTHTNNYGEEYFSFVNGQFTSDGGTHLSAFKEGFLKGIQTYFKKDYRSEDIREGTASAIAIKLKNPVFESQTKNKLGNSDIRAWVVQETRNAVEDWLHKNPEAGKKLEQKIISNESLRTELNAVKKEAREAAKKIALKIPKLKDCKYHLEDGKDGAESTIFITEGDSASGSIVSSRDVMTQAIFSLRGKVENMYGKKRAAIYKNEELYNMMMALGIENDVEGLRYAKIVLATDADFDGFHIRNLLLTFFLSFLVPI

SEQ ID NO: 58391 - DNA, 705 bp, Unknown
  Obtained from environmental sample
  misc_feature (1)..(705): n is a, c, g, or t
atggcgttaatatcaaaagcgtccatcgcggaagttaacagcagattggacgcgatttccgtagtgggcgaatatgtccgcttggagaaaaaaagcggacgctggtggggaagatgtccctttcacggcggcggtcaggaaaaaaccccttctttcaaagtagaccccgatttaaaaatgtaccactgtttcggctgcggtaaaggcggcagtgttatcagttttgtcatggaaatggacaagctcacctatcccgaagcgataaagaaccttgccaaaaaaatgagcatagagcttatttatgaagaaggcggtcccgcggaagacggcgaagatcattcaatcaaagaagaactgtacgaattatataaaaggatgacggggacttttgagcattttctgtatgaaaaagatgaaggaaaatccgctcttaactacattttggacagaagcataagcgaggagatgatcaaaaagtttcaacttggttttgctccctcggatcgggattttctgcacaaatttctaaaacaaaaaggctattccgatgaatttcttgaaaaatcagggctgttttcccgcaaaatacaaaacaatcccgcttttttcaggacggcttatgttccccattaccgatcgtcaagggaaaatagtcgcttttgggggacgcgccctgcccggaacagtgcaaagcgacggaaatga

SEQ ID NO: 58392 - protein, 234 aa, Unknown
  Obtained from environmental sample
  DOMAIN (134)...(215): DNA primase catalytic core, N-terminal domain
  misc_feature (1)..(234): Xaa is any amino acid
MALISKASIAEVNSRLDAISVVGEYVRLEKKSGRWWGRCPFHGGGQEKTPSFKVDPDLKMYHCFGCGKGGSVISFVMEMDKLTYPEAIKNLAKKMSIELIYEEGGPAEDGEDHSIKEELYELYKRMTGTFEHFLYEKDEGKSALNYILDRSISEEMIKKFQLGFAPSDRDFLHKFLKQKGYSDEFLEKSGLFSRKIQNNPAFFRTAYVPHYRSSRENSRFWGTRPARNSAKRRK

SEQ ID NO: 58393 - DNA, 486 bp, Unknown
  Obtained from environmental sample
  misc_feature (1)..(486): n is a, c, g, or t
atggcggataatctttttagtaatttaaaaaatatagacccgacaattctttcgatgactccgaaagagttaaacgaaaaaatagtaatcgcttccattgttgaaagagaatacagagtagagcaggaagcgcctgttatggctggagttttttataacagattaaaaataaaaatggcgctgcaatcctgcgctaccgtagaatacattataacggagatacaaaaccgtcctcatccgtctgttttgttattttcagacatagaaattgatcacccgtataatacatacattaagccgggtcttccgccgggaccgatttccgctcccggacttaccgccttgcaagccgcattttccccctcaaatacaaattatctgtatttccggcttgaagatgtcgcgagcggaagacattatttttcccggacttatgacgaacacataaaagccggtcagcttataacaaaaccatcatggcgttaa

SEQ ID NO: 58394 - protein, 161 aa, Unknown
  Obtained from environmental sample
  DOMAIN (1)...(155): Aminodeoxychorismate lyase
  misc_feature (1)..(161): Xaa is any amino acid
MADNLFSNLKNIDPTILSMTPKELNEKIVIASIVEREYRVEQEAPVMAGVFYNRLKIKMALQSCATVEYIITEIQNRPHPSVLLFSDIEIDHPYNTYIKPGLPPGPISAPGLTALQAAFSPSNTNYLYFRLEDVASGRHYFSRTYDEHIKAGQLITKPSWR

SEQ ID NO: 58395 - DNA, 816 bp, Unknown
  Obtained from environmental sample
  misc_feature (1)..(816): n is a, c, g, or t
ttgaagaaggagaagataatggaaaaggttacacttgctgaattaaaagaacttttttattcggcgtatgatgccaaagaaaatggaaaatacgacactgctattggagtgttgaacatagtcattcctgaatttcagaaattgggtgatgatttctggacaggtacggcttatgaatgtcgtgctttatcatatttatcaaaagacgatgaaggtaattgccgaagcgattataaaaccgctatcaaacactatgcaaaatcggcacagcagggtaacaaagatgcattaaaatctcttgatcggataaaagaaatgggatttgaagtaccttcaatatcaagcggttccggcggcggttttggaatgggcggatcatcatcaggaagcagcaagggaaagatcaccttaccaaacggagatgtctatgaaggagaaacacgtaacggcgtaccacatggaaaaggaaaaatgatctacgcagcaactggtaatgtctatgaaggcgattttgttgacggcaaacaaaccggcaaagggaaatatacattcgcaagcggcaatgtatacgaaggcgattttgttgacggcaatttccacggcaaagggaaaatgaccgactctgacggcgatgtatacgaaggtgattttgttggtgacaaaaaacacggcaaagggaaatatacattgacagacggcagagtgtacgaaggtgatttcattaacaacgaaccccacggcaaagggaaatatacctaccctgacggcagtgttcaaaaaggaaattggaaagacggcaagtttgtggtgaaatga

SEQ ID NO: 58396 - protein, 271 aa, Unknown
  Obtained from environmental sample
  DOMAIN (143)...(165): MORN repeat
  misc_feature (1)..(271): Xaa is any amino acid
MKKEKIMEKVTLAELKELFYSAYDAKENGKYDTAIGVLNIVIPEFQKLGDDFWTGTAYECRALSYLSKDDEGNCRSDYKTAIKHYAKSAQQGNKDALKSLDRIKEMGFEVPSISSGSGGGFGMGGSSSGSSKGKITLPNGDVYEGETRNGVPHGKGKMIYAATGNVYEGDFVDGKQTGKGKYTFASGNVYEGDFVDGNFHGKGKMTDSDGDVYEGDFVGDKKHGKGKYTLTDGRVYEGDFINNEPHGKGKYTYPDGSVQKGNWKDGKFVVK

SEQ ID NO: 58397 - DNA, 768 bp, Unknown
  Obtained from environmental sample
  misc_feature (1)..(768): n is a, c, g, or t
gtgacagacggaataaagacgtgccgcagaaaccggctgatgacgggcagcagtacgcctttacccggggaaatgtttattacggaggtaagaacgatggtgaatgaagcaaccgttgccagattgcatgagatgggtttttccgttatggcctcctcttaccgacggcagatggaggacaacgcaatacacaagctctcctttgatgaacggttcggcctgctggtggataccgaatggacaagccgaaaaaacaaccgtctcaaacgccttatacacagagccggtttcccattatcaggcgcctgcattgaggatattgaataccgtgcggaccgcaaactgaacagggaacaaataatccagctttcatcctgcagctatattgctgaaaaacacaatgtcattatcctcggcgcgaccggggccggcaaaacgtatctcagctgcgccctggggatggcggcctgccgccgcttccattcagttaaatatatccgtttgccggaattactggatgaacttgctgttgccaggggggaaggcatcttccaaaaggcaatacagggatacaaaaaaatagatctgcttgtccttgatgaatggcttttaattccgctcactgattctgaaagtcgggatattctggagatagttgaaagccgtcatgggcggtgttcaaccgtcttctcttctcaattgatcctgccggtgggcagactaaaatcgttgaaggccctcttggagaagccgttcttgaccgtatag

SEQ ID NO: 58398 - protein, 255 aa, Unknown
  Obtained from environmental sample
  DOMAIN (55)...(84): IstB-like ATP binding N-terminal
  misc_feature (1)..(255): Xaa is any amino acid
MTDGIKTCRRNRLMTGSSTPLPGEMFITEVRTMVNEATVARLHEMGFSVMASSYRRQMEDNAIHKLSFDERFGLLVDTEWTSRKNNRLKRLIHRAGFPLSGACIEDIEYRADRKLNREQIIQLSSCSYIAEKHNVIILGATGAGKTYLSCALGMAACRRFHSVKYIRLPELLDELAVARGEGIFQKAIQGYKKIDLLVLDEWLLIPLTDSESRDILEIVESRHGRCSTVFSSQLILPVGRLKSLKALLEKPFLTV

SEQ ID NO: 58399 - DNA, 1146 bp, Unknown
  Obtained from environmental sample
  misc_feature (1)..(1146): n is a, c, g, or t
gtggattgggctggggatgccgcttctatcactgacaatgtaagcggggggccaataccggtatatatatttgtcgcaatactgccatgcagcgggtatgcctacgcggaagggttcctgaaccggaacatggaaagctggataaccgcccatgtccgtgcgtacgagttcttcggcggcgtgacaaggatacttataccggacaatctaaagaccggcgttgagaaagcggactggtacaatcccgtaatcaacaaaacctatcatgaaatggccgagcattacgggacggcagttgttcccgcgggagtgaggcagccaaaagcgaaagccagcgtggaacgggcggtaggcatgctttcaacatggataaccgccgccttgcgcaaccggcagttcttttccctttgggaattaaacgaggcgatgcggcagaagctggccgactttaaccataaacctttccagaagaaaccgggcagccgggaaagcgccgcgaaccgaaggttcgatgccggggaacgcccattcctcatgccgctcccgtcaaaacccttcgagctttcaacatggaagattgccaccgtccagcttaactaccacatcgccgccgataagatgaattatagcgttccctatgagtatatcaagcataaagtcgatgtcaggcttacccagcgcatggtggagatattctatcaggggaagaggattgccagccacatacggctttacggccatagcgggcaatacagcacaacggcggaacatatgccggagaaacaccggcagtatacccagtggaacgccgagcggtttatacggtgggcctgtgatgtcggcccctgcacggaacaggcggtcaaagccgttatcgcctcccgaaaagtggaacagcagagttataaaacttgcatcgccctcctaaaactggctgatacttattctgcgggcaggctggaaacagcctgtgaaaaagccctctcctattcgtcatgccccagctttagaagcatccgcactatattaaagaccggcagtgacagacggaataaagacgtgccgcagaaaccggctgatgacgggcagcagtacgcctttacccggggaaatgtttattacggaggtaagaacgatggtgaatga

SEQ ID NO: 58400 - protein, 381 aa, Unknown
  Obtained from environmental sample
  DOMAIN (4)...(170): Integrase core domain
  misc_feature (1)..(381): Xaa is any amino acid
MDWAGDAASITDNVSGGPIPVYIFVAILPCSGYAYAEGFLNRNMESWITAHVRAYEFFGGVTRILIPDNLKTGVEKADWYNPVINKTYHEMAEHYGTAVVPAGVRQPKAKASVERAVGMLSTWITAALRNRQFFSLWELNEAMRQKLADFNHKPFQKKPGSRESAANRRFDAGERPFLMPLPSKPFELSTWKIATVQLNYHIAADKMNYSVPYEYIKHKVDVRLTQRMVEIFYQGKRIASHIRLYGHSGQYSTTAEHMPEKHRQYTQWNAERFIRWACDVGPCTEQAVKAVIASRKVEQQSYKTCIALLKLADTYSAGRLETACEKALSYSSCPSFRSIRTILKTGSDRRNKDVPQKPADDGQQYAFTRGNVYYGGKNDGE

SEQ ID NO: 58401 - DNA, 1449 bp, Unknown
  Obtained from environmental sample
  misc_feature (1)..(1449): n is a, c, g, or t
ttgaaaatcggggacaggtccgcctcggcgataaaatcaggcggcaccacccgacgggccgcaaaaatggtaaccctggacgtggatcaccccgatgtggaaaaatacatttcctggaaagccgaggaggaacataaagtcgcctctatggtgaccggctcggcgatagtgaaaaaacaccttgacggaatcaaaaaggcccttgccagtttccgcgggccggacgccgacaaattcaacatcgaaaaaaaccacgatctggcggcggttctccgcgcggcgttaggtgataaaattcccccgtcctacctgtaccagcagctcaggcgcatggaacacggcgatgacgaggtatattcacagacctactccaccgcctgggacgatgaggcgtacaacaccgtttcgggccagagttcaaataacagcctgcgcataaacgatgagtttatgtgggcggtgatgaacgacggggactggaatcttaccagccgcaccgccggcaatgtcatgaaaacgatcaaggcccgcaaactctggacggatatagcccgcagcagttggcagtgcgccgatcccggactgcaataccacacaaccatcaatgactggcatacctgcccggcgggcggggaaatccgggcgtcgaatccgtgttcggaatacatgtttctggacgacaccgcctgcaacctcgcttcgataaacctgggcgcgttatacgataaacaatcaaaaacgttcagcgtcgagggctacctccatgccattggaatttggaccacggtgcttgaaatttcggtggtgatggcccagttcccgtcgcccaaaatcgcggagctttcttacctgtaccgcaccctcggcctgggttacgcaaaccttggaaccctgcttatgcttatggggctggcctatgattctcctgagggcagggcggtggcgggggcgctttcggccctgctttcaggcgaggcgtattcccagtccgcccgcatggccgccgaactggggcctttcctccgttacaaggaaaattccgccaatatgcttcgcgttatacgcaaccacaggcgggccgcgtacaacagcctcgacgccgagtatgagggtctgcacaccataccctgcgggatcgatcagacaaactgcccggcatacctgctggacgcggccaaggccgcatgggatcgtgcgctggaactcggcaaggcccacggctaccgtaacgcccaggttacagccatcgccccaaccggcactatcgggctgttgatggactgtgacaccaccggcgtcgaacctgattacgcccttgtaaaattcaagaaactcgccggaggcgggtacttcaaaattatcaaccagtcggtgccgctcgcgctggaagcccctgggttattcgccgcaattaatagaagaaattatcgcgtatgccaccggctataa

SEQ ID NO: 58402 - protein, 482 aa, Unknown
  Obtained from environmental sample
  DOMAIN (47)...(480): Ribonucleotide reductase, barrel domain
  misc_feature (1)..(482): Xaa is any amino acid
MKIGDRSASAIKSGGTTRRAAKMVTLDVDHPDVEKYISWKAEEEHKVASMVTGSAIVKKHLDGIKKALASFRGPDADKFNIEKNHDLAAVLRAALGDKIPPSYLYQQLRRMEHGDDEVYSQTYSTAWDDEAYNTVSGQSSNNSLRINDEFMWAVMNDGDWNLTSRTAGNVMKTIKARKLWTDIARSSWQCADPGLQYHTTINDWHTCPAGGEIRASNPCSEYMFLDDTACNLASINLGALYDKQSKTFSVEGYLHAIGIWTTVLEISVVMAQFPSPKIAELSYLYRTLGLGYANLGTLLMLMGLAYDSPEGRAVAGALSALLSGEAYSQSARMAAELGPFLRYKENSANMLRVIRNHRRAAYNSLDAEYEGLHTIPCGIDQTNCPAYLLDAAKAAWDRALELGKAHGYRNAQVTAIAPTGTIGLLMDCDTTGVEPDYALVKFKKLAGGGYFKIINQSVPLALEAPGLFAAINRRNYRVCHRL

SEQ ID NO: 58403 - DNA, 1668 bp, Unknown
  Obtained from environmental sample
  misc_feature (1)..(1668): n is a, c, g, or t
ttggaactggtcggcaaagacggcacgtccatctcggccttcgcagatgccctccaagccctcgatggcatccacccagtcattccaattatggtggtgggcggagcagggtcggtgcctgcggcggcgctggtggtcgctgccctgaaagccaaaggcgccgacttgtcaaacgcgaatttgaccctagggaacgacccacttgggttccttgcacaaaatggccaactgccgatgagcgttgacgaagcgtttgacagcttggccagcttgaccaaatgggccgccacaagcgcaccaaaagccaaaactctggtagcctgcgggttcccatattttgacgctggcgcggatgcagttcagcagctagccttcacgctttcaagcgcagtagcagcactgagggccatggaggctaggggcgtaagcctagaggatgctgcgtctagaatggtcttccgcctaaaggtgggcagccatttctttatggaaatagccaagctgcgtgccatgcgagtgctttgggcgcaagtggctagggcatgcggagccagcgatgaagccgcaaagatatgcctgcaggccaaaaacggccgcatcaataagacccaattcgacccgcatgtaaacatactgagggggacgaccgaggctttcgcagccgtcgccggcggggccgactcattgcacatcggctcgtttgacgagacgcttggcgggccgccatccgaactgggaaggcgtattgccagaaacacgcagctaatactgcggggagagtccaagctggatcacgtcgttgacctagccggcgggcagttgggcagtcgaaacactgacacacaattaatagtcgcggcatggaagctgttccaagaagttgacgcgatgggcggcttgcaaaaggcgcttgaaaatggcttcgtccaaaaggccatactcgaagtcgcaaacgctaggcgcaaagccgttgccgcccgcacagacgtaatagtgggcataaaccagtatccgaatgccatagagggaatgccagaagaaaaaacagttgatcatgcagccatcaaggcaaagctagggcctgcggcctctgccgcaaggacgggacaggccaagtcgaaagactttggcgcactcgttgacgcagcgcctaagtcaactctgggcgaaatatcaaaggcccttggttgttccggcagcatcaaggtagagcctcttgtggcgttccgcaccgccgaaatatttgaagccctccgcaaagccatgatcaaggctcgaaaaggcaagacggatgtatttttggcaaaccttgggccagtgggggcctatatgccccgtctggactttacccgcgcctttttccaagttggcgggttcaccgtggacgacaagtcttggttcaagacacctgaggaggcagcaaaggcagcgattgccagcggggctccgatagtagtggctgtcgggttggacgacacttacattgagcaggcccaagggcttgccaaggctctcaaggccggaggagcaaaaacagtgctgctggctggccttctcaaagaccataccgacgcattcaaggcggccggcattgacgattttgtccacataaaaagtgatgctcacgccgtcttaagcggcttggcaaagggtatgggggtgatctga

SEQ ID NO: 58404 - protein, 555 aa, Unknown
  Obtained from environmental sample
  DOMAIN (1)...(401): Methylmalonyl-CoA mutase
  misc_feature (1)..(555): Xaa is any amino acid
MELVGKDGTSISAFADALQALDGIHPVIPIMVVGGAGSVPAAALVVAALKAKGADLSNANLTLGNDPLGFLAQNGQLPMSVDEAFDSLASLTKWAATSAPKAKTLVACGFPYFDAGADAVQQLAFTLSSAVAALRAMEARGVSLEDAASRMVFRLKVGSHFFMEIAKLRAMRVLWAQVARACGASDEAAKICLQAKNGRINKTQFDPHVNILRGTTEAFAAVAGGADSLHIGSFDETLGGPPSELGRRIARNTQLILRGESKLDHVVDLAGGQLGSRNTDTQLIVAAWKLFQEVDAMGGLQKALENGFVQKAILEVANARRKAVAARTDVIVGINQYPNAIEGMPEEKTVDHAAIKAKLGPAASAARTGQAKSKDFGALVDAAPKSTLGEISKALGCSGSIKVEPLVAFRTAEIFEALRKAMIKARKGKTDVFLANLGPVGAYMPRLDFTRAFFQVGGFTVDDKSWFKTPEEAAKAAIASGAPIVVAVGLDDTYIEQAQGLAKALKAGGAKTVLLAGLLKDHTDAFKAAGIDDFVHIKSDAHAVLSGLAKGMGVI

SEQ ID NO: 58405 - DNA, 495 bp, Unknown
  Obtained from environmental sample
  misc_feature (1)..(495): n is a, c, g, or t
atgtattttaatgatctgatcgagaactacaacaaagaacaccgcgagcgggatatgtttcacgatctcatgcgctaccgcgtgaatgagattcttcttgtagcaagcttgtacaactctcttgtgataacgcaggacggggctctggcggagcagatatacggcgagtttttcagcttaaatttgaatacagtcccaagggttacttgcgcgtatacgctggagtccgcgagcgaaatgttctgtcgtaataagtatgacatggtcatacttatggctggcctggattttgacacgccccttgagcttgccggaaaaatgaaagcgcacgatcccaatgttcctgttctgcttcttgtaatgaacaactcaagccttgctgggcttgatccttccaggcccgaatgtaaagcggtcattgacaaaatattttgtctggaacggttattcaaaactgtttgtcgccatgatcaagtatatcgaacacctgcataa

SEQ ID NO: 58406 - protein, 164 aa, Unknown
  Obtained from environmental sample
  misc_feature (1)..(164): Xaa is any amino acid
MYFNDLIENYNKEHRERDMFHDLMRYRVNEILLVASLYNSLVITQDGALAEQIYGEFFSLNLNTVPRVTCAYTLESASEMFCRNKYDMVILMAGLDFDTPLELAGKMKAHDPNVPVLLLVMNNSSLAGLDPSRPECKAVIDKIFCLERLFKTVCRHDQVYRTPA

SEQ ID NO: 58407 - DNA, 1026 bp, Unknown
  Obtained from environmental sample
  misc_feature (1)..(1026): n is a, c, g, or t
atggttgataatgacacgcagatcggattggttcaggtaattccccttatagaggattccatccgctactactcgcgctatctgccggagctttactctgtggtcttaaaccaaaccaaacttcttttggaggaagaacgctctgtcgaaacaaacaaaatagtcagaatgagatggcggccaaaaattctcttggccgccagttacgaagaagccctggatttgttcaaacgctatgagccttatttgttgacagtgatttcggacattcgctatccggttaatggcgtagatgatcccgaagccggatttaagtttcttaccgatgttaaggcaagaaggcccgaaacccctattctattgcaatccagtgaagatgaaaaccgaaataaagcttacgcaatgggggccgcgtttgtcgataaaaactcaaacacccttggtcatgacatgattgttttttttcaaacccatctgggctttggcccgtttgttttcagaatgccggatggcagggaactgtcgcgggccgcaacaatggatgagtttgaaacgcaattaagaacaattcctgtcgagtccattttctatcacagccgcaaaaatcacttttcaacatggtttatggccagaggggaagttaaaattgcgagagttatgcgaaactacagcgccgatgattttggctcgtctgaggctataagggattatttgattgaaagcatcggcaaaataaaagccgccaaaacacggggtagtataccgatgttgaacccatacgacttaatgactgaaaattcagattcctcaaagacgccgccaaataaactcgttcggcttggagacggctcggtaggtggcaaaggacgtgggcttgtattcataagcagcttaatagagaattccgcttttatcggtctttcagaaaaaatggaaatacaaattccatacacggcttttatcggcatagacgaattcgaaggtttatggaacaaacgagctgtggggatttcgtggattacatga

SEQ ID NO: 58408 - protein, 341 aa, Unknown
  Obtained from environmental sample
  misc_feature (1)..(341): Xaa is any amino acid
MVDNDTQIGLVQVIPLIEDSIRYYSRYLPELYSVVLNQTKLLLEEERSVETNKIVRMRWRPKILLAASYEEALDLFKRYEPYLLTVISDIRYPVNGVDDPEAGFKFLTDVKARRPETPILLQSSEDENRNKAYAMGAAFVDKNSNTLGHDMIVFFQTHLGFGPFVFRMPDGRELSRAATMDEFETQLRTIPVESIFYHSRKNHFSTWFMARGEVKIARVMRNYSADDFGSSEAIRDYLIESIGKIKAAKTRGSIPMLNPYDLMTENSDSSKTPPNKLVRLGDGSVGGKGRGLVFISSLIENSAFIGLSEKMEIQIPYTAFIGIDEFEGLWNKRAVGISWIT

SEQ ID NO: 58409 - DNA, 579 bp, Unknown
  Obtained from environmental sample
  misc_feature (1)..(579): n is a, c, g, or t
atgcggcgagcaagagcgacaaacaaagctgtggttagcaagcaatcgttttgtgtgcttgatctgtgtacgggttcaggggcaatagcaatcgcgttgaaacatacaatgccggaactggaagtgtgggcaacagacatttccgccgaagccctggaaaccgccaaaacaaacgccgcccgcctcttgcccccaaattcaatccgctttttccaaggcgatctctacgacgccctaccctctctttcttcttctttcttccctcttccctcttctctcttctttttaatagttagcaatcccccctacataccttccgccgaaatctcctccctctcgcctgaggttcgcatggaaccggcgctagctctggacggaggcgatgacgggttagacgtaatcagaaaaatcgtgtcacgcgcgccggaatttctccgcaagggcggctgtttgctgctggaagccgatcctcgtcaaatggcggccatagcgtccatgtataaagaagcaggtttttctgacattcaaacccacgcggatctatccggcagggaacgggtgatcagcgggattaaatag

SEQ ID NO: 58410 - protein, 192 aa, Unknown
  Obtained from environmental sample
  DOMAIN (9)...(176): Methyltransferase small domain
  misc_feature (1)..(192): Xaa is any amino acid
MRRARATNKAVVSKQSFCVLDLCTGSGAIAIALKHTMPELEVWATDISAEALETAKTNAARLLPPNSIRFFQGDLYDALPSLSSSFFPLPSSLFFLIVSNPPYIPSAEISSLSPEVRMEPALALDGGDDGLDVIRKIVSRAPEFLRKGGCLLLEADPRQMAAIASMYKEAGFSDIQTHADLSGRERVISGIK

SEQ ID NO: 58411 - DNA, 540 bp, Unknown
  Obtained from environmental sample
  misc_feature (1)..(540): n is a, c, g, or t
atgattataactggaggaaaaattatgttaattgatgacgttcttgaatccgcgataacttacaatgggaatgacgtaaaacgtatcaatcatttacttaaagtttattcatttgcccatcttattggcattatggaaaaatgtgatacgaaaacacaggaaataattgatatttcagcaatactccatgatattggcattcatgaagcggaacggaaacacaattcaagcgccggaaactggcaggaaatcgaagggccttcggttgccgatgagattttaaaaaaattcaatctggataatgttattaaagacagggtattatttcttatcggacatcatcaccattacaactctattgatggcatagattatcaaatactgattgaagctgattttttggtaaatatttttgaggatggaatggatgaaaattcaataaaaagcgtcaaggaaaaaatattcaaaacaaaaaccggtataaatttactggaaaaattatatagtacagggaattctggcaataaggataaaccctaa

SEQ ID NO: 58412 - protein, 179 aa, Unknown
  Obtained from environmental sample
  misc_feature (1)..(179): Xaa is any amino acid
MIITGGKIMLIDDVLESAITYNGNDVKRINHLLKVYSFAHLIGIMEKCDTKTQEIIDISAILHDIGIHEAERKHNSSAGNWQEIEGPSVADEILKKFNLDNVIKDRVLFLIGHHHHYNSIDGIDYQILIEADFLVNIFEDGMDENSIKSVKEKIFKTKTGINLLEKLYSTGNSGNKDKP

SEQ ID NO: 58413 - DNA, 897 bp, Unknown
  Obtained from environmental sample
  misc_feature (1)..(897): n is a, c, g, or t
ttgtataatatcgacaaactttttgaggcggtcagcgcgaagggccatgtgtgcgtgggattagatacagcagcggaatatgtcccgccggcggaacggaagcgggccgcctccgacgctgaagcggttctggcttttaaccttgcccttgttgactctacttttgacgcctgcgcctgctacaaggtgcagatcgcctactacgaggaaatggggctggaggggctgggttgttacgcgaagaccctgcggtacatccgcgaaaaaggcggcctggttatagccgatattaaacgcggcgatattgccgataccgccctgcgttacgcgaaagcccatttcgccggggaatttgaggccgattttgtcacgctttctccctatatgggcatggactcaattgagccctggcttgcctacgccgaacaaagcggcaaaggcgcttttgtgctgatgaggacgagcaacaagggtatgcgggattttgagtatcttgaattatcgtccggtaaaaaacgcctgtaccacgcgttggagacaaactttcaaggcttgccgaggccccataagggtattcacggttacggggcctttggcgccgttgtcggctgtaccgaaagggatgaggccgccgaaatccgcaaaaaatactccaatctatttttccttatacccggctacggcgctcagggcggcgcggctgacgacgcggcgctgcttttacgcgaaggaaacggcggtgtagtgaacgcctcacgatccatactaaaggcctgggaaacagaacttaaaaaatcaggcggggaggggtcggctataacaaattcctttgccgcggaagcggcccgcagggcggcgattgagatgcgtgacgctatacgggctgttaaacactaa

SEQ ID NO: 58414 - protein, 298 aa, Unknown
  Obtained from environmental sample
  DOMAIN (15)...(266): Orotidine 5'-phosphate decarboxylase / HUMPS family
  misc_feature (1)..(298): Xaa is any amino acid
MYNIDKLFEAVSAKGHVCVGLDTAAEYVPPAERKRAASDAEAVLAFNLALVDSTFDACACYKVQIAYYEEMGLEGLGCYAKTLRYIREKGGLVIADIKRGDIADTALRYAKAHFAGEFEADFVTLSPYMGMDSIEPWLAYAEQSGKGAFVLMRTSNKGMRDFEYLELSSGKKRLYHALETNFQGLPRPHKGIHGYGAFGAVVGCTERDEAAEIRKKYSNLFFLIPGYGAQGGAADDAALLLREGNGGVVNASRSILKAWETELKKSGGEGSAITNSFAAEAARRAAIEMRDAIRAVKH

SEQ ID NO: 58415 - DNA, 720 bp, Unknown
  Obtained from environmental sample
  misc_feature (1)..(720): n is a, c, g, or t
atgaaaataattctttccgtttacggcgtttgcgacatcggcttaaagaaaccaaacaacgaagacatgatcctgcttaatgacgaaatgttccgggacggttcaagacagaaggaatttgacgccggtaataatatagtaatagccgtagccgacgggataggcgggctggacagaggagaagccgccagcgaaatggcgctggcaaggttaaaggaaattcttgaaaaaattcccgatgatttgaacaatcaggaattaaaagaagtattcgacgtatataccaaggaaacccataaagcaatgtcgcagggaatgggaagcacaatagccgggctttttgtttatcagggcaaagtcttccgtttccatgccggggactcaaggatttatctgctgcgtgacggcggactgcgcaggcttacgatagaccactctctcagggagtcaggggggaaccctgatgccccttccaatataattaccaacgcattaggtggtggaaacagcgcgttcatagaatttgaggaagtcgaacagccttttttgaataatgacatataccttctgtcttccgacggcttgcacgatcttgtcccccccgatataattccgatacgcttatgctgccgcgaaccgaaggggtcgaagctgccgaaaaactgttggcgtttgcgaaagagaatggcggaaatgataatatttcaatcattaccataa

SEQ ID NO: 58416 - protein, 239 aa, Unknown
  Obtained from environmental sample
  DOMAIN (6)...(235): Protein phosphatase 2C
  misc_feature (1)..(239): Xaa is any amino acid
MKIILSVYGVCDIGLKKPNNEDMILLNDEMFRDGSRQKEFDAGNNIVIAVADGIGGLDRGEAASEMALARLKEILEKIPDDLNNQELKEVFDVYTKETHKAMSQGMGSTIAGLFVYQGKVFRFHAGDSRIYLLRDGGLRRLTIDHSLRESGGNPDAPSNIITNALGGGNSAFIEFEEVEQPFLNNDIYLLSSDGLHDLVPPDIIPIRLCCREPKGSKLPKNCWRLRKRMAEMIIFQSLP

SEQ ID NO: 58417 - DNA, 876 bp, Unknown
  Obtained from environmental sample
  misc_feature (1)..(876): n is a, c, g, or t
ttgggttatggagagcggccgagacgtttgtcttcggctgatattgcttccctgtcaaaggaagatacccttacatttcttcctgaagatattcccggcacgactgccgataaaatggtttccattgacgaggcgcttaaagacctcaatatgctggtggggcttaaatcggtcaaagacgcggtaacaaaaataaccaactctttgcaggcccaaaaacttaccggcgaaacagagacgcttgccaaacattttgtttttatgggtaaccccggcacgggaaaaacgactgtcgcgagaataatgggcgatgtgttcaaagccgtaggcatgcttcccaccaataatttgatagaagcggacagggggaaactggtggcctcctatgtaggccagacggccaagctggtggcgcagcaatgcgacaatgctatgggcggcatcctttttatagatgaagcgtactcgctgaaacagggtgtgcaggacagtttcggacaggaagcggtggacacgcttcttaaacggatggaagatgaccggggcaaatttgttgttatagccgccggttataccaaagagatggaagaatttttagcgtctaacagcgggtttaaatcgcggttttcggattatatcaactttgacgactacaatacatccgaaatgcgggaaatctttatagggatgtgcaaaaaaaggaaaattgaatttgcccccggctttgatgaggctctgcaaaaaagactgaaagaattatatgacggaagaaacacccagtttgccaatgcccgtacggtaaggcaattatttgacaaaacaagggagaacgtatccgtaagggtgcttgccatgcggaaacccgaagagaactaa

SEQ ID NO: 58418 - protein, 291 aa, Unknown
  Obtained from environmental sample
  DOMAIN (84)...(276): ATPase family associated with various cellular activities (AAA)
  misc_feature (1)..(291): Xaa is any amino acid
MGYGERPRRLSSADIASLSKEDTLTFLPEDIPGTTADKMVSIDEALKDLNMLVGLKSVKDAVTKITNSLQAQKLTGETETLAKHFVFMGNPGTGKTTVARIMGDVFKAVGMLPTNNLIEADRGKLVASYVGQTAKLVAQQCDNAMGGILFIDEAYSLKQGVQDSFGQEAVDTLLKRMEDDRGKFVVIAAGYTKEMEEFLASNSGFKSRFSDYINFDDYNTSEMREIFIGMCKKRKIEFAPGFDEALQKRLKELYDGRNTQFANARTVRQLFDKTRENVSVRVLAMRKPEEN

SEQ ID NO: 58419 - DNA, 636 bp, Unknown
  Obtained from environmental sample
  misc_feature (1)..(636): n is a, c, g, or t
atggggaaaaacaaatcccaaaacagcgatgagaaaaatgaattttccaggggaataaaatataaagaattatttcatactaccggggtaaaacaaattttggtcgcgtttttctgttattgcagccttgaaagcatgaccggattgtggggaagcagttttttggttatggaaagaaatatatccccggaaatagccgcccaatggatctcgttatattatatcggcataacggtcggccgctttatttcaggttttctgaccatgaaattaaacaaccgtcaaatggtccgtttggggcaggcacttatcgcgtgtggaattattgccttaataatacctgcaggcaaagtgctattattgccgggattttttacaatcggacttggatgcgctcccatataccccagcctcttacacgaaaccccgagaaatttcggcaaagaaaaatcgcaggcgataatgggaatacaaatggcaagcgcgtatattgggtctacgtttatgccgccgttgtttggacggataacgccatattttagttttaaaatttttccgttttttatcggcggcatattggcgctcaacataataatggtcgagttactgaacaagcgagttgacaaaaagggctag

SEQ ID NO: 58420 - protein, 211 aa, Unknown
  Obtained from environmental sample
  misc_feature (1)..(211): Xaa is any amino acid
MGKNKSQNSDEKNEFSRGIKYKELFHTTGVKQILVAFFCYCSLESMTGLWGSSFLVMERNISPEIAAQWISLYYIGITVGRFISGFLTMKLNNRQMVRLGQALIACGIIALIIPAGKVLLLPGFFTIGLGCAPIYPSLLHETPRNFGKEKSQAIMGIQMASAYIGSTFMPPLFGRITPYFSFKIFPFFIGGILALNIIMVELLNKRVDKKG

SEQ ID NO: 58421 - DNA, 537 bp, Unknown
  Obtained from environmental sample
  misc_feature (1)..(537): n is a, c, g, or t
ttgtccattcagacggcaaagtccacacacagctgctacaaaataggcataccggaaaagccggcccacgaggccaacgccgctaccctgccctacagcccaagactggaaaggggcacggtagtccgctggaaagccgacgcttcggtttttgaaaccaccacccacaattatgacgccctcgccaaccgcctgcgggaactggccttcctcaacaagggtttaaaaattacaatccgcgacgaaaggctttccaatcccaaagttcacgaattcaggtttgagggcggggtgaaaagttttgtcgagtacctcaacgaaaacaaaaccgtcctgtacagggaaccggtttatcttgagggtagccgcggcgacggccaggatggagaggtagagattgagtgcgccatccaatacaacgacggctttaacgaaataatgttttcttttgttaatgatattaacacacgcgagggcggaacccacctgattggcctcaaagaccccccttacgcgcaccctgaacgatttccttaa

SEQ ID NO: 58422 - protein, 178 aa, Unknown
  Obtained from environmental sample
  misc_feature (1)..(178): Xaa is any amino acid
MSIQTAKSTHSCYKIGIPEKPAHEANAATLPYSPRLERGTVVRWKADASVFETTTHNYDALANRLRELAFLNKGLKITIRDERLSNPKVHEFRFEGGVKSFVEYLNENKTVLYREPVYLEGSRGDGQDGEVEIECAIQYNDGFNEIMFSFVNDINTREGGTHLIGLKDPPYAHPERFP

SEQ ID NO: 58423 - DNA, 1062 bp, Unknown
  Obtained from environmental sample
  misc_feature (1)..(1062): n is a, c, g, or t
ttggcctcaaagaccccccttacgcgcaccctgaacgatttccttaaaaaatccaagcaggccaaaaaactggaggagagcctttccggcgacgacgtgcgcgaggggctgaccgcggtgctttcggtgaaggttcccaatccgcagtttgagggccagaccaagggcaagctgggcaactccgaagtaaaaggcatcgtcgaatccttcataagcgaacagcttgagcttttctttgacaagaaccccgatgtcataaacaatatactggaaaagtcggtgcttgcggcaaaagcccgaatcgccgcgcgccaggcgcgggacgcgacccggcgcaagaacgcgatggactccgccggccttcccggaaagcttgccgactgttcggaaaaagaccccgccttatgcgaattatttatcgttgagggcgactcagccggcggttcagccaagcagggccgcgaccgccgctatcaggctatactctcccttttcgggaaaatgctcaatgtggagaaaacccgcatcgaaaaagtcatcaccaacgacaagctccagcccatcatcgcaagcattggcgcgggctgcggcaccgaatttgacatttccaaaatccgctaccataaaatcatcataatggcggacgccgacgtggacggctcccatatccgcacattgctactgaccttcttctaccgttacatgaccgatcttatcgagagaggccacgtctacatagccatgccgcccctctacaagatcagttacgacaagaaaaatttttacgcctacgacgacgccgagaaagaccgtttccttgccgaatccggcaaagacccggaaaaagtcgccgtccagcgctacaagggcctcggcgaaaatgattccgaccagttatgcgacactacaatggatcccgtcaagcgcaacatcatacaggttcaccttgacgacaccgtagaggccgagcgtattttcaccacgctgatgggcgaagttgtccagccccgccgggagtttatcgaggcaaacgcccttttggtcagcaatctggacgtgtag

SEQ ID NO: 58424 - protein, 353 aa, Unknown
  Obtained from environmental sample
  DOMAIN (136)...(247): Toprim domain
  misc_feature (1)..(353): Xaa is any amino acid
MASKTPLTRTLNDFLKKSKQAKKLEESLSGDDVREGLTAVLSVKVPNPQFEGQTKGKLGNSEVKGIVESFISEQLELFFDKNPDVINNILEKSVLAAKARIAARQARDATRRKNAMDSAGLPGKLADCSEKDPALCELFIVEGDSAGGSAKQGRDRRYQAILSLFGKMLNVEKTRIEKVITNDKLQPIIASIGAGCGTEFDISKIRYHKIIIMADADVDGSHIRTLLLTFFYRYMTDLIERGHVYIAMPPLYKISYDKKNFYAYDDAEKDRFLAESGKDPEKVAVQRYKGLGENDSDQLCDTTMDPVKRNIIQVHLDDTVEAERIFTTLMGEVVQPRREFIEANALLVSNLDV

SEQ ID NO: 58425 - DNA, 342 bp, Unknown
  Obtained from environmental sample
  misc_feature (1)..(342): n is a, c, g, or t
atgtacaaacagatggggcgcagccgggaagcgcagggaaatatcatgctttttatggcaatgcgcggtcttgaaagaccggctgttttagaagatgttcccacttatatattaattccggcgttcattcttaatgaacttaccgtggcttttaaaatcggaataatgctgtttattccgttcatagtaattgacatggtggtggcaagcgcccttatgtccatgggcatgattatgcttccgcctgtaatgatatccatgccgtttaaacttattctttttattcttgtggacggctgggggctgttgacgaatcagctagtccgttcttttgaattatga

SEQ ID NO: 58426 - protein, 113 aa, Unknown
  Obtained from environmental sample
  DOMAIN (1)...(108): FliP family
  misc_feature (1)..(113): Xaa is any amino acid
MYKQMGRSREAQGNIMLFMAMRGLERPAVLEDVPTYILIPAFILNELTVAFKIGIMLFIPFIVIDMVVASALMSMGMIMLPPVMISMPFKLILFILVDGWGLLTNQLVRSFEL

SEQ ID NO: 58427 - DNA, 306 bp, Unknown
  Obtained from environmental sample
  misc_feature (1)..(306): n is a, c, g, or t
ttgcggcttacgccgcgtaaggaggggttaatagagatgacaattggttttataaaaactcttttacagcggggagtgcttcaggtgctgatgatcgcttcccctcttttaatttccgcgctggtgataggtttgattgtggcaatcctgcaggcgacaacttcaattcaggagcagactcttgtttttgtgcctaaggtggttgtcattcttgttgttcttgccttattgggcggctggatgttcacttctctcggagattacacaagacagttattcaatatgattccgagtatggcgaggtag

SEQ ID NO: 58428 - protein, 101 aa, Unknown
  Obtained from environmental sample
  DOMAIN (16)...(91): Bacterial export proteins, family 3
  misc_feature (1)..(101): Xaa is any amino acid
MRLTPRKEGLIEMTIGFIKTLLQRGVLQVLMIASPLLISALVIGLIVAILQATTSIQEQTLVFVPKVVVILVVLALLGGWMFTSLGDYTRQLFNMIPSMAR

SEQ ID NO: 58429 - DNA, 876 bp, Unknown
  Obtained from environmental sample
  misc_feature (1)..(876): n is a, c, g, or t
atggtagaaaatgccgttcttcagaatattcttctctttggtccggtatttctgttgattgccgtaagggctcttgccatgatagaagtaacccctctgctttcgtccgaagcgattccgcaagtggcaaaaatcgcgcttgccggccttaccgcttttgccgttatttccacggcggaaatttttatggcggctaattctccgtccggtattgtcaccctgcccggcggcacattaagcgatttgcgcagtgaaacattctccttgcgcttcttcctgctgattataggcgaaggaataatcggccttattttaggttttttcataatgattattttttccgctttttctaccgcgggacaatttttctccctgcaaatgggcttcggcgcctctgaaacttttgatcccctgtcgcaaattgaaaatccgctcatgggccaataccttaatcttgtgtccatgcttgtctttgtaacaataggcggttttcacctgcttttcaaaggtttctggagttccgtgcaatcaattaacattatctatctaatcgagggtagggagcctgttgttaaaatgtttgcttccggcctttcgcgcttgtttttagacgcgatgatcatttccctgcctatactcggcactttgtttttaacctctcttacaacggggcttatttcaaaagccgcgccgcagatcaacattctttccgaaggtttccctatttcaatttccgtcgcctttctcctaatttttgcttcgctcccctttatggtcgacgcctttatccatgtaattaattctggttttgagactatccaaaaaactttgttcatagacataggccgccaaataacatccggaggcggattatga

SEQ ID NO: 58430 - protein, 291 aa, Unknown
  Obtained from environmental sample
  SIGNAL (1)...(26)
  DOMAIN (8)...(274): Bacterial export proteins, family 1
  misc_feature (1)..(291): Xaa is any amino acid
MVENAVLQNILLFGPVFLLIAVRALAMIEVTPLLSSEAIPQVAKIALAGLTAFAVISTAEIFMAANSPSGIVTLPGGTLSDLRSETFSLRFFLLIIGEGIIGLILGFFIMIIFSAFSTAGQFFSLQMGFGASETFDPLSQIENPLMGQYLNLVSMLVFVTIGGFHLLFKGFWSSVQSINIIYLIEGREPVVKMFASGLSRLFLDAMIISLPILGTLFLTSLTTGLISKAAPQINILSEGFPISISVAFLLIFASLPFMVDAFIHVINSGFETIQKTLFIDIGRQITSGGGL

SEQ ID NO: 58431 - DNA, 1254 bp, Unknown
  Obtained from environmental sample
  misc_feature (1)..(1254): n is a, c, g, or t
atgagcaatttggcggccgcaagccgggagttaaacaaaataagtttaactaaacaagataatccctcttcactgttcactgttcactgttcactgttctctttttcatcttctctatccgctaacaactatccgctaacaactatccacttacagtggttcgcggacgaagaagacgcgccgggcaggacagaagaacctacagagcataaattacagcgcctgcgtgaagaagggcaggttgtaaaaagccaggaacttgtcggcgcgataggtctgcttctgccggccctgctgattctggccttagctccttcaatgctgaacacatgcaaagagttaatccgctttttcttcgagcgcgccgtcgaactggatccaaccaaggacgcggttattctggctgttcttttgcgttattttgtccggcttgcagctcctattatggctgtcgcgtttatagcggcaattgtttcaaatgtcgcgcaggtaggatttttgtttaccacaaagcccattgttccggatttttcaaaggtgcttcccaagattgggcagtacttcaagcgcattttttccgtggacggaatttacaattttgttaaatcaatagccaagatggcgattatcgggtttgtggcttttattctgatctattcggaaaaggacaaactgctgcgtcttcaggaaacaagcattatgacggggcttaccacagtatctacaatcgcgattaagatgctgatcatttcggctcttttgctgtgtgttttgtcgatacctgatttattgtttcagcgctggcgtttcagggaacgcaaccgtatgaccaggtacgaggtaaaagaagaacagaaaatgtacgaagcggatccgcagatacagggaaggatacgcagccgcttccgtgaattgttaagacagaatatcagagcgtctgtgcctaaagcggatgtggtagtaacaaacccgacccaccttgcagtggcgatacaatatgatcagagttacatggaagggccgatgatagtcgctatgggcgaagatgaaatggccgcgagaatcaggcagatcgcgcaggagaatgaagtgccgctggtggaaaacaagcctcttgcttgggctttgtaccgcgacccgaaaatcgacgtgggagatattatacccagggagtactggagtactgtagcgcttgtattaagcaaagtttggtacttgaatgaggaaaaacggcgcaggaggatgagcgcgtga

SEQ ID NO: 58432 - protein, 417 aa, Unknown
  Obtained from environmental sample
  DOMAIN (59)...(404): FlhB HrpN YscU SpaS Family
  misc_feature (1)..(417): Xaa is any amino acid
MSNLAAASRELNKISLTKQDNPSSLFTVHCSLFSFSSSLSANNYPLTTIHLQWFADEEDAPGRTEEPTEHKLQRLREEGQVVKSQELVGAIGLLLPALLILALAPSMLNTCKELIRFFFERAVELDPTKDAVILAVLLRYFVRLAAPIMAVAFIAAIVSNVAQVGFLFTTKPIVPDFSKVLPKIGQYFKRIFSVDGIYNFVKSIAKMAIIGFVAFILIYSEKDKLLRLQETSIMTGLTTVSTIAIKMLIISALLLCVLSIPDLLFQRWRFRERNRMTRYEVKEEQKMYEADPQIQGRIRSRFRELLRQNIRASVPKADVVVTNPTHLAVAIQYDQSYMEGPMIVAMGEDEMAARIRQIAQENEVPLVENKPLAWALYRDPKIDVGDIIPREYWSTVALVLSKVWYLNEEKRRRRMSA

SEQ ID NO: 58433 - DNA, 348 bp, Unknown
  Obtained from environmental sample
  misc_feature (1)..(348): n is a, c, g, or t
atggctgacgctgcattaggcgcgggcggaacgccgtcccgtaacatattagactttttccgtgatagtgttccggcgcttgcggtaataataattgtcgtaatgttgattttaccgcttccgacagttttactggacgcgcttatggcgatgaaccttatgctttctcttttaattctgcttatagttctttatactcaaaagccgaccgaattcagcctttttccgactatgcttcttgtcgcgacggttttctcgcttgccctgaacgtttcttccacgcggcttattttaagggacggaattaaattcagcggcaaaatggtaagagcgttttcaaacttgtag

SEQ ID NO: 58434 - protein, 115 aa, Unknown
  Obtained from environmental sample
  misc_feature (1)..(115): Xaa is any amino acid
MADAALGAGGTPSRNILDFFRDSVPALAVIIIVVMLILPLPTVLLDALMAMNLMLSLLILLIVLYTQKPTEFSLFPTMLLVATVFSLALNVSSTRLILRDGIKFSGKMVRAFSNL

SEQ ID NO: 58435 - DNA, 360 bp, Unknown
  Obtained from environmental sample
  misc_feature (1)..(360): n is a, c, g, or t
ttgcttccttgtccctgttcctccatcgcgttacggatgttttcttcctgctgcgaaacggtctttacgccggagtcaatcaattcgaatctggccagcaccttgtctgtggagcctgttatttttatgattgattccgctatttttttcagtaccgtgctaatcgttttggattgctcgccagacgattccgccagtttgcggatttcatcggcgactacggcaaagccctttcctgcttctcccgcgtgcgcggcttctatcgcggcgttcatcgaaagcaggttggtctggcttgcgatgttttccattaccgcgttaatctccagcaagccttcagactcgcgggatatttcctga

SEQ ID NO: 58436 - protein, 119 aa, Unknown
  Obtained from environmental sample
  misc_feature (1)..(119): Xaa is any amino acid
MLPCPCSSIALRMFSSCCETVFTPESINSNLASTLSVEPVIFMIDSAIFFSTVLIVLDCSPDDSASLRISSATTAKPFPASPACAASIAAFIESRLVWLAMFSITALISSKPSDSRDIS

SEQ ID NO: 58437 - DNA, 1134 bp, Unknown
  Obtained from environmental sample
  misc_feature (1)..(1134): n is a, c, g, or t
ttgtgttgtgtgctgtggcgctttttgtcgctggtatggcttttgccacggggtcacaagcctcaggtggcgacaccgttaacattggcgcgattttcccgctttccggggctgttgcgttctatggcactgaatcacgcgatggagcgctgcttgccctcgagcagaccaatgcagcgggtggacttctgggtaaagagncttgccctgttgtcggaagacgatgaaggcgacgctacgaaagcggtaaatgcccttaccaaacttaccacaagggacaaggtttcatttgtcattgggtcaagtacatcagggccgacccaggccatgagtaccctggctcagagtaataaagtcgtgctggtctccccttcagcgaccaatatcaatgtaaccaaggccggcgattatattttccgggcttgttttattgatcccttccagggcgtagtgggcgctgactttgcctatgggacgctgggaagccgccgggcggctatcctgtacgacgcgggcgccgactataatgccggtctggccgattctttcaggaaccagttcaaggcgattggcggtcaggtcgtggccgatgaagcttatcaaaccggggatgtggattttaacgcccagattacccgtattaaggcggggaaccccgatgtagtgtacctgcccaattattacaacgacgtatcgctccaggcaaaacagcttcgggatcaggggataacctgcgcccttgtaggcggcgacggctgggacagccttactgaaaacgccggagacgaaatccttaacggtttctggtcttccgggttcgcctcggatacaactgaccccaaaggcgtagcttttgtcagggctttccagtcaaagtataaccggctcgcttcacagtttgccgcccttggttatgacgcgatgatgctcgttattgatggcattaaagccgccggatcttttgattccgccgccgtcaaagacgcaatagcaaggatcaatggtccctatgttaccggtaatatccgttatgactcggaccgcaacccgattaaaggcgccgcgattctggaaattgtcaggcaagacggcaagttggtcaatgtgtataagacgacggtgaatcctaagtaa

SEQ ID NO: 58438 - protein, 377 aa, Unknown
  Obtained from environmental sample
  DOMAIN (20)...(363): Receptor family ligand binding region
  misc_feature (1)..(377): Xaa is any amino acid
MCCVLWRFLSLVWLLPRGHKPQVATPLTLARFSRFPGLLRSMALNHAMERCLPSSRPMQRVDFWVKXLALLSEDDEGDATKAVNALTKLTTRDKVSFVIGSSTSGPTQAMSTLAQSNKVVLVSPSATNINVTKAGDYIFRACFIDPFQGVVGADFAYGTLGSRRAAILYDAGADYNAGLADSFRNQFKAIGGQVVADEAYQTGDVDFNAQITRIKAGNPDVVYLPNYYNDVSLQAKQLRDQGITCALVGGDGWDSLTENAGDEILNGFWSSGFASDTTDPKGVAFVRAFQSKYNRLASQFAALGYDAMMLVIDGIKAAGSFDSAAVKDAIARINGPYVTGNIRYDSDRNPIKGAAILEIVRQDGKLVNVYKTTVNPK

SEQ ID NO: 58439 - DNA, 552 bp, Unknown
  Obtained from environmental sample
  misc_feature (1)..(552): n is a, c, g, or t
ttgatgaaccagtgcactcacggcattgatcttctgcaatggattatgggcgaagacgctgtccgcgtacaggcgcagacccgcagattccttcgcccaatcgaagcggaggattttggagccgcaataattgaattcaggaacggatctgtcggaatcattgagggaagcgccgatattttccccaaaaatataaatgaaacgctttccgtttttggcgaaaaaggttcggttgtaatcggaggacttgccgtaaataagctggaaatctggcgttttgcggacgctgaaacaacaggagacacggaagaaaaagttttaaatccaaatgagaaggatcctcccactgtttacggttttggacactctgctctttttaaagattttattgaggcaatagaagaaaaccgcgagcctttaatttcaggagaaagcgggaaaaaagcgcttgaaataatactcgccatttataaatcacaaaaaacaggcaaacctgtaagcgtgcctttaaatttttctactcttaacatgaaaggatattttaaaaaatga

SEQ ID NO: 58440 - protein, 183 aa, Unknown
  Obtained from environmental sample
  misc_feature (1)..(183): Xaa is any amino acid
MMNQCTHGIDLLQWIMGEDAVRVQAQTRRFLRPIEAEDFGAAIIEFRNGSVGIIEGSADIFPKNINETLSVFGEKGSVVIGGLAVNKLEIWRFADAETTGDTEEKVLNPNEKDPPTVYGFGHSALFKDFIEAIEENREPLISGESGKKALEIILAIYKSQKTGKPVSVPLNFSTLNMKGYFKK

SEQ ID NO: 58441 - DNA, 1533 bp, Unknown
  Obtained from environmental sample
  misc_feature (1)..(1533): n is a, c, g, or t
atgatcagatggcacgagtttctttttattacgggtattttatatgccgcgcctattcaggaaagttccggcggcattggcaagaacggagagttggttctgcttcacagcaacgattttcacggcgcattgctggcaaacgacgggcgtccaatcatcgctgaaatggctaccgttgttaatgttgtaagagttgttaatccgcaggttcttcttgttgacgccggggattttaacacaggcagcgctctttccaatatgtttgacgcagagccgggtattcgcgcgtataatataatgggttatgacgctgtaactttcggcaaccatgaatttgacagtactttggaaaaactcgataagcaaatcggtcttgcggattttccttttgtttcgtcaaatattaaaaagcaggatggttcatatcttggcggcaacaggtatcttgtaaaacagtacaataattttacggtcggcatattcggtattacaacattgcgtacgctcactatcgcaagccccgataaatcgcttgtgtttataaatgaaatagaagccgcccgtgaagtagtggatattttgcgtaatcaggaaaaagttgacattattatcggtttgacgcacatgggcgatgtgaaagaagctgaagatcatataacgtctattgaacttgcatcggcagttgaagggattgatgttatagtagacgcacattctcattctttttttgaaattccaaaaagaatagagagtacatggattgtatccgcaaatgaaatgggaaaattcatgggctttggaagacttgtcgtgcggaacggaaaacttgcggatttcgggtgggtgtccgtcgctgtaagacccgatgtcgatattgaaaaaatgctcaagccttatgtggaaaaagcgggagttgttttaaaagaagtaataggagaagcttccgatgattttataatcggaaaccgtctgacacggtatcaagaaacagcgattggcaatctggttacagatgcaaacgcttggtacttgcggaatataagcagacagcagattgattttgtatttcataacggaggaaatatccgagccgaacttaaaaaaggtcctataactcaggaaaatgtattaacggtgcttccttttgagaattatctttttgtagcttcaatgaaaggttcgcagcttattaaattgtttgattttatcgcaacaattccgcagggaaacggcggatttgcgcagttttcaagcgatgtgcgattaacaatcgataaaacttcaggcggcggaacagttaaagatttaactatcggcggagaacctattgatcctgatcgtgtgtatcgtttttgcacaaatgattatattcttggaggcggagacggttatacgccgatgctggaagcgacagacaaattaaacacttcggttttactttcgtatgttgttacggaatacatcaaggcgaataagtcaataaaaccggaaactgacggaagattgactattatcggcggagttaaaaattaa

SEQ ID NO: 58442 - protein, 510 aa, Unknown
  Obtained from environmental sample
  DOMAIN (32)...(242): Calcineurin-like phosphoesterase
  misc_feature (1)..(510): Xaa is any amino acid
MIRWHEFLFITGILYAAPIQESSGGIGKNGELVLLHSNDFHGALLANDGRPIIAEMATVVNVVRVVNPQVLLVDAGDFNTGSALSNMFDAEPGIRAYNIMGYDAVTFGNHEFDSTLEKLDKQIGLADFPFVSSNIKKQDGSYLGGNRYLVKQYNNFTVGIFGITTLRTLTIASPDKSLVFINEIEAAREVVDILRNQEKVDIIIGLTHMGDVKEAEDHITSIELASAVEGIDVIVDAHSHSFFEIPKRIESTWIVSANEMGKFMGFGRLVVRNGKLADFGWVSVAVRPDVDIEKMLKPYVEKAGVVLKEVIGEASDDFIIGNRLTRYQETAIGNLVTDANAWYLRNISRQQIDFVFHNGGNIRAELKKGPITQENVLTVLPFENYLFVASMKGSQLIKLFDFIATIPQGNGGFAQFSSDVRLTIDKTSGGGTVKDLTIGGEPIDPDRVYRFCTNDYILGGGDGYTPMLEATDKLNTSVLLSYVVTEYIKANKSIKPETDGRLTIIGGVKN

SEQ ID NO: 58443 - DNA, 519 bp, Unknown
  Obtained from environmental sample
  misc_feature (1)..(519): n is a, c, g, or t
atgatcatcacgatgatcacaacgatcacggacatcaacatggacaccaccattgaaagcaggatagcactgcttcaggcgtttgatccgctgtttccaacgggagcctacacgatgtcgggcggcatggaaacttatacgcagaaaggacttgtaaaggacaaatccactcttgtctcatacctgaaagctcaaatctacattttgccctacggcgaccttggcgtctgcgcgaaaacggcgcaaggcgaagattttatttttatggacagcctttgcgccgcgatgaaacagcccttcgagatacgaacaggaagcgaaaaaatatgcacgcgttttttgaaagctcaggagacgttatgcgattatccgtctcttgccgcgtacaggcaggcgataaggcaggaaaaatgccgaggacattatcccgtcgcggtaggactttttattcgcgattttaaagcgaacataaatgatgctcttgaactttatgctacagcattttgtcgcagatggtaa

SEQ ID NO: 58444 - protein, 172 aa, Unknown
  Obtained from environmental sample
  misc_feature (1)..(172): Xaa is any amino acid
MIITMITTITDINMDTTIESRIALLQAFDPLFPTGAYTMSGGMETYTQKGLVKDKSTLVSYLKAQIYILPYGDLGVCAKTAQGEDFIFMDSLCAAMKQPFEIRTGSEKICTRFLKAQETLCDYPSLAAYRQAIRQEKCRGHYPVAVGLFIRDFKANINDALELYATAFCRRW

SEQ ID NO: 58445 - DNA, 486 bp, Unknown
  Obtained from environmental sample
  misc_feature (1)..(486): n is a, c, g, or t
atgataatcgaaaaaattttaggaaaaaaaccggaaaacaccggcggaaaaattatcgagactgtcccttttgattggtttgaaatgaacaacaagattttgaaaaagacatcctcaaaagggacggaaatcgggcttaggctttctgtgccgttgtttgacggcgcgttattgtatgaagacggcgagaaaatcatctgccttgagcttctgccgtgcgagacgacgcgggttcatgtccacaacataaaggaaatggggcgagtttgttttgagctaggcaaccgccatctgccgctttccatagcggaggattccgttagcacgccctatgacaacccaacctatgagtatcttgagaaacttggtttccactgcgagcgcgtaaccgaaaagtttacgccggagataattacccacggacaccatcatgatcatcacgatgatcacaacgatcacggacatcaacatggacaccaccattga

SEQ ID NO: 58446 - protein, 161 aa, Unknown
  Obtained from environmental sample
  DOMAIN (4)...(70): UreE urease accessory protein, N-terminal domain
  misc_feature (1)..(161): Xaa is any amino acid
MIIEKILGKKPENTGGKIIETVPFDWFEMNNKILKKTSSKGTEIGLRLSVPLFDGALLYEDGEKIICLELLPCETTRVHVHNIKEMGRVCFELGNRHLPLSIAEDSVSTPYDNPTYEYLEKLGFHCERVTEKFTPEIITHGHHHDHHDDHNDHGHQHGHHH

SEQ ID NO: 58447 - DNA, 762 bp, Unknown
  Obtained from environmental sample
  misc_feature (1)..(762): n is a, c, g, or t
atgctgatggtctgccaccacctggacagccgagtgcccgaagacgtagccttcgccgactcgcgcatccgcccagaaaccatcgcggcggaagacgtgcttcacgacatgggtatattctcgatgatgagttccgactctcaggcgatggggcgcatcggagaagtgatcatgaggacttggcagacagcgagtaaaatgaaagaccagcgcggacatcttaccgaagacagcgagcgcaacgacaactatagggcaaagcgctatgtatccaagtacacgataaaccccgccgttacccacggcatagcggaatataccggctctgtggaaacaggcaaatacgccgaccttgttatctggaaccccgccctcttcggcgcaaagccagagatgatcattaaaggcggatacataatcgccgccaaaatgggcgacgctaacgcttccattccgacgcctcagcctgtaatatacagaaacatgttcggcgcttcggacctggcacgcaagcgcacatgcatcacgtttgtctctggagcggcggcaaaaagcggaatcggcaaacggcttggacttgaccgcattgttcttcctgtaaagaactgccgcaaactttccaaagcggacatgcgctttaacgaccgcacgggggacataaaggttgatcctgaaacatacaccgtaaccgtggacgggaaaaaaataacttgcgacccggctgaaagcctgagtttggcaagaaggtattggttgttttaa

SEQ ID NO: 58448 - protein, 253 aa, Unknown
  Obtained from environmental sample
  misc_feature (1)..(253): Xaa is any amino acid
MLMVCHHLDSRVPEDVAFADSRIRPETIAAEDVLHDMGIFSMMSSDSQAMGRIGEVIMRTWQTASKMKDQRGHLTEDSERNDNYRAKRYVSKYTINPAVTHGIAEYTGSVETGKYADLVIWNPALFGAKPEMIIKGGYIIAAKMGDANASIPTPQPVIYRNMFGASDLARKRTCITFVSGAAAKSGIGKRLGLDRIVLPVKNCRKLSKADMRFNDRTGDIKVDPETYTVTVDGKKITCDPAESLSLARRYWLF

SEQ ID NO: 58449 - DNA, 990 bp, Unknown
  Obtained from environmental sample
  misc_feature (1)..(990): n is a, c, g, or t
ttgaaagagcgcgcgctcagggatttaagggggcttaatatgtttgaaatgacaagaaaacaatacgcaagcatgtacggcccgacaacgggcgacaggatacgccttggcgatacctcgatcattattgaagtcgagcgcgacctgacagtctacggagaagaagctaaattcggcgggggcaaatccctgcgcgacgggatgggtcagtcatgcggtgtaaaggacgccgactgccccgaccttgttattacgaacgccgtaatccttgaccacacgggaataataaaagcggatatcggcattaaaaacggcaagatttgcggcataggcaaggcgggaaaccccgacattatggacggcgtaacaaaaggactgacggtcggcgcatccactgaaattatagcgggcgagggcatgattgttacagccggcggcattgacacccatatacattttatcagccccacacaaatagaaaccgcgctgtattccggagttacgacaatgatcggcggcggaaccggacccgcggacggaacaaacgccaccacctgcacgccgggacgcttcaaccttgaaaaaatgctggaagccgcggaaggttatcctgttaatctcggttttctcggcaagggcaacagctcatcgcctaacgcgcttgccgaacagatagaagcgggagcctgcgggcttaaaatccatgaggactggggttccaccacggccgttatccgcgcctcgctctacgccgccgacaggtacgacgttcaggtcgcgattcacacggacacgctgaacgagggcggctttgtcgaggacacgctcgccgcaataggcgaccgcgtcattcacacataccataccgaaggcgcgggcggcggacacgcgcccgacattatcagggcggccggcctgcctaatattctgccgtcatcgacaaatcccacaatgccgtttacccgtcaacacggtagacgagcatcttga

SEQ ID NO: 58450 - protein, 329 aa, Unknown
  Obtained from environmental sample
  DOMAIN (141)...(328): Amidohydrolase family
  misc_feature (1)..(329): Xaa is any amino acid
MKERALRDLRGLNMFEMTRKQYASMYGPTTGDRIRLGDTSIIIEVERDLTVYGEEAKFGGGKSLRDGMGQSCGVKDADCPDLVITNAVILDHTGIIKADIGIKNGKICGIGKAGNPDIMDGVTKGLTVGASTEIIAGEGMIVTAGGIDTHIHFISPTQIETALYSGVTTMIGGGTGPADGTNATTCTPGRFNLEKMLEAAEGYPVNLGFLGKGNSSSPNALAEQIEAGACGLKIHEDWGSTTAVIRASLYAADRYDVQVAIHTDTLNEGGFVEDTLAAIGDRVIHTYHTEGAGGGHAPDIIRAAGLPNILPSSTNPTMPFTRQHGRRAS

SEQ ID NO: 58451 - DNA, 510 bp, Unknown
  Obtained from environmental sample
  misc_feature (1)..(510): n is a, c, g, or t
atggcgcacgattatgatttgcacgccccggtaggcgcaaacaagaaaaaaagaataattggacgcggtcaaggttccggtcgcggaactacagccggaaaaggaaacaaaggtcagcaagcccgttcaggcggaaagacttatgtcggctttgaaggcggacagatgcctttgtacaggcgtctcgcccacagaggtttttccaattatccgtttaaacaggaatggcagattatcaatcttggcgagattgaaaaacgatatgaagcgggcgaaaccgtagagcttgccacacttcataaaaaaggacttgttaaaggcgttgacccgataaaagttttggctaacggaaacttaaccaaaaaattaagttttaaggttgacggtgtttccgcttcggcaaaagaaaaaattgaaaaagcgggcggcgacgttactgttattcccgctcccgaaaaagcgcgtcctaaaaacaagagtaaaaaagcgaaagcaggtggaaagaaataa

SEQ ID NO: 58452 - protein, 169 aa, Unknown
  Obtained from environmental sample
  DOMAIN (112)...(143): Ribosomal protein L15
  misc_feature (1)..(169): Xaa is any amino acid
MAHDYDLHAPVGANKKKRIIGRGQGSGRGTTAGKGNKGQQARSGGKTYVGFEGGQMPLYRRLAHRGFSNYPFKQEWQIINLGEIEKRYEAGETVELATLHKKGLVKGVDPIKVLANGNLTKKLSFKVDGVSASAKEKIEKAGGDVTVIPAPEKARPKNKSKKAKAGGKK

SEQ ID NO: 58453 - DNA, 654 bp, Unknown
  Obtained from environmental sample
  misc_feature (1)..(654): n is a, c, g, or t
atggcaaaaacaaaagacctaatcgaagattctgtagtagaagaaaatatcgaagacagctctgattccgcggcagacacagattctgtcgaagctgcggttgaaagccgttccgaaggcagaggaagacgcgggcgcggacgcgacagagatcgcggagatcgtgagcctgtcgaaaaagaatttatcgagaaacttgttaaactaaacagaaccgccaaagttgttaagggcggacgccgtttctctttctcggcgctcactgtaatcggcgaccgcaagggaaaagtcggctacggtttcggcaaagcgaacgacgtatctgaagctatccgcaaaagcatagacagagcaaaacgcaatatgattcatctgcctgtaaagaatggaacaattccccatgaagtaaaaggattttttaagtcgtcttatgttttgttaaaacccgctcgttcgggaacaggaattatcgcgggaggtccggtaagggcgattatggaagcgggcggcgttaccgacgtgctttcaaaatcgattgggtcttcaagtcaatataacgtggtcaaggcaacatttgaatgtatcactaaaatgatggatgccaggacaatttcaagaaacaggggcaaatccctgagtgagctatggggttga

SEQ ID NO: 58454 - protein, 217 aa, Unknown
  Obtained from environmental sample
  DOMAIN (136)...(209): Ribosomal protein S5, C-terminal domain
  misc_feature (1)..(217): Xaa is any amino acid
MAKTKDLIEDSVVEENIEDSSDSAADTDSVEAAVESRSEGRGRRGRGRDRDRGDREPVEKEFIEKLVKLNRTAKVVKGGRRFSFSALTVIGDRKGKVGYGFGKANDVSEAIRKSIDRAKRNMIHLPVKNGTIPHEVKGFFKSSYVLLKPARSGTGIIAGGPVRAIMEAGGVTDVLSKSIGSSSQYNVVKATFECITKMMDARTISRNRGKSLSELWG

SEQ ID NO: 58455 - DNA, 363 bp, Unknown
  Obtained from environmental sample
  misc_feature (1)..(363): n is a, c, g, or t
atgttacaaaaaatgctggaaaaagacagaaaacgtcttagaagaaagattcatatacgcaaaaggatagccggaacagcggaacgtccgcgtatgacggttacaaaaagcaaccgcagtctttctgttcagataattgacgacgacaagggacatacccttgtttcagcttcgtcccttgaaaaggatctgaagaatattaaggcgactgtcgccggagcgggacagttaggtgaaatagttggcaaacgtctgttggaaagaaacatcaaaacagtggtgtttgatcgcaacggatatttgtatcatggaatagtcaaggctttagccgacggaacccggaaagcgggaatcagtttctag

SEQ ID NO: 58456 - protein, 120 aa, Unknown
  Obtained from environmental sample
  DOMAIN (7)...(120): Ribosomal L18p/L5e family
  misc_feature (1)..(120): Xaa is any amino acid
MLQKMLEKDRKRLRRKIHIRKRIAGTAERPRMTVTKSNRSLSVQIIDDDKGHTLVSASSLEKDLKNIKATVAGAGQLGEIVGKRLLERNIKTVVFDRNGYLYHGIVKALADGTRKAGISF

SEQ ID NO: 58457 - DNA, 480 bp, Unknown
  Obtained from environmental sample
  misc_feature (1)..(480): n is a, c, g, or t
ttgtgcgtaaatatactgggcaatgcccttaacattacagtacaggaactcaataaaggagacgatatgcagaaggatatttttgttttgtttgcaaagtacaacaaagttgtgaatcaaaaaatgaatgaggtaataaaaaacctctcgaaagaagaatgggagaaaaatctgggcgggttttttagttctgtccgaggcctttgttcccacctttatatctgtgatttcaactggctaaaacgcttttcccacttaaaggagtttgacgtttttaaggaagccctttttgcgcgggagccctactcttttaaggaagtgctttttgcggacatggctgaatatttaacaaaccgacctctgttagacgaaaggatcatcgcctttataaacgagataaatgaaaaagatataaactcgtttttaaaatacgccgattctgaagggaatacatatgaacggaacttcggcggcctgtaa

SEQ ID NO: 58458 - protein, 159 aa, Unknown
  Obtained from environmental sample
  DOMAIN (23)...(157): DinB family
  misc_feature (1)..(159): Xaa is any amino acid
MCVNILGNALNITVQELNKGDDMQKDIFVLFAKYNKVVNQKMNEVIKNLSKEEWEKNLGGFFSSVRGLCSHLYICDFNWLKRFSHLKEFDVFKEALFAREPYSFKEVLFADMAEYLTNRPLLDERIIAFINEINEKDINSFLKYADSEGNTYERNFGGL

SEQ ID NO: 58459 - DNA, 552 bp, Unknown
  Obtained from environmental sample
  misc_feature (1)..(552): n is a, c, g, or t
ttgaggaatggggcatcgagatcaacgaagaccgcgataactttgactacctttaccttagaagcgatctggcggaactgccgggcaagaaataccaaaaaaaagaaccttgtggcgcagtttttaaagtcatatgcccacgaggagaagcccctgacgctggagctgataagctatgcaaaggaaatcctagagcgctggcgggagaataaaggtaacgaaagcgattacatcgcctcgatggaagccctggagcatttcggggagcttaacatgagcgggttattgttctatattgacggtaagccggcgggttggtgccttggggaaccgattgccgggggcaggatgtttgccgttcattttgaaaagggcatggaagagtacaagggcatatatcagtacatcaatctggccttcgcggcttctctgcccgagagcatcacccacatcaaccgcgaacaggaccttggggacgaagggttgcgtcaggcaaagatgacctatcgtccgtctgggtttgtgcgtaaatatactgggcaatgcccttaa

SEQ ID NO: 58460 - protein, 183 aa, Unknown
  Obtained from environmental sample
  misc_feature (1)..(183): Xaa is any amino acid
MRNGASRSTKTAITLTTFTLEAIWRNCRARNTKKKNLVAQFLKSYAHEEKPLTLELISYAKEILERWRENKGNESDYIASMEALEHFGELNMSGLLFYIDGKPAGWCLGEPIAGGRMFAVHFEKGMEEYKGIYQYINLAFAASLPESITHINREQDLGDEGLRQAKMTYRPSGFVRKYTGQCP

SEQ ID NO: 58461 - DNA, 576 bp, Unknown
  Obtained from environmental sample
  misc_feature (1)..(576): n is a, c, g, or t
ttgcttttctgctatactccctccatgctaatcccatctttcccggacttcacacccctcactttcgcgctcaaggacgaaatgcacccaaagctctatcaagctgtggacggggtttcggagtttacttttgctggtctttatatgttcagaaagcgttacgggtaccgcgtttccaggcttggggacaaaacccttatcctttcggggactcaaccacctcatgcggacggcgatgcggaaaagaggtttttcatgaccccccttgccgcgcctggcaggggtgtgctggaagagctctttaaaacccatgatttctggaagaatattccggagtcgatagtaatccccgaaaaagagcgccttgaggaatggggcatcgagatcaacgaagaccgcgataactttgactacctttaccttagaagcgatctggcggaactgccgggcaagaaataccaaaaaaaagaaccttgtggcgcagtttttaaagtcatatgcccacgaggagaagcccctgacgctggagctgataagctatgcaaaggaaatcctagagcgctggcgggagaataa

SEQ ID NO: 58462 - protein, 191 aa, Unknown
  Obtained from environmental sample
  misc_feature (1)..(191): Xaa is any amino acid
MLFCYTPSMLIPSFPDFTPLTFALKDEMHPKLYQAVDGVSEFTFAGLYMFRKRYGYRVSRLGDKTLILSGTQPPHADGDAEKRFFMTPLAAPGRGVLEELFKTHDFWKNIPESIVIPEKERLEEWGIEINEDRDNFDYLYLRSDLAELPGKKYQKKEPCGAVFKVICPRGEAPDAGADKLCKGNPRALAGE

SEQ ID NO: 58463 - DNA, 804 bp, Unknown
  Obtained from environmental sample
  misc_feature (1)..(804): n is a, c, g, or t
atgtccccatacgcggcctggatgattgccgacatactttcggacaggtcaagcagatttgtgggcttcggtcccgccccttcgctggcaactccttttgaatcgatgttcaaaaccggaacggccaatcagtttcagcacatctgggctttgggcgcgacaaagcgttttaccgtgggcgtctggatgggaaatttttcaggcgaaaccataattggcagtacgggaagctccatccccgccaggatagcggcaaaactcctcggcgttttggaagaatccgccgggcaggaaaaagcgcaaagaagcacgagtaaagtaactgaaaacctggcgggccctgtgccgcagggaacgacggaggtgcaaatctgtgccctctcgggaatggcggctggcccctactgcaccgggcttaccagagaatttatacgcaacgagaaaatccccgccgtctgcaactggcacacccaggctggcctcttttacccaagtgaataccgctcgtggttgagcgaaaggttccgttccggcggcgtcaggcaggaaggggcaggcagaataaggacgccggtaacaggggcggtgttttaccttgacccgtcgttgcccgccgaggcgcaggcgataagggtcgaaaccacaggctttagtgaaagcgcactactctttgttgacggcgagctttccggtagcctaaaccatgccggggtttacgcgcttccgctttcgcggggtcggcatagcgttaccgtggccgataatgaggggagtgccgccgaggtggaatttgaggtgaggtga

SEQ ID NO: 58464 - protein, 267 aa, Unknown
  Obtained from environmental sample
  DOMAIN (175)...(264): Penicillin-Binding Protein C-terminus Family
  misc_feature (1)..(267): Xaa is any amino acid
MSPYAAWMIADILSDRSSRFVGFGPAPSLATPFESMFKTGTANQFQHIWALGATKRFTVGVWMGNFSGETIIGSTGSSIPARIAAKLLGVLEESAGQEKAQRSTSKVTENLAGPVPQGTTEVQICALSGMAAGPYCTGLTREFIRNEKIPAVCNWHTQAGLFYPSEYRSWLSERFRSGGVRQEGAGRIRTPVTGAVFYLDPSLPAEAQAIRVETTGFSESALLFVDGELSGSLNHAGVYALPLSRGRHSVTVADNEGSAAEVEFEVR

SEQ ID NO: 58465 - DNA, 684 bp, Unknown
  Obtained from environmental sample
  misc_feature (1)..(684): n is a, c, g, or t
gtggaggagatttgcttcggcaacaacgatacgcttagcgcgcaaatagcgatgttggtcaacgccgacgtgttggtcaatttaacggatgtgggcggtctctacgacaagaaccccaacacggagaaggacgcgaagcacatacccgtagtgaacgccgtcaatgccggaatacagaagatggccagcgagaaaaagagcgaaatcagcgtaggcggtatgtccacgaagttgaaagccgccgagatggtcacaaaggccggcatcccggcgcttatcggcgacggtttcaatcaaagcctgctgacggtgctgaaagacgagtcccgggcgacgttattcctgccgtccaccaaaaagatatcggcaagacggtgttggatagccttcacaggacagccgtccggtagcgtcacagtggacgccggggcgtccaaggcggtggcggaacaaggcaaaagcctgcttgccgccggaatcaccgcggtgggaggacggttcaacgccggtgacatggttgacatcgtcaatccgaaaggagaggtaatagccaaaggactggtaaacttctccgcggacgagatagagaaaatatgcggctgcaaaaccgcggaagtggagaaaaaactcggcgccatacggttcaacgaagtcatactaagggacaatatggtcgttgtgtag

SEQ ID NO: 58466 - protein, 227 aa, Unknown
  Obtained from environmental sample
  DOMAIN (136)...(210): PUA domain
  misc_feature (1)..(227): Xaa is any amino acid
MEEICFGNNDTLSAQIAMLVNADVLVNLTDVGGLYDKNPNTEKDAKHIPVVNAVNAGIQKMASEKKSEISVGGMSTKLKAAEMVTKAGIPALIGDGFNQSLLTVLKDESRATLFLPSTKKISARRCWIAFTGQPSGSVTVDAGASKAVAEQGKSLLAAGITAVGGRFNAGDMVDIVNPKGEVIAKGLVNFSADEIEKICGCKTAEVEKKLGAIRFNEVILRDNMVVV

SEQ ID NO: 58467 - DNA, 1020 bp, Unknown
  Obtained from environmental sample
  misc_feature (1)..(1020): n is a, c, g, or t
atgcccgtcaaagcgcccgtgaaaaagaccgtcaaaaagaagcgccccgccgcgaaaaccaccgccaagaagcccgcagagcgcgagttggtctcgtttgacttcgccgtcaaatacctattgcgcggcaagcgcgactacgttgtcctcaacggctttctgtccgaacttcttggcaaaaaagtagaggtcaaatccctcgaagacgtagaaaacatcaaggaagacaaagacgacaagaccaaccgcgtagacatgagggcgcagataaacggcggcgaaaccgtgttgtttgaaatccagtttattcaggagtttgacttcttaggcagggtgcttttcggcgtcagcagtgctatagtagaacaagtcaaggcgggtaaattttacaatatacagaaaatctactcggtaattatcgcgtattctaatctaaacgccaagcgtgagtacctgttttccggcgaaatgaacaattttcacggcgtccactacaaagacgaactaatcccgttttcacaggctatcgctccgaagtcaaagaaaaaggtagatattcacccggagtattacctgattttaccgagaatgttcgacgaanagatgcgcggcaggttcgacgaatgggtctacatcctaaaaaactcgaaagcccgcgccgactttaaggccgccggaatcaaagaggccaagaccaagttagactacctgagcatgacgcccgaaaagaaaaaagagtacgcaagatttttagaacaccgccgaagcgccagaagcgcgttagaaacggcggtaggccaaggcgaactcagaggcgagcgcagaggcttacggaaaggtctacaacaaggcatacagaaaggcatacagaaaggcatacagaaaggcatacagaaaggttgggatgaagcaagtaccaaacacgccaaaagtatgtacaaaacaggctttacggtcaaacagatcgcaaaaggcctcgaactttcagaaaccgccgtcaagcgaattttaggcttgtaa

SEQ ID NO: 58468 - protein, 339 aa, Unknown
  Obtained from environmental sample
  misc_feature (1)..(339): Xaa is any amino acid
MPVKAPVKKTVKKKRPAAKTTAKKPAERELVSFDFAVKYLLRGKRDYVVLNGFLSELLGKKVEVKSLEDVENIKEDKDDKTNRVDMRAQINGGETVLFEIQFIQEFDFLGRVLFGVSSAIVEQVKAGKFYNIQKIYSVIIAYSNLNAKREYLFSGEMNNFHGVHYKDELIPFSQAIAPKSKKKVDIHPEYYLILPRMFDEXMRGRFDEWVYILKNSKARADFKAAGIKEAKTKLDYLSMTPEKKKEYARFLEHRRSARSALETAVGQGELRGERRGLRKGLQQGIQKGIQKGIQKGIQKGWDEASTKHAKSMYKTGFTVKQIAKGLELSETAVKRILGL

SEQ ID NO: 58469 - DNA, 459 bp, Unknown
  Obtained from environmental sample
  misc_feature (1)..(459): n is a, c, g, or t
atggatttacagtttgcgcacctgttgcggtggataatagtctatctcgacaattgttgctacagccgactaaccgacgcggacgcgctacccgacacgatagcggaggccgcgaagatacgggcgattatcgacaaccggtttataggcgggtacgttataataggcggttttgccgtatctatcgaaatggggaagaaccccaacgacgtaaagcgtatggcgtcgagacgcctttatgacaaaatcattatagacgaagtcgatgaagacgaacagatcattgcaagagcgacggaattagaatctatggggcttaaacctatggacgcccgtcatcttgcggcggctgaagaggccggagcggattaccttgtaacggtggataaagattttataaagacgtgcgcaagaccgaacattacggcggtgaaagtcataaaccctttagatttttga

SEQ ID NO: 58470 - protein, 152 aa, Unknown
  Obtained from environmental sample
  misc_feature (1)..(152): Xaa is any amino acid
MDLQFAHLLRWIIVYLDNCCYSRLTDADALPDTIAEAAKIRAIIDNRFIGGYVIIGGFAVSIEMGKNPNDVKRMASRRLYDKIIIDEVDEDEQIIARATELESMGLKPMDARHLAAAEEAGADYLVTVDKDFIKTCARPNITAVKVINPLDF

SEQ ID NO: 58471 - DNA, 438 bp, Unknown
  Obtained from environmental sample
  misc_feature (1)..(438): n is a, c, g, or t
ttggctatggtactgctcaaggattcaaaagttaccgcccgcaagcctcaggattgcgtgggccttgatgttgcataccagtcagagacaacttccgatacctatatgaccgatctggaagccagaggtttgaagtttacccaccggaagtatgaaaaggtgatgtactgtttcgacgaactcaaactgggccgtgtagatgtcattatcaccgacctgctggtggcctacgactatgtcgccccggcggacagcccctttgaaattgtctggacaagccccgaagatgagcggtttggcatctgcctgaaaaaaggaaacgatgcccttaccgcggctattgacgaagctctggataaactttttgaagatggaaccatgctccgtatttcaatggatatttttggcatggatctggtaacggcggcgcgaaagtag

SEQ ID NO: 58472 - protein, 145 aa, Unknown
  Obtained from environmental sample
  misc_feature (1)..(145): Xaa is any amino acid
MAMVLLKDSKVTARKPQDCVGLDVAYQSETTSDTYMTDLEARGLKFTHRKYEKVMYCFDELKLGRVDVIITDLLVAYDYVAPADSPFEIVWTSPEDERFGICLKKGNDALTAAIDEALDKLFEDGTMLRISMDIFGMDLVTAARK

SEQ ID NO: 58473 - DNA, 417 bp, Unknown
  Obtained from environmental sample
  misc_feature (1)..(417): n is a, c, g, or t
gtgacagatatgctggccaccattcagcggatgatctcatggattccttccctcctgaatggcgccaaaataaccatatccctgacgatacttgccgtttcggcggggctggtgctgagtctttttatcgctctgggaaagatgtcaagcaatgtcatcgtcaataaactatgcagcgcgtatgttttcttctttcggggtacgcccctgctgatgcagttgtattttatctattatgctctgccttcggtttcccggcttttcctcattcagacagggcaggccggggttgaccgctttatttacgcctttattgcctttagcctgaactccgccgcctactgcgcggagataatccgggcggcaattcaaagcatcgacagggacagttcgaggcctcccgcgcgctgggcctga

SEQ ID NO: 58474 - protein, 138 aa, Unknown
  Obtained from environmental sample
  misc_feature (1)..(138): Xaa is any amino acid
MTDMLATIQRMISWIPSLLNGAKITISLTILAVSAGLVLSLFIALGKMSSNVIVNKLCSAYVFFFRGTPLLMQLYFIYYALPSVSRLFLIQTGQAGVDRFIYAFIAFSLNSAAYCAEIIRAAIQSIDRDSSRPPARWA

SEQ ID NO: 58475 - DNA, 777 bp, Unknown
  Obtained from environmental sample
  misc_feature (1)..(777): n is a, c, g, or t
atgtcgatgatcaaaacagtcgggctgcacaagacctttcacggttcgcaggggagggggccgcttgaggtgttaaaggatgtgtccctcaccgtagagcagaaggaagtcgtctgcataatcgggccctccggcgcgggcaagtcaacatacctgcgtaccctgaaccgtctggaaacgatcgacgaagggcagatatttattgaagacaaactcctctttgactgccacaagggaacaaaccacgtaaaaatgcaccatgacgaacgcaacaggacattgcttgaagtgggcatggtgttccagcgtttcaatctttttccccacaggacggcccttgaaaatgtaatgcttgcccctgtccatgtccgcaaactttccgttgaagaagcgcgggaaagggccaaaaatatacttgagcgcgtcggtcttgccgataaattcgacgtattcccctcccagctttccggcggtcagcagcagcgtgtcgctattgcccgcgcccttgcgatggagccgaggatcatgctttttgacgagcctaccagcgcgcttgacccggagcttgtcggcgaggtgttagccgtaatgaaacagcttgccgtcggcggaatgaccatgctggtggtatcgcacgagatgggctttgcccgcgaggttgccgacagggtagtattcatgttcgagggaaaaatcctggaaatcgccccgcccaaggtaatgttcaacacccccgaaaacgagcgtacccgccagttcctgcaaagcgttttgtaa

SEQ ID NO: 58476 - protein, 258 aa, Unknown
  Obtained from environmental sample
  DOMAIN (3)...(234): RecF/RecN/SMC N terminal domain
  misc_feature (1)..(258): Xaa is any amino acid
MSMIKTVGLHKTFHGSQGRGPLEVLKDVSLTVEQKEVVCIIGPSGAGKSTYLRTLNRLETIDEGQIFIEDKLLFDCHKGTNHVKMHHDERNRTLLEVGMVFQRFNLFPHRTALENVMLAPVHVRKLSVEEARERAKNILERVGLADKFDVFPSQLSGGQQQRVAIARALAMEPRIMLFDEPTSALDPELVGEVLAVMKQLAVGGMTMLVVSHEMGFAREVADRVVFMFEGKILEIAPPKVMFNTPENERTRQFLQSVL

SEQ ID NO: 58477 - DNA, 369 bp, Unknown
  Obtained from environmental sample
  misc_feature (1)..(369): n is a, c, g, or t
ttggccctttcccgcgcttcttcaacggaaagtttgcggacatggacaggggcaagcattacattttcaagggccgtcctgtggggaaaaagattgaaacgctggaacaccatgcccacttcaagcaatgtcctgttgcgttcgtcatggtgcatttttacgtggtttgttcccttgtggcagtcaaagaggagtttgtcttcaataaatatctgcccttcgtcgatcgtttccagacggttcagggtacgcaggtatgttgacttgcccgcgccggagggcccgattatgcagacgacttccttctgctctacggtgagggacacatcctttaacacctcaagcggccccctcccctgcgaaccgtga

SEQ ID NO: 58478 - protein, 122 aa, Unknown
  Obtained from environmental sample
  misc_feature (1)..(122): Xaa is any amino acid
MALSRASSTESLRTWTGASITFSRAVLWGKRLKRWNTMPTSSNVLLRSSWCIFTWFVPLWQSKRSLSSINICPSSIVSRRFRVRRYVDLPAPEGPIMQTTSFCSTVRDTSFNTSSGPLPCEP

SEQ ID NO: 58479 - DNA, 1461 bp, Unknown
  Obtained from environmental sample
  misc_feature (1)..(1461): n is a, c, g, or t
ttggccgaggagcatgaagggcaagataatctgccggacaaagatactcattccgcattcctaactcctaattcttcattagtccccactccccattctcccttgcagcaccgcctgatcgaacgcctgcctttctcgcttacccccggtcagaaaaaagccgttgcggaaataaacgccgatatgggcgattacgcaaacagcaatttttccatggcgcggctcttgcagggggatgtcggttccggcaaaacgcttgtttcgtttctggcagccttgcgggcggctgataatggcggacagaccgcgctattggctccgacagaactgcttgcccgccagcatgcggaaaacgccgcccggctccttgaacccctgggcctgcgtatagcgttcctgacgggaaatataaaagcggcgggcagaaaagacctgttaaagcatttggcggcgggggaaatagacattgcggtgggaacccacgcgctattttcaaaagacgtaaattataataatttgcagttggtaattattgacgaacagcaccgctttggcgtaacgcagcgggcccttatcatggcaaagaataatacggcaacccctcacctgttgatgatgagcgccacgcctattccccgcacccttgccatgacggtttttggcgacatggacgtttcggtaataagcgatatgccgcccggaagaaagccggtaataacccacctggcaagggaatccaacgagcagaaggtgtatgactttgtgcgcgataaactgaaaaccggttcccaggcttacttcgtatatccgttaatagaaagcgacgatgagaaagaaataattctgaaagacgccgtctttcttaaagacgcagtctcaatggcggatcggctggcggcaaaaatcttcccaggtttcgccgtggccctgatccattcaaaactcgacgaggaagaaaagcgtcagactatggaacgtttccgcaaaggcgaaataaaggtgttagtcgccaccagcgttgtcgaggtgggcgtggacgtgccgaacgcgaattgcattgtgattgaacacgccgaacgcttcggcctttccgccctgcaccagcttcgcggaagggtcgggcgcgggcaggatcaagcatactgttttctggtttactcggacaaatacaccgatgacggcaaggcgagattaaacgtaatgtacgaaagcactgacggctttgtcattgccgaggaagacttaaaactgcgggggccggggcagatcgccggaaccgaacagtccggctacctcagtctgggaatcgcaaatcccatcctcgacatagacgcgcttacaaaggcccgcgcggacgccttttccattctggaaaacgaccccggccttgtgcttgacggccaccgaatcatcacccgcgtcctggaagaagcgccgcccttcggagaggtggcgttgtag

SEQ ID NO: 58480 - protein, 486 aa, Unknown
  Obtained from environmental sample
  DOMAIN (44)...(212): Type III restriction enzyme, res subunit
  misc_feature (1)..(486): Xaa is any amino acid
MAEEHEGQDNLPDKDTHSAFLTPNSSLVPTPHSPLQHRLIERLPFSLTPGQKKAVAEINADMGDYANSNFSMARLLQGDVGSGKTLVSFLAALRAADNGGQTALLAPTELLARQHAENAARLLEPLGLRIAFLTGNIKAAGRKDLLKHLAAGEIDIAVGTHALFSKDVNYNNLQLVIIDEQHRFGVTQRALIMAKNNTATPHLLMMSATPIPRTLAMTVFGDMDVSVISDMPPGRKPVITHLARESNEQKVYDFVRDKLKTGSQAYFVYPLIESDDEKEIILKDAVFLKDAVSMADRLAAKIFPGFAVALIHSKLDEEEKRQTMERFRKGEIKVLVATSVVEVGVDVPNANCIVIEHAERFGLSALHQLRGRVGRGQDQAYCFLVYSDKYTDDGKARLNVMYESTDGFVIAEEDLKLRGPGQIAGTEQSGYLSLGIANPILDIDALTKARADAFSILENDPGLVLDGHRIITRVLEEAPPFGEVAL

SEQ ID NO: 58481 - DNA, 441 bp, Unknown
  Obtained from environmental sample
  misc_feature (1)..(441): n is a, c, g, or t
atggcaattgcgcccattattgaagaattcggctggcacacttacggtatccattgtgtacgccgacgtttcaacctttttactacttgctttgtttttggaattatctggggaatatggcatatgccactttcctctatcaaaggctattatcaaaatgttgtcatggaaacaggagtcatttattcaattaattttcttaccagccttattccctacttaatcatagataactggacttattacaaaacaaaacgcaatatgtttttgcaagtgtgccagcatttagtatttggtttttctatggaattgtttcgcactcaccctgacagtaaggttattcatactgttattctcctaattgtcagcgtagttatcgtgattaaaaatggcaagtttttctttgataaatcatttgagccggaagcgacacttggataa

SEQ ID NO: 58482 - protein, 146 aa, Unknown
  Obtained from environmental sample
  misc_feature (1)..(146): Xaa is any amino acid
MAIAPIIEEFGWHTYGIHCVRRRFNLFTTCFVFGIIWGIWHMPLSSIKGYYQNVVMETGVIYSINFLTSLIPYLIIDNWTYYKTKRNMFLQVCQHLVFGFSMELFRTHPDSKVIHTVILLIVSVVIVIKNGKFFFDKSFEPEATLG

SEQ ID NO: 58483 - DNA, 633 bp, Unknown
  Obtained from environmental sample
  misc_feature (1)..(633): n is a, c, g, or t
atgagaacagttaaagagccggaaatacgaaaaagcgaaattcttaatactgcggaaaaactttttttcgcaaaaggctatgaagaggcgacagtaaacgatattcttgaagcggtacagattgcgaaaggaacattttattattatttcaaatcaaaagaagatgttttagacggaattgtcaaacgccagattgacgaagggttggaaaaggcgcaagccattgccgccgatccaaagttgggcattgaggaaaaattgttatcggtaattatggcgcaaaaaccgaaaaaaacagtaaagaaaaaagttttgcctattatccataaacctgccaatgcgttacttcaccagaaaattctttccgaatatgtccttagacttagtcccattctaactgatattgttcaagaggggatcgccaaaaaagattttaatactccatatcccaaagaaattaccgagatacttttgtccgccggtttggttattttcgataccgcctacttccgctggacacaggaagaacagatgcggcgtatttccgcctttatttatactatagaacagctaacgggagcaaaaccgggaagtatggcgcaattatccggtatgtttattataaaccactaa

SEQ ID NO: 58484 - protein, 210 aa, Unknown
  Obtained from environmental sample
  DOMAIN (14)...(60): Bacterial regulatory proteins, tetR family
  misc_feature (1)..(210): Xaa is any amino acid
MRTVKEPEIRKSEILNTAEKLFFAKGYEEATVNDILEAVQIAKGTFYYYFKSKEDVLDGIVKRQIDEGLEKAQAIAADPKLGIEEKLLSVIMAQKPKKTVKKKVLPIIHKPANALLHQKILSEYVLRLSPILTDIVQEGIAKKDFNTPYPKEITEILLSAGLVIFDTAYFRWTQEEQMRRISAFIYTIEQLTGAKPGSMAQLSGMFIINH

SEQ ID NO: 58485 - DNA, 1773 bp, Unknown
  Obtained from environmental sample
  misc_feature (1)..(1773): n is a, c, g, or t
gtgaaaatatatcgactttttgctgttttcgctgtacattttattatggttcctttctttggaagactttctaaccttctcttcaataaaatcaaccggcaagggcaggaagattttcgggaagaaaagctaatcatggatttttctaaaacaaaaaaatccccttttgatattaaatcagaatcttcgtataatgcctatctgtcaaagggctcttttcagatgggcctgaaaaagccaaagtacatcgcgtggacagagatacccgaccgcgaatataacgatcatattatcgaagccagaatccgtctggacagcatgggcggctatgcggccgcggggcttacatttcatatcagggatgatgaagcctactatatcgtacttttttccaacaaaggatatttccgccttgaccttgtaagagacggctctcccaagccgcttatcgcgtggacagatatttatgaatttgacggaaaaaatatcaacataggcatcatcacttacggcactttcctgatttttcttgtcaatggaaaatgggtcggtgaaacaagcgacgacttgtataccacaggaaaattgggcctggcccttgcctcttatgaagaagcaaatgtaaaaacaatgaacggaacgccaggggacggggatgatgacaaatatgcctgtaaagcttttcttgactatctttcgatagacacaagggttaaaagcatagaggaaaaatacaaaaaatggactgataatttaaacataaacgcggaaagccgcctgcggctggcggaaactttcgcggttatgggcgaatccttaaaagccctggatcagattcacaaggcgtgggaacgcagggacaaagccatacgcgaggtttcttcgggagaagaatcggtcagaaccaaaaaagaactgcttctggcggcgcgtatgtcgttaaagctgggtcaattaaatgaagcggaaagttttctggacgccattcttgaacaatgggcggactccgccgagggaaaagaagccgtaaaagaaaaaataaagatactgggcgaacttaaaaaattcggcgaattaaaagaatttgttttaaaatatgtaaataacaaaaaagacataaattatcatactttgcttgcgcgctgttattttgaattaaaggaatataaaaaatccgcggcggcgtgggacaaggcttttgagatgaacaaaaataacggggtttacgcggcaaacgccgccaacgcgcttgagttaagcgggaaaaaagaagaagctcttttgcggtttattaaagcgggcaaaatttttcttaatcaggataatcaggcggaacttggagcaataatgccgaagattttatcttttggcggcggcagctgggaagcccgcgtccttgccggaaaatgggcttacagtatagaagattacaaccgctgtataacggaatttaccgccgcgaataagctcagatgctccataaaaccacggccggaagccgacccggctcattattatttgtgggggcttgccttaaacgtacaggggaaaaacagcgaggccgtccgcttgattgaaaaggccgtaaggctggcgcccgactacggtcttttccgtttcaaacttgcggaaataaaactggcatccggagcaaaagatttaaatccggcggaagaattcaagcttgcgttaaacaacatggacgatcccggcggaaagatggcggaacacgcgaagaatctgctgcgtaaagcgggaaaagatgctggttga

SEQ ID NO: 58486 - protein, 590 aa, Unknown
  Obtained from environmental sample
  DOMAIN (502)...(535): Tetratricopeptide repeat
  misc_feature (1)..(590): Xaa is any amino acid
MKIYRLFAVFAVHFIMVPFFGRLSNLLFNKINRQGQEDFREEKLIMDFSKTKKSPFDIKSESSYNAYLSKGSFQMGLKKPKYIAWTEIPDREYNDHIIEARIRLDSMGGYAAAGLTFHIRDDEAYYIVLFSNKGYFRLDLVRDGSPKPLIAWTDIYEFDGKNINIGIITYGTFLIFLVNGKWVGETSDDLYTTGKLGLALASYEEANVKTMNGTPGDGDDDKYACKAFLDYLSIDTRVKSIEEKYKKWTDNLNINAESRLRLAETFAVMGESLKALDQIHKAWERRDKAIREVSSGEESVRTKKELLLAARMSLKLGQLNEAESFLDAILEQWADSAEGKEAVKEKIKILGELKKFGELKEFVLKYVNNKKDINYHTLLARCYFELKEYKKSAAAWDKAFEMNKNNGVYAANAANALELSGKKEEALLRFIKAGKIFLNQDNQAELGAIMPKILSFGGGSWEARVLAGKWAYSIEDYNRCITEFTAANKLRCSIKPRPEADPAHYYLWGLALNVQGKNSEAVRLIEKAVRLAPDYGLFRFKLAEIKLASGAKDLNPAEEFKLALNNMDDPGGKMAEHAKNLLRKAGKDAG

SEQ ID NO: 58487 - DNA, 912 bp, Unknown
  Obtained from environmental sample
  misc_feature (1)..(912): n is a, c, g, or t
ttggtagattgccgccctcgttttgccgaagacgttttgcggtttgcctctcatggtaaagatcgcctgcgtgtacacatcgcgggcggagatgatcgagccaccggcggactggccctcggtgaggaagatggtggatctgccgccgtcgttctccccggcgtggtacttgcagtctttgaggttcggtatctttatctccacgcgtttcgcggcctctttggcttccttcttcaccttgttcagctcggtgcgcaatttctcattttgcactatcttgctctcaaggctgcgcgccgcgtcggcgttcttgtgcaggaagtctactacgcccgacttgacctcggagactatccatccgcgtatctccgtgttcccaagcttattctttgtctgcgactcgaagacggggcttttgagtttgatggcgacggcgcccgatatgccgtcgcgcacgtccacgccggagtagttcttcttatagaactcgttgacccccttgagtatgccctcccgaaaggcgctcaggtgcgtgccgccgtcggaggtgaactggccgttcacaaacgagtggtagtcctccccgtacgcctgcgtatgcgtgaaggcgaactccagctgcttgccgcggcagtaggctatgctgtagaccgccgactcgccgatgtcgttttgcaacaggtccaagagcccgttcttggactcaaatttctgcttccccaaaaagagcttcagcccggagttgaggtaggcgtagttccacaggcgctgctctatgtactcgaaattgaacttgtactcgccgaaaatctccgcgtcgggaacgaactccacgaacgtgccgtccggttcttccgttttagagacgccgcccttttggagatgagtttgccgcgctcgaacttcgcctga

SEQ ID NO: 58488 - protein, 303 aa, Unknown
  Obtained from environmental sample
  misc_feature (1)..(303): Xaa is any amino acid
MVDCRPRFAEDVLRFASHGKDRLRVHIAGGDDRATGGLALGEEDGGSAAVVLPGVVLAVFEVRYLYLHAFRGLFGFLLHLVQLGAQFLILHYLALKAARRVGVLVQEVYYARLDLGDYPSAYLRVPKLILCLRLEDGAFEFDGDGARYAVAHVHAGVVLLIELVDPLEYALPKGAQVRAAVGGELAVHKRVVVLPVRLRMREGELQLLAAAVGYAVDRRLADVVLQQVQEPVLGLKFLLPQKELQPGVEVGVVPQALLYVLEIELVLAENLRVGNELHERAVRFFRFRDAALLEMSLPRSNFA

SEQ ID NO: 58489 - DNA, 1302 bp, Unknown
  Obtained from environmental sample
  misc_feature (1)..(1302): n is a, c, g, or t
gtggagttcgttcccgacgcggagattttcggcgagtacaagttcaatttcgagtacatagagcagcgcctgtggaactacgcctacctcaactccgggctgaagctctttttggggaagcagaaatttgagtccaagaacgggctcttggacctgttgcaaaacgacatcggcgagtcggcggtctacagcatagcctactgccgcggcaagcagctggagttcgccttcacgcatacgcaggcgtacggggaggactaccactcgtttgtgaacggccagttcacctccgacggcggcacgcacctgagcgcctttcgggagggcatactcaagggggtcaacgagttctataagaagaactactccggcgtggacgtgcgcgacggcatatcgggcgccgtcgccatcaaactcaaaagccccgtcttcgagtcgcagacaaagaataagcttgggaacacggagatacgcggatggatagtctccgaggtcaagtcgggcgtagtagacttcctgcacaagaacgccgacgcggcgcgcagccttgagagcaagatagtgcaaaatgagaaattgcgcaccgagctgaacaaggtgaagaaggaagccaaagaggccgcgaaacgcgtggagataaagataccgaacctcaaagactgcaagtaccacgccggggagaacgacggcggcagatccaccatcttcctcaccgagggccagtccgccggtggctcgatcatctccgcccgcgatgtgtacacgcaggcgatctttaccatgagaggcaaaccgcaaaacgtcttcggcaaaacgagggcggcaatctaccaaaacgaagagctgtacgatatgatgatggcgcttggcattgaggaggacgtggagaagctgcgttataatagaatagttttagccaccgacgccgatgttgacggtttccacatcagaaatttattgctgactttcttcctcacgtactttgaggagttggttcaggccgggcacgtttatattttagagacgccgctcttccgcgtccgcaacaagaaagagacgctctactgctacagcgaaaaagagcgcgacgccgccatagccaagatccgcgacccggaggtaacgcggttcaagggtttgggggagatatcgccgagcgagttcggccagttcataggcggcgatatgcggctcgtggaggtcaacataaaatcagcgaagaatattaccgagacattagagttttatatgggaaagaataccccggagcggcgtgattttattatggagaatttgatatag

SEQ ID NO: 58490 - protein, 433 aa, Unknown
  Obtained from environmental sample
  DOMAIN (48)...(203): DNA gyrase B
  misc_feature (1)..(433): Xaa is any amino acid
MEFVPDAEIFGEYKFNFEYIEQRLWNYAYLNSGLKLFLGKQKFESKNGLLDLLQNDIGESAVYSIAYCRGKQLEFAFTHTQAYGEDYHSFVNGQFTSDGGTHLSAFREGILKGVNEFYKKNYSGVDVRDGISGAVAIKLKSPVFESQTKNKLGNTEIRGWIVSEVKSGVVDFLHKNADAARSLESKIVQNEKLRTELNKVKKEAKEAAKRVEIKIPNLKDCKYHAGENDGGRSTIFLTEGQSAGGSIISARDVYTQAIFTMRGKPQNVFGKTRAAIYQNEELYDMMMALGIEEDVEKLRYNRIVLATDADVDGFHIRNLLLTFFLTYFEELVQAGHVYILETPLFRVRNKKETLYCYSEKERDAAIAKIRDPEVTRFKGLGEISPSEFGQFIGGDMRLVEVNIKSAKNITETLEFYMGKNTPERRDFIMENLI

SEQ ID NO: 58491 - DNA, 441 bp, Unknown
  Obtained from environmental sample
  misc_feature (1)..(441): n is a, c, g, or t
atgatggccgaggaggttgctggcgatgtcggcggctgccttgatgcggagcgcatatcaaagacggcggaggacaagctgcgctccgtcggcctctccagagcgaaggcagcggctataaaggatttggccgaaaagacgaaggttggcatcgtccccgaatggaggacactgcgaaagatgggcgacgaagagataatagaaagactgatccaggtgcgcggggtagggcgctggaccgtcgagatgctgctaattttttcattgggccgcccggatatatggcctgtagatgactttgccatcaaaagggcctttgggctatattttggggccgcagagcagcccaaacgagccgaattgatcgctaaggccgagggctggaggccctggaggtcagtcgtggcgaggtgcctgtggaagtatctggacgaaggctga

SEQ ID NO: 58492 - protein, 146 aa, Unknown
  Obtained from environmental sample
  DOMAIN (3)...(130): HhH-GPD superfamily base excision DNA repair protein
  misc_feature (1)..(146): Xaa is any amino acid
MMAEEVAGDVGGCLDAERISKTAEDKLRSVGLSRAKAAAIKDLAEKTKVGIVPEWRTLRKMGDEEIIERLIQVRGVGRWTVEMLLIFSLGRPDIWPVDDFAIKRAFGLYFGAAEQPKRAELIAKAEGWRPWRSVVARCLWKYLDEG

SEQ ID NO: 58493 - DNA, 1299 bp, Unknown
  Obtained from environmental sample
  misc_feature (1)..(1299): n is a, c, g, or t
gtggctagtgcttttgttgatatttgcgccctcaagggccacatcggccaagtggcgcaggtgcgcggctgggtaaggaacgcccgcgcaagcaagacccgcttcatcgagctgcgcgatggcacagggttcgtgcagtgcgtggttaccgcttcggactctgaacccgaaagctacgagctggccggaagcctggcccaagagtgcgcggtagagatttcgggcctggtgcaggcgcacccaaagacaggcgtgccagagatattggtcaagtcgctctcgctcattggcggcagcgcggactatcccatcacgccaaaagagcatggcacagcattcctgatggaaaaccgccacctttggctgcgctccaagcgccagtgggccatactccgcgtgcgacacgccatagcaaaggcgatacgcgacttctttgacggcgatggcttcacgctgattgacagccccatcctgaccccctcctgctgcgagggggcctccacgctgttcggcaccccctatttcgatgagggcatggcctacctcagccagtccggccagctctacctagaaccggccctagccgcatttggcaaagtgtactgctttgggcccacgttcagggccgaaaaaagcaagactaggaggcacctgacagaattttggatggtggagccggagattccctttgcccacctagaagacgcaatggaactgggcgagcgcatgctgaagttcatcctacatagggtgctggaatccaaaaaagaagagctgaaaatattggagagggatctgtctccgctggaatgcgcactgaacagcgaatacatcaggatgacatacaccgagagcgtagaaaggttaaaggggctgggcagcgacataaaatggggcgaagacttcggcaacgacgatgagaccatactcatgaattccttggagcgcccatgctgggtacaccgtttccctaaagaattcaaagcgttctacatggagcctgacccccatgacccacgtttggccttgggcgcagacctgctggccccagagggctacggcgagatcataggcggcggcgaacgcgcttccagcctgcagtatttgctggaccagattgccaaagagggcctagatgaaaaagactacaagtggtacttggacgtgcgccgctatggttccgtaccccacgccggctttggcctaggccttgaaagggccgtggcgtggatatgcaaactgccgcatgtccgcgagacgggggcatatccaagaatgatgggtacgctctggccataa

SEQ ID NO: 58494 - protein, 432 aa, Unknown
  Obtained from environmental sample
  DOMAIN (133)...(286): tRNA synthetase class II core domain (G, H, P, S and T)
  misc_feature (1)..(432): Xaa is any amino acid
MASAFVDICALKGHIGQVAQVRGWVRNARASKTRFIELRDGTGFVQCVVTASDSEPESYELAGSLAQECAVEISGLVQAHPKTGVPEILVKSLSLIGGSADYPITPKEHGTAFLMENRHLWLRSKRQWAILRVRHAIAKAIRDFFDGDGFTLIDSPILTPSCCEGASTLFGTPYFDEGMAYLSQSGQLYLEPALAAFGKVYCFGPTFRAEKSKTRRHLTEFWMVEPEIPFAHLEDAMELGERMLKFILHRVLESKKEELKILERDLSPLECALNSEYIRMTYTESVERLKGLGSDIKWGEDFGNDDETILMNSLERPCWVHRFPKEFKAFYMEPDPHDPRLALGADLLAPEGYGEIIGGGERASSLQYLLDQIAKEGLDEKDYKWYLDVRRYGSVPHAGFGLGLERAVAWICKLPHVRETGAYPRMMGTLWP

SEQ ID NO: 58495 - DNA, 591 bp, Unknown
  Obtained from environmental sample
  misc_feature (1)..(591): n is a, c, g, or t
atgattgccgacgctaacaaaagagtggcaaacacttcgttgggagcggtgcgtaccaaacttgggcgcgatctcggtctttgcgatccgtcccattttgaatttgtgtggataatagacttcccgatgtttgaatacaatgaagacgaaaaaaaatgggaagcggctcaccatctttttacattgccgcaggaaaaataccacgcgacactggagagcgatccgggttccgtaaaaggcgatctttacgatcttgtgttaaacggttatgagttagcgtcaggttctattcgtattcatgactcgtcaatgcaaaaaagagtttttgagatagtgggaattgatcctgcacaagcggagaaaaagttcggctttttaacggaggcttttaaatacggagcgccgccgcacggaggtattgctccagggcttgaccgccttgtaatgatcatggcgggggtttcatcgttaaaggacgttatagcgttcccgaaaaattcgtttgcggtaagtcctatggatgattgcccgtcggaagtggatcaaaaacagttggatgaattgcgtataaagatacttccgcctaagtga

SEQ ID NO: 58496 - protein, 196 aa, Unknown
  Obtained from environmental sample
  DOMAIN (1)...(168): tRNA synthetases class II (D, K and N)
  misc_feature (1)..(196): Xaa is any amino acid
MIADANKRVANTSLGAVRTKLGRDLGLCDPSHFEFVWIIDFPMFEYNEDEKKWEAAHHLFTLPQEKYHATLESDPGSVKGDLYDLVLNGYELASGSIRIHDSSMQKRVFEIVGIDPAQAEKKFGFLTEAFKYGAPPHGGIAPGLDRLVMIMAGVSSLKDVIAFPKNSFAVSPMDDCPSEVDQKQLDELRIKILPPK

SEQ ID NO: 58497 - DNA, 477 bp, Unknown
  Obtained from environmental sample
  misc_feature (1)..(477): n is a, c, g, or t
ttgtgcggagaaacacacaaaactgacggcgggaaaagaccgcgtgcggtaatgatttgggaatcgtccgcaaacaaaggagtttctatgaaactgataaaaaaacttttagggattgccgcaattaccgcagtgattggatttataactctgcctcttacaggctgtccggcagaggctgatgacggtaacggtgtaacaacaaccgtaccggttacaggtgtaacgcttaatcaaacaagtatctccctgactatgggcggtactgcaaaccttaccgcaacggttgcgccggataacgcgactaacaaagcggtatcatggtcatcaagcaatacggcaagtgtgactgtttcaaacggcgttgttaccgcagttgcggctggttcggcgacaattactgttactacagcggacggaaacaaaaaagcttcttgcatcgttaccgtaacgccaatcggtataacaactatctaa

SEQ ID NO: 58498 - protein, 158 aa, Unknown
  Obtained from environmental sample
  DOMAIN (71)...(148): Bacterial Ig-like domain (group 2)
  misc_feature (1)..(158): Xaa is any amino acid
MCGETHKTDGGKRPRAVMIWESSANKGVSMKLIKKLLGIAAITAVIGFITLPLTGCPAEADDGNGVTTTVPVTGVTLNQTSISLTMGGTANLTATVAPDNATNKAVSWSSSNTASVTVSNGVVTAVAAGSATITVTTADGNKKASCIVTVTPIGITTI

SEQ ID NO: 58499 - DNA, 807 bp, Unknown
  Obtained from environmental sample
  misc_feature (1)..(807): n is a, c, g, or t
ttgactattaatattgcaaaacatgaatttacaattatttgggataacgtttattatttttccttatccaatttcccatatatttccgattgggaattaaagaaattactattatttatggaatatgaaaaaaataataatagaaaaacacaaattatttgcgaagataataatataatagaaaaaattaattatgtaattaaaaatccagatcaatatttaaatgtaaatgtacctaaaaaaattacagaatgtattgcttgcaaccaaaaaggctgtataactgattatttatgtcatactgcaagtattgaagatgcaaaatcaatattcaattgcggtaaaatactatcagcagtaaaagcaagaaaaaaaacaggaattgagctttcaaaagaacagagaaatgcagctaatgatccaccagatttttttgattatataatgttttcatggggtaattgtcaagcgggcgacaggcttattatggaacgattattagggagaattccaaatgaaaatgatttgagtttcgattttaagcctagcgtaagatattattttaaatataaaactattattgaacataataattttgtaaatgatggttaccatcctgcaaaaataaaaaatgaaataatactttataataatttatattgctgtataattccagaacaatataagaccatttttttgaatattgccccccaaaacataaagaataaaatccattatttagaaaataattgtaaaaatatatttgattggtctgaaaaagtctataattacattttaaaattataa

SEQ ID NO: 58500 - protein, 268 aa, Unknown
  Obtained from environmental sample
  misc_feature (1)..(268): Xaa is any amino acid
MTINIAKHEFTIIWDNVYYFSLSNFPYISDWELKKLLLFMEYEKNNNRKTQIICEDNNIIEKINYVIKNPDQYLNVNVPKKITECIACNQKGCITDYLCHTASIEDAKSIFNCGKILSAVKARKKTGIELSKEQRNAANDPPDFFDYIMFSWGNCQAGDRLIMERLLGRIPNENDLSFDFKPSVRYYFKYKTIIEHNNFVNDGYHPAKIKNEIILYNNLYCCIIPEQYKTIFLNIAPQNIKNKIHYLENNCKNIFDWSEKVYNYILKL

SEQ ID NO: 58501 - DNA, 537 bp, Unknown
  Obtained from environmental sample
  misc_feature (1)..(537): n is a, c, g, or t
gtggaaggcagggtggaacccgaagagacacaggaagcgcagagtatcgaagtatgcgaaaccggaaacgggggacagtgcaagccgggcgaaagccccgaacggagcctgctggatgcgatattggacgtagataacatgttcaaggcgcaggagcgggtaatagcgaacagggggtcagcgggagtagacgggatgacggtcggggagttgaacgactacctcatcaagcattatagggaattaagcgagagcatacggggcggctggtacaaaccgaagccggtgaagcaggtggagataccgaaaccggacggcgggaaacgcctgctgggaataccaacggtaatagaccggatggtgcaacaggcggttgtacaagtattgcaaccgatatttgagcagacattctcggattccagtttcgggtttagaccggggcggaacgcgcatcaggcgatacagcgagcgaagcaatattacgaggaagggcatacttttgtaaaacgaggtgacaggcactattttggtatataa

SEQ ID NO: 58502 - protein, 178 aa, Unknown
  Obtained from environmental sample
  misc_feature (1)..(178): Xaa is any amino acid
MEGRVEPEETQEAQSIEVCETGNGGQCKPGESPERSLLDAILDVDNMFKAQERVIANRGSAGVDGMTVGELNDYLIKHYRELSESIRGGWYKPKPVKQVEIPKPDGGKRLLGIPTVIDRMVQQAVVQVLQPIFEQTFSDSSFGFRPGRNAHQAIQRAKQYYEEGHTFVKRGDRHYFGI

SEQ ID NO: 58503 - DNA, 1110 bp, Unknown
  Obtained from environmental sample
  misc_feature (1)..(1110): n is a, c, g, or t
ttgatttttctatatattacttccatggcacaaagcgcaacaaaaaggtttggtattttaacggccggcggcgattgtcccggacttaacgccgctcttcgcggagtatgccgtgcggcttatgatcgttatggcatggaaattattggcattgcgaaaggttttcgcggtttaattgaagaagatacaagagtccttaaaccggaagatttttccggtattctgacgcgcggcggaacaattctcggctccagcagggaaaagccgtttagccgtgtcgataaagacgaggttgcgcttgaaaaagtttccgctataaaagacacatacgcaaaactcaaacttgattgccttgttgtgcttggcggaaacggaacaaatactacgggatataaacttgcatgggaaggtctcaatgtaatcggtcttcccaaaacaatagacaatgatattgtcggaaccgacaaaacattcggatttgattcggctttgtctatctgcacggaagcgatagatcgtcttcattccacggcgcaaagccacagccgcgttatcgtaattgaattaatggggcacaaggcgggatggctctcgctttacgcgggagtcgccggcggcggcgatatagttctgatacctgaaatcccctacgatatacgcgccattggcaatcatcttgaggaccgcgcaagaacgggaaaaacattttcgatagttgtcgtcgcggaaggcgcgttatcggttaaagaagcggcaatggataaaaaggacagaaaaaaatacagagcggaaaacggtccttctgtggcgtatcgtctcgcaaaagaaatcggcgaagaaacaggaatggaaacccgcgctacagttttaggttatgtgcagcgcggaggcgtaccaagcgctacagatcgcgttcttgcgacaagccttggaaccgccgccgtggaacttttggctaagggtgattacggacgcatggtagcgttaaacggcacggaaattgattctgtcgatttaagtatccccgaaggcaaagtaaaaagcgtaccgttggatcattatatgattgacaccgcgaaagcggttggcacttgcatcggcgttttttaa

SEQ ID NO: 58504 - protein, 369 aa, Unknown
  Obtained from environmental sample
  DOMAIN (15)...(320): Phosphofructokinase
  misc_feature (1)..(369): Xaa is any amino acid
MIFLYITSMAQSATKRFGILTAGGDCPGLNAALRGVCRAAYDRYGMEIIGIAKGFRGLIEEDTRVLKPEDFSGILTRGGTILGSSREKPFSRVDKDEVALEKVSAIKDTYAKLKLDCLVVLGGNGTNTTGYKLAWEGLNVIGLPKTIDNDIVGTDKTFGFDSALSICTEAIDRLHSTAQSHSRVIVIELMGHKAGWLSLYAGVAGGGDIVLIPEIPYDIRAIGNHLEDRARTGKTFSIVVVAEGALSVKEAAMDKKDRKKYRAENGPSVAYRLAKEIGEETGMETRATVLGYVQRGGVPSATDRVLATSLGTAAVELLAKGDYGRMVALNGTEIDSVDLSIPEGKVKSVPLDHYMIDTAKAVGTCIGVF

SEQ ID NO: 58505 - DNA, 576 bp, Unknown
  Obtained from environmental sample
  misc_feature (1)..(576): n is a, c, g, or t
gtggtcagattggccgagatcagttatatgcacgaacaggaaggaaaattttccgtagctgacgcattatcaaatgtgggcaagaaattaatacgccgtcatcctcatgtattcggcgaagtaaaagtaaaagacagcgcggaagttttggaaaattgggcgcagataaaagtagaacaagaagggcgcaaaccaaaggattccgcgcttgatgaagtaagcggcggacttcctccgatggatcgcgcttataaaatgcaaaaaaaagccgccaaaaccggctttgattggcctgacattgacggagtagcagataaaataaaggaagagcttgatgaaacgcttgccgcaaaaaatgccgaagaaaccgaagaagaattaggcgatctgcttttctcggtaatcaacctttgccgttttttaaaagtagaaccttcagccgctcttaaccgaacaaacaacaaatttattgaaagatttaaatatgtggaaagaaaaatgaaagaaacagggcaagaaatgaaaaaagaaaatcttaatattatggataaatattggaacgaagcaaaaaagtaa

SEQ ID NO: 58506 - protein, 191 aa, Unknown
  Obtained from environmental sample
  DOMAIN (98)...(160): MazG nucleotide pyrophosphohydrolase domain
  misc_feature (1)..(191): Xaa is any amino acid
MVRLAEISYMHEQEGKFSVADALSNVGKKLIRRHPHVFGEVKVKDSAEVLENWAQIKVEQEGRKPKDSALDEVSGGLPPMDRAYKMQKKAAKTGFDWPDIDGVADKIKEELDETLAAKNAEETEEELGDLLFSVINLCRFLKVEPSAALNRTNNKFIERFKYVERKMKETGQEMKKENLNIMDKYWNEAKK

SEQ ID NO: 58507 - DNA, 357 bp, Unknown
  Obtained from environmental sample
  misc_feature (1)..(357): n is a, c, g, or t
ttggaaaacgatacatacgagaaaaaattcgaagaacctgtcagcagagcagtgggtgaatcccttccaaaacgttttaacgaactggaagttattgtcgctcataacccaacaaaaatcatggtaacaaaagaaccaaatgaacttttcggctcatttaccattcttaaacctaccagtataaatttctcgggagtgttctaccaattgccgaccgtttacaataccctcgctaaattctttgaagagacgcttaacagacatcgcaaaattccgcagatggacgccaaaaaagccgctcaattaatagcggacacggttaaaaaaaccatgagtcctgaatgcccctatcaatga

SEQ ID NO: 58508 - protein, 118 aa, Unknown
  Obtained from environmental sample
  misc_feature (1)..(118): Xaa is any amino acid
MENDTYEKKFEEPVSRAVGESLPKRFNELEVIVAHNPTKIMVTKEPNELFGSFTILKPTSINFSGVFYQLPTVYNTLAKFFEETLNRHRKIPQMDAKKAAQLIADTVKKTMSPECPYQ

SEQ ID NO: 58509 - DNA, 2694 bp, Unknown
  Obtained from environmental sample
  misc_feature (1)..(2694): n is a, c, g, or t
atggactcaagaatacattttttcagccagaaggacgttatctccaacaaggtagcgcctgaattattaggtatccgcggacggcaggcgaatgaatttgccgaacttggttttccgattctgccgggatttattctggatactgaacttgcttcggagcttgacacaaaaacaataaaaaaagacatttttgatcttttgggaaaatgcgcaaaattagtgggcaagacttacggcgacgctgaaaaccccatgttgttaaaagtaattatttcttcaaacatggcgattacaacttacccggtattgcataactttggacttgcaaggcctgttcttgaaggttttgcgaagtgggtaggcaaggattttgccgcaaacgaagttttatttatgatcaacggcatgatgaacatcgaagagaagataaatgaattggaaggtaaaacccagatgaaggaagaaattgccgaaaagaacaaacttattaaaagattattgggcattaaaggaccttctaatgaactgcataatgaggaagataaagctccccttccaaagaaaaaaaccgcagaggaatatatggatgattacgccaaatacttccccaaaggtttctttgatgacgcggaatctcagttattgataaccattagtgaaatttccaaattgcttaaaatggatgaacaaaataacaatgatacggcaattgccattcagcctatggtatacggaaattacggcaaggattcctgttcaggttattttttcagcagaaatgtagtgacgggcgagaaaaaactccagggaaattactttgtcggcaagttcaacgaaattggggccgcagggtatgatattaataaaattgatccaacgcaccttaaacaacttgaaaaaatcgcatggactctcgaagacaaattcaaggaaattcgccaggttcgctttaccgtagaaaacggaaaactctggctgatagagcagaggcttgtggatcaaaaatctacccaggctgatcttaaactcttgcttgatcttcaaaagcggaaaatagttgacgcggcttatgtagtaaaagcgattgatcctctaagacttaatgaaattctgcatcctgtaattaatcctgccagcgttaagggatttaaatcatggaagggcggtatcgcgggcgctccgggcgcggcgataggacgcgtctatttcagcacggacgctttgttggaagcgaaaaaagcggcgacacagcagggaaataaagacagttttattctctgtcttgaatcttcttttgcggaagacgtaaaagcaatcgaagtaagcgccggcgtattaaccgccgagggcggatattccgctcacgcgtccgtagtagcgcgccagtacggaaaagtgtcgcttgtatcccctgagcttaaaattaaaggaacaaaagcgaccctaggcgattttagtttctccgaaggaaactacataaccatcgacgttcctttctacggcgaatcaaaagtttatcttggaactgcggaacttatagagcctgatccaaaaggttcggggcttctggactttatcgatctttccaagagcttcttaaaagaattccatatcaggtgtaatgcggacactccgcgagacgctaaacttgctttagacttcggcgcggacggcgtaggtttgtgccgcacggaacacatgttctttaaagcggatcgcatcaatgttttccgcgatatgctgatgtccgatgacaaaaaagaacgccagaaagttttaaataaactgcaaataatgcaaagggaagatttttacggcatcatgaaagtgatggcgggcaaggaagtaacaatccgtcttctggattcgccgcttcatgaatttatgccccatactaacgatgaattacaggcttatattgaccatgttgggaaagttaaaggaaccaagccgtcaaaagccgatattgtcgccagtgttgacgctctgcatgaatttaacccaatgttgggacaccgaggatgccgtatcgccgtctcttacccggagatttacgcgatgcaggtaaaagcgatttttgaagcggcgtataaactgcgctcggaaaaaattgacgcgcgtcctgaaattatggttccgattgtaatgaactccgctgagttaaaacttatcgcctatggcaaaaagatcgaaggttccaactatttaggcatagttgacatcgaagaagcgctcagaaaagaaatgaaagctaaagaagttgaatacaagatcggtaccatgattgagcttcccgccgcggcccttggagccggagaaattgcgaaatacgggcgtttcttcagctttggcacaaacgaccttactcagactactttgggtatttcaagggacgactttaccgcgtttatgccggattacactttgtttgaccttatcaacggcaacccgttcagcacgttggattcaagagtaaaagagcttatcgcccttgcaacggatcgcggacggctgacccgtccggatttggtttgcggtttgtgcggtgagcatggagccaatcccgcaaacgtccgcttctgcatggatgccggtcttaactatgtatcctgttcactgtactcggtccatatagccatgcttgcggtagctcaggctgaaattgaaaaattacaggccaaagggaaggaataa

SEQ ID NO: 58510 - protein, 897 aa, Unknown
  Obtained from environmental sample
  DOMAIN (396)...(495): PEP-utilising enzyme, mobile domain
  misc_feature (1)..(897): Xaa is any amino acid
MDSRIHFFSQKDVISNKVAPELLGIRGRQANEFAELGFPILPGFILDTELASELDTKTIKKDIFDLLGKCAKLVGKTYGDAENPMLLKVIISSNMAITTYPVLHNFGLARPVLEGFAKWVGKDFAANEVLFMINGMMNIEEKINELEGKTQMKEEIAEKNKLIKRLLGIKGPSNELHNEEDKAPLPKKKTAEEYMDDYAKYFPKGFFDDAESQLLITISEISKLLKMDEQNNNDTAIAIQPMVYGNYGKDSCSGYFFSRNVVTGEKKLQGNYFVGKFNEIGAAGYDINKIDPTHLKQLEKIAWTLEDKFKEIRQVRFTVENGKLWLIEQRLVDQKSTQADLKLLLDLQKRKIVDAAYVVKAIDPLRLNEILHPVINPASVKGFKSWKGGIAGAPGAAIGRVYFSTDALLEAKKAATQQGNKDSFILCLESSFAEDVKAIEVSAGVLTAEGGYSAHASVVARQYGKVSLVSPELKIKGTKATLGDFSFSEGNYITIDVPFYGESKVYLGTAELIEPDPKGSGLLDFIDLSKSFLKEFHIRCNADTPRDAKLALDFGADGVGLCRTEHMFFKADRINVFRDMLMSDDKKERQKVLNKLQIMQREDFYGIMKVMAGKEVTIRLLDSPLHEFMPHTNDELQAYIDHVGKVKGTKPSKADIVASVDALHEFNPMLGHRGCRIAVSYPEIYAMQVKAIFEAAYKLRSEKIDARPEIMVPIVMNSAELKLIAYGKKIEGSNYLGIVDIEEALRKEMKAKEVEYKIGTMIELPAAALGAGEIAKYGRFFSFGTNDLTQTTLGISRDDFTAFMPDYTLFDLINGNPFSTLDSRVKELIALATDRGRLTRPDLVCGLCGEHGANPANVRFCMDAGLNYVSCSLYSVHIAMLAVAQAEIEKLQAKGKE

SEQ ID NO: 58511 - DNA, 534 bp, Unknown
  Obtained from environmental sample
  misc_feature (1)..(534): n is a, c, g, or t
gtgacgcctcctgcggcacttacaaaaggcaaatttaccgttaaaaaagtttctaaacccaaaaaggccgatgaggccaaacctgccgcgaaagcaaaggcaaaagcgcccgctaagggaaaagccacgtctaaaaaagccgcaggagacgctcccgtaaagaaagcggctagcgtagtacaggtacagtcatcgggcggacccgcgaagatgactccccgctatgcggttgtagtacagaatgagcttttccataacggaaacgttgaagcatggaagaggattatcgcaagttataaagccaaacaccccgctctggaagttttcatttattatgaaggtgaaagaatactcgatattaactcattgtttaaatggggcaaggtaaagcatggcagcgccattgaatttgccgtagccggaaatgaaattcaggatgtagcgaagctgcaacgttatctggcgcagggagccagtcatatgtttgaagcgttcctacatgggcaggttaataccgtgcttaaactattttaa

SEQ ID NO: 58512 - protein, 177 aa, Unknown
  Obtained from environmental sample
  misc_feature (1)..(177): Xaa is any amino acid
MTPPAALTKGKFTVKKVSKPKKADEAKPAAKAKAKAPAKGKATSKKAAGDAPVKKAASVVQVQSSGGPAKMTPRYAVVVQNELFHNGNVEAWKRIIASYKAKHPALEVFIYYEGERILDINSLFKWGKVKHGSAIEFAVAGNEIQDVAKLQRYLAQGASHMFEAFLHGQVNTVLKLF

SEQ ID NO: 58513 - DNA, 1122 bp, Unknown
  Obtained from environmental sample
  misc_feature (1)..(1122): n is a, c, g, or t
ttgaatatggcaaaagcggactattacgacatactgggcgttcacaagggcgcttccgacgacgatataaagaaggcgtaccgcaagctcgccgtgaagtaccatcccgacaaaaatcccggggacaagaccgcggtggagaagtttcgcgaggccacggaggcctacgagattctgaaggatccgcagaagcgcgcccagtacgacaagttcggccacgcggcgtttgatatgccgcagggcggcggcggtggatatggcggcgggtatgccggaggcagcttcgacctatccgacgcgttgcgggcgttcatgaacgatttcggcggggactctatcttcggcgacctcttcggcttcggttcgcgcacccggcgcggcggcggtcacgggggggcgcggggcaacgatctgcaggtcaagctcggcctcacgcttgaggagatctcggcaggcgtgaagaagaccataaaagtcaggcgtttggacaggtgttccgagtgcggcggcagcggttccaagaccggcaagcgcgtcacttgcgcgaagtgcggcggcagcggccgcgtgcgccacgttaccaattcattcttcggccagatggttcaagagacggattgccccatctgccgcggcgacgggcagactgtctccgacccgtgcgcggcgtgcggcggcagcggtctgcggcagtccgagtcgacagtgtcggtggacattccggcgggcgtggaagagggcaattacatccgcgtgcccggaaggggcgacgccggcaggggaggcggggagtcgggcgacctaatagtcatattgcacgagaaacctcacgatatattcacccgccacggcatagacctgagttgcaaactagacataacattctccgaggcggcgctggggtgctctaagaccatcaaaacgcttgaggacaaagtcagcctgaaaatcccgggcggcactcagtctgaaaaagtcttcaaactcaaatctaaaggattggcggagtatcgcggcaggaacaggggggatttactcgtgaaggtgcacgtcaacacgccggagaagcttgggaaggaagagaaggatctgtttgagaagttggcgaagcgcgggatgtga

SEQ ID NO: 58514 - protein, 373 aa, Unknown
  Obtained from environmental sample
  DOMAIN (152)...(235): DnaJ central domain (4 repeats)
  misc_feature (1)..(373): Xaa is any amino acid
MNMAKADYYDILGVHKGASDDDIKKAYRKLAVKYHPDKNPGDKTAVEKFREATEAYEILKDPQKRAQYDKFGHAAFDMPQGGGGGYGGGYAGGSFDLSDALRAFMNDFGGDSIFGDLFGFGSRTRRGGGHGGARGNDLQVKLGLTLEEISAGVKKTIKVRRLDRCSECGGSGSKTGKRVTCAKCGGSGRVRHVTNSFFGQMVQETDCPICRGDGQTVSDPCAACGGSGLRQSESTVSVDIPAGVEEGNYIRVPGRGDAGRGGGESGDLIVILHEKPHDIFTRHGIDLSCKLDITFSEAALGCSKTIKTLEDKVSLKIPGGTQSEKVFKLKSKGLAEYRGRNRGDLLVKVHVNTPEKLGKEEKDLFEKLAKRGM

SEQ ID NO: 58515 - DNA, 924 bp, Unknown
  Obtained from environmental sample
  misc_feature (1)..(924): n is a, c, g, or t
atggcgataaagatcggccagcgcgaggtcgacatccgcgtctccatactccccacaatcttcggcgaaaaagcggtgctgcgcatactggacaaggagtcattcgaaaagaacaccgcaagcttgggcctcacccaatacgacgaacggatcttccgctcgcagatagccaaaccctacggattggtcatagttacgggaccgaccggaagcggaaagtccacgacgctctacagcgcgctgcaagccgtcaaaaacgtggccagaaatataatcacggtggaagaccctgtagaattccacatggagggggtaaaccaagtcaacgtgaacacaaagaccggcctgactttcgcaacggcgttgcggtcaatcctgcggcaagaccccgacatcgttctgataggagagatccgcgacagcgagacggcggacatcgcgataaaaatggcgctgaccggccacttggtattctcaaccctgcacacaaacgacgcggcaagcaccatagcccgcttcaccgacataggtatccctcccctgctgctcggctcggcgctgaacctgatcgtggcgcagcggctggtgcggaaaatatgccctaagtgcaaaatagaatacaaagccgcaccggaacttatacagagcatcggactagaccccgaaaaagtcacgaaactctacaagggcaacgggtgcgtcacctgcaacggcaccggcttcgcggggcgcacggcgatattcgagatgctgcagatcactaagaacatccgcaaacttatactgaagaacgcgtcaacgacggaaattcaagaggcggcggcggcggaaaacatgaaaacgctgcggcaaacgggcgcggaactggcgatgaacggagagactactattgagcaggtgctggcggccacgattgaaatttaa

SEQ ID NO: 58516 - protein, 307 aa, Unknown
  Obtained from environmental sample
  DOMAIN (2)...(199): Type II/IV secretion system protein
  misc_feature (1)..(307): Xaa is any amino acid
MAIKIGQREVDIRVSILPTIFGEKAVLRILDKESFEKNTASLGLTQYDERIFRSQIAKPYGLVIVTGPTGSGKSTTLYSALQAVKNVARNIITVEDPVEFHMEGVNQVNVNTKTGLTFATALRSILRQDPDIVLIGEIRDSETADIAIKMALTGHLVFSTLHTNDAASTIARFTDIGIPPLLLGSALNLIVAQRLVRKICPKCKIEYKAAPELIQSIGLDPEKVTKLYKGNGCVTCNGTGFAGRTAIFEMLQITKNIRKLILKNASTTEIQEAAAAENMKTLRQTGAELAMNGETTIEQVLAATIEI

SEQ ID NO: 58517 - DNA, 444 bp, Unknown
  Obtained from environmental sample
  misc_feature (1)..(444): n is a, c, g, or t
gtgactttttcggggtctagtccgatgctctgtataagttccggtgcggctttgtattctattttgcacttagggcatattttccgcaccagccgctgcgccacgatcaggttcagcgccgagccgagcagcaggggagggatacctatgtcggtgaagcgggctatggtgcttgccgcgtcgtttgtgtgcagggttgagaataccaagtggccggtcagcgccatttttatcgcgatgtccgccgtctcgctgtcgcggatctctcctatcagaacgatgtcggggtcttgccgcaggattgaccgcaacgccgttgcgaaagtcaggccggtctttgtgttcacgttgacttggtttaccccctccatgtggaattctacagggtcttccaccgtgattatatttctggccacgtttttgacggcttgcagcgcgctgtag

SEQ ID NO: 58518 - protein, 147 aa, Unknown
  Obtained from environmental sample
  SIGNAL (1)...(16)
  misc_feature (1)..(147): Xaa is any amino acid
MTFSGSSPMLCISSGAALYSILHLGHIFRTSRCATIRFSAEPSSRGGIPMSVKRAMVLAASFVCRVENTKWPVSAIFIAMSAVSLSRISPIRTMSGSCRRIDRNAVAKVRPVFVFTLTWFTPSMWNSTGSSTVIIFLATFLTACSAL

SEQ ID NO: 58519 - DNA, 666 bp, Unknown
  Obtained from environmental sample
  misc_feature (1)..(666): n is a, c, g, or t
atggatcagatcggccgaggacctcgacatcgccgaacgccgcctgcctcaggacgggcgtatggcgataaagatcggccagcgcgaggtcgacatccgcgtctccatactccccacaatcttcggcgaaaaagcggtgctgcgcatactggacaaggagtcattcgaaaagaacaccgcaagcttgggcctcacccaatacgacgaacggatcttccgctcgcagatagccaaaccctacggattggtcatagttacgggaccgaccggaagcggaaagtccacgacgctctacagcgcgctgcaagccgtcaaaaacgtggccagaaatataatcacggtggaagaccctgtagaattccacatggagggggtaaaccaagtcaacgtgaacacaaagaccggcctgactttcgcaacggcgttgcggtcaatcctgcggcaagaccccgacatcgttctgataggagagatccgcgacagcgagacggcggacatcgcgataaaaatggcgctgaccggccacttggtattctcaaccctgcacacaaacgacgcggcaagcaccatagcccgcttcaccgacataggtatccctcccctgctgctcggctcggcgctgaacctgatcgtggcgcagcggctggtgcggaaaatatgccctaa

SEQ ID NO: 58520 - protein, 221 aa, Unknown
  Obtained from environmental sample
  misc_feature (1)..(221): Xaa is any amino acid
MDQIGRGPRHRRTPPASGRAYGDKDRPARGRHPRLHTPHNLRRKSGAAHTGQGVIRKEHRKLGPHPIRRTDLPLADSQTLRIGHSYGTDRKRKVHDALQRAASRQKRGQKYNHGGRPCRIPHGGGKPSQREHKDRPDFRNGVAVNPAARPRHRSDRRDPRQRDGGHRDKNGADRPLGILNPAHKRRGKHHSPLHRHRYPSPAARLGAEPDRGAAAGAENMP

SEQ ID NO: 58521 - DNA, 447 bp, Unknown
  Obtained from environmental sample
  misc_feature (1)..(447): n is a, c, g, or t
atggccaacaggcggatgggcgctaaaattcttcttgcgctgtttacgcgcgcaaatccgggaaaggatttttcagagcatatagccgagcgcatcgtagaaaccgaggccatgaactgcatcaactctcttgagaacggttttaactttcttacagcccttggttccatctccccgttaacgggatttcttggcactgtttcaggaatgataggcgcgttccgctcaatagccgaagctacagaggtaaacgcgcagattgtcgccaacggcatttacgaagcgcttattaccaccgtattcgggcttgtaatagccattatcgcgatggtatttcattcaatttttaccaacagcgtcgataagttttcaagcaacatggaaagcatctgttccgatttaattatccggctgacggaacagcaggatcagaaaagcaaagcttaa

SEQ ID NO: 58522 - protein, 148 aa, Unknown
  Obtained from environmental sample
  DOMAIN (2)...(132): MotA/TolQ/ExbB proton channel family
  misc_feature (1)..(148): Xaa is any amino acid
MANRRMGAKILLALFTRANPGKDFSEHIAERIVETEAMNCINSLENGFNFLTALGSISPLTGFLGTVSGMIGAFRSIAEATEVNAQIVANGIYEALITTVFGLVIAIIAMVFHSIFTNSVDKFSSNMESICSDLIIRLTEQQDQKSKA

SEQ ID NO: 58523 - DNA, 399 bp, Unknown
  Obtained from environmental sample
  misc_feature (1)..(399): n is a, c, g, or t
gtgaatataaaacggaaaagaaaaaatttttatattccccttaactccatgtccgacgtggcttttcttcttttgatttttatcatgcttgtggcgctgattaactacaggaaggaagtaaaaattgaataccctgaggcaaaaacggcgttaaggacaaccgccgaaaaaaatcttgaagtttgggtagacaaggaaggcgcgatttatcttgacggagacttgtccgatcatcagggattggaaaaagaaatatcgtatctttaccttaacgcccccgatacaagggtgcatatcatcgcggaccgtaatactccctacgaaaaaattaattccattctggaaattcttcaagttttgcagtaccgcgttgtaagttttgtggtgaaaaatgaataa

SEQ ID NO: 58524 - protein, 132 aa, Unknown
  Obtained from environmental sample
  DOMAIN (5)...(132): Biopolymer transport protein ExbD/TolR
  misc_feature (1)..(132): Xaa is any amino acid
MNIKRKRKNFYIPLNSMSDVAFLLLIFIMLVALINYRKEVKIEYPEAKTALRTTAEKNLEVWVDKEGAIYLDGDLSDHQGLEKEISYLYLNAPDTRVHIIADRNTPYEKINSILEILQVLQYRVVSFVVKNE

SEQ ID NO: 58525 - DNA, 570 bp, Unknown
  Obtained from environmental sample
  misc_feature (1)..(570): n is a, c, g, or t
atgaataaagaaaaaataatccgcttttctatttatattttcgccgccgttcttcaccttttggttcttttttttgtaattaaaacaaataaaatttttcaggaagctcccgaaaacgcgagaataatgaaattaaccgacattcaggaagcccctccgcctgaaccggaaattccgcaagtggaagccattgccgaaaaaatgatagaaaccgacgtcgcgcccgtccaacaggtgcttgcggcgggagtttttcttaccgagacttatcttgcgatgaatcaggtttccgttccgcccaagtttgactccggcctggtcatgaaatcccttgtctaccctcctatcgcgttgcgttccggaattgaaggaaaggtcatccttgaattattcgtcgaccgtaccggtatggtgcaaaagattgtaatcttaaaagaagaccctcccgaccgcggcttcggtgaagcggcggtaaaggcgttcacggacagaaaaggcttgcccgcctacgccaacggagaacccgtctccgcaaggtaccgctacccggtgacatttaagttgaaataa

SEQ ID NO: 58526 - protein, 189 aa, Unknown
  Obtained from environmental sample
  DOMAIN (110)...(144): Gram-negative bacterial tonB protein
  misc_feature (1)..(189): Xaa is any amino acid
MNKEKIIRFSIYIFAAVLHLLVLFFVIKTNKIFQEAPENARIMKLTDIQEAPPPEPEIPQVEAIAEKMIETDVAPVQQVLAAGVFLTETYLAMNQVSVPPKFDSGLVMKSLVYPPIALRSGIEGKVILELFVDRTGMVQKIVILKEDPPDRGFGEAAVKAFTDRKGLPAYANGEPVSARYRYPVTFKLK

SEQ ID NO: 58527 - DNA, 876 bp, Unknown
  Obtained from environmental sample
  misc_feature (1)..(876): n is a, c, g, or t
gtgagatacgccgctgttcagattttgcgactcaattatccgcttcggctcgcatgccgattactgcgcgtttcggcaagcggctattattcctggcatcaacgtcctgccaaagccgaaagctcgcaacgcctgactgcgatactcaaagccgcccatcagaagacgcgcggcacttacggggccgagcgactccacaaggagctgcttgctgaagggcatgaaatatcgctatggaaagtgaaaaaactccgcagagcgcacggtttggtactcaggcacaagcgcaaatttgtgcgcactaccgattccagccatgatttgccggtggccccgaatctcctttcacggaatttcacgcaagaagcctgtaatcgcgcttgggtgagcgacatcacctatattccgacccgcgaaggctggttgtaccttgccggggtgaaagacctatacagcaaggaaattgtggggttcagcctttcaccacgcatagacaccgcccttgtggtgaatgcgctacgcaaagccttccacgctcatcggcctgcaccaggcttgctgctgcactcggatcgcggcagccagtattgtagccgtatttatcaggaaaagatggaaaaataccgtatggtttgttcaatgagtcgcaagggggactgctacgacaatgccccaatggaaagcttctttggcctgctgaaaaccgaacttgttcgctgtaggcagtacaacagtcatagcgaagccatgcgtgacataacggaatatattgaaatattttacaatcgacaacggcgacaagcggcactcggttatctttcaccggctgcctttgcccgaaaggcgcgagatgaacaactgggcaaagccgcatag

SEQ ID NO: 58528 - protein, 291 aa, Unknown
  Obtained from environmental sample
  DOMAIN (120)...(280): Integrase core domain
  misc_feature (1)..(291): Xaa is any amino acid
MRYAAVQILRLNYPLRLACRLLRVSASGYYSWHQRPAKAESSQRLTAILKAAHQKTRGTYGAERLHKELLAEGHEISLWKVKKLRRAHGLVLRHKRKFVRTTDSSHDLPVAPNLLSRNFTQEACNRAWVSDITYIPTREGWLYLAGVKDLYSKEIVGFSLSPRIDTALVVNALRKAFHAHRPAPGLLLHSDRGSQYCSRIYQEKMEKYRMVCSMSRKGDCYDNAPMESFFGLLKTELVRCRQYNSHSEAMRDITEYIEIFYNRQRRQAALGYLSPAAFARKARDEQLGKAA

SEQ ID NO: 58529 - DNA, 864 bp, Unknown
  Obtained from environmental sample
  misc_feature (1)..(864): n is a, c, g, or t
atggaaaaccttatggtcaagcaggaaaacggagcggaagaagcgggcaaggcggtagatgatattaaattccatattgacagcctcaataaaatgatagaggaacaaactgaaagcgttgacaagtcgtcttccgccattgaggaaatgaccgcaaacatccattcggtaacccagactctagctaaaaacagccgaaatgtcagcgaattggccgaagcgtcggagaatggcaagacaggccttcaattagtcgcgcaggagatactggaaatagcgaaggattccgaggggcttcttgaaattaattcgttgatgaacaccatcgcaagccagaccaacctgctttcgatgaatgcagctattgaggcggcgcatgcgggagaggcagggaggggttttgccgttgtcgcggatgaaatccgtaaactcgccgagacctccggtcggcagtcaaagaccacggcggcaatgctaaaaaaaataaaagcgtccatagacaacattaccaaatcctctaacgacgtgcttgagcgtttcggggctatagattcaagcgtgaagacggtttctgagcatgagcaaaacattttacacgctatggaagagcaggaaacagggggaagacaaatacttgattcaataagccgcttgagggacataaccgcttcggtcaagaaaggatctgacggcatggaagaatcaggaatgaccctggttaaggaatcaagcgactttataaaaaccagccaggaagcggtaagcggtatgggcgagatactaaaaggcgttaaccagataaaagtttcggtaaaccatgtaaacgatatgagcatggaaaacctaggaactttgaatcgttaa

SEQ ID NO: 58530 - protein, 287 aa, Unknown
  Obtained from environmental sample
  DOMAIN (34)...(270): Methyl-accepting chemotaxis protein (MCP) signaling domain
  misc_feature (1)..(287): Xaa is any amino acid
MENLMVKQENGAEEAGKAVDDIKFHIDSLNKMIEEQTESVDKSSSAIEEMTANIHSVTQTLAKNSRNVSELAEASENGKTGLQLVAQEILEIAKDSEGLLEINSLMNTIASQTNLLSMNAAIEAAHAGEAGRGFAVVADEIRKLAETSGRQSKTTAAMLKKIKASIDNITKSSNDVLERFGAIDSSVKTVSEHEQNILHAMEEQETGGRQILDSISRLRDITASVKKGSDGMEESGMTLVKESSDFIKTSQEAVSGMGEILKGVNQIKVSVNHVNDMSMENLGTLNR

SEQ ID NO: 58531 - DNA, 591 bp, Unknown
  Obtained from environmental sample
  misc_feature (1)..(591): n is a, c, g, or t
atgctcatatcgtttacatggtttaccgaaacttttatctggttaacgccttttagtatctcgcccataccgcttaccgcttcctggctggtttttataaagtcgcttgattccttaaccagggtcattcctgattcttccatgccgtcagatcctttcttgaccgaagcggttatgtccctcaagcggcttattgaatcaagtatttgtcttccccctgtttcctgctcttccatagcgtgtaaaatgttttgctcatgctcagaaaccgtcttcacgcttgaatctatagccccgaaacgctcaagcacgtcgttagaggatttggtaatgttgtctatggacgcttttattttttttagcattgccgccgtggtctttgactgccgaccggaggtctcggcgagtttacggatttcatccgcgacaacggcaaaacccctccctgcctctcccgcatgcgccgcctcaatagctgcattcatcgaaagcaggttggtctggcttgcgatggtgttcatcaacgaattaatttcaagaagcccctcggaatccttcgctatttccagtatctcctgcgcgactaattga

SEQ ID NO: 58532 - protein, 196 aa, Unknown
  Obtained from environmental sample
  misc_feature (1)..(196): Xaa is any amino acid
MLISFTWFTETFIWLTPFSISPIPLTASWLVFIKSLDSLTRVIPDSSMPSDPFLTEAVMSLKRLIESSICLPPVSCSSIACKMFCSCSETVFTLESIAPKRSSTSLEDLVMLSMDAFIFFSIAAVVFDCRPEVSASLRISSATTAKPLPASPACAASIAAFIESRLVWLAMVFINELISRSPSESFAISSISCATN

SEQ ID NO: 58533 - DNA, 321 bp, Unknown
  Obtained from environmental sample
  misc_feature (1)..(321): n is a, c, g, or t
atggtagaatctgtattaaaggaggaatatgaagtatcgaccgctaaatccggcaaggaagcaatgggcttgttctatcagggccttataccccatcttattttattggatttaattatgccggatatggacggatgggacacttataacaggataaaagcgttaagcagtctgcacgatattccgattgcttttatcacttcgtcaagcgatccgaaagatataaaacacgcgcatgaaataggagcggtagattttattaaaaagccttacgataaagacgatcttagaaaaagagtggcaaaaattataaaaaaataa

SEQ ID NO: 58534 - protein, 106 aa, Unknown
  Obtained from environmental sample
  DOMAIN (2)...(101): Response regulator receiver domain
  misc_feature (1)..(106): Xaa is any amino acid
MVESVLKEEYEVSTAKSGKEAMGLFYQGLIPHLILLDLIMPDMDGWDTYNRIKALSSLHDIPIAFITSSSDPKDIKHAHEIGAVDFIKKPYDKDDLRKRVAKIIKK

SEQ ID NO: 58535 - DNA, 423 bp, Unknown
  Obtained from environmental sample
  misc_feature (1)..(423): n is a, c, g, or t
atgaaaataggttttaagcttactgctcttatgacaacgctggggatatttgccgtcgcttccgtttccgttactttacttttaaggtcgcaggccagtataacaaaactttccgaacaatacgccgtttccatggcgaatgactctgccgcggatattactaattttattgacgcttatatgcacagagtggaaacactctctgatgttatggaacagtaccgttacatgataattgccaaccgccgtacttttttcaattttatactggaaggacttacccgtgaaaacccggatattatagcggcatggagcgtatgggaacctgacgctttggaaggcgaagacagacattttcttggnanncaaaggactagtaaaacaggccgttttgccccttactnatacggggaaacggaataa

SEQ ID NO: 58536 - protein, 140 aa, Unknown
  Obtained from environmental sample
  SIGNAL (1)...(23)
  misc_feature (1)..(140): Xaa is any amino acid
MKIGFKLTALMTTLGIFAVASVSVTLLLRSQASITKLSEQYAVSMANDSAADITNFIDAYMHRVETLSDVMEQYRYMIIANRRTFFNFILEGLTRENPDIIAAWSVWEPDALEGEDRHFLGXQRTSKTGRFAPYXYGETE

SEQ ID NO: 58537 - DNA, 1290 bp, Unknown
  Obtained from environmental sample
  misc_feature (1)..(1290): n is a, c, g, or t
atgagaaatcaggtggatgtgaaagtttttccggcgcggttaaacggcgctgttgacgccattccttccaaatcgcaggctcacagggctcttatatgcgcggctctggcggataaaccgacgcgcgtcgagtgtaacggcgagtctgatgacattttggcaacagcggcctgtctgtccgtccttggcgcggaaattgaacgcgagtcaggcgcttatgttgtgcgtcctataaatcgggggcgggaagagaacggcggcattgcgacgctaccctgcggtgaaagcggcagcacgtttcgattcatgctaccgattgtcggcgctctgggacggaaagttagctttactccgaaaggacggctgcctgaacgcccgctctcccctttgtacgaagagcttgtcggtcacggggccgaattgtcaccgcaaggctccgttccgttttatgccggcgggcaacttaagccgggacgatatacgctggatgcgggcgtatcttcgcaatttatcagcggcttgctatttgccctgcctttgcttgacggcgacagtaaactcactctgacaggaagcgccgaatcattcccttatattgagctgactatggcgatgctggaagagttcggcgtgaaagcggagtttgacggtggggtcttttccatacagggcgggcaaacctaccgttcttcaggggttgtgcgcgtagagggcgattggtctaacgccgcgttctggctgggcgccggcgctatcggctcaggcagcgttacctgcgccgccttgaatttgcaatcgcggcagggcgacagggcgatactggacatcatggcgaagttcggtgcgcgccttgaagtgaacggttccgccgtaatcgtatcaggcgggaaattacggggcattgaaatcaatgcgaaggatattcccgatctcgtaccgatattggccgtaataggcgctgccgccgaaggaaccaccgttattcgcaacgcaggaagattgcgtacaaaagaaagcgacaggctcgccgccgtaagcgcggtactgcgaactttgggtgctgacgtaagcgagacagcggacgggcttgtcttgcatgggggtgccgctttcaaaggcggagaggtttcttcctacggggatcacaggatagcgatgtctgcggcagtcgctgcaacggtgtgcgcagagccggttgttattcatggcgcggaggcggtcaataaatcatacccaggattttttgacgatttgcgtctgctgggcggctctgtcctgtataacatataa

SEQ ID NO: 58538 - protein, 429 aa, Unknown
  Obtained from environmental sample
  DOMAIN (9)...(418): EPSP synthase (3-phosphoshikimate 1-carboxyvinyltransferase)
  misc_feature (1)..(429): Xaa is any amino acid
MRNQVDVKVFPARLNGAVDAIPSKSQAHRALICAALADKPTRVECNGESDDILATAACLSVLGAEIERESGAYVVRPINRGREENGGIATLPCGESGSTFRFMLPIVGALGRKVSFTPKGRLPERPLSPLYEELVGHGAELSPQGSVPFYAGGQLKPGRYTLDAGVSSQFISGLLFALPLLDGDSKLTLTGSAESFPYIELTMAMLEEFGVKAEFDGGVFSIQGGQTYRSSGVVRVEGDWSNAAFWLGAGAIGSGSVTCAALNLQSRQGDRAILDIMAKFGARLEVNGSAVIVSGGKLRGIEINAKDIPDLVPILAVIGAAAEGTTVIRNAGRLRTKESDRLAAVSAVLRTLGADVSETADGLVLHGGAAFKGGEVSSYGDHRIAMSAAVAATVCAEPVVIHGAEAVNKSYPGFFDDLRLLGGSVLYNI

SEQ ID NO: 58539 - DNA, 1095 bp, Unknown
  Obtained from environmental sample
  misc_feature (1)..(1095): n is a, c, g, or t
gtgaatcttgtgaactccgttcttgtagagacaagggatcggcccaataaccgtatttacggaagtcaggacaacagcagaatatttatcagcgcgggcaatactgttatttcgattaacacttctgataacagcgtcagcgaaatgtccggacaggacaagctttggatcattcccgcggacggaaccgggagtaaaaacgctgtaaacgcgtgggtagtaagcgagcgcggaagagttacccttgtaaacggcgatttggagccggcgcagggtttccccgttcttacggggcttaggctttcagccgcgcccgcggcgtataacggcaaggtctacctttgcgatgaagacggaaaagttcactctgtagacgctaacggagctcaaaaaatctgggaaacgacgtttacctcgtctctgcgctcgcctccttcttttataaccgcgaaggcaaaaacaggagaactccattacgcggctgtttacccaaagagctttttcggcgagctttggcttcttgacgcggacggaaaactcctccccgagtggcccgcgcagttaatgagagtggatgaagacggatttacggctaacgcgggaattagttttggatcgccgattttagtttcgcttaacaaccaggtgcataccgcgtttataagccagtccggcgacttttttatttttgacgaaaccgcaaaagcgctttctccgtttccgcttatacttgaaggcgtgttctatgttcagcctgttttcgacggaagatttttctggcttgtttccgcggaaggaaatttattcagggtgagccaggaaggcgaggttttgtatcagagtatcgcgggtttttccgcaaaggaagaagggtacataacggtatttgactgcgacggagacaaaacccccgaagtctttttcaccggcgagggcaacgcgctttacgcgtacacgcagaatttccgctctctggaaggcttcccgcttcccgcgtggggcaagccgcactttgttcctgcgcagggaagcaaaaaggcggaaatctacggcattggaatggaccggcgtttgtaccgctggcagtttaggtaa

SEQ ID NO: 58540 - protein, 364 aa, Unknown
  Obtained from environmental sample
  misc_feature (1)..(364): Xaa is any amino acid
MNLVNSVLVETRDRPNNRIYGSQDNSRIFISAGNTVISINTSDNSVSEMSGQDKLWIIPADGTGSKNAVNAWVVSERGRVTLVNGDLEPAQGFPVLTGLRLSAAPAAYNGKVYLCDEDGKVHSVDANGAQKIWETTFTSSLRSPPSFITAKAKTGELHYAAVYPKSFFGELWLLDADGKLLPEWPAQLMRVDEDGFTANAGISFGSPILVSLNNQVHTAFISQSGDFFIFDETAKALSPFPLILEGVFYVQPVFDGRFFWLVSAEGNLFRVSQEGEVLYQSIAGFSAKEEGYITVFDCDGDKTPEVFFTGEGNALYAYTQNFRSLEGFPLPAWGKPHFVPAQGSKKAEIYGIGMDRRLYRWQFR

SEQ ID NO: 58541 - DNA, 1128 bp, Unknown
  Obtained from environmental sample
  misc_feature (1)..(1128): n is a, c, g, or t
atgaaaaaaatagtatttttcctgtttttaacagcggcgtttttttcttcctgcgtctcgctgaaaaaagatatttcgcttaacagtcaaattacccaatcggataaaaatatagaggcgattgaggaagcggttgtcccgcttgaggccttaggcggcgctcaggcgcgaagccgtcagggcgatattaccgctgcgcggcaattaattacaagcaaggaaaaagaagcatctaccgacgccgattataccggcaaacttatggcgtggtcgggcaggcttgcgattcttgagggcaagtacagcgacgcacagcgtttatacaggcagtcaacggcggcatcagccggaaatgttcccgcgattattctgggcatccgtcttgagggagatcccgcaaagcggcttgagttaatagagaaggaacttgcgatatcgggcagacagtcttccgccgtcggtttcggtgaattgcagatagaaaggggcgtttcgcttacagatacgagccgttttgccgaagccgcaggcgcattcgacgccgcatttgcctcggggattaacaaagtctacagggacaattacgtaaatatgcgtaatcgcgcgtgggaattacgcaacacaagcggagtggccgccggaacaataaacatgatgcaggatcgcataacatggagcgactgcattaacattgcgcgtaacgaaacccagcttttcagatttataagcggcggcagaaacttaagcgaagccgatttattcaaccgtcttcttgaacgcgcctttattccgtacacgcaggacatcgcggtaaacgagtggcccaaagcaaagccggacaggggcgaatttgtaacgcgcgcgggagcggcgtggtttgtctggcacttgtacgccgaaatgagggcggacagaacccttctttcccgttattcatcgcgttatgcgacaggcgcgaacccccgcagcccgatagcggacgttccgcctctctcgccgttctttgactcaatactcggcagcgtggagacggaactcttgtctctccccgacggacggaacttcaggccggcgcagcccatccgcggtccggagatgctttcggttttgaagaagattgacaattag

SEQ ID NO: 58542 - protein, 375 aa, Unknown
  Obtained from environmental sample
  SIGNAL (1)...(22)
  misc_feature (1)..(375): Xaa is any amino acid
MKKIVFFLFLTAAFFSSCVSLKKDISLNSQITQSDKNIEAIEEAVVPLEALGGAQARSRQGDITAARQLITSKEKEASTDADYTGKLMAWSGRLAILEGKYSDAQRLYRQSTAASAGNVPAIILGIRLEGDPAKRLELIEKELAISGRQSSAVGFGELQIERGVSLTDTSRFAEAAGAFDAAFASGINKVYRDNYVNMRNRAWELRNTSGVAAGTINMMQDRITWSDCINIARNETQLFRFISGGRNLSEADLFNRLLERAFIPYTQDIAVNEWPKAKPDRGEFVTRAGAAWFVWHLYAEMRADRTLLSRYSSRYATGANPRSPIADVPPLSPFFDSILGSVETELLSLPDGRNFRPAQPIRGPEMLSVLKKIDN

SEQ ID NO: 58543 - DNA, 846 bp, Unknown
  Obtained from environmental sample
  misc_feature (1)..(846): n is a, c, g, or t
atggctgatagcgaagggcgactgcacacaaattttgtgcagactggaaccgctactggccgtctctcaagccgcgaaccaaatcttcaaaacatacccgtccgcgccgaagaaggccgccgtatccgcgaagcgtttatcgccaaaagcggctgtgttctaatttccgccgactacagtcagatagaactggtaatactcgcgcatctatcgcaggataagaatcttatttccgcattcaaagaaaaccgcgatgttcacgccagaaccgcggcattaatctttggcgttgatgaaaacgaaataaaacccgaacagaggcgcatggcaaaaacgattaacttcggcgtaatttacggaatgagcgccttccgtcttgccaatgaattaaacatcagcagaacagaagcgcaaaattttattaatgcgtattttaacacatactcaggcgtgcggcagtttatagaaaacaccattaaaaaaactgaacaaacaggctatgttacgacaatttcaagccgccgccgctatattcctacaattaattcgcataacaagactgaaaaatccgccgccgaacgcattgcagttaacactcccattcaagggtcagcggctgacattgtaaaaatggcaatgctaaatttggacaaaaaacttaccgctgaaaaaagcaaagcgcgtcttttgttacaagttcacgatgaactgattcttgagtgtccaaagagtgatgccgagaggacttcattattggttaagacggaaatggaacaggctgtaactttaagtatccctctgcgagtgagtgttgaggctgggagccggtggggggattttcattga

SEQ ID NO: 58544 - protein, 281 aa, Unknown
  Obtained from environmental sample
  DOMAIN (1)...(280): DNA polymerase family A
  misc_feature (1)..(281): Xaa is any amino acid
MADSEGRLHTNFVQTGTATGRLSSREPNLQNIPVRAEEGRRIREAFIAKSGCVLISADYSQIELVILAHLSQDKNLISAFKENRDVHARTAALIFGVDENEIKPEQRRMAKTINFGVIYGMSAFRLANELNISRTEAQNFINAYFNTYSGVRQFIENTIKKTEQTGYVTTISSRRRYIPTINSHNKTEKSAAERIAVNTPIQGSAADIVKMAMLNLDKKLTAEKSKARLLLQVHDELILECPKSDAERTSLLVKTEMEQAVTLSIPLRVSVEAGSRWGDFH

SEQ ID NO: 58545 - DNA, 408 bp, Unknown
  Obtained from environmental sample
  misc_feature (1)..(408): n is a, c, g, or t
gtggtaacaaaagccgctccagacccccgcgacatccccgacatgattttcggcatgagggcggtaaccttcgccaaatccaacgccataatgatagtgaaagagcagtccgcgacaggcataggctgcggacaggtgaaccgtatatggcctactatgcagtcgctggaaagaagcgccgccgtattaaaagccgaaaaccgcccgtggaaagacgacagcccggcgagggttctggcctcagacgcgtttttccccttccccgacatagtagaagccgccgccgccgccggaatcaagtcaataatccagccgggcggctccatgaacgacaaattatcggtagagacttgcgataaatacggcatagcgatggtctttaccgggattcggcattttaagcattaa

SEQ ID NO: 58546 - protein, 135 aa, Unknown
  Obtained from environmental sample
  misc_feature (1)..(135): Xaa is any amino acid
MVTKAAPDPRDIPDMIFGMRAVTFAKSNAIMIVKEQSATGIGCGQVNRIWPTMQSLERSAAVLKAENRPWKDDSPARVLASDAFFPFPDIVEAAAAAGIKSIIQPGGSMNDKLSVETCDKYGIAMVFTGIRHFKH

SEQ ID NO: 58547 - DNA, 1095 bp, Unknown
  Obtained from environmental sample
  misc_feature (1)..(1095): n is a, c, g, or t
ttggttttaacgcggaaatacccctttcctttgagcaaggtttcggaggctttatctttgaaacggaagccacgcttcaacctgaactgccgcctgaatcatgcgttttactggggcgcacaacggatgaatacacccttaacacaaaaacatttaatatcccgcttgataaactgcaaagcgcgtgggaaaaaacccttgatcccgtttatccgtacaatatcgggcaagaacggaaaaaccgaatcgtttttttatgacaaaggcgtgtcaatcagggcaaaagatagttacgctaaaccgaagtttattatccccgtatttcccggaacaaacagcgaatacgacacggcaaaagcgattgaaaaagcgcatggacaggcgcaaatatttgtaatacgaaaccttaccccctcttccatcgccgaaagcgtaagcgcttttgaaaaagcccttaaatcggcgcagggcatggttattcccggaggtttttcaggcggcgatgaacctgacggctcgggaaaatttataacggcttttttaagaaaccccgccgtctgcgccgccgtgacagagctgttacaaaaaagagacggccttatttgcggtatctgcaacggttttcaggcattgataaaactcggtcttgtcccttacggcgaaattcgcgccatgaagccggactctcccaccctaaccttcaacacaataggccgccatcaagccgtccatgtaaggacaaaggtaacatcgaataaatcgccctggctttcccgtcttgaactcggcgttaattatatagtccccatatcacacggcgagggccgttttatcgcgagcgaagaacaaatccgctctcttgcggcaaacggccaaatagccacgcagtatgtagatttagacggctctccttctcaggacatacgtttcaacccgaacaattcaaatttcgccatagaaggcatcacctcccccgacggcagagtcttcggcagaatggcgcacaatgagcgttttgacgaggggcttttcaggaacataccgggaattaagaagatggatattttcgccggagccgtggattattttagataa

SEQ ID NO: 58548 - protein, 364 aa, Unknown
  Obtained from environmental sample
  misc_feature (1)..(364): Xaa is any amino acid
MVLTRKYPFPLSKVSEALSLKRKPRFNLNCRLNHAFYWGAQRMNTPLTQKHLISRLINCKARGKKPLIPFIRTISGKNGKTESFFYDKGVSIRAKDSYAKPKFIIPVFPGTNSEYDTAKAIEKAHGQAQIFVIRNLTPSSIAESVSAFEKALKSAQGMVIPGGFSGGDEPDGSGKFITAFLRNPAVCAAVTELLQKRDGLICGICNGFQALIKLGLVPYGEIRAMKPDSPTLTFNTIGRHQAVHVRTKVTSNKSPWLSRLELGVNYIVPISHGEGRFIASEEQIRSLAANGQIATQYVDLDGSPSQDIRFNPNNSNFAIEGITSPDGRVFGRMAHNERFDEGLFRNIPGIKKMDIFAGAVDYFR

SEQ ID NO: 58549 - DNA, 816 bp, Unknown
  Obtained from environmental sample
  misc_feature (1)..(816): n is a, c, g, or t
atgtcatggggatttgatccgcaagtgtcttccgcaagcccgtaccacggagctgttttcgccgttgtcctgtcgcttgcgaaaattatcgccgcaggcggaagcagaaaacgctgttggctctcttttcaggaatattttgaaagattacgagacgatcctttaaggtggggaaaacccgtctccgccctgctcggcgctcttgacgcgcagttagggcttgagatagcggcgataggcggcaaggattcaatgtcaggctcctatacgcttaagaacggagaaaatatcgatgttccgcccactcttgtttcattcgccgtttctgtcgcaaagatagacggcatagtaacgcccgagttcaagcgagccggaagctgtgtttatcttttcaaaccgccctgccctgtttttgaaaaggctgacttcgccgcccttcgcgaatattttgacactgcggaaaaattaatcgcgggtaaaaaaatactttcagcatgggcggcaggctccggcggaacggcagaagctgtcgtaaaaatgtgcgccggtaacaagattggttttaacgcggaaatacccctttcctttgagcaaggtttcggaggctttatctttgaaacggaagccacgcttcaacctgaactgccgcctgaatcatgcgttttactggggcgcacaacggatgaatacacccttaacacaaaaacatttaatatcccgcttgataaactgcaaagcgcgtgggaaaaaacccttgatcccgtttatccgtacaatatcgggcaagaacggaaaaaccgaatcgtttttttatga

SEQ ID NO: 58550 - protein, 271 aa, Unknown
  Obtained from environmental sample
  misc_feature (1)..(271): Xaa is any amino acid
MSWGFDPQVSSASPYHGAVFAVVLSLAKIIAAGGSRKRCWLSFQEYFERLRDDPLRWGKPVSALLGALDAQLGLEIAAIGGKDSMSGSYTLKNGENIDVPPTLVSFAVSVAKIDGIVTPEFKRAGSCVYLFKPPCPVFEKADFAALREYFDTAEKLIAGKKILSAWAAGSGGTAEAVVKMCAGNKIGFNAEIPLSFEQGFGGFIFETEATLQPELPPESCVLLGRTTDEYTLNTKTFNIPLDKLQSAWEKTLDPVYPYNIGQERKNRIVFL

SEQ ID NO: 58551 - DNA, 912 bp, Unknown
  Obtained from environmental sample
  misc_feature (1)..(912): n is a, c, g, or t
atgataaccttagattgttccgatcatataaaaagcgaaaaaattgataataatccgttacctgataattataaaaacaaatatattgataaaacttttgatatcgaaggtatttcccttgttttttcacaagaagagcttaaaaaatgcgccgccgtttacggagaggcaataacatttataatagaaatatttaacaagttttttactaaaaataaaaaaaccgcggattttgaaatttcgatagatgaaaccgtatcgcctacaacgccgttacagcatttttttgtcgcaaaggaactttttgacgcgggcgtttcttttgagtcattggcgccgcgtttctgcggagagtttcaaaaaggaatagattacatcggcgatacagctcagtttgaaaaagaaataaatattcacgcggcaatagcaaggttttttggttacaaattgagtattcattccggatcagacaaattcagcgtgtttccggcaataagaaaagccgtaaacggccggtttcacgttaaaaccgccggaacaaactggctggaagctatgcgcgtaatcgctgataaagacccttctctttaccgtgagattcacagctttgctttaaccgcgtttaacgaagcgaaaaaattttaccatgtaacaacggatattttaaaaattcacgatatttcatcgattaatgatatggaactgacaaaactctttgaaaataacgaagcgcgccagcttatacatatcacttacggaatgatattaaaccataagaaagaagacggaacttacgcgtttaaggagcgtttatacaaactttggagagagaatgaagacgcgtacaggtcagcccttgcggcgcatataggaaaacatttggaattgttaacatcttcacaaaactgttaa

SEQ ID NO: 58552 - protein, 303 aa, Unknown
  Obtained from environmental sample
  misc_feature (1)..(303): Xaa is any amino acid
MITLDCSDHIKSEKIDNNPLPDNYKNKYIDKTFDIEGISLVFSQEELKKCAAVYGEAITFIIEIFNKFFTKNKKTADFEISIDETVSPTTPLQHFFVAKELFDAGVSFESLAPRFCGEFQKGIDYIGDTAQFEKEINIHAAIARFFGYKLSIHSGSDKFSVFPAIRKAVNGRFHVKTAGTNWLEAMRVIADKDPSLYREIHSFALTAFNEAKKFYHVTTDILKIHDISSINDMELTKLFENNEARQLIHITYGMILNHKKEDGTYAFKERLYKLWRENEDAYRSALAAHIGKHLELLTSSQNC

SEQ ID NO: 58553 - DNA, 303 bp, Unknown
  Obtained from environmental sample
  misc_feature (1)..(303): n is a, c, g, or t
atgtatagcgtaggcatagcgtaccttctctggcttatttccggcttcggagcgctgggttttcacaggttttatctggggaaaattttcacgggattactgtggtttttcacaggcggtcttggaatgatcggctcaatttatgatttaattacgctgccgggacaggtaagggatgcgaatatacgccgcgcttatcatgacagcgttaatacaaatatttataatactaataaccggtcttcatggcggaacgtagacgacggcgagactcatattgtccacgacaaagacgagttgtag

SEQ ID NO: 58554 - protein, 100 aa, Unknown
  Obtained from environmental sample
  DOMAIN (1)...(51): TM2 domain
  misc_feature (1)..(100): Xaa is any amino acid
MYSVGIAYLLWLISGFGALGFHRFYLGKIFTGLLWFFTGGLGMIGSIYDLITLPGQVRDANIRRAYHDSVNTNIYNTNNRSSWRNVDDGETHIVHDKDEL

SEQ ID NO: 58555 - DNA, 597 bp, Unknown
  Obtained from environmental sample
  misc_feature (1)..(597): n is a, c, g, or t
atgtcttccttattccgctgcttngtattatcgccggccttttgtttgcatggaggaagcgcgccagaaacggcggcgcagcaagcagcggcgcagcaagcagcggcgcagcaagcagcggcgcagcaagcagcggcgcgtcttntgcgccgggagtggaagttttcgcgggtccttcaaaacagcgggggcgtcattgtccgcgccggtaaaaaaaacgcggccggcaattcatggatagtaaaaacaggctcgctaaaaataagttttccggaaaaagatttagttccggcggctccggcaaaaaccaggccgacggcttcctgggcggcggattacggctcgtcgggagaagctgtctttgagttaaaacttttaggaatgaggcttggggaagcgacggaaaccctgcgccgccagatagacgccgccgttctttccggcctgaaaaatttttccgttattcacggcatgggcagcggcgtcttgcaaaaaggaatccatgaatatcttaaaaacgatccagcggtagcggattattattttgcccgccccgaactcggcggcttcggcaggacagaggttgttttacgttga

SEQ ID NO: 58556 - protein, 198 aa, Unknown
  Obtained from environmental sample
  SIGNAL (1)...(25)
  DOMAIN (123)...(198): Smr domain
  misc_feature (1)..(198): Xaa is any amino acid
MSSLFRCXVLSPAFCLHGGSAPETAAQQAAAQQAAAQQAAAQQAAARLXRREWKFSRVLQNSGGVIVRAGKKNAAGNSWIVKTGSLKISFPEKDLVPAAPAKTRPTASWAADYGSSGEAVFELKLLGMRLGEATETLRRQIDAAVLSGLKNFSVIHGMGSGVLQKGIHEYLKNDPAVADYYFARPELGGFGRTEVVLR

SEQ ID NO: 58557 - DNA, 930 bp, Unknown
  Obtained from environmental sample
  misc_feature (1)..(930): n is a, c, g, or t
gtgtccgacaggggccttttggaaatgctttcctcttacggcgtgacggtgctgcctgaaatcgtaatggacaggacggccctgacaatgcaatatcagacccgctccccttcaggcgccgtccaggtaaggataacccgctatccgcagtggatacgcgtattaggcgaaaacgggaaccccatgcaccctgtaagcgcgaaattcagcggccttgacatgtattgggcaagcccccttgaattgcgcaaagttgaaggcgttgacgcgatggagttgttcaccaccacgcctgatgcctggtcaatgagggaaccgctttatacaagccctgaactgcccatgatgtttaccaaggatgccgactctaccgccggcgagaagatactcggggcgagtcttacggggctgtttccctcatggttcgcgggtaagcaaaagcccgaacaggaggacggttcagaacttcccgatatacccgccgaagccaaaccctcgcgattgataattgccggcgacacggaatttgccacgtcgtttatgaacgtcacgggctcccagcgcagcaatattgattttcttatacaggccgccgactggctgtgcaacgatgacgacatcatagggatacgctcaagggaatcgcgttccaacaggcttgacaggataattgatcccgtaaagagggccgccgcaatgcgccttgcccagtttgtaaatgtcttccttattccgctgcttngtattatcgccggccttttgtttgcatggaggaagcgcgccagaaacggcggcgcagcaagcagcggcgcagcaagcagcggcgcagcaagcagcggcgcagcaagcagcggcgcgtcttntgcgccgggagtggaagttttcgcgggtccttcaaaacagcgggggcgtcattgtccgcgccggtaa

SEQ ID NO: 58558 - protein, 309 aa, Unknown
  Obtained from environmental sample
  misc_feature (1)..(309): Xaa is any amino acid
MSDRGLLEMLSSYGVTVLPEIVMDRTALTMQYQTRSPSGAVQVRITRYPQWIRVLGENGNPMHPVSAKFSGLDMYWASPLELRKVEGVDAMELFTTTPDAWSMREPLYTSPELPMMFTKDADSTAGEKILGASLTGLFPSWFAGKQKPEQEDGSELPDIPAEAKPSRLIIAGDTEFATSFMNVTGSQRSNIDFLIQAADWLCNDDDIIGIRSRESRSNRLDRIIDPVKRAAAMRLAQFVNVFLIPLLXIIAGLLFAWRKRARNGGAASSGAASSGAASSGAASSGASXAPGVEVFAGPSKQRGRHCPRR

SEQ ID NO: 58559 - DNA, 1077 bp, Unknown
  Obtained from environmental sample
  misc_feature (1)..(1077): n is a, c, g, or t
ttgccttcatttaaggcttttgttttttggccgatttattttttgttttgttattcctttgttttattctcgtttttgcagtttgtcagggtgagtcccttacgccttgctaccatgggttctattccggctgttttttatttctttttggcgctcttgcttctggacggcctcagaatttctttgcagcatttaggccgaatcccgtacgtacagatttattccgttgccggaacgggaattgcgatttgccttgctcttattacgatgatctacggcgcttataatgcaagaagcataagaagcgtgcattacgcggttacgctgaacaagcgttctgaaatgccgcatttgcgaattgcccttgtctctgatctgcacatcggtgaaaccgttggccggaaatgggtcgcaaatatcgtggatgcaatcaataaaattgaaccggatataatttgcatagcgggggatataatagacagtaatttggaagcaatatctgacattgaagctgtcgtagctgagctaaagcgtcttaacgcacctttgggtgtttacgcctgtcccggcaaccatgatgtggacaggctttcacttcggcaaacgggcggaacaggcagtggaatggacggcataaaagcctttctggaaacggcggatattgttttcttattggatgaaattgtcatgccgaatgatagtatctatctggcaggccgtaaggacgcaaggcctatcggcctacgccaggagagaaagcctgttgcccagcttgctgtcagtcttgacacatcaaaggcttttattgttctggatcatcaacctgttgattattcaaatctggaaaaagccggcactgatttgattttatcaggacatacccatcggggacaattttttcctgtcaacattgtcacaaagtttatgtttaaaaaagcaggtgcaactcattatggttactggcggggttctatcgcccaggctgtggttagctcaggagccggagtgtgggggccgcccattcgtgttgccaccggaagtgaagtagctgtgattgatgttgtttttggccagtaa

SEQ ID NO: 58560 - protein, 358 aa, Unknown
  Obtained from environmental sample
  DOMAIN (118)...(297): Calcineurin-like phosphoesterase
  misc_feature (1)..(358): Xaa is any amino acid
MPSFKAFVFWPIYFLFCYSFVLFSFLQFVRVSPLRLATMGSIPAVFYFFLALLLLDGLRISLQHLGRIPYVQIYSVAGTGIAICLALITMIYGAYNARSIRSVHYAVTLNKRSEMPHLRIALVSDLHIGETVGRKWVANIVDAINKIEPDIICIAGDIIDSNLEAISDIEAVVAELKRLNAPLGVYACPGNHDVDRLSLRQTGGTGSGMDGIKAFLETADIVFLLDEIVMPNDSIYLAGRKDARPIGLRQERKPVAQLAVSLDTSKAFIVLDHQPVDYSNLEKAGTDLILSGHTHRGQFFPVNIVTKFMFKKAGATHYGYWRGSIAQAVVSSGAGVWGPPIRVATGSEVAVIDVVFGQ

SEQ ID NO: 58561 - DNA, 1113 bp, Unknown
  Obtained from environmental sample
  misc_feature (1)..(1113): n is a, c, g, or t
atggaagggggaaaaacaagttttgagcaattgctgtcggtaatgcctgaagggtggcaagacaaggcaaaagaacttggggcattaaaacgtgaacgggaaataaaaaaggctatagatttactgcggctggtattcatatacctgaccgatgggaagtcctttagcggaacggcagcattgttaaaacttaccggcatttgttcgataaccaagaaagcggtatttacgagatttcaaaaatacggggaatggcttcgatggctgtgccagaacatatgccggaacaacaaagcgattgtccaagcgcctgaatggcttggcggccggaaagcatatatagttgacgccagcaacgaacctgtacacgggagcgacaaggcggattaccggctgcattacgcgatagggctgtttgatctggggatgaaggaaatggcgctgagcacaacggaaacgggggaaaaggccagcaatttcaagacatttggggataaagacatcgttataggggatcgtgcgtattgcagcaagcaagggatagaatacctattgggaaagaagagcaattttttgtttcgatttgggacaaaacggtttcatgtatataaccggaatagggtggccgtgaatattctggggtattttaaaggaataaaggctggagggattggggagaagacgctgtattatgaatatgagggagagtacaagccacttcgtttttgtgtgctacggaaaacaaaagaagcggaacaggccggccttgaggctttgcggaagacacagatgagaaaatacgggaacaaagaattgagcaaggcacaaatggcatataacaggtatgtgataattgttacgtcaataacggatgtggcttctgagttgatccttgacttgtaccggcagcggtggcagatagagctggcattcaaacggttaaagtcgttatttaaataccatgagataccagttcatgttgaacagagcgcctgggcatggttttacgagaaattgttattggcggctctttgtgaaacatgggttaacaaagggcgttttcccccctctgcaggaaagcgagagcgaacaagagtggtctctatggtgtga

SEQ ID NO: 58562 - protein, 370 aa, Unknown
  Obtained from environmental sample
  DOMAIN (112)...(344): Transposase DDE domain
  misc_feature (1)..(370): Xaa is any amino acid
MEGGKTSFEQLLSVMPEGWQDKAKELGALKREREIKKAIDLLRLVFIYLTDGKSFSGTAALLKLTGICSITKKAVFTRFQKYGEWLRWLCQNICRNNKAIVQAPEWLGGRKAYIVDASNEPVHGSDKADYRLHYAIGLFDLGMKEMALSTTETGEKASNFKTFGDKDIVIGDRAYCSKQGIEYLLGKKSNFLFRFGTKRFHVYNRNRVAVNILGYFKGIKAGGIGEKTLYYEYEGEYKPLRFCVLRKTKEAEQAGLEALRKTQMRKYGNKELSKAQMAYNRYVIIVTSITDVASELILDLYRQRWQIELAFKRLKSLFKYHEIPVHVEQSAWAWFYEKLLLAALCETWVNKGRFPPSAGKRERTRVVSMV

SEQ ID NO: 58563 - DNA, 705 bp, Unknown
  Obtained from environmental sample
  misc_feature (1)..(705): n is a, c, g, or t
gtgataaagccctatgctcactggagcgtaggattaaccatacgctatcctaaaacgatggctggtatttacggcattccctggaaggaggaattattattggctacatacggttacgttcgtgtgtcaagtgtcgaccaaaacgaggacaggcagatgctcgccatgctggaattgaaaataccggcagagtatattttcatggataaacagagcggaaaagatttcaatcgaccatcgtatcagtcgcttctgaccaaggtaagccccggtgacctaatctacataaagagcatagaccggctggggcgtaactatgaggaaatccagaaccaatggcgcatcctgacaaaagagcgcggcattgatatcgccgtaattgatatgccccttttggatacgcgcaatggccgggacttagtggggactttccttgccgacatcgtattgcaaattctgtccttcgtggcgcaaagtgaacgtgagaatatccgcaaacgccaggccgagggtataaaggcggcgcggtcacggggtatccatttgggacggccagtcaaaaagcctcccgataacttcaatgaattggcgaatctgtggatacggagaaaactgaccacaaaggaacttattcagcagacgggcttaaaggaaacctcactgtacaggcggctgcgggaatatcaggcggccaggagcaagtaa

SEQ ID NO: 58564 - protein, 234 aa, Unknown
  Obtained from environmental sample
  DOMAIN (36)...(181): Resolvase, N terminal domain
  misc_feature (1)..(234): Xaa is any amino acid
MIKPYAHWSVGLTIRYPKTMAGIYGIPWKEELLLATYGYVRVSSVDQNEDRQMLAMLELKIPAEYIFMDKQSGKDFNRPSYQSLLTKVSPGDLIYIKSIDRLGRNYEEIQNQWRILTKERGIDIAVIDMPLLDTRNGRDLVGTFLADIVLQILSFVAQSERENIRKRQAEGIKAARSRGIHLGRPVKKPPDNFNELANLWIRRKLTTKELIQQTGLKETSLYRRLREYQAARSK

SEQ ID NO: 58565 - DNA, 738 bp, Unknown
  Obtained from environmental sample
  misc_feature (1)..(738): n is a, c, g, or t
atggtaattgaaagtaataccaggacgacgacaagtaaccttgtcccggcttgcatttgcatgggccggaggggcatgggcgcgaaaatggttatcgtggcgtccgatagcagggacgtgcaggattggctttaccgctatttggagccttacgggttaaagggctacgctttttaccttgtagaaagcgaagacgtattttccgaatacgtggggaagattgacacggtaatggcatttgttgaggatattttctttggcgaaaagactattggcatgttggataatatccgaaagcaatacccgaagctgaagctggcgctgttttcggcttctgttttgcctttaggtctagcggcgcgatatttgtactggagcatgggcagctacctttcgctgcgggatagcgagaaggaaatcagggaagcagtggaagcgattttcgggaaacggctggctgtgccatcatacttaataggctgccttgatgaatacggccgccttccgaatataaaaccgcatctgacccaccgggaggttgagattgtccgctacgccggagagggaaaaacggggagggaaatagcttcagttttgatgctgagctggaggacggtgcggaaccatatttccaatatctaccggaaattcgggattcgcaacatggtgggggttcttaagctggcagtgtctaaggggatattgccggtggaggagattatgagttttacgggttag

SEQ ID NO: 58566 - protein, 245 aa, Unknown
  Obtained from environmental sample
  DOMAIN (172)...(229): Bacterial regulatory proteins, luxR family
  misc_feature (1)..(245): Xaa is any amino acid
MVIESNTRTTTSNLVPACICMGRRGMGAKMVIVASDSRDVQDWLYRYLEPYGLKGYAFYLVESEDVFSEYVGKIDTVMAFVEDIFFGEKTIGMLDNIRKQYPKLKLALFSASVLPLGLAARYLYWSMGSYLSLRDSEKEIREAVEAIFGKRLAVPSYLIGCLDEYGRLPNIKPHLTHREVEIVRYAGEGKTGREIASVLMLSWRTVRNHISNIYRKFGIRNMVGVLKLAVSKGILPVEEIMSFTG

SEQ ID NO: 58567 - DNA, 546 bp, Unknown
  Obtained from environmental sample
  misc_feature (1)..(546): n is a, c, g, or t
atggaacatcaaaaagtaccgaaacgggaaagtgctgacaaagccttcaaagaagtcgcaacagaaagtcttggagaaaataaggacgatcatacacagccatcgtggagcaaaacaggacgaccttatagccatgctcaaccccgttataaggggatggacaagttaccaccgcacggtggggtggtagcaaaaaggattttctcaaaaacggacaaagagttgttccttctcctttggaaatgggcgaggaagaggcacggcaataaaggccggcactggatttcccgccgctattggaaaaccgaagggaacaaacactgggtattcaaggacacgctcacgctgctcagattttgcgacaccaaggtgaggcggcatataccgctcaaactggaaatgaacccctacatcgacactgaatatttccacaagaggagacaccggctgttagtaaacagaacattgggagtgatactcccagagacgaaaaaccaaggccaaaccggcagctgtccgacagacggcggcttacttgaggcttga

SEQ ID NO: 58568 - protein, 181 aa, Unknown
  Obtained from environmental sample
  DOMAIN (9)...(100): Group II intron, maturase-specific domain
  misc_feature (1)..(181): Xaa is any amino acid
MEHQKVPKRESADKAFKEVATESLGENKDDHTQPSWSKTGRPYSHAQPRYKGMDKLPPHGGVVAKRIFSKTDKELFLLLWKWARKRHGNKGRHWISRRYWKTEGNKHWVFKDTLTLLRFCDTKVRRHIPLKLEMNPYIDTEYFHKRRHRLLVNRTLGVILPETKNQGQTGSCPTDGGLLEA

SEQ ID NO: 58569 - DNA, 606 bp, Unknown
  Obtained from environmental sample
  misc_feature (1)..(606): n is a, c, g, or t
atgatggccgagnttgacgagattgcgcatgaatggctattacagcacataccaatggacaagcgtatattaaaacagttccttaaagcaggctatgtatacgagcaccagctatttccgacagaccgtggaacgccgcagggtgggattataagcccccttttggcaaatgctacgctgaacgggatagaagaactcttgcaaaaggagaccaaaagaatgaggtctcaggaaaaggtatatcccaaaatcaatatggtcagatacgccgatgattttgtgataactgccaaaaccaaagaaattgcggagaaggtcatagggctggttcgtcaattcatggccgaacgtggtttgcaattatcggaagaaaagacggtaattacgcatatctccgaagggattgattttctgggatggaacatcaaaaagtaccgaaacgggaaagtgctgacaaagccttcaaagaagtcgcaacagaaagtcttggagaaaataaggacgatcatacacagccatcgtggagcaaaacaggacgaccttatagccatgctcaaccccgttataaggggatggacaagttaccaccgcacggtggggtggtag

SEQ ID NO: 58570 - protein, 201 aa, Unknown
  Obtained from environmental sample
  DOMAIN (159)...(201): Group II intron, maturase-specific domain
  misc_feature (1)..(201): Xaa is any amino acid
MMAEXDEIAHEWLLQHIPMDKRILKQFLKAGYVYEHQLFPTDRGTPQGGIISPLLANATLNGIEELLQKETKRMRSQEKVYPKINMVRYADDFVITAKTKEIAEKVIGLVRQFMAERGLQLSEEKTVITHISEGIDFLGWNIKKYRNGKVLTKPSKKSQQKVLEKIRTIIHSHRGAKQDDLIAMLNPVIRGWTSYHRTVGW

SEQ ID NO: 58571 - DNA, 561 bp, Unknown
  Obtained from environmental sample
  misc_feature (1)..(561): n is a, c, g, or t
atgaagggcgcaatcgccaaggcggaagagcttgcggcggctactcccaattcgttcattcctcagcagttcaataaccccgctaatccggctgttcacgagaaaaccacaggaccggaaatttggaacgataccgacggaaaagttgatatcgtggtcggcggagtcggaacaggcggaacattgaccggagcgggaaaatttttaaaatcgaaaaaatcgagcgtgaagattgtcgcggtggaacctgcagcgtctcccgtactttccggcggatctcccggaccgcataagattcagggtatcggagccggttttaaacctcaggtttatgacgcggctgttatcgatgaaatttatcagaccgatgaaacaaaagccggaaccgcggcgcgccgtcttgcgaaagaagaaggcattatcgtgggaatctcgtcaggctctgtccttgaagcggctttgactgtcgccaaacgaccggaaaacaacggtaaaaccatagtagccgtattaccggacaccggcgagcgttatttgtcaacatggctctgggaagaataa

SEQ ID NO: 58572 - protein, 186 aa, Unknown; identical to SEQ ID NO: 4344
  Obtained from environmental sample
  DOMAIN (1)...(174): Pyridoxal-phosphate dependent enzyme
  misc_feature (1)..(186): Xaa is any amino acid

SEQ ID NO: 58573 - DNA, 948 bp, Unknown
  Obtained from environmental sample
  misc_feature (1)..(948): n is a, c, g, or t
atggcaacaactgaattaaacgcgctgaataaggcgcaagcgtatcaactggcggacattaccaaaaccccgccgcaattcggcgcgattacgccgcgttggcttacacgttttttggaattcaaaggacttgaagccggtatttaccgcgtaaacaaagtagtcgaaggagagacgccgcttgatattctctgctcatcggaaaaaaagagcgcggaacttcccgaaggttatgtacagtatcaaccaaagccaagagaatatactctcaactcgatttctacaattatcaacgtagataccgccgtggaagatgtgttttcttcaccatacgaccagacaaaagaacaactacacctggcgattgaaagtttgcgcgagcggcaggaaagccaactcattaataacgatgattacggcttgttgaaaaatatttccgacaatcagcgcataagacccggaaacaaagccggttcacctatgcccgatgatttagacgaattgctttcaaaagtttggaaagagccggcgttcttcttggctcacccgcgcgctatcgcggctttccagcgcgaatgtacgcgcaggggcgttccgccttcaaccacttcgctctttggcggcaattttattctgtggcgcggtattccaattattccgacagacaaactgtttgtggacggcttgaaaaacccaaagagcaagggcggaaaaaccaatattctgctggtgcgcaccggagaggcaaaacgcggagttgtcggtttgtaccagacaggtttgcagaacgaacaaggcagaggactttccgtgcgtttcaggggagtagataacaaaggactcgcgtcctacctcctgtcgctttactgctcagccgcaattctcgctgacgacgccatagccgttcttgaagatgtggaagtgggtaactactatgattacacctaa

SEQ ID NO: 58574 - protein, 315 aa, Unknown
  Obtained from environmental sample
  misc_feature (1)..(315): Xaa is any amino acid
MATTELNALNKAQAYQLADITKTPPQFGAITPRWLTRFLEFKGLEAGIYRVNKVVEGETPLDILCSSEKKSAELPEGYVQYQPKPREYTLNSISTIINVDTAVEDVFSSPYDQTKEQLHLAIESLRERQESQLINNDDYGLLKNISDNQRIRPGNKAGSPMPDDLDELLSKVWKEPAFFLAHPRAIAAFQRECTRRGVPPSTTSLFGGNFILWRGIPIIPTDKLFVDGLKNPKSKGGKTNILLVRTGEAKRGVVGLYQTGLQNEQGRGLSVRFRGVDNKGLASYLLSLYCSAAILADDAIAVLEDVEVGNYYDYT

SEQ ID NO: 58575 - DNA, 1251 bp, Unknown
  Obtained from environmental sample
  misc_feature (1)..(1251): n is a, c, g, or t
atgttcattttctccatatataaattcggtaaactgttgttaaggagaatttatatgttatacacacaaggaaaaacagattgtaaacccgttgaagtcggctatgatgaaaaacggcttgacgcgcttaacaaccatcttcagcgcgtcattgatgacggcgagatacaatgcgctacctactgtatatcccgcaaaggcagaattttcgctcatggagcgataggaaaaaagtcattccgtataaatgataacactccggttcagcctgattccgtcagatatgtggcatctattaccaaagtatttaccgctgttgcgataatgaaactggtagaggacggctttacgcggctggacgtgcctgtgggcgagattctgccgcagttcaacactccgccgtacaacggcgtaacgctgtttcagcttttaacccacacttccggaatgcacgcagacggcggatgctttgataacaaataccagaccaattactggaaaatgattgacgacgcttacaaactttgcagtcccggcgaaaaaaaggaatttgactggttaaccgcagctttaagcacaataggcagcggtttccgcataaagcccgataccgagtgggcgtattgcagttttggttttgtagttctgggcgcggttatcgaaaaattatccggaatgtcagctcaagaatttatagaagaaaacatctgcaaaccgctgggcatgaaggacaccacttttaacataacggcggaaatggcaaaacggtatatcgtttctgatgaagagcttgaaaaatatataaatgataaaataaacggaacttataaacctcattggatcggagaaatattgaatatcccgccgacagggggcggcctggaatcgacagtttacgatattaaccgttttggcaacatgatgctttcgggcggtacgttaaacggcgcgcgtattctgggcagaaaagctgttgaaaaaatgacaacccttgcctgcgcctttccgaattatacatggaatgcaaaagaaaaagagcggtactacggcataggctttgatatgagaaacggtccggcctttacattctctcaaggcactttcatgcatgaaggctcgggagcgtgttcattgtacattgacccaaaagaggaatttgtcgcggcttggattgtgccgttcgcgaaagaaggctggttctctagggcgcttttcaacgtacaaaatataatttggtcgggaataatttaa

SEQ ID NO: 58576 - protein, 416 aa, Unknown
  Obtained from environmental sample
  DOMAIN (43)...(407): Beta-lactamase
  misc_feature (1)..(416): Xaa is any amino acid
MFIFSIYKFGKLLLRRIYMLYTQGKTDCKPVEVGYDEKRLDALNNHLQRVIDDGEIQCATYCISRKGRIFAHGAIGKKSFRINDNTPVQPDSVRYVASITKVFTAVAIMKLVEDGFTRLDVPVGEILPQFNTPPYNGVTLFQLLTHTSGMHADGGCFDNKYQTNYWKMIDDAYKLCSPGEKKEFDWLTAALSTIGSGFRIKPDTEWAYCSFGFVVLGAVIEKLSGMSAQEFIEENICKPLGMKDTTFNITAEMAKRYIVSDEELEKYINDKINGTYKPHWIGEILNIPPTGGGLESTVYDINRFGNMMLSGGTLNGARILGRKAVEKMTTLACAFPNYTWNAKEKERYYGIGFDMRNGPAFTFSQGTFMHEGSGACSLYIDPKEEFVAAWIVPFAKEGWFSRALFNVQNIIWSGII

SEQ ID NO: 58577 - DNA, 2412 bp, Unknown
  Obtained from environmental sample
  misc_feature (1)..(2412): n is a, c, g, or t
ttgatggccgagcgggaagacggtcatttaaagcaattaaagggaatagcggacgtaatgggcgagtttgaatccttaccggcgggagcccggcgtgacacttatgacaatatactgctggctaccctgagcaataatccaaacttcgtcagaatatattccgtttggaaaccaaacgccatagacggcatggatgcccgttatataggccgtccggggtcaaccccgacggggcagtacgcaatggcctacacaagagaaaacggcaagattgaggtaacgaaagacctcgtccttgatgaagttaacgcgtggataaacggtcccgacgcgttcaaagacaaagttgatcatcccattcctttaaaagtaaacagaaaagacacttatgttatcagaataggcgttcccataaccaaagggactacaaacgaagtagtcggacacctggctgttttaatggacattgcgttaatacaggaattggtaaacaaaactctccatgattacgaagaaatatcccagatggctgtttactcaggcaacggtttaattatgggaaacctgcggcctgagcgggtaggaaaatttctgcccgaagtggaagctttatacggcgtttatcagaaagacgccaatcaagctgtacttgacggcatgccgttcagttgttcaagcttttcgaattcgttaaaagagaacgtgaaaattgaaatggcgcctttccggataggcgattcagacaatacctggagcgtaatgatcgcgtccagagagaaatatattatgagaaatgtcatcgctatgagaaactttgtcattgttatggcatcgattgcgattatagcggcggttgtaatcatatatctcgttttgaacggcgctatcaaaccaattaatgaaaacccaaaaacaatccggggattattttcatacgcgataatcctgctcattatattggcgtttgcgctgatggttacgctggggtccgtatttatgtccaacatagtcagccgtcagttggaaaacaacgcgcttgcggcgcttgactatctggaaaccaatatcacagtagacctcagagaacccaggacgctgctgggcggcgcgtccgaaaccgtgcgcaaaatgattctgcacggcgcaagcgaaaaagaagtacatacttatctgaatgaaatcaccgcgtttttactgagtgatgaagagcagcttgcggactttgacgggcttttcggttattttaacgtattcggaggagcgctgctcgacggacaggatcgcgcgccgcctgaaaattataaccctcttgaacgcccctggtacaaagaagcggtggcggcgggcggcgaaataacttttatacagccccatctcagcgtaatgtcggcgaagccgatgattatcatcgcctatgggcgggccttgtatgacgatgacggaaacctgctcggcgtagtcgccctgaacatgaattttgaaagagtcaagggatatatcgttcaggcgaatttaggcaaagtatggtttggaattttattgaacgaacagtttgattttattttccatagagaggcaggattggaaggcacaaatttcgcggacgtgaacagcgataccgcaaatcttgtggcaatgcttaaatcgggaaatgattatgtgtacgaattcatgatgattaactatcagaatatcccctcaatcgcatttgtcagaaaactggaaaacggctggtatctcggcatcataacgcccaaagacgggtatttcacggaagtcaaaagagtaaggcttatactcatattgattggaacagtactgtcggcaatattcagcgttattctggttcatatgatttcagaaagacgaaaagccgacgcaaagataaacgaagcggaaaaggcgataatggcaaaccgcgttaaatccgattttctggcaaagatgagccatgaaatacgttcgccgatgaatgttattttgggtattaccgaaatgcagcttgagaaaaaagacctgccgccggaaacactggttgcgctgggtaaaatgcggaattccggacatttgctgcttaatataatcaacgacatactggacctttccaaaattgagtcgggcaagatggaattggtgacgaccaattatgatattccaagcctgatcaacgatacggtacagtttaacgtcatacgttttgacagcaagcctattaattttattttaaatattgatgaaaatattcctgtaaatttattcggcgaccctctgcgcatcaaacagatattgaataacctgctctccaactctttcaatacactgatatgggagaagttgaactgtcgttttccgcagaagcctccggcgcgggcgcacccggtacgggcgcgtatggaccagacaagcctgtaa

SEQ ID NO: 58578 - protein, 803 aa, Unknown
  Obtained from environmental sample
  DOMAIN (454)...(536): Cache domain
  misc_feature (1)..(803): Xaa is any amino acid
MMAEREDGHLKQLKGIADVMGEFESLPAGARRDTYDNILLATLSNNPNFVRIYSVWKPNAIDGMDARYIGRPGSTPTGQYAMAYTRENGKIEVTKDLVLDEVNAWINGPDAFKDKVDHPIPLKVNRKDTYVIRIGVPITKGTTNEVVGHLAVLMDIALIQELVNKTLHDYEEISQMAVYSGNGLIMGNLRPERVGKFLPEVEALYGVYQKDANQAVLDGMPFSCSSFSNSLKENVKIEMAPFRIGDSDNTWSVMIASREKYIMRNVIAMRNFVIVMASIAIIAAVVIIYLVLNGAIKPINENPKTIRGLFSYAIILLIILAFALMVTLGSVFMSNIVSRQLENNALAALDYLETNITVDLREPRTLLGGASETVRKMILHGASEKEVHTYLNEITAFLLSDEEQLADFDGLFGYFNVFGGALLDGQDRAPPENYNPLERPWYKEAVAAGGEITFIQPHLSVMSAKPMIIIAYGRALYDDDGNLLGVVALNMNFERVKGYIVQANLGKVWFGILLNEQFDFIFHREAGLEGTNFADVNSDTANLVAMLKSGNDYVYEFMMINYQNIPSIAFVRKLENGWYLGIITPKDGYFTEVKRVRLILILIGTVLSAIFSVILVHMISERRKADAKINEAEKAIMANRVKSDFLAKMSHEIRSPMNVILGITEMQLEKKDLPPETLVALGKMRNSGHLLLNIINDILDLSKIESGKMELVTTNYDIPSLINDTVQFNVIRFDSKPINFILNIDENIPVNLFGDPLRIKQILNNLLSNSFNTLIWEKLNCRFPQKPPARAHPVRARMDQTSL

SEQ ID NO: 58579 - DNA, 600 bp, Unknown
  Obtained from environmental sample
  misc_feature (1)..(600): n is a, c, g, or t
atggaaaacccccgcggcgatgacggcaagcatcttacaggccttggaacaccggcgacgcgcggcgcgattcttcaaaaattggtagaccgcaaatacgtcttacttaaaggaaagaacgtccttatttccgatgacggaaacttcctcatcgaaaatatcttaaaaaatgacgagctggcggcttttatatcaatcccggaaaccacccgatgggaagaacaactccacgacaacacctccgcttttattgagggcattaaagactttgtgcgcggcgcggttaaaaataccggcatggatacatatcaacatgagaaaaaatcgcttggtaaatgccctgtctgcggaaccggagatatttacgagggtaataataattattactgcagtaattacaaggcaagccccccatgcaaatttgttatttggaaaaacatctgtcaggcgttcgttacacattcagacgttcaggctttgcttgccggcaagcagacaaaagtaaaaaaatgcgtaagccctaaaacgaagaatgtatttaacgcgaaatttaagcttgtcgccggaaaagttgaattccagtttgaggagaaaaaatga

SEQ ID NO: 58580 - protein, 199 aa, Unknown
  Obtained from environmental sample
  misc_feature (1)..(199): Xaa is any amino acid
MENPRGDDGKHLTGLGTPATRGAILQKLVDRKYVLLKGKNVLISDDGNFLIENILKNDELAAFISIPETTRWEEQLHDNTSAFIEGIKDFVRGAVKNTGMDTYQHEKKSLGKCPVCGTGDIYEGNNNYYCSNYKASPPCKFVIWKNICQAFVTHSDVQALLAGKQTKVKKCVSPKTKNVFNAKFKLVAGKVEFQFEEKK

SEQ ID NO: 58581 - DNA, 669 bp, Unknown
  Obtained from environmental sample
  misc_feature (1)..(669): n is a, c, g, or t
atganaaacataaatggcctttcatatccgcgtaccccttcccgcgtcatgggtgatgataatgtcgatctggtaaaaaatatttacgaaaaattatttgacgaatataaagatgttacaaaattatctgattatctttccggagttgattcttcttttatttcaaacgataataaacgcctttttaactcaacggaacttcaggatcaccatgcgcttattcctttaacaagctgtccattgaattgttctgatgaagaagccgccgtctattaccttgttttgcaaagttttttcaatgttttaaaaccgccctatgtttataattccgtttccatcgatgtcgatatctccggacacaaatttattggaaacggtatagaagttattaacgccggttggaaatcaaactcattacaattatcaaaaccttctttaattggtatagatgaggacgaagatgtttcagaagattattccggacttatccagggtaatgaatataaagttgttactgttaaagttcttggcaaaaaaacagaaccaaaaaaacattatacttcgcttccctgctgcagctcatggaaaacccccgcggcgatgacggcaagcatcttacaggccttggaacaccggcgacgcgcggcgcgattcttcaaaaattggtag

SEQ ID NO: 58582 - protein, 222 aa, Unknown
  Obtained from environmental sample
  misc_feature (1)..(222): Xaa is any amino acid
MXNINGLSYPRTPSRVMGDDNVDLVKNIYEKLFDEYKDVTKLSDYLSGVDSSFISNDNKRLFNSTELQDHHALIPLTSCPLNCSDEEAAVYYLVLQSFFNVLKPPYVYNSVSIDVDISGHKFIGNGIEVINAGWKSNSLQLSKPSLIGIDEDEDVSEDYSGLIQGNEYKVVTVKVLGKKTEPKKHYTSLPCCSSWKTPAAMTASILQALEHRRRAARFFKNW

SEQ ID NO: 58583 - DNA, 1251 bp, Unknown
  Obtained from environmental sample
  misc_feature (1)..(1251): n is a, c, g, or t
atgtcgaaaacaaatattatccaacgaagagagctgaaaccgctgtggaacaaagccagtaaaatggcgcagcattatgagaaagcgggaaactgcgttacttcggtaatgggagctgattttgtttcagtaataccttccaagcatcccaagcatatgctgttttgctctttttgcaaacgctaccatcaaactccgggaaatatggcggcgcatgaaatcccttgttcccaaatgcattatgatgccgtaaaagaggccagcaggcttggcggctcatttgtttatacctgtccaaatggtttattattctggaccagcccgtttttttcaggagggcgttttgccggagcgttgatggccggaggggcccttgccataaaaagaaaacaggctttgaaaaggttttttaacttctacaaaggaaaaattcccctcgatgaaattgacaaataccttgagggtattcccgaaagaagcagcgaggaaatgaaggctctttcacagatgctgctgctttgcgcggaaaaaatttcctgttccggaaccggttatcatgatttagcagaacatgagcagggacatgactgcacaggccagcagtcttttttaaatgacaaggaaagactgctcatagcgtgcctgcgccggggcgacagtaccgaagcccagagtattgcgcgggatctattggctgatttcagtaatttggctgacggcgattttgagttcttcaaaatgaaggcgatagaactggtagtcatggtttcaagaaccgggacaaattccgaaaatgaggcggaacttgtcgaaacgaacagccgtaatataaaacaaattgaggattcaactaccgccggggaattggctgataatgtctgcctgattcttgaaagaatggccgggaaaattttctcttttcaggggattcgccacgcgtcagcgctcaggaaagccgagcgttttatctgggaaaattacaccaggaagatcagccttaaggagattgccgacgcatccgggctttccgcgccttatttcagcacggtattcaagaacgaaatgggtgaaaacctttcaaactatcttaacagactcagggtggagaaagcgttggtgatgcttggtgaaaccgattctcccatcaacaagatttcggcggattgcggttttgaagaccaaagctggttttcaaaagtattcaaaagctataccggtatcagcccctatgaataccgtaagtatggttga

SEQ ID NO: 58584 - protein, 416 aa, Unknown
  Obtained from environmental sample
  DOMAIN (318)...(364): Bacterial regulatory helix-turn-helix proteins, AraC family
  misc_feature (1)..(416): Xaa is any amino acid
MSKTNIIQRRELKPLWNKASKMAQHYEKAGNCVTSVMGADFVSVIPSKHPKHMLFCSFCKRYHQTPGNMAAHEIPCSQMHYDAVKEASRLGGSFVYTCPNGLLFWTSPFFSGGRFAGALMAGGALAIKRKQALKRFFNFYKGKIPLDEIDKYLEGIPERSSEEMKALSQMLLLCAEKISCSGTGYHDLAEHEQGHDCTGQQSFLNDKERLLIACLRRGDSTEAQSIARDLLADFSNLADGDFEFFKMKAIELVVMVSRTGTNSENEAELVETNSRNIKQIEDSTTAGELADNVCLILERMAGKIFSFQGIRHASALRKAERFIWENYTRKISLKEIADASGLSAPYFSTVFKNEMGENLSNYLNRLRVEKALVMLGETDSPINKISADCGFEDQSWFSKVFKSYTGISPYEYRKYG

SEQ ID NO: 58585 - DNA, 741 bp, Unknown
  Obtained from environmental sample
  misc_feature (1)..(741): n is a, c, g, or t
atgaaaacacagccattatttacaataattttcgaaaacgagaatattatagcagttaacaaagcctctggaatttcggtgggcggcgaccggtgggatgaaaccaaagacagactagacagactagtcgccgaaattattacccatccaacaaaaatttttactgtccatcgtatagactgcgatacatcagggctggtggtattcgccaaaaatgaagaaacacaccgccgtttttctattgcctttgaagggcgggatgttaccaagcggtacattgccattgtccacggccgccctgcctggcaggaaacggcctgtgatcttcccttgattcccaacggaaacaaactccaccagacaataattgacaaataccagggcaaaaagtcccttacccgctttgtgcttctggacagcgcggaacattacagcgtaattgaagccctgccggaaaccggcagaacccaccagatacgcgtccatgccgcggcgttgggacatcccgttgtatgcgactcaatgtacggaaagggcaaaccggttatgctttcggaaataaaaaggaactggcatggcgacccttatgatgaaaaacctcttttggcgcggcttggtcttcatgccgccgagcttgcggtgccaacggaatccatcagcctccacgccccgcttcccagggatatggccgctctaatcaaccagataaaaaaaattagggagtggggttttggttcgtaa

SEQ ID NO: 58586 - protein, 246 aa, Unknown
  Obtained from environmental sample
  DOMAIN (15)...(165): RNA pseudouridylate synthase
  misc_feature (1)..(246): Xaa is any amino acid
MKTQPLFTIIFENENIIAVNKASGISVGGDRWDETKDRLDRLVAEIITHPTKIFTVHRIDCDTSGLVVFAKNEETHRRFSIAFEGRDVTKRYIAIVHGRPAWQETACDLPLIPNGNKLHQTIIDKYQGKKSLTRFVLLDSAEHYSVIEALPETGRTHQIRVHAAALGHPVVCDSMYGKGKPVMLSEIKRNWHGDPYDEKPLLARLGLHAAELAVPTESISLHAPLPRDMAALINQIKKIREWGFGS

SEQ ID NO: 58587 - DNA, 1305 bp, Unknown
  Obtained from environmental sample
  misc_feature (1)..(1305): n is a, c, g, or t
ttggcaaggcgtaaaactatgaatttcagcaaaattgcatttattctatcaacagcgatttgcgctctttttgcccaaagctatcagaatttaaccctacagaactgcattgaaatagcaaaaaaaagtagcctttctcttgcaagcacaaggctaaacgaaaaaacagcagcatcttccctaacgcaggcaaaaaacgccagacttccagatttaaggggcagtgtgtcgcagagtgtggcaggcaatcccttgcttgaaaattcacaaaaccgctatgcgtttggcataggcgtaaattcttccatgccaattttcacaggaggcagaataagccattcggtgaaccaagctgagtaccgcaaagaaattgcaacgctcaattcagatgcagcggagagaattttgtctgaacaggttatcaaagcttttatgcaggtttggtctttaactgaatctgaggcggccgccaaggcttcgcttgcactatctaaaagaatgctcgcaagagattccgtgcttttcaatgccggcagctacacagtgagcgatttggctctggcttttgcaaatgttgcaagtgatagtttgaatttattgcaaacacaaagcaacttaacccaaagctacaccgctctgcgccagcttttggaaattccgcaaaattccagcttctccgttttgccaccagattccgcaaaacccgaaatcacagaaaattactctgccctgctcagatctgcacagaacaattccatagataaaaaaatagattctctctccgttttagcggccaaagaagcggttggcattgcaaaagcggctcgctacccaagcgtgtctttaagcggctcgctgagttccggttttcactgggaaattgaagacccaaaatacccaaaacaactgaagaacgggtttggctattccgcatcgcttggcatcaatattcccattatagactggggcgctgccgcagatggagttttgcaagcgcaagtagcagaggaaaaagcgcaaatatccgctctcaacacgcaaaagcagcttgagaatgtaattgagcagttagctctgcaagttgaaacttaccgcttgcaatgggaggtttcttctgtgcaattggaagctgggaggctttcccttgaaaaatccgttcagcagcacgaacttggaatgttggatatttcttcgcttgttcagcagcaaactattttcaacaattcgcaaataaagcacaatcaggcaaaatacagctatttactcagtaaatcgcttttggatttgcaaacggggaatttctaa

SEQ ID NO: 58588 - protein, 434 aa, Unknown
  Obtained from environmental sample
  SIGNAL (1)...(27)
  DOMAIN (241)...(432): Outer membrane efflux protein
  misc_feature (1)..(434): Xaa is any amino acid
MARRKTMNFSKIAFILSTAICALFAQSYQNLTLQNCIEIAKKSSLSLASTRLNEKTAASSLTQAKNARLPDLRGSVSQSVAGNPLLENSQNRYAFGIGVNSSMPIFTGGRISHSVNQAEYRKEIATLNSDAAERILSEQVIKAFMQVWSLTESEAAAKASLALSKRMLARDSVLFNAGSYTVSDLALAFANVASDSLNLLQTQSNLTQSYTALRQLLEIPQNSSFSVLPPDSAKPEITENYSALLRSAQNNSIDKKIDSLSVLAAKEAVGIAKAARYPSVSLSGSLSSGFHWEIEDPKYPKQLKNGFGYSASLGINIPIIDWGAAADGVLQAQVAEEKAQISALNTQKQLENVIEQLALQVETYRLQWEVSSVQLEAGRLSLEKSVQQHELGMLDISSLVQQQTIFNNSQIKHNQAKYSYLLSKSLLDLQTGNF

SEQ ID NO: 58589 - DNA, 510 bp, Unknown
  Obtained from environmental sample
  misc_feature (1)..(510): n is a, c, g, or t
ttggccaacagcacagcgacaagaagagctatcagcgggtccaaccagttcagccccgtcagcttgaccaacagcaagcccagaagcaccccaagcgttgtccaaaaatcagataggacgtgctgcccgtctgccttcagtgcatctgactggtgctttttgccgataaaaaccagcaagaggccaagcaacccattcaaggccccggccgctaagttccacgccagtcccagccccaattctttgatagtgtcagtacccaaaaaaagttgctggtacaggatggtgatggcctcccaggcgatgagtgccgccgctatggctatcagcccgccttcaaaggccgcgctgaagtgttccacctttccatgtccaaaggggtgctccctgtccgccgacctttccgcaagccgcacagcgccaaaggcgaatatagcgcctatgacgttcacgacgctctcgatggcgtctgaccacagcgcggcggagcccgatactgccgcggcgtag

SEQ ID NO: 58590 - protein, 169 aa, Unknown
  Obtained from environmental sample
  misc_feature (1)..(169): Xaa is any amino acid
MANSTATRRAISGSNQFSPVSLTNSKPRSTPSVVQKSDRTCCPSAFSASDWCFLPIKTSKRPSNPFKAPAAKFHASPSPNSLIVSVPKKSCWYRMVMASQAMSAAAMAISPPSKAALKCSTFPCPKGCSLSADLSASRTAPKANIAPMTFTTLSMASDHSAAEPDTAAA

SEQ ID NO: 58591 - DNA, 519 bp, Unknown
  Obtained from environmental sample
  misc_feature (1)..(519): n is a, c, g, or t
atgaacatggagcttacctctaccgaagccgttacactacaatatggacaagtggcattagcgccagcacgacgcggaggagatgtggcaccagcacacaagaagagcggcgtttcaaaccatgctcggcaaaatgtgcgtcctctgacccgaaaaaaactcatcgctttctgcctgagcttccagggggcctacgaggactatcctttcgacggaatcacagaccccggcgcgtggacggtgatgcgccacagggccaacaaaaagtcattcgcgctgatttttgaaatggacggcaagctatgcgccaacctcaagtgcgacccattcgaggcagacttcctgcgccaggtgttcaagggcgtgacgccggcctaccacatgaacaagcagcactggaacacggtagtcataggctcggacgtgccggagggcgaactgtttaggcagatcgaanacagctttgagctgatcaacccaaaggcangaaacgaaaatgagattttgagacatctttga

SEQ ID NO: 58592 - protein, 172 aa, Unknown
  Obtained from environmental sample
  DOMAIN (58)...(159): Protein of unknown function (DUF419)
  misc_feature (1)..(172): Xaa is any amino acid
MNMELTSTEAVTLQYGQVALAPARRGGDVAPAHKKSGVSNHARQNVRPLTRKKLIAFCLSFQGAYEDYPFDGITDPGAWTVMRHRANKKSFALIFEMDGKLCANLKCDPFEADFLRQVFKGVTPAYHMNKQHWNTVVIGSDVPEGELFRQIEXSFELINPKAXNENEILRHL

SEQ ID NO: 58593 - DNA, 525 bp, Unknown
  Obtained from environmental sample
  misc_feature (1)..(525): n is a, c, g, or t
atgctgccagaagaaattacagacaatgtatttaccttggtgggcaaggtatttccagttgtcacggtaggcgctgtgggcgaccacaattcgatggtggccagcggaggcgggatggggctgctgttcagaaagccagcgacgtggtgcgtatttccgtcaaagcgatatacgcttgaactgatagaaaaggaacagtcgtacactctttcctatttttcagacgaatacagagagcgattcatgtttttgggaatgaaatctggcagggacagcggcaaaatggaagaggtcgaattgactgcgattgaaacaccgcttcacaacacgactttcgaagaagcgcgactcgttgttgaatgcagcctcatgcagataaccgtcccccaaatcagcgatttttattccgaagaagccaaaaaataccttgccgaaacctaccaagaccccggcgagatacgcaagtatgtctttggggcgattgaggcggtttggaaaaagagagagaaaaaacatgacatgtag

SEQ ID NO: 58594 - protein, 174 aa, Unknown
  Obtained from environmental sample
  misc_feature (1)..(174): Xaa is any amino acid
MLPEEITDNVFTLVGKVFPVVTVGAVGDHNSMVASGGGMGLLFRKPATWCVFPSKRYTLELIEKEQSYTLSYFSDEYRERFMFLGMKSGRDSGKMEEVELTAIETPLHNTTFEEARLVVECSLMQITVPQISDFYSEEAKKYLAETYQDPGEIRKYVFGAIEAVWKKREKKHDM

SEQ ID NO: 58595 - DNA, 879 bp, Unknown
  Obtained from environmental sample
  misc_feature (1)..(879): n is a, c, g, or t
gtggtctcaggccgaaacagtgacgagttcggtggcatagccaactcgctgggccacatggtggccaacctgagggacatagtcgccggtgtgaaccaaggcatagacggcgtggccagcggctcgacggagctgtcggcatcggcggaggagatgtcccacaccaccaccgagatagccaggagcgccgaacgccagaggggcgacgccgagggcatggccgcagccatgaccgagctgtcggcctcgattgacgaggtgagccaaagcgcctccgagtcccttacccagcttaacgcggcactggaggcgacgcagcagggcaacatggcaggctcctccaccaagagcgcgatggacgagataacgcagaccaccggcagaatagccgccgccatcggcgtaattcaggagatagccaaccagaccaacctgctttcgctgaacgcggcaatagaggcagccaaggccggcgagcagggcaagggcttcgcggttgtggccgaggaggttcgcaagctggccgagcgcagcgccatctctgccaaggagatagcgcagcacaacattgaggcgcgcacctcggtgcagcacggagaggagatggtcaccaccactgtcgagctgctggagaagatccgcaccagcctagacaagttcgcagtgaggactagagaatctgtgaaggctacggtagagcaggccaagacaggcaccgaagtggccaagcaggtggacgccagcgtgaatgaggcggcatccattgcctcagccacgcaccagatgtcatccaccacgcaggaggtggcgcgcacttcgtctgaattggccggcctcgcccagggcctgcaagaccagatgcgcaggttcagagtgtaa

SEQ ID NO: 58596 - protein, 292 aa, Unknown
  Obtained from environmental sample
  DOMAIN (50)...(291): Methyl-accepting chemotaxis protein (MCP) signaling domain
  misc_feature (1)..(292): Xaa is any amino acid
MVSGRNSDEFGGIANSLGHMVANLRDIVAGVNQGIDGVASGSTELSASAEEMSHTTTEIARSAERQRGDAEGMAAAMTELSASIDEVSQSASESLTQLNAALEATQQGNMAGSSTKSAMDEITQTTGRIAAAIGVIQEIANQTNLLSLNAAIEAAKAGEQGKGFAVVAEEVRKLAERSAISAKEIAQHNIEARTSVQHGEEMVTTTVELLEKIRTSLDKFAVRTRESVKATVEQAKTGTEVAKQVDASVNEAASIASATHQMSSTTQEVARTSSELAGLAQGLQDQMRRFRV

SEQ ID NO: 58597 - DNA, 408 bp, Unknown
  Obtained from environmental sample
  misc_feature (1)..(408): n is a, c, g, or t
gtgcgcgccacctcctgcgtggtggatgacatctggtgcgtggctgaggcaatggatgccgcctcattcacgctggcgtccacctgcttggccacttcggtgcctgtcttggcctgctctaccgtagccttcacagattctctagtcctcactgcgaacttgtctaggctggtgcggatcttctccagcagctcgacagtggtggtgaccatctcctctccgtgctgcaccgaggtgcgcgcctcaatgttgtgctgcgctatctccttggcagagatggcgctgcgctcggccagcttgcgaacctcctcggccacaaccgcgaagcccttgccctgctcgccggccttggctgcctctattgccgcgttcagcgaaagcaggttggtctggttggctatctcctga

SEQ ID NO: 58598 - protein, 135 aa, Unknown
  Obtained from environmental sample
  misc_feature (1)..(135): Xaa is any amino acid
MRATSCVVDDIWCVAEAMDAASFTLASTCLATSVPVLACSTVAFTDSLVLTANLSRLVRIFSSSSTVVVTISSPCCTEVRASMLCCAISLAEMALRSASLRTSSATTAKPLPCSPALAASIAAFSESRLVWLAIS

SEQ ID NO: 58599 - DNA, 1020 bp, Unknown
  Obtained from environmental sample
  misc_feature (1)..(1020): n is a, c, g, or t
atggatgataaaaaagaaaacgtcatcagctttaagaacgttaaagtcgatttccggattcgccaaagtttttttaaggagtacatcaagagagaaacgaaaatcgtccatgccctggatgatgtttcattcgacattgcgcggggtgaaattctctcactcgtaggcgaatcgggcagcggaaaaacgacaacggggcgctccctcttgcggctcgtccataatacagacggcgacattttttttgacggggcgaatatcgcgcacgccgggaaagacaaacagtatatgaaagacttcaggcaaaaggcccaaatgatctttcaggatccgtaccagtctctgaatccgcgttttaatgtttacgaaatagttactgaacccctgttattcggttccaaaaaaaaactgtccatcattgaaaaagaaaagcttgccatacaggcgcttgagtttgccggtttaaggccggctgtagattacctttaccgttatccgcatgaattgtcaggcggacagcgccagcgggtttcgatagccgcgtgcttcgtcatgtctcctgaattgattgttgcagatgaacctgtttctatgcttgacgcttcggtacgcgccgatattttgaaattgtttgtgagcctgaaggaacaaaaaaacgtctcgatactttttattacccacgatctgtccctggcatggcttatttcagacagaattgcgataatgtatttgggaaaaattatggaaatgggcccctccgatatcatcgcagggtcgtgccttcatccatattcccaagcgctcacaagcgtactggcgatggtaggcgaaaagcgcaggcgtgagcgaatcgttctcaaaggagagacgccatcgcccatcattattccgccgggctgccgcttccacccacgctgcccggccgcgacggaaaagtgcaggaacgaaacgcctgaatacagggaaattaatcccggccattttgtttactgccatacaccgggaataataaaaggttga

SEQ ID NO: 58600 - protein, 339 aa, Unknown
  Obtained from environmental sample
  DOMAIN (248)...(313): Oligopeptide/dipeptide transporter, C-terminal region
  misc_feature (1)..(339): Xaa is any amino acid
MDDKKENVISFKNVKVDFRIRQSFFKEYIKRETKIVHALDDVSFDIARGEILSLVGESGSGKTTTGRSLLRLVHNTDGDIFFDGANIAHAGKDKQYMKDFRQKAQMIFQDPYQSLNPRFNVYEIVTEPLLFGSKKKLSIIEKEKLAIQALEFAGLRPAVDYLYRYPHELSGGQRQRVSIAACFVMSPELIVADEPVSMLDASVRADILKLFVSLKEQKNVSILFITHDLSLAWLISDRIAIMYLGKIMEMGPSDIIAGSCLHPYSQALTSVLAMVGEKRRRERIVLKGETPSPIIIPPGCRFHPRCPAATEKCRNETPEYREINPGHFVYCHTPGIIKG

SEQ ID NO: 58601 - DNA, 990 bp, Unknown
  Obtained from environmental sample
  misc_feature (1)..(990): n is a, c, g, or t
gtgatagcgatgcccgataaattgcttgaagtcagcgatctaaaaacctatttcaagattcagcagggcgaagtcaaagctgtagacggcgtaagttttacgctttacaaaggcgaatcactcgggctggtcggtgaatccggctgcggtaaaacgactaccgcgctgtcggttatcaaactgctgccggataacggatacattgccggcggtaaggttgtttttctcgggcgggatattacaaacctggatgacgaacatctttaccagttccgctggaaagaggcgtccatgatcttccagggcgcgatgaacgccctgaatccggtcaagcggatttctgatcagataacggaagccatttttttgcacgagaaaaaaatcacaaagagccaggcgcttgaccgcgtaaaagaagtgttcgagctggtagagcttaatccgaacatggtgcactgttatccccatgagttctcaggcggaatgagacaacgcgccattatcgcactggcgcttgtgctgaacccttcgcttgttatcggggacgaacccacaaccgctctggacgttatggttcaggcgcagattattgatcttatcaattccctgcgaaataaacttggcatgagcctcctcatgataacgcatgacctgtccattatcaccgaggtttgcgatcgcatcgccgtcatgtacgcgggcaaaattgttgaaatgggcagtaccggggaaattgtaacaaatttcaaacatccttatacagaaaaactcattacggcttttcccaacatatataaagaaagaacaatggtcgattcaattcccggagatcctcccgatttgtttaaccctcctccaggctgccgcttcgcgccgcgctgtcacctacgggacggagagcattgcggcaaagatgaaccgcctcttgtcgacatagacggaaaaggccattttaccgcctgccatttaaggagagccggaaatggatga

SEQ ID NO: 58602 - protein, 329 aa, Unknown
  Obtained from environmental sample
  DOMAIN (237)...(302): Oligopeptide/dipeptide transporter, C-terminal region
  misc_feature (1)..(329): Xaa is any amino acid
MIAMPDKLLEVSDLKTYFKIQQGEVKAVDGVSFTLYKGESLGLVGESGCGKTTTALSVIKLLPDNGYIAGGKVVFLGRDITNLDDEHLYQFRWKEASMIFQGAMNALNPVKRISDQITEAIFLHEKKITKSQALDRVKEVFELVELNPNMVHCYPHEFSGGMRQRAIIALALVLNPSLVIGDEPTTALDVMVQAQIIDLINSLRNKLGMSLLMITHDLSIITEVCDRIAVMYAGKIVEMGSTGEIVTNFKHPYTEKLITAFPNIYKERTMVDSIPGDPPDLFNPPPGCRFAPRCHLRDGEHCGKDEPPLVDIDGKGHFTACHLRRAGNG

SEQ ID NO: 58603 - DNA, 792 bp, Unknown
  Obtained from environmental sample
  misc_feature (1)..(792): n is a, c, g, or t
atgatggccgantcttttggttttattgttttcgcggccattgggcctgtagtttatgaataccatcatgacggttacgcgctgggcaagcgcttacaggccccaaacgagaagtacgcccttggtcttgacgaacttggacgcgatgtaatgggcgcggttatttacggcgcgcgcgcgtcgctggcaataggcttttttgttaccctgctcattgtcatagtgggatctttcataggcatactaacaggatatttcggcggtataatcgacataatactaatgcgcgtaacggaagctttcatgcttgtcccttttatgccgctcgtgttaaccctttccgcgataatcggccagaggttttccaatatcattattattctcggtctgacatcctggccgggaaccgcgcggcttgtgaggtcgcagacgcttaccataaagcagcgcaattacgttgaacgcgcccgctcgcttggggcatcaagtgcgtatatcatgttccggcacatacttccaaacatcttcccgttgatattttccgaaatcattttgctcgttcaaagcgctataatcgcggagtcgacactcgcgttcctgggaatcggcgatccgtcaattccaacctggggtcagcttctccgcagcgcgcgggagcaaggctccattttagtcggctcctggtggctctttgttccggcgggtatctgtatattccttttggcttcatcatttgtttttatcagctacgggtttgatgaaatcctcaaccccaaattaaggaagaggtga

SEQ ID NO: 58604 - protein, 263 aa, Unknown
  Obtained from environmental sample
  DOMAIN (58)...(262): Binding-protein-dependent transport system inner membrane component
  misc_feature (1)..(263): Xaa is any amino acid
MMAXSFGFIVFAAIGPVVYEYHHDGYALGKRLQAPNEKYALGLDELGRDVMGAVIYGARASLAIGFFVTLLIVIVGSFIGILTGYFGGIIDIILMRVTEAFMLVPFMPLVLTLSAIIGQRFSNIIIILGLTSWPGTARLVRSQTLTIKQRNYVERARSLGASSAYIMFRHILPNIFPLIFSEIILLVQSAIIAESTLAFLGIGDPSIPTWGQLLRSAREQGSILVGSWWLFVPAGICIFLLASSFVFISYGFDEILNPKLRKR

SEQ ID NO: 58605 - DNA, 1689 bp, Unknown
  Obtained from environmental sample
  misc_feature (1)..(1689): n is a, c, g, or t
atgcattacaagaattttttgacggttacttatgcgcccgccggttatttgaatgacaattcggttgaacagataaaagcggacattgaaaaagtcagcaagtacataaaacttgacaagatatatcttgaaacttaccgctcggaagttcttatagagcgcaaaaaaatggaagccgtaaaagccctgtttgttgaaaagggctatatggtatccggcgggattacaactacggtaaagcaaactttaatggggagcatgtgttttacagacccggaaaaccgcaaaaggcttggagaaatcgccgcctacaccgcgcagctttttgatgaaataatccttgacgacttttattttacaaattgccgctgtgaatcctgcataaaggcaaaaggagaccgcgactgggcttctttccgtcttgcgcttatgaacgatatttccgaaaacgtgataatcaaaaacgcgaaagcggcgaatccaaaagtaaattgtataatcaaatatcccaactggtacgacagttttcaggctaacggttataatcttgaagacgaatcaaaaatgtttgacatgatctacacaggaacagaaactcgcgatccaaattatacgcatcaaaacctgccgcgctatttaagttttttcctgccccgcctttttgaacacatcaagccggggaaaaacggcggcggctggtacgatctctttgagtgttcgctcgaagactatgtacaacaggcttatttaacgcttttttcaaaatgccgcgaacagatgcttttctgtttccccttactcgccaacgccccgctttacaccgccgcggttggcgcgttctacgacgaggcggatcttttcatcggcaggattggagaacctttgggcgtcgcctgttacaagccgtatcactcatacggggagaggctgcttcatgaatttatcggaatgtgcggcgttcccctggacccctatccttattacccggcggacgcgaagacggtatttcttaccgcggacgcagcatgggacaaagaaattgtcgctaaaataaaacaaagcctattaaacgggagcaaagtttttattacaagcggactgtatgaaaaattgtccggcaaaggtattgaagatatactaccgttagaagttacaaacagaaaaataaccacagacatttttaccaacagcgcttttggcggcggcaatgtcggttatgtaaaagccgccgcgcccataaccctaagccatgtcgcctacaatgaaaacgatatatggcctctttcagccgcgcttacgccccattcaactcacgcgctgttgttatgcggcgcttacggcaagggcagcctctacgtgcttacaatccccgacgcgttcgccgatttgtacaacctgcccgccgaaacgctctctgttttacgccgggaattcaatttgcccataacgcttgaatgcgggggccgcgtgtcgctgtttccttatgacaacgatacttttattttgcagtcattccttaacaggccggagcgtgtgcgcgtccgcgttaacagggcaaatgtaaagctagcgccgttgatgaaacccagaatgcgcccctttgatatagtcccccattcaggcgggaacgagagcgtttttgacattcacataatgccggggcattacatggtttttaagattgaatga

SEQ ID NO: 58606 - protein, 562 aa, Unknown
  Obtained from environmental sample
  misc_feature (1)..(562): Xaa is any amino acid
MHYKNFLTVTYAPAGYLNDNSVEQIKADIEKVSKYIKLDKIYLETYRSEVLIERKKMEAVKALFVEKGYMVSGGITTTVKQTLMGSMCFTDPENRKRLGEIAAYTAQLFDEIILDDFYFTNCRCESCIKAKGDRDWASFRLALMNDISENVIIKNAKAANPKVNCIIKYPNWYDSFQANGYNLEDESKMFDMIYTGTETRDPNYTHQNLPRYLSFFLPRLFEHIKPGKNGGGWYDLFECSLEDYVQQAYLTLFSKCREQMLFCFPLLANAPLYTAAVGAFYDEADLFIGRIGEPLGVACYKPYHSYGERLLHEFIGMCGVPLDPYPYYPADAKTVFLTADAAWDKEIVAKIKQSLLNGSKVFITSGLYEKLSGKGIEDILPLEVTNRKITTDIFTNSAFGGGNVGYVKAAAPITLSHVAYNENDIWPLSAALTPHSTHALLLCGAYGKGSLYVLTIPDAFADLYNLPAETLSVLRREFNLPITLECGGRVSLFPYDNDTFILQSFLNRPERVRVRVNRANVKLAPLMKPRMRPFDIVPHSGGNESVFDIHIMPGHYMVFKIE

SEQ ID NO: 58607 - DNA, 1128 bp, Unknown
  Obtained from environmental sample
  misc_feature (1)..(1128): n is a, c, g, or t
atgatttacaaaacctttggaaaaacaggcgtaaaagtttcggcactaggcttcggcgcaatgcgtctgcccatgaaagaatttgacggcaaaaaaatcgtagacgaagatcttgccgtccccctcatgcaaaaagcctttgacatgggcgttaactatgttgataccgcgccgctttactgcgaaacgttaagcgaaatagccgtaggcaaggcgttgaaaggctaccgtgacaaagtgtatctgtccacaaagaaccccatcgaagacgccgacggcgatcactggatggaacggctggaaaaatcgcttaaaaaattggacacggactacatagatttttatcatttttggggtatctcattaaaaagtttcgagtcatggcagggattaaaattcggtcctattgaggctgcgtataaagccaaagagcaggggcttataaaacacatttcattttcataccacgacgcggcggaaaattataaaaagatagtagactcaggtcactttgaaacaacacttgttcagtacaatatgctggatcgttccaacgaagagaacattgcctacgcgaagtcaaagggtttaggcgttgtggtaatgggacccgtaggcggcggacgtctcggcgcgccaagcgaaaaaattcaaagcctgcttaaaaacaaatcgacaagcacggcggaaatggctctgcgtttcgtgctttcaaatgaaaatatagacatggctctttccggcatgggcaatctcgacatgttaaaggaaaattttgaaatcgcctcgcgcacagggcatttaacggaagaagaactgcgtcatgtgaaatccatgatggaagaaaacaaaaaccttgcgaagttatactgtacgggctgtaattactgcaaaccctgtcctcagggcatagacataccgtatctttttgaaatcatgaaccgctaccgcgtctacgacttgaaggaacacgcaaagagcgcgtacaaggaagtgatcaacggctggagctggattaagagcgccgacgcttcaaagtgcgctagttgcggcgtatgcgaggaaaaatgcccgcagaaacttccgattatcaagcagctgcaggaaactcatcgtacccttgcgtag

SEQ ID NO: 58608 - protein, 375 aa, Unknown
  Obtained from environmental sample
  DOMAIN (340)...(363): 4Fe-4S binding domain
  misc_feature (1)..(375): Xaa is any amino acid
MIYKTFGKTGVKVSALGFGAMRLPMKEFDGKKIVDEDLAVPLMQKAFDMGVNYVDTAPLYCETLSEIAVGKALKGYRDKVYLSTKNPIEDADGDHWMERLEKSLKKLDTDYIDFYHFWGISLKSFESWQGLKFGPIEAAYKAKEQGLIKHISFSYHDAAENYKKIVDSGHFETTLVQYNMLDRSNEENIAYAKSKGLGVVVMGPVGGGRLGAPSEKIQSLLKNKSTSTAEMALRFVLSNENIDMALSGMGNLDMLKENFEIASRTGHLTEEELRHVKSMMEENKNLAKLYCTGCNYCKPCPQGIDIPYLFEIMNRYRVYDLKEHAKSAYKEVINGWSWIKSADASKCASCGVCEEKCPQKLPIIKQLQETHRTLA

SEQ ID NO: 58609 - DNA, 864 bp, Unknown
  Obtained from environmental sample
  misc_feature (1)..(864): n is a, c, g, or t
ttgtactacgcatttgatattatgatccgttttgcgaaatacaaaaaagattctgcgacagaaaaagaaatgacgaaacaaaaaaaccgttttggaaaaattattgaggagcgttgctggaaagatgaccgcttcgtgcgcggtatcactgaacatgatgttacagtcgggaaaaaggacgatcccgaagcgaacatctggcttaatccgcaaagttgggcggtaatcagcggctacgcggatgaaacacgcggcaaggcaatactcgatctagtccacaaagagctaaacacaaaatacggcgcacgccttatgtctccgtcttaccgcaaacacgcttttgacggagcgcttgctttgttgttcaatccgtccacaaaagagaatggcggtatcttcctgcaaactcagggctggataatccttgccgaagcgctacttggacgcggaaaccgcgccgttgagtattatctggaaagttgtccctccgcacaaaatgaaattgccgatacgcgccttatggagccttacgcttactcgcaatttacggaaagcacagacagcccgtttgaaggacgcagtcatgttcactggctgacaggcacggcaagcacggtaatggtcggcagtgtggaaggcattttgggattaaggccggatatcgaaggactgcgtttgtctcccgcaattccttcatcgtggaaatcatttacaatggaaaaatccttccgcggtaaaaaacttaacataaaagtgaataaccccgacggacatgaaagcggctgtaaaaaactgactgtcaacggaacggcggcagaaggcaattatatttccgccggtatattgaaccggagaacgaaataa

SEQ ID NO: 58610 - protein, 287 aa, Unknown
  Obtained from environmental sample
  misc_feature (1)..(287): Xaa is any amino acid
MYYAFDIMIRFAKYKKDSATEKEMTKQKNRFGKIIEERCWKDDRFVRGITEHDVTVGKKDDPEANIWLNPQSWAVISGYADETRGKAILDLVHKELNTKYGARLMSPSYRKHAFDGALALLFNPSTKENGGIFLQTQGWIILAEALLGRGNRAVEYYLESCPSAQNEIADTRLMEPYAYSQFTESTDSPFEGRSHVHWLTGTASTVMVGSVEGILGLRPDIEGLRLSPAIPSSWKSFTMEKSFRGKKLNIKVNNPDGHESGCKKLTVNGTAAEGNYISAGILNRRTK

SEQ ID NO: 58611 - DNA, 1197 bp, Unknown
  Obtained from environmental sample
  misc_feature (1)..(1197): n is a, c, g, or t
ttgactcgaataggcgaagaaacaagtgaaaaactgcaaataatcccgccgcagatatatgttgaaaaaacagtcaggcccaaatacgcctgccgcagttgtgaagggacggaagatgaagaggcgccctctgtccgcatagcgcctgtggaaccggcgattattcccaagagcatagcgagtcccagtcttttaagcactattatcacgcagaagtttgaaatgcatctgccgtattacaggcaggagaaacaatttgagcagataggggctgaaataagcaggcaggatatggccaactggcagcagcaagtgcacctgaggcttgaacctctgtttgagttgcttaaaaaagcggttaaagacggccctgtaatacagatggacgagactccggtacaggtcatttcggatatgaagtccgaagaaactgacaaaaaagacacgcatgaaagctatatgtggcttaccctcggcggatctgttggtaagaaagtaacatggtatgagtatcatccgacccgtgccggatatcacgcgaaagagtttctggaaggatattcaggatacctgcaaacggacgggtataaagggtatgacagcgcgttaaaagatatgccaaatatcattcatgtgggatgtttcgcccatgcgagacggaagttttttgaagcgacaaaagcaaacaagaattccaaatccgcgcaggaagggataaagcatatccgcaagctgtatgacattgagaatgaattacgggataagattgcggataacaatacatttctatcagaacggaaatcccgcgccgggcctgcgcttgaaaagttcaaggcatggcttgagaaacgaaaagaagaagtgcctccgagcctgctcttagggaaagcgatatattacagccttgcccagtgggataagatgaccgcgtatcttgagaacccttatcttacgcctgacaacaacgcttgtgaaaacgcgatacggccgtttgtattaggccggaagaactggctgttttgtcagagcgtcggcggagtcgaaagttcatgcggcatgtacacacttattgaaacggcaaagttaaacggccttgttccctttgattatctcatgattcttttcgaaaaggctccgcttgcttcttctcccgatgattgggaaaagttgcttccttggaacattttcactgcttaa

SEQ ID NO: 58612 - protein, 398 aa, Unknown
  Obtained from environmental sample
  DOMAIN (1)...(209): Transposase IS66 family
  misc_feature (1)..(398): Xaa is any amino acid
MTRIGEETSEKLQIIPPQIYVEKTVRPKYACRSCEGTEDEEAPSVRIAPVEPAIIPKSIASPSLLSTIITQKFEMHLPYYRQEKQFEQIGAEISRQDMANWQQQVHLRLEPLFELLKKAVKDGPVIQMDETPVQVISDMKSEETDKKDTHESYMWLTLGGSVGKKVTWYEYHPTRAGYHAKEFLEGYSGYLQTDGYKGYDSALKDMPNIIHVGCFAHARRKFFEATKANKNSKSAQEGIKHIRKLYDIENELRDKIADNNTFLSERKSRAGPALEKFKAWLEKRKEEVPPSLLLGKAIYYSLAQWDKMTAYLENPYLTPDNNACENAIRPFVLGRKNWLFCQSVGGVESSCGMYTLIETAKLNGLVPFDYLMILFEKAPLASSPDDWEKLLPWNIFTA

SEQ ID NO: 58613 - DNA, 486 bp, Unknown
  Obtained from environmental sample
  misc_feature (1)..(486): n is a, c, g, or t
ttgtgtaaatctctcatgcgcaaacggaattcatcagactgttcaataacgcacgctatcctgtccatcgtttttaccgattccacgggatacgcccccgccgacgtttcgcccgaaagcatgatcgcgtctgttccgtcgagtatcgcgtttgccacgtcggtcagtttcgcgcgctgggggcgcgggttatgtatcatcgagtccagcatctgcgtcgcggtaatgacgggttttcccgcctttctgcacacattgataatgtgtttttgcgccagaggaatctgctcggtggggagctgtacgccaaggtccccccttgccaccattacgccgtccgcaagccgggcaatttcttttatattttccaggccttcaccgctttcaattttggctatgattttcatgcgggaagagtggctttcaagaaatttctttatttcggttacctcgtgggggaagctcaaaaaactcgcggcgacataa

SEQ ID NO: 58614 - protein, 161 aa, Unknown
  Obtained from environmental sample
  misc_feature (1)..(161): Xaa is any amino acid
MCKSLMRKRNSSDCSITHAILSIVFTDSTGYAPADVSPESMIASVPSSIAFATSVSFARWGRGLCIIESSICVAVMTGFPAFLHTLIMCFCARGICSVGSCTPRSPLATITPSASRAISFIFSRPSPLSILAMIFMREEWLSRNFFISVTSWGKLKKLAAT

SEQ ID NO: 58615 - DNA, 564 bp, Unknown
  Obtained from environmental sample
  misc_feature (1)..(564): n is a, c, g, or t
atggtagccgaagaggtgcgcaaacttgcgatacgcagcgtcgaggcggcgaagaacacgacgaagatgatcgaggcggcggtgaagaacgccgacggcggcgtaaagatcacggaggatgtggccaagtccctcggccagatcgtagaccgcacgcagacggtgggctatctgatcgacgagatagcggccgcttccgccgagcaagcgcgcgacataaagatggtgaacaacgccgtggcggagatgaacgatgtcaccctgagaaacgccgacaactccgaagagtcggcgaaagtctccgaggagcttttagaccgtgccgaggaactttcggatatggtgagcgagttcaaactgagctgcggcaacggcaatcgccgtccgaacgcgcagagccaactgccctcgccgcaaaaatacgccgcgcttccgaacacggccgcaaataataacgccaaggttgccggcggatgggtcgggacgagtttcgtgaagtcggcgaaagtcgttaaagcgagcgatattataccgctggacgacaaagagttgagcgggctttaa

SEQ ID NO: 58616 - protein, 187 aa, Unknown
  Obtained from environmental sample
  DOMAIN (2)...(121): Methyl-accepting chemotaxis protein (MCP) signaling domain
  misc_feature (1)..(187): Xaa is any amino acid
MVAEEVRKLAIRSVEAAKNTTKMIEAAVKNADGGVKITEDVAKSLGQIVDRTQTVGYLIDEIAAASAEQARDIKMVNNAVAEMNDVTLRNADNSEESAKVSEELLDRAEELSDMVSEFKLSCGNGNRRPNAQSQLPSPQKYAALPNTAANNNAKVAGGWVGTSFVKSAKVVKASDIIPLDDKELSGL

SEQ ID NO: 58617 - DNA, 1236 bp, Unknown
  Obtained from environmental sample
  misc_feature (1)..(1236): n is a, c, g, or t
gtgggagttgagcccgctatggccgccgatgatacggataagttgaaaatctgccatttcgtaacatattacctgccggttacgcaaaattggatttacagccaattaatacataacgaagaatgtcgcgctacggtgttgtgtcaacggttggtgaatccaaagcagttcccattcgatgccgtgtatcccatttgtcaatcgcgaggtatgccctccgtgcctaataggctgattcataaaatatttgaacgctacccattagagccgcatttatcaacagtaaagcgggtaaatccggatatcctgcatggacactttttgcttgaatcatggcggaattaccgattggtcaagcgcatgaatgtcccattggtgacgacgtgttacggccaggacataacgagtttattgaaaaagccgttttgggcggcgcgtagcggaaaggtatttgatatcggggcggcgtttatagttgagggagagtatatgggggaaatgctcgcggctaaagggtgtccgaaggagaagatacgggttatcaagcttggggttgacgttgagagaatttgcggtatcgacggcgatgtcaatgacggtattaataataacgttcgtggtaatgatatcaacagtacagataataaagtccgtatattattcaccggtctaaaccgtgaaaaaaaaggagcgatatacgccgccaaagcatttgtcaaagcgctgtctgccggcactgataatcactccgataaaaacggcgagagtgttgatttggaactgcatctattaggcgacggcgtctatcgtaaagccgttgagaaaattctaatggatgccggcgtaaggcaaaaggctgtcttccacggcgtaaccccgtattctcgctacctagagatactcaaaggcgccgacattgttttggcccccagcgtccacgccgccgacggcgacacggagggcggcgcgccggtggtcgtcatagaggcgctatgcgccggagttcctgtcgttggcagcaatcactgcgatatcccgaacattgtctctaacggttccgccggcctcatatcggcggagcgtgacgtggaggcgttgacgagagatatccgtatcctatccgcagatcggcggctaagagcggcgatgggagaacgcgggaagcgctacgcacggggggagcacgatatcggcaaacaggtacggaagattacgatggttacaaggaggttctaa

SEQ ID NO: 58618 - protein, 411 aa, Unknown
  Obtained from environmental sample
  DOMAIN (203)...(390): Glycosyl transferases group 1
  misc_feature (1)..(411): Xaa is any amino acid
MGVEPAMAADDTDKLKICHFVTYYLPVTQNWIYSQLIHNEECRATVLCQRLVNPKQFPFDAVYPICQSRGMPSVPNRLIHKIFERYPLEPHLSTVKRVNPDILHGHFLLESWRNYRLVKRMNVPLVTTCYGQDITSLLKKPFWAARSGKVFDIGAAFIVEGEYMGEMLAAKGCPKEKIRVIKLGVDVERICGIDGDVNDGINNNVRGNDINSTDNKVRILFTGLNREKKGAIYAAKAFVKALSAGTDNHSDKNGESVDLELHLLGDGVYRKAVEKILMDAGVRQKAVFHGVTPYSRYLEILKGADIVLAPSVHAADGDTEGGAPVVVIEALCAGVPVVGSNHCDIPNIVSNGSAGLISAERDVEALTRDIRILSADRRLRAAMGERGKRYARGEHDIGKQVRKITMVTRRF

SEQ ID NO: 58619 - DNA, 879 bp, Unknown
  Obtained from environmental sample
  misc_feature (1)..(879): n is a, c, g, or t
ttgccgtccgggcccttgacaaaatcgaacgacgggattgttatacaacaacccgtgtattatccgtttgaatcgagcataaaaaaaaccggacggcagttacttgtaaatgaacttgtgtactcagacgggcgttacagcatagattttcaggattttgaaacaaaaataaaacaggcgaaaatgttcattctctgcaatcctcataaccctgtagggcgcgtttggaaacgcgatgaactggagcgcatgggtgaaatatgcctgcgccataacgtgactgtcatcgccgatgaaatccacgaggattttattttttccgggcacaagcacattgtattttctgctttaaatgaggattttgcgaatataaccgttacctgcacatcgccgtcaaaaacttttaatctcgctggattgctttgcgccaatatttttatttccaacaaagaactgcgtgaaaaatttaaaggggagtacgagagctgcggattaagccagcctggcgtaatgggacttatagcctgtaaagcggcgtatgaagacggggccgaatggctggatcaacttcttgactatcttgccggaaatatgttatttctcaaaacatatctttcaaagcacattcaaaagatcaagtttattgaaccggaaggaacgtatcttgcgtggctggattgcaatgaaatcggaacttccgcccaaaaactggatgaagcgcttacgcacaagggaaaattgtggcttagctccggcatttcattcgggaaaggcggcaatggcttcgagcgtataaatgccgcatgtccccgttccgttttacagaacgcgctggatcggttaaataatgtggattggaaaagcgcagagaggaaatag

SEQ ID NO: 58620 - protein, 292 aa, Unknown
  Obtained from environmental sample
  DOMAIN (2)...(281): Aminotransferase class I and II
  misc_feature (1)..(292): Xaa is any amino acid
MPSGPLTKSNDGIVIQQPVYYPFESSIKKTGRQLLVNELVYSDGRYSIDFQDFETKIKQAKMFILCNPHNPVGRVWKRDELERMGEICLRHNVTVIADEIHEDFIFSGHKHIVFSALNEDFANITVTCTSPSKTFNLAGLLCANIFISNKELREKFKGEYESCGLSQPGVMGLIACKAAYEDGAEWLDQLLDYLAGNMLFLKTYLSKHIQKIKFIEPEGTYLAWLDCNEIGTSAQKLDEALTHKGKLWLSSGISFGKGGNGFERINAACPRSVLQNALDRLNNVDWKSAERK

SEQ ID NO: 58621 - DNA, 1128 bp, Unknown
  Obtained from environmental sample
  misc_feature (1)..(1128): n is a, c, g, or t
atggacataagcacaatatgcgtacacggatgtgaaaaaaaattcgatacgaccggatcggtcgccgttcctatattcgcctccgctactttcgcccaccccggcgtcgggaaaagcaccggatttgattactcacgctcgctcaaccctaccactgtgcatctggaagacactgtctccgcgttggaagggggttgtcaggcaatagcgttttcttccggcatggcggcggtttcggcattaatggaattgttttcaccgggcgatcatatcatagcctccgatgacctttacggcggcacagtccgcctttttacgcatatatccgaaaagaacggtgtaaaagtttcttatgcgacggcggaaaacatcgaaaaagggataaccccgtccacaaaagccatatttatagaaacgccttccaatccaatgatgcacgtaacggacatcgcggctgtcgcggcaattacgaaaaaacataatatgctccttattgttgacaacacgttccttacgccgtattttcaaaaaccgttttctcttggagccgatattatcctgcacagcggaacaaaatatttaggcgggcacaacgacaccctgtcggggctgttagttgtaaagactgcgaccatcggggaaaaattaaggtttatcgcaaaaacaaccggcgcctgcctttcgccctttgacagttttttaattatccgcggaattaaaacgcttgcaatccgcatggaacaccagcaggagacagccctgaaaataacgcgctggcttttggagcaaaacgctgtaaaaaaagtgtattaccctggattgaaggaacaccccgattatgaaatttcatcccgtcagacaagcggttttggcgcaatgatctcttttaccgtgaacaacgggcaaatggcaacgcgcatacttgaaagcgtaaaagtaattaaatacgcggaaagtttaggcggcgttgaaagcctcattacctatcccatgttgcaaacccacgccgacctgccggaaagcgaacgtctggcgcggggcatagatgatcgtttattgcgcttgtcggtcgggctggaagcgcccgatgacttaatcgccgatcttaaacaggcattctggaactaa

SEQ ID NO: 58622 - protein, 375 aa, Unknown
  Obtained from environmental sample
  DOMAIN (4)...(374): Cys/Met metabolism PLP-dependent enzyme
  misc_feature (1)..(375): Xaa is any amino acid
MDISTICVHGCEKKFDTTGSVAVPIFASATFAHPGVGKSTGFDYSRSLNPTTVHLEDTVSALEGGCQAIAFSSGMAAVSALMELFSPGDHIIASDDLYGGTVRLFTHISEKNGVKVSYATAENIEKGITPSTKAIFIETPSNPMMHVTDIAAVAAITKKHNMLLIVDNTFLTPYFQKPFSLGADIILHSGTKYLGGHNDTLSGLLVVKTATIGEKLRFIAKTTGACLSPFDSFLIIRGIKTLAIRMEHQQETALKITRWLLEQNAVKKVYYPGLKEHPDYEISSRQTSGFGAMISFTVNNGQMATRILESVKVIKYAESLGGVESLITYPMLQTHADLPESERLARGIDDRLLRLSVGLEAPDDLIADLKQAFWN

SEQ ID NO: 58623 - DNA, 2007 bp, Unknown
  Obtained from environmental sample
  misc_feature (1)..(2007): n is a, c, g, or t
gtggcagccggagctgaaaacccggaagaacccgccaaagttcttgaggacgcggcggcgatgatacgatcctgtttttcccggatcaatctgtgcctggaaaaagaggtgttccccgccctggcgaaagacggcctggaactgaggaggcccccgtttacccccgacgagataagttaccttaaaccgctttttatgcgggaaattcttcccgtccttactcccctgcggttcggccctgctgataatgacaatgatattgtaccgccgcttattgcgggcagaattatttacggggcctttcttttgaaagctgccggttccgcaaattcaatgccgccggaaacggaacaaatagccattgtgggagttccgcccatcctagaacgaatcatcaggattgatcccggcggcggcccaaaacagcgctgggcattgctggacgatcttcttatgttatggggggacgcttttttttccggctatgaaataaaagaacggcttgtctttcgaatacaccgggacgctgatttcgcggttgatgaaaaacgggacgatgattttgtggaggccctggaagaaatgcttcaaaaacgggatcggtctccggcggtacggatggtctattcacactgggatcgcggttttttacaaaaaatcgtggaaaacagcgaggactcaaggatcattaccgccattaccaggcatattgaactttccggggaagatctttttcccattttcggccccctcaaccttgcttccctttacggtctgacaaagatacagggttttgaaaagctaaaacgaaaacttcccaaaccctgcgctcatcccgcttttccgccggattttcccgtttgggattccattagggcgggagatatccttcttaccctgccttaccagtccttcgatccggtgatccggtttttcgaagaggccgcagcggatccggaagttatttcgatcaaaacaacactgtacagaaccagcggcgattctcccattattcatgcccttgaacaggccgcgctaaacggaaaacatgtaaccgcagtggtggaactaaaagcaaggtttgacgaggaacggaacatttcctgggctcaccagcttgaactgtcgggggtgatcgtaatttacggccttgccgggcttaaggtacacgcaaaaatctgccaggtgatacggagggagaccaccgggctggtacagtaccttcatttttccacgggaaattacaacgacaagacagcaaggctctacagcgatctttgtctttttagctgccgggaagattacgcaaacgacgccgccatattctttaatacgctttccggctattccgcgcctctttccatgcgtactctggttacctccccgcttcaattaaaaaaacgccttattgacctgattgacagggaagcaaagcgtaccagccagggctcgccgggacggatcatggcaaagatgaacgccctggtagacgacgatgtggccgatgccctgtaccgggcatccggggctggtgtatcgatcaaccttaatatccggggaatctgcaccctagtgccggaaatcccggaactttcagaaaatatcagggttgtaagcattatcgatagttttctggaacattcccgaattttctattttaacaacggcggagcggaagaattttttatctccagcgccgactggatgccccgcaatctggaacggcgggtagaactctttgtccccgttttggatgaacgggtgcgggaagaactgcgtaccattctggaatcatactttaaggacaattcacaggcatggattcttggtggagacggaaactggaaacggcggaaacctgagacggacgaagagcctttcagagcccaggagtatttacagaaactggcggaaaaggcggcggcacaacacctgaaaacaccccaggattttattgtccggcgcagccttcaggcaggccaaccggcgggcccgttggggcattaa

SEQ ID NO: 58624 - protein, 668 aa, Unknown
  Obtained from environmental sample
  DOMAIN (1)...(639): Polyphosphate kinase
  misc_feature (1)..(668): Xaa is any amino acid
MAAGAENPEEPAKVLEDAAAMIRSCFSRINLCLEKEVFPALAKDGLELRRPPFTPDEISYLKPLFMREILPVLTPLRFGPADNDNDIVPPLIAGRIIYGAFLLKAAGSANSMPPETEQIAIVGVPPILERIIRIDPGGGPKQRWALLDDLLMLWGDAFFSGYEIKERLVFRIHRDADFAVDEKRDDDFVEALEEMLQKRDRSPAVRMVYSHWDRGFLQKIVENSEDSRIITAITRHIELSGEDLFPIFGPLNLASLYGLTKIQGFEKLKRKLPKPCAHPAFPPDFPVWDSIRAGDILLTLPYQSFDPVIRFFEEAAADPEVISIKTTLYRTSGDSPIIHALEQAALNGKHVTAVVELKARFDEERNISWAHQLELSGVIVIYGLAGLKVHAKICQVIRRETTGLVQYLHFSTGNYNDKTARLYSDLCLFSCREDYANDAAIFFNTLSGYSAPLSMRTLVTSPLQLKKRLIDLIDREAKRTSQGSPGRIMAKMNALVDDDVADALYRASGAGVSINLNIRGICTLVPEIPELSENIRVVSIIDSFLEHSRIFYFNNGGAEEFFISSADWMPRNLERRVELFVPVLDERVREELRTILESYFKDNSQAWILGGDGNWKRRKPETDEEPFRAQEYLQKLAEKAAAQHLKTPQDFIVRRSLQAGQPAGPLGH

SEQ ID NO: 58625 - DNA, 762 bp, Unknown
  Obtained from environmental sample
  misc_feature (1)..(762): n is a, c, g, or t
ttgaacacggtagcttccaaaggccaattacagacgcataacctgaaaatacagaactcggaattgttcggtacgatggccaatctgttgaaaaacgagtcctggcgtacgcccactctgaacaatattaatataaattacgaaatcaaagacggacaattaacgattgaaccaatacggatgaacatcgcgcaggccagtctggaactcacaggcagccagggccttgacatgtccttgaattacaaggtaaacacgacagtgcctgtttcggcaatcggttcggccgcgtctgatattttgagcaaaatacccggaggctcaaggctccgggaaatcaaggtgacgggattgataacaggcacggttaaaaagccccttgtaactcttggcgtcgccgatatggtggataatgttgtcgaaaccgttaaagaaacagtcaaagaacaagcgcaagcggtcaaagaacaggcgaaagaagaagttgataaacagataagcgccatcatggccgatgccgaaaaacaggctcaaaacatccgtgataacgccaaattagccgccgacaaaattcgcgctgaagccgacgccaatgcccaaaaactggaagacgcggcgaaatcaccgcttgaaaaagcagcggctcaagtggcggccaagaaactccgcgacgaaggcaatgccgccgccgcaaaattagagcaggaagccgaaaagcaagtaacggccattatggacgccgccagacaaaataaaaattaa

SEQ ID NO: 58626 - protein, 253 aa, Unknown
  Obtained from environmental sample
  misc_feature (1)..(253): Xaa is any amino acid
MNTVASKGQLQTHNLKIQNSELFGTMANLLKNESWRTPTLNNININYEIKDGQLTIEPIRMNIAQASLELTGSQGLDMSLNYKVNTTVPVSAIGSAASDILSKIPGGSRLREIKVTGLITGTVKKPLVTLGVADMVDNVVETVKETVKEQAQAVKEQAKEEVDKQISAIMADAEKQAQNIRDNAKLAADKIRAEADANAQKLEDAAKSPLEKAAAQVAAKKLRDEGNAAAAKLEQEAEKQVTAIMDAARQNKN

SEQ ID NO: 58627 - DNA, 2334 bp, Unknown
  Obtained from environmental sample
  misc_feature (1)..(2334): n is a, c, g, or t
gtgggaaccgcggcaaagattgttaagaaaatcaaccttcccgacggcggggtgaacatctttatctccacgctaaagcgtttcaaggttaaaaaaaccctccatgccagcaaccccatagtggcggcggtggagtacctgaatgaggaagaagacgacaccagcgaggtaaaggcccttacaagggcgctcatctccgaaatgaagcagatctccgaaaacaaccccctgttttccgaggaaatgcgcctcaacatgataaacatagatcatccgggcaagatcgccgattttatcgccagcattctgaatatcgacaaggcggagatgcagaagattctggagatcctcaacgtgcgaaagcgcatggaacaggtgctggtgttcatcaaaaaggaacaggagcttctgcggattcagaaaaagatacagaaagagataaacgaaaaaatcgagaaatcgcaaagggattatttccttaaagaggagctgaaggcgataaagggcgagctgggaatgaccaccgacgccaagagctctgactaccagcgctttaaggacattatcgaaggcttcaaatttgaaggcgaggtaaaggaaaccgtagagcaggagcttgaaaaattcaacctgatggagccgaactcggcggaatttgttgttacgcgcaattaccttgaccttatcgtcagccttccctggggcgagccgggcccggagaatttcagcatgaaaaacgccgaggcgattctggaagcggatcattacggccttgaagacgtaaangaccgcatcatggaatacctcgccgtgagaaagctgcggagctataacgtaaaaagcgttcctgtccagcttgtggcccccccgccctcggctgaaacggaacagggaatggggaacggggaacagggaacggaacagggaacagggaatagggaacagggaacagggaacagggaacctgtagcggacaaaattccgctcagagattcagttgattccccggcaggttccataatctgccttgtgggaccgccgggcgtggggaaaacgtcggtcggcagatccatagcaagggccctgggcaagcagttcttccgtttttcagtgggcgggatgagggacgaggccgagataaaagggcaccgccgtacctatataggcgcgatgccgggcaagatcatccaggggcttaaaatcgtcaaaacaaaggcccccgtatttatgattgacgagattgacaagatgggggaaagttaccagggcgatcccgcaagcgccctccttgaagtgctggatccagagcagaatgtcgagttcagggatcattatctggatatgccttttgacatttcccatgttttttttattgtcacggcgaacaccctggacacaatcccccctccgcttttggaccgcatggagataatacagcttccaggctatatcgacactgaaaagctggagatcgcccgcaggtaccttgtccccaaaagccttgagaaaaacggcctgaaaaagaatcaggttaagtataccaaggacagccttttatatatcgccaactcttacgcccgcgaagccggcgtcaggaattttgaaaaaaaccttgacaagattcaccgcaagctggcaaagcagatagttgaggagaaggagaaagggtccgcggacggcggtgagaacgatgcaaagcccatcatgttcccgatagataaaaagctgattgaaaaacatttgggcaagccgatttttccggaaggcgacataaaaaaggcggacaggccgggaatgtcagtcgggctcgcctggacaagcatgggcggcgacaccctggtaattgaagcggcctcggttccgggcaaggaagggctgaccctcaccggcaaaatgggcgacactatgaaggaaagcgccgctatcgccatgaccgtggcgcggaagatggccatagaacgttaccatgtcgcgcaggactggtttgatttaaaccatatacatctgcacattcccgaaggcgcgacgccgaaagacggcccctctgccggaataacaatggccacagccctgctttcgcttatgcgggagaaggtagtcaccgagcggctggtaatgacgggcgaactgtccctgacaggacaggtgcttcccatcggcggcctcaaggaaaaaacagtcgccgcgaggcggaacaaagcccgccacatcattatcccgcgccagaacgagcgcgatcttgacgagattcccgatcatgtgaagaaaggcatcagcttccatcctgtggaacgctttgaggaagtgctagcgttggcgctgccggacaactaa

SEQ ID NO: 58628 - protein, 777 aa, Unknown
  Obtained from environmental sample
  DOMAIN (341)...(477): ATPase family associated with various cellular activities (AAA)
  misc_feature (1)..(777): Xaa is any amino acid
MGTAAKIVKKINLPDGGVNIFISTLKRFKVKKTLHASNPIVAAVEYLNEEEDDTSEVKALTRALISEMKQISENNPLFSEEMRLNMINIDHPGKIADFIASILNIDKAEMQKILEILNVRKRMEQVLVFIKKEQELLRIQKKIQKEINEKIEKSQRDYFLKEELKAIKGELGMTTDAKSSDYQRFKDIIEGFKFEGEVKETVEQELEKFNLMEPNSAEFVVTRNYLDLIVSLPWGEPGPENFSMKNAEAILEADHYGLEDVXDRIMEYLAVRKLRSYNVKSVPVQLVAPPPSAETEQGMGNGEQGTEQGTGNREQGTGNREPVADKIPLRDSVDSPAGSIICLVGPPGVGKTSVGRSIARALGKQFFRFSVGGMRDEAEIKGHRRTYIGAMPGKIIQGLKIVKTKAPVFMIDEIDKMGESYQGDPASALLEVLDPEQNVEFRDHYLDMPFDISHVFFIVTANTLDTIPPPLLDRMEIIQLPGYIDTEKLEIARRYLVPKSLEKNGLKKNQVKYTKDSLLYIANSYAREAGVRNFEKNLDKIHRKLAKQIVEEKEKGSADGGENDAKPIMFPIDKKLIEKHLGKPIFPEGDIKKADRPGMSVGLAWTSMGGDTLVIEAASVPGKEGLTLTGKMGDTMKESAAIAMTVARKMAIERYHVAQDWFDLNHIHLHIPEGATPKDGPSAGITMATALLSLMREKVVTERLVMTGELSLTGQVLPIGGLKEKTVAARRNKARHIIIPRQNERDLDEIPDHVKKGISFHPVERFEEVLALALPDN

SEQ ID NO: 58629 - DNA, 693 bp, Unknown
  Obtained from environmental sample
  misc_feature (1)..(693): n is a, c, g, or t
atgatccgcttccagaatcgcctcggcgtttttcatgctgaaattctccgggcccggctcgccccagggaaggctgacgataaggtcaaggtaattgcgcgtaacaacaaattccgccgagttcggctccatcaggttgaatttttcaagctcctgctctacggtttcctttacctcgccttcaaatttgaagccttcgataatgtccttaaagcgctggtagtcagagctcttggcgtcggtggtcattcccagctcgccctttatcgccttcagctcctctttaaggaaataatccctttgcgatttctcgattttttcgtttatctctttctgtatctttttctgaatccgcagaagctcctgttcctttttgatgaacaccagcacctgttccatgcgctttcgcacgttgaggatctccagaatcttctgcatctccgccttgtcgatattcagaatgctggcgataaaatcggcgatcttgcccggatgatctatgtttatcatgttgaggcgcatttcctcggaaaacagggggttgttttcggagatctgcttcatttcggagatgagcgcccttgtaagggcctttacctcgctggtgtcgtcttcttcctcattcaggtactccaccgccgccactatggggttgctggcatggagggtttttttaaccttgaaacgctttag

SEQ ID NO: 58630 - protein, 230 aa, Unknown
  Obtained from environmental sample
  misc_feature (1)..(230): Xaa is any amino acid
MIRFQNRLGVFHAEILRARLAPGKADDKVKVIARNNKFRRVRLHQVEFFKLLLYGFLYLAFKFEAFDNVLKALVVRALGVGGHSQLALYRLQLLFKEIIPLRFLDFFVYLFLYLFLNPQKLLFLFDEHQHLFHALSHVEDLQNLLHLRLVDIQNAGDKIGDLARMIYVYHVEAHFLGKQGVVFGDLLHFGDERPCKGLYLAGVVFFLIQVLHRRHYGVAGMEGFFNLETL

SEQ ID NO: 58631 - DNA, 555 bp, Unknown
  Obtained from environmental sample
  misc_feature (1)..(555): n is a, c, g, or t
gtgccggtaatttgtgtaagcagcaagacaggttttgggattgaagaattatcaccattccttgaatctgctaaaacagtggtcttcctgggatcatccggtgttgggaagtcttcccttttaaaccggctggccggcgaagaaataatggaagtaaaatccatacgcgaggatgacagcaaaggccgccataccactacgttccggcagctcttccggcttgaatcgggagccctcgtaattgatacccccggaatgcgggaaatcggactctgggattcaaaagaaggaataagccttgcctttgcggaagtggaagaactatttacacagtgccggttctccgattgcagccaccagaccgaacctggctgcgcagttctggcggcgctggaagacggcaggctttcgcctgagcaatggaagaattacaaagcccaaagaagggagaacgcttttgtcatgaaccattcagcctacttgaagcaaaagcaggaattccataagtccatagcaagaaacaataaagcaagacagaagaggacggagatataa

SEQ ID NO: 58632 - protein, 184 aa, Unknown
  Obtained from environmental sample
  DOMAIN (25)...(113): GTPase of unknown function
  misc_feature (1)..(184): Xaa is any amino acid
MPVICVSSKTGFGIEELSPFLESAKTVVFLGSSGVGKSSLLNRLAGEEIMEVKSIREDDSKGRHTTTFRQLFRLESGALVIDTPGMREIGLWDSKEGISLAFAEVEELFTQCRFSDCSHQTEPGCAVLAALEDGRLSPEQWKNYKAQRRENAFVMNHSAYLKQKQEFHKSIARNNKARQKRTEI

SEQ ID NO: 58633 - DNA, 459 bp, Unknown
  Obtained from environmental sample
  misc_feature (1)..(459): n is a, c, g, or t
atggctgacgttaatcatgtagttttaatcgggcggcttacaagagacgctgaattaaaatacaccgcaggaggtcaggcggtttgcaaattttccatcgctgtaaacagaagaaagaaaaacggcgatcaatgggaagacgaagcgaacttctttgacattgtactgtggggtaagcagggcgaatctttgcaatcataccttgtaaaaggaaaaatgataggcgtagacggagaacttcgtcaggatcgctggcagcaggacggacagaaccgttccaaagttgagataatagcgaattatattcagcttttgggcggcggaggcggaggcggctcgggcggaggagaccggcagaattacaataatccgccgagtaacaattcgcaggaatcgcaaagttacgcttcttcatcatcaggtaaagacgacggttttaccgacgatatacctttttaa

SEQ ID NO: 58634 - protein, 152 aa, Unknown
  Obtained from environmental sample
  DOMAIN (4)...(105): Single-strand binding protein family
  misc_feature (1)..(152): Xaa is any amino acid
MADVNHVVLIGRLTRDAELKYTAGGQAVCKFSIAVNRRKKNGDQWEDEANFFDIVLWGKQGESLQSYLVKGKMIGVDGELRQDRWQQDGQNRSKVEIIANYIQLLGGGGGGGSGGGDRQNYNNPPSNNSQESQSYASSSSGKDDGFTDDIPF

SEQ ID NO: 58635 - DNA, 327 bp, Unknown
  Obtained from environmental sample
  misc_feature (1)..(327): n is a, c, g, or t
atgtcagacgacaaatattttgataacgaaccccattcccgccacggcagggaaatggatatgcagatggacgaccgagacggcgatgatcgcggccgaggcggaaaagggcagaaagtttttttcaagaaaaaagtttgcaaattctgcgctcaaaaaatgaagatagactacaaggaagccgatacgcttcgcaggtttattacggaaagaggaaaaattcttccgcgccgtattacgggaacttgcgctaaacatcagcgcgcccttgcccttgctatcaaacaggcaagaagcatcgcccttcttccgtatgtagccgaataa

SEQ ID NO: 58636 - protein, 108 aa, Unknown
  Obtained from environmental sample
  DOMAIN (50)...(103): Ribosomal protein S18
  misc_feature (1)..(108): Xaa is any amino acid
MSDDKYFDNEPHSRHGREMDMQMDDRDGDDRGRGGKGQKVFFKKKVCKFCAQKMKIDYKEADTLRRFITERGKILPRRITGTCAKHQRALALAIKQARSIALLPYVAE

SEQ ID NO: 58637 - DNA, 1032 bp, Unknown
  Obtained from environmental sample
  misc_feature (1)..(1032): n is a, c, g, or t
atggaacgcaccgataaatacataacccccctgttacaacaggcgcgcgacagtatgggcggcggattaaaactcatggtaaccccgtggtcgccgcctggatggatgaaagataacggcgaaatgaaccacggcggaaaattactgaaaaaatattatcccctttgggccggttattttacgtgttttattgatgaactaaaaaaacggggcattgatacctgggttgtttccgtgcaaaacgaaccggcggcagtacaaacatgggattcctgtatatggacggcggaggaagaaggcgaatttgccgttaatcatcttgggccggcgctggaaaagaggcctgggaaccggataaggattcttgtttgggatcataaccgcgatattttatgggatcggttctcccaatccatgtctgttgccggagccgacaagtacattgacggagcggcgtttcactggtattcgggcgatcagtacgaaaatgtcgcgaaagtggcaaatgcgtatccgggcaagacgcttctctttaccgaaggatccgttgaagggggatcgcgtccgggcgcatggttttccggcgagcgctacgctcataatattatcaatgacctgaataacggctgcacaggctggattgactggaatatcgcccttgacatgcagggcgggccgaaccacgtgggaaatctctgtgacgcgccgattcttgtcgatacagattcaggccagatacattatcagtcttcttattactacatcgggcatttcagccgctttataaaacctcaggcgcggcgtgtagatattgccttgaactcttacatgactcctgccactgttgacgggcgtatgggaaacatgatggaatgctgcgctttcaagaataacgataattcattggttcttgttatcatgaaccgtactgaagctgatatggtgtatgaggtttgttttgctgatgaaagtgaaactacagtgttaaaatgtccacccagagggattcaaacagtgatcttaaacagttag

SEQ ID NO: 58638 - protein, 343 aa, Unknown
  Obtained from environmental sample
  DOMAIN (1)...(342): O-Glycosyl hydrolase family 30
  misc_feature (1)..(343): Xaa is any amino acid
MERTDKYITPLLQQARDSMGGGLKLMVTPWSPPGWMKDNGEMNHGGKLLKKYYPLWAGYFTCFIDELKKRGIDTWVVSVQNEPAAVQTWDSCIWTAEEEGEFAVNHLGPALEKRPGNRIRILVWDHNRDILWDRFSQSMSVAGADKYIDGAAFHWYSGDQYENVAKVANAYPGKTLLFTEGSVEGGSRPGAWFSGERYAHNIINDLNNGCTGWIDWNIALDMQGGPNHVGNLCDAPILVDTDSGQIHYQSSYYYIGHFSRFIKPQARRVDIALNSYMTPATVDGRMGNMMECCAFKNNDNSLVLVIMNRTEADMVYEVCFADESETTVLKCPPRGIQTVILNS

SEQ ID NO: 58639 - DNA, 1182 bp, Unknown
  Obtained from environmental sample
  misc_feature (1)..(1182): n is a, c, g, or t
ttgttgcttatggaaaaaaatgagatatgggaactcattatcattaatgacagcgaaactgttccaaagtaccggcaacttcaatctgagatagaacggcttattgccgaaaatattttgcagatcaatatgcggctgccgggtgaaaatgaatttttcagccgtcttggtctttctcggaccacaatcagaaaagccctggaagctcttgaaaaggcgcatcttatatatcgtgtgcagggacaaggaacctttatcggcagcaaacccccgtcatggcaagaaaaagcaagtaacgctaaatccggtaaaattaaaaagcttattggggttgtattaccgaacatcaccaatgaaatttatccttttattgtcagcggtatagaacagactatttattcgagggatatctgcgtatttaccgccaattcaggcggaagccacgacagggaattgcgtaacataaatgaaatgctgaacaattcaattgacggcttgatccttgaaccgctctattcaggctttgatcaaaaggaaacaaggctggtttcattactggataaactggccatccccgtggtgctgataaataatgatattccttcaattaaatgttcaaaggtgatgcaggatgacgagggcgggggccggctcattacggagcatcttttggaacatggccacaggcgtatcgcgtttatttacaatgacaagataagcacgggttttgaaaggcgaaaaggataccgcgccgccctggccgcggcgggtattgaacatgacagcaggcttgagattgcgtataacgatgaggaaggaatagtgtatcccggatatgttattaccaaacaactgcttgaaaataccgggctgggagttacggcaattttttattataacgatgaccttgcctttcaggggcttgtggcaatacaaagtttaaatttaaaagtacccaatgacatttccatcgcgggttacgacgacgtcccgcgttccagcctggaaggaatatggcttactaccgtttcccatcctaaatcgctgatagggaactgggcggcgtcattgcttcttgaacaatttgatctgatcaacaaacctatttgccggaagatagtagttcattctcccttaataagccgcggttcggcagcttctccccctttcaggcaggactga

SEQ ID NO: 58640 - protein, 393 aa, Unknown
  Obtained from environmental sample
  DOMAIN (106)...(378): Periplasmic binding proteins and sugar binding domain of the LacI family
  misc_feature (1)..(393): Xaa is any amino acid
MLLMEKNEIWELIIINDSETVPKYRQLQSEIERLIAENILQINMRLPGENEFFSRLGLSRTTIRKALEALEKAHLIYRVQGQGTFIGSKPPSWQEKASNAKSGKIKKLIGVVLPNITNEIYPFIVSGIEQTIYSRDICVFTANSGGSHDRELRNINEMLNNSIDGLILEPLYSGFDQKETRLVSLLDKLAIPVVLINNDIPSIKCSKVMQDDEGGGRLITEHLLEHGHRRIAFIYNDKISTGFERRKGYRAALAAAGIEHDSRLEIAYNDEEGIVYPGYVITKQLLENTGLGVTAIFYYNDDLAFQGLVAIQSLNLKVPNDISIAGYDDVPRSSLEGIWLTTVSHPKSLIGNWAASLLLEQFDLINKPICRKIVVHSPLISRGSAASPPFRQD

SEQ ID NO: 58641 - DNA, 492 bp, Unknown
  Obtained from environmental sample
  misc_feature (1)..(492): n is a, c, g, or t
gtgccgttaggacttgggacatggcctgccgtctggatgctgcctaccgactggaaatacggaggatggcctgccagcggcgaaatagacattatggaacatgtgggatataacccggacgcgcttgttatgtccgtccatacggagtcatacaaccatgtaaaacaaacgcaaaaaagtaaaagtataaaactttccggaatgacggacaatttccatgtatatgccgtggaatggctgccggataaaataaagtttttttacgacgggaaattgcaatttacatacaatcccggcgcgttaaaaaacaaccctacgtataaggaatggccttttgacaggcgtttccacctgttgataaatcttgcgttcggcgggaactggggcggcgcgcgcggcgtggattatgacattctcccggtaaaatatgaaattgattatgtgcgggtataccaaagccctgaaatcaccgcgttgattattaaaccttga

SEQ ID NO: 58642 - protein, 163 aa, Unknown
  Obtained from environmental sample
  DOMAIN (1)...(149): Glycosyl hydrolases family 16
  misc_feature (1)..(163): Xaa is any amino acid
MPLGLGTWPAVWMLPTDWKYGGWPASGEIDIMEHVGYNPDALVMSVHTESYNHVKQTQKSKSIKLSGMTDNFHVYAVEWLPDKIKFFYDGKLQFTYNPGALKNNPTYKEWPFDRRFHLLINLAFGGNWGGARGVDYDILPVKYEIDYVRVYQSPEITALIIKP

SEQ ID NO: 58643 - DNA, 1875 bp, Unknown
  Obtained from environmental sample
  misc_feature (1)..(1875): n is a, c, g, or t
atgggcaatcgcataaacacagtcatgcaggccgcctattttaaaatttccggcatattgtccgaagaagaagcggtaagacgcatgaaggaacatatcgaacattcctacggcaagaagggcaaagacgtagtagaaaagaactacaaaaccgtagacgcgtcattgaccgccgttgaggaagtaaaatatccttccaagaccgaaggggacatccacatgaaaaaaccctttgccaccgcgaaggatccatggatcaaggaagttctcggaaccatgtcggtacaggaaggcgacaacctgcctgtcagcaaacttccggaagacggaacattccctacagccactacccagtacgaaaaacgctctgttgccgagcgcgttcccctttggaaccccgaagtctgtatacaatgcggtaactgtacggtcgtatgcccgcatgcctgtatgcgctttaaaaatcttacagacgatcaagttgcgaaagcgccgaagggatttaaaaccgccgagattaaaccaaagccggtagcgggccagaaagcggcgcttgttatcgcgtgcgaagattgttacagctgcggcgtttgtttcaatatctgcccgatgtccaataaaggtcaggagaaaccggcgttgtcatggaaatcttacgcggacgatcatgaattacacgcggaacaggtagctgtttgggattacttcctttcattgccggaaactccggcaggagatcttatatcgccgaaagcgcttgcctacaagcgccccttgtttgaattctcgggcgcgtgcggcggctgcggcgaaactccctacgttaaacttatgtcccagttgttcggcgaccgcgcgatcatcgccaatgccacgggttgttcctccatttacggcggaaacctaccgaccacgccttactgcaaacgcgcggacggacgcgggccggcatggtcgaacagcttgttcgaggacgcggcagaatttgcgatgggcttccgccttacaagcgacaagctcgccgttcacgcccgcgaaatcgccgagaaggcaaagggcgaaggcatcgcggcaggaatcatagacaagattctttccaacaatcaggccgacgacgcggcgattgacgaacttcgcaaaaatattgacgcgcttaaagcagagctaaaaaacaactccaagccaacagcgaaacttttggtttcgttagccgactattttgtaaaacgttcagtgtgggcgttcggcggcgacggctgggcttacgacataggcttcggcggactggatcatgttatcgcttccggcaagaacgttaatcttttgtgcatggataccgaagtttattccaacaccggcggacagatgtccaaatcgactcctgtcggcgcaatcgcgaaatttgccaacgcgggaaaggatattacaaagaaagaccttggcgcgatagcgatgagctacggttatgtgtatgtcgcgaaagtttcgttaggcgcaaatatgccgcaggtaatcaaagcgttccgcgaagcggaatcttacgacggcccgtcgcttataatcgcgtactcgcactgtatcaaccacggaatcgacatgagcaaggggcttgagcagggcaaggcggttgtatcaagcggcctatggccattgtaccgctacgatccgcggcttaaggatcagggaaagaatcccttccagcttgattcgaaagatcctacgacaagcatagaagactttatgtacaaagaggtacgtttcaagagcttaaaagccgctaaccccggccgcgcagacgcattgcttgcaaaagcgaaagcccatgcggaaagagtttggaaagagtacaaatatttggcggaacgtccgttctaa

SEQ ID NO: 58644 - protein, 624 aa, Unknown
  Obtained from environmental sample
  DOMAIN (129)...(152): 4Fe-4S binding domain
  misc_feature (1)..(624): Xaa is any amino acid
MGNRINTVMQAAYFKISGILSEEEAVRRMKEHIEHSYGKKGKDVVEKNYKTVDASLTAVEEVKYPSKTEGDIHMKKPFATAKDPWIKEVLGTMSVQEGDNLPVSKLPEDGTFPTATTQYEKRSVAERVPLWNPEVCIQCGNCTVVCPHACMRFKNLTDDQVAKAPKGFKTAEIKPKPVAGQKAALVIACEDCYSCGVCFNICPMSNKGQEKPALSWKSYADDHELHAEQVAVWDYFLSLPETPAGDLISPKALAYKRPLFEFSGACGGCGETPYVKLMSQLFGDRAIIANATGCSSIYGGNLPTTPYCKRADGRGPAWSNSLFEDAAEFAMGFRLTSDKLAVHAREIAEKAKGEGIAAGIIDKILSNNQADDAAIDELRKNIDALKAELKNNSKPTAKLLVSLADYFVKRSVWAFGGDGWAYDIGFGGLDHVIASGKNVNLLCMDTEVYSNTGGQMSKSTPVGAIAKFANAGKDITKKDLGAIAMSYGYVYVAKVSLGANMPQVIKAFREAESYDGPSLIIAYSHCINHGIDMSKGLEQGKAVVSSGLWPLYRYDPRLKDQGKNPFQLDSKDPTTSIEDFMYKEVRFKSLKAANPGRADALLAKAKAHAERVWKEYKYLAERPF

SEQ ID NO: 58645 - DNA, 501 bp, Unknown
  Obtained from environmental sample
  misc_feature (1)..(501): n is a, c, g, or t
atgaagaccatatttgtcgttgacgacagtgatactaacctgacgatggcagagtcggcattggaagaccaataccgcgttatgacaatgccgtcagcggcaagtatgttctcgtttttggaaaaagttattcccgatttaatccttctggatatagaaatgccggaaatggacggctttgaagcgcttgcgaaacttaagaaaaaagaaaaatacagcgaaattcccattatgtttttaacaggccgcaccgatgcggatgtggaagcgcgcggttttgaaatgggcgccgtagattttgttacaaagccgttctccgcgccggtactgttaaaccgcataaagacgcaccttgatattgatcaggttatccgcgaacgaacagcgcagttacaccggcttcaaaacaatatagtgtctgttctggcggacatggtggaaaatcgcgacaaggggacaggcggccatattgagcgcacgtcaattacatcaaaattctga

SEQ ID NO: 58646 - protein, 166 aa, Unknown
  Obtained from environmental sample
  DOMAIN (2)...(115): Response regulator receiver domain
  misc_feature (1)..(166): Xaa is any amino acid
MKTIFVVDDSDTNLTMAESALEDQYRVMTMPSAASMFSFLEKVIPDLILLDIEMPEMDGFEALAKLKKKEKYSEIPIMFLTGRTDADVEARGFEMGAVDFVTKPFSAPVLLNRIKTHLDIDQVIRERTAQLHRLQNNIVSVLADMVENRDKGTGGHIERTSITSKF

SEQ ID NO: 58647 - DNA, 510 bp, Unknown
  Obtained from environmental sample
  misc_feature (1)..(510): n is a, c, g, or t
atgaaagagcgcggagtttatcttgatgaaatccgcaattgggacgtggataaaatagtttcttccgcgcgtatgcatgacctcgggaaaatttctattacagatattattgtgaacaagccggataaacttaccgatgatgaatacgagttaattaaaacgcacaccatcgaaggcgagatgataattgacgagataatctccaaaacgggagaagatgaattcctaaacagcgcaaggttgtttgccggctgtcatcatgaacgttgggacggcaaaggttatcccaggggcttaaaaggagagaaaatcccactgcaggggcgcatcatggctattgtggacgtgtacgacgcccttgtttccgaacggccgtataaaaaagcgttttccgacgaggaggcggtacagataatattggataacgccggcgttcattatgatcctaaaattgtcgaggtttttaattcggtaaaagatcagtttaaaactgtaagggctaaattataa

SEQ ID NO: 58648 - protein, 169 aa, Unknown
  Obtained from environmental sample
  DOMAIN (7)...(120): HD domain
  misc_feature (1)..(169): Xaa is any amino acid
MKERGVYLDEIRNWDVDKIVSSARMHDLGKISITDIIVNKPDKLTDDEYELIKTHTIEGEMIIDEIISKTGEDEFLNSARLFAGCHHERWDGKGYPRGLKGEKIPLQGRIMAIVDVYDALVSERPYKKAFSDEEAVQIILDNAGVHYDPKIVEVFNSVKDQFKTVRAKL

SEQ ID NO: 58649 - DNA, 1509 bp, Unknown
  Obtained from environmental sample
  misc_feature (1)..(1509): n is a, c, g, or t
atgaaaggtcgtacaatgtacgtaatacctttctccatggggccggtcggttccaatatcgctaaaatcggtgttgaaattaccgacagcccttatgtcgtgtttaatatgcacataatgacaagggttggaaaaaaggtattggcagttcttggaaaagacggatttttcgtgccatgtctccattcgatagccaagccgctgaaacccggcgaaaaagatacaagctggccgtgcgaaccggatgtcaataaaaaatacatcagtcattttcccgacacttacgaaatttggtcttacggttcaggttacggcggaaacgcgctcctcggcaaaaagtgcctcgcgctccgtatcgcgtccgttctcgcgcgggacgagggttggctcgcggaacacatgctaattttaaaacttaccaatcccaaaggaaaagttaagtatgtcacaggcgctcttccgtcggcgtgcggaaagacaaacctcgccatgttgattcccactcttcccggctggaaagtggaaacaatcggcgatgatatcgcatggatgaaattcggcaaggacggcaaactttacgctattaaccccgaggccggattcttcggcgttgctcccggaacaagcaatcagtcaaacaagagcgccatggattcaatcaggaagaatacgatctttacaaacaccggccttaccgaagacggcgacatctggtgggaacaaattggttatccaccttcaggcgaaaaaatcacaaactggaaaggcgaanaagtacctgccccncaagccgataaatcccccaaaggcgaagaaatcgcccacccgaacgcccgtttcaccgcgcccgcaagacaatgccccgtaatcgcttccgagtgggaagacccgaaaggcgtgccaatcagcgcgttccttttcggcggacgccgcgcgtcaactattcctctcgtaaaccaaagcaaaaactgggtacacggcgttttcatgggttcgatcaccggttctgaaatcaccgccgcggctctcgatcttaaagaaggttccatacgccgcgacccgtttgccatgcttcccttctgcggctaccacatgggcgattatttcagccactggctcaaactcggcaagaaagcgcaggacgaaggacacggcgacaaactgccgaaaattttctttaccaactggttccgcaaagacaaagacggtcatttcatgtggcccggttacggcgaaaactcccgcgtactcgcgtgggtattcgaccgctgcgacggtaaggacaactatgttgaaaccgctatcggcttcctgcccaaaccaggagcgattgaaccgcccgcaggcgtaagcgcggacacgatgacgcagttaactaccgcggacaaagacggctggaagaaagaaatttccgacgtgcgcgagaaccattacgcgaaattcggggataagatgcctaaagagttgtatgatcatttgtcggagatggagaagaatctcggcgcataa

SEQ ID NO: 58650 - protein, 502 aa, Unknown
  Obtained from environmental sample
  DOMAIN (1)...(500): Phosphoenolpyruvate carboxykinase
  misc_feature (1)..(502): Xaa is any amino acid
MKGRTMYVIPFSMGPVGSNIAKIGVEITDSPYVVFNMHIMTRVGKKVLAVLGKDGFFVPCLHSIAKPLKPGEKDTSWPCEPDVNKKYISHFPDTYEIWSYGSGYGGNALLGKKCLALRIASVLARDEGWLAEHMLILKLTNPKGKVKYVTGALPSACGKTNLAMLIPTLPGWKVETIGDDIAWMKFGKDGKLYAINPEAGFFGVAPGTSNQSNKSAMDSIRKNTIFTNTGLTEDGDIWWEQIGYPPSGEKITNWKGEXVPAPQADKSPKGEEIAHPNARFTAPARQCPVIASEWEDPKGVPISAFLFGGRRASTIPLVNQSKNWVHGVFMGSITGSEITAAALDLKEGSIRRDPFAMLPFCGYHMGDYFSHWLKLGKKAQDEGHGDKLPKIFFTNWFRKDKDGHFMWPGYGENSRVLAWVFDRCDGKDNYVETAIGFLPKPGAIEPPAGVSADTMTQLTTADKDGWKKEISDVRENHYAKFGDKMPKELYDHLSEMEKNLGA

SEQ ID NO: 58651 - DNA, 915 bp, Unknown
  Obtained from environmental sample
  misc_feature (1)..(915): n is a, c, g, or t
atgcgggacatacaggattttgattcgataatgattcggctggcttccccggagatgatcaggaactggtcttacggagaagtaaagaaaccggaaaccataaactaccggacgcttcgtccggaaaaagacggcctcttctgcgaaaggattttcgggacaacaaaggaatgggaatgttattgcggtaaattcaagtcgatacgctacaaaggggttacctgcgaccgttgcggcgtcgaggttacccattttaaggtgcgccgcgaacgcatgggccacatagaactggcggctccggtttcgcatatttggtattaccgctcggttcccagccgcatgggactgcttcttgatatgacaatgacggccctccgttccgtgctgtactacgaaaaatatgttgtcattgatcctgctgacacggaactgaaaaaagggcaaatgctctccgaggacgaatactttgaggagcaggaaaggtacggcggcggttttacagcgggcatgggcgccgaggcgatccgcaccctgcttgaaaacgttgacttggacaagctggccgcggaactgcgggaaaagatgatagaaaaaggcgcaaagagcgacaagcgcctccttaagcgcattgagattgtcgagaatttccgcaattcccagaacaagcccgaatggatgatacttgacgtgatcccggtgataccgcccgaactgcgccccatggttcagcttgacggcgggcgttttgccaccagcgatctaaacgatttataccgccgcgtgatcaaccggaacaaccgcctgaaaaggctgcaaacgcttaacgcccccgacatcattatacgcaacgaaaagaggatgctccaggaagcggtggacgcgctctttgacaattccaagaaaaagaaaatgtaa

SEQ ID NO: 58652 - protein, 304 aa, Unknown
  Obtained from environmental sample
  DOMAIN (4)...(303): RNA polymerase Rpb1, domain 1
  misc_feature (1)..(304): Xaa is any amino acid
MRDIQDFDSIMIRLASPEMIRNWSYGEVKKPETINYRTLRPEKDGLFCERIFGTTKEWECYCGKFKSIRYKGVTCDRCGVEVTHFKVRRERMGHIELAAPVSHIWYYRSVPSRMGLLLDMTMTALRSVLYYEKYVVIDPADTELKKGQMLSEDEYFEEQERYGGGFTAGMGAEAIRTLLENVDLDKLAAELREKMIEKGAKSDKRLLKRIEIVENFRNSQNKPEWMILDVIPVIPPELRPMVQLDGGRFATSDLNDLYRRVINRNNRLKRLQTLNAPDIIIRNEKRMLQEAVDALFDNSKKKKM

SEQ ID NO: 58653 - DNA, 1518 bp, Unknown
  Obtained from environmental sample
  misc_feature (1)..(1518): n is a, c, g, or t
atggccgagtgtaaagcccgcagaaacggaacagttcttcgcgtaacatcgcaggaaatagtcgtaaagccggaaagggcgggaaacccgaaaccggcggcgcaggtatcgcttgactcccacggcaacgatgtttataaactggtaaagttccagagaaccaatcaggacacatgctataaccagcgccccattgttaataccggcgataaaataaccacaggtcaggtaatcgcggacgggcccgccacgcaaaacggcgagcttgcccttgggcgcaatatcttagtgggctttatgccatggaacggatacaactacgaagactcaattcttatttccgaaaaagtagtaaaagacgatatgtttacctcgatacacataaaagaatttattgtggaaataagggaaacaaaactcggtcccgagaaaatcacgcgcgacattcccaacacgtcggaaaaaagccttgataatctggacagcgaaggcattatccgcgtcggcgcgaaagtgcgttccggcgacattcttgtcggcaaagttacgcccaagagcgagaccgagacgacgcctgaattcaaactgctaaattcaatcttcggcgaaaaggctaaggaagtgcgcgacacgtcccttaaagtgccgcacggcatagagggaacaataattgacattcagcggcttaagcggacagagcatgacagtctcagcccgggagttgacgaggtggttaaggtgttaatcgccaccaaacgcaagctccgcgagggcgacaagatggccggacggcatggcaacaagggcgttgtcgcgcgcatcctgccggaggaggatatgccctatatggaagacggcaccccgcttgatatctgccttaccccgttaggcgttccctcccgtatgaatattggccagcttctggaaaccgaacttggctgggcgggttcgactctggacgaatggtattcatcgccggttttccagtccccttccaccgagcagattgagggcaaactcatagaggcgggcttacccgtgacaagcaagaccatgctccgcgacggcaggaccggcgaatattttgtaaacccgattttctgcggggtgatttacttccttaaactccaccatcttgtggatgataaaatgcacgcccgcagcaccggcccctactcgctggttacccagcagccgcttggcggcaaggcccagttcggcggccagcgccttggcgagatggaagtctgggctttggaagcttacggcgcggcgcatacgcttcaggaactgctgacgatcaagtcggacgacatgacagggcgttccaaaatttacgaggccattgtaaagggagaaccttccaccacggcgggcattcctgaatcgtttaacgtactggtgcaggaactgagggggcttgcgcttgatcttgcgatttttgacaacaacagcaaacagattccccttaccgaaaaagacgaagagcttattgcgaaatcgaagagtaatttctaa

SEQ ID NO: 58654 - protein, 505 aa, Unknown
  Obtained from environmental sample
  DOMAIN (407)...(483): RNA polymerase Rpb2, domain 7
  misc_feature (1)..(505): Xaa is any amino acid
MAECKARRNGTVLRVTSQEIVVKPERAGNPKPAAQVSLDSHGNDVYKLVKFQRTNQDTCYNQRPIVNTGDKITTGQVIADGPATQNGELALGRNILVGFMPWNGYNYEDSILISEKVVKDDMFTSIHIKEFIVEIRETKLGPEKITRDIPNTSEKSLDNLDSEGIIRVGAKVRSGDILVGKVTPKSETETTPEFKLLNSIFGEKAKEVRDTSLKVPHGIEGTIIDIQRLKRTEHDSLSPGVDEVVKVLIATKRKLREGDKMAGRHGNKGVVARILPEEDMPYMEDGTPLDICLTPLGVPSRMNIGQLLETELGWAGSTLDEWYSSPVFQSPSTEQIEGKLIEAGLPVTSKTMLRDGRTGEYFVNPIFCGVIYFLKLHHLVDDKMHARSTGPYSLVTQQPLGGKAQFGGQRLGEMEVWALEAYGAAHTLQELLTIKSDDMTGRSKIYEAIVKGEPSTTAGIPESFNVLVQELRGLALDLAIFDNNSKQIPLTEKDEELIAKSKSNF

SEQ ID NO: 58655 - DNA, 360 bp, Unknown
  Obtained from environmental sample
  misc_feature (1)..(360): n is a, c, g, or t
atgtcaattattgttccctctatgccgtgcggcactttaagggacgtgtcgcgcacttccttagccttttcgccgaagattgaatttagcagtttgaattcaggcgtcgtctcggtctcgctcttgggcgtaactttgccgacaagaatgtcgccggaacgcactttcgcgccgacgcggataatgccttcgctgtccagattatcaaggcttttttccgacgtgttgggaatgtcgcgcgtgattttctcgggaccgagttttgtttcccttatttccacaataaattcttttatgtgtatcgaggtaaacatatcgtcttttactactttttcggaaataagaattgagtcttcgtag

SEQ ID NO: 58656 - protein, 119 aa, Unknown
  Obtained from environmental sample
  misc_feature (1)..(119): Xaa is any amino acid
MSIIVPSMPCGTLRDVSRTSLAFSPKIEFSSLNSGVVSVSLLGVTLPTRMSPERTFAPTRIMPSLSRLSRLFSDVLGMSRVIFSGPSFVSLISTINSFMCIEVNISSFTTFSEIRIESS

SEQ ID NO: 58657 - DNA, 993 bp, Unknown
  Obtained from environmental sample
  misc_feature (1)..(993): n is a, c, g, or t
atgatcagatcggccgaggatttgtccggccgggttatacgaataatcatgggcgacagccacacctgtacccacggggcgttcggcgcttttgccgccggtgtgggaactaccgatttagaggtggggatactgaaaggcgtctgcgctttcggcaagcctgaaaccctgaggatcaacctgcttggggaactgccgtccggcgttttgccgaaagacgtaatcctcgcaattatttccaggataagcgtttcgggcgcgtcgggaaaagttatggaactgcgggggccggtaatttcttccatgagcatggaaggcagaatgacaatctgcaacatggctgtcgaggcgggagccaccagcggcgtatgtatgcctgatatgactaccgtaaattacctgtggcctttcatcgggcctgaaggagataaaacttattcaagcaaagaagaagctcttaaggatttttcaaaatggataagcgatggcgacgcggagtattcgggcgttgtcgatattgactgttcaaaactggagccgcttgcgacagtcggctacaagcctgacgaagtaaaacctgtgcgggaacttgcgggaacaaaagtcgatcaggtgtatatcggttcatgcaccaacggcagaatcgaagacctgcgcgccgcggcggccgtcctgcgcggtaaaaaaatcgccgatactgtacgcgcgattatcgcgcccgctaccacagacatttacgcgcaggctctcaaagaggggcttatacaggacttccttgacgccggctgctgcgtaaccaacgccacctgcggcgcgtgtcttggaatgtccaacggcgtgcttgccgaaggcgaggtttgcgcttccaccacgaaccgcaatttttacggccgcatgggcaagggcggcatggttcaccttatgagtcccgaatcggcggctgccgcggcattagcgggcgcgattgtaacgccgaataattgtaataggtaa

SEQ ID NO: 58658 - protein, 330 aa, Unknown
  Obtained from environmental sample
  DOMAIN (1)...(320): Aconitase family (aconitate hydratase)
  misc_feature (1)..(330): Xaa is any amino acid
MIRSAEDLSGRVIRIIMGDSHTCTHGAFGAFAAGVGTTDLEVGILKGVCAFGKPETLRINLLGELPSGVLPKDVILAIISRISVSGASGKVMELRGPVISSMSMEGRMTICNMAVEAGATSGVCMPDMTTVNYLWPFIGPEGDKTYSSKEEALKDFSKWISDGDAEYSGVVDIDCSKLEPLATVGYKPDEVKPVRELAGTKVDQVYIGSCTNGRIEDLRAAAAVLRGKKIADTVRAIIAPATTDIYAQALKEGLIQDFLDAGCCVTNATCGACLGMSNGVLAEGEVCASTTNRNFYGRMGKGGMVHLMSPESAAAAALAGAIVTPNNCNR

SEQ ID NO: 58659 - DNA, 525 bp, Unknown
  Obtained from environmental sample
  misc_feature (1)..(525): n is a, c, g, or t
atgaaaacgtttaatggagaagtattatttcttgatcgcggcgatattaataccgatgaaattattccggcaaaatatttaaccgaggacacaagaatagcgttaaagccgcatcttctggaagacttaaaaatgaaaggctttgacccggcgaaagacattgccggaaaaggcgcggtgctgacgcgggcgaacttcggctgcggatcctcgcgggaacacgccccctgggcgcttgaggtaaacggcattaatatcgttatcgctgaaagtttcgcccgtatcttccggcagaacatgtacaactgcggaatgatcgcctgcgaagtttcagcggcgacgctggacgaattgtttaaggaattttcaaatgttaaaacgacattaacggtggatacaggcaagggcagtttaagtttcaaagcgggaggaaaggaaaaaacagtttctttcacccttaaagattttgaaaaagcgctggtggaagccggcggctgggtcgagtacgcggcaaagaaatactga

SEQ ID NO: 58660 - protein, 174 aa, Unknown
  Obtained from environmental sample
  DOMAIN (1)...(113): Aconitase C-terminal domain
  misc_feature (1)..(174): Xaa is any amino acid
MKTFNGEVLFLDRGDINTDEIIPAKYLTEDTRIALKPHLLEDLKMKGFDPAKDIAGKGAVLTRANFGCGSSREHAPWALEVNGINIVIAESFARIFRQNMYNCGMIACEVSAATLDELFKEFSNVKTTLTVDTGKGSLSFKAGGKEKTVSFTLKDFEKALVEAGGWVEYAAKKY

SEQ ID NO: 58661 - DNA, 1539 bp, Unknown
  Obtained from environmental sample
  misc_feature (1)..(1539): n is a, c, g, or t
ttgaggatcacaatggcggacaaactgataaaagtttttgacactacgctgagggacggcgagcaggctcccggctgcagtatgaatctggcggaaaagatcgaggtcgcgaagcggctggaaaaacttggagtagatgtaatcgaagcgggtttcccaatatcaagcccgggcgatcttgagtctgtaagagcaatagccggaatcattaaaaattgctccgtggccggactctgccgaagcagggaaggcgacatagacgctgcgaaagaatcgctggcaaaagcggcaaaccctcgcgttcacatattccttgcgacatcgcccgtacacatggagtacaaactcaagatgacgcctgagcaggtgcttgaacaggcggtttcctcggtaaagtacgctaaaaaattctgcaatgacattgaattttccgcggaagacgcctttcgcagtgatcctgattttgtatgcaaagttttcggcgcggtaattgaagcgggggcgttaactgtaaatttccccgacaccgtaggctacgcgatgcccgccgaattcggcgagcgcgtccgctatataaaagagcacactccgcacatggaaaaagcttgtctgtccgtgcattgccacaacgatcttggactggccgtggcgaacagtatcgccgccatcgcgaacggagcggatcaggttgagtgtacgattaacggaatcggcgaacgcgccggaaacgcgtctctggaagaagtagtaatgggcctgcgcgtccgccatgactttttttccgccgatacaagaatagacagtacgcagatttacgcggcaagccgccttgtgtcccaggtaactggcgtgaaggttcagccgaacaaggcgatcgtcggcgacaacgctttcgcgcatgaagcgggaatccaccagcacggagtattggcgaaaagggaaacctacgagatcatgaccccgcagtcaataggcattccccaaaaccgcatggttcttggcaaacattcaggccgccacgcttttgaggagcgccttaaagacctgggtataagtgtcgaagcggaggcgtttgaaaaaatattcgccgatttcaaagaacttgccgacaaaaagaaagttgtcagcgaccgcgacattgaagcactggcaatggacagggccgtgtctgttcccgaaacatggaagctggatcattgggctgtgaacacaggttccgctttgggcgcggcgggcgttatacgcctgcggcacaaggatggcgagtataaaaaactggtctgccttggcgacggccccatcgactcgatcttcaaagcgatcaacgagattacaggccaggagccggagcttgagctttatgaaataggcgccgttacgggcggctcttcctcgcagggcgaagcgatggtaaaaatcatgatggaaggcagacgctggaacggccgcggcgtttccaccgacgtaatcgaagcctcaataatggcctatttatcggcgattaacgccatggaatgggacttagcagataacagataa

SEQ ID NO: 58662 - protein, 512 aa, Unknown
  Obtained from environmental sample
  DOMAIN (374)...(505): LeuA allosteric (dimerisation) domain
  misc_feature (1)..(512): Xaa is any amino acid
MRITMADKLIKVFDTTLRDGEQAPGCSMNLAEKIEVAKRLEKLGVDVIEAGFPISSPGDLESVRAIAGIIKNCSVAGLCRSREGDIDAAKESLAKAANPRVHIFLATSPVHMEYKLKMTPEQVLEQAVSSVKYAKKFCNDIEFSAEDAFRSDPDFVCKVFGAVIEAGALTVNFPDTVGYAMPAEFGERVRYIKEHTPHMEKACLSVHCHNDLGLAVANSIAAIANGADQVECTINGIGERAGNASLEEVVMGLRVRHDFFSADTRIDSTQIYAASRLVSQVTGVKVQPNKAIVGDNAFAHEAGIHQHGVLAKRETYEIMTPQSIGIPQNRMVLGKHSGRHAFEERLKDLGISVEAEAFEKIFADFKELADKKKVVSDRDIEALAMDRAVSVPETWKLDHWAVNTGSALGAAGVIRLRHKDGEYKKLVCLGDGPIDSIFKAINEITGQEPELELYEIGAVTGGSSSQGEAMVKIMMEGRRWNGRGVSTDVIEASIMAYLSAINAMEWDLADNR

SEQ ID NO: 58663 - DNA, 705 bp, Unknown
  Obtained from environmental sample
  misc_feature (1)..(705): n is a, c, g, or t
ttgtcgaaacttcccgcgcgtcttgaaacagagtgggacggcgaaattgacagatggaaaacccatatgccccaaacatacacccacgaggtaacgtttgccaagaatgccctccacccccgcttcatcatagaagaaaccgcgaaggcgctgggccccgaaacagtagccgttaccgatgtgggccagcaccagatgtgggccgctcagttcttccccgctgaaaagcccaggtcatttataagctcgggcggcctaggaactatgggcttcggtcttggcgcggcctgcggcgtgaaaatcgccaaccctcaaaaacccgtcgtgctttttacaggcgacggcagtttcagaatgaactgcgcggagatggcgaccctgaccaacaataaaatcccgcttttgattattgtttttaacaacggtgttctgggcatggtaaggcagtggcaaagtttcttttacgaaaaaagatactcgcagacaactctgggagcggcccccgactttataaaactctgcgaagcctacggcattaacggtttccgggcgaacaacagggaatctttcaagaaggcgctccacgccgccggcgaagaattatccgccggaagagccgcgctaatcgaagccgacatagaccgcgacgaanacgtgttaccgatggttccgtccggcaaaccgattgacgaacaaattctataa

SEQ ID NO: 58664 - protein, 234 aa, Unknown
  Obtained from environmental sample
  DOMAIN (60)...(211): Thiamine pyrophosphate enzyme, C-terminal TPP binding domain
  misc_feature (1)..(234): Xaa is any amino acid
MSKLPARLETEWDGEIDRWKTHMPQTYTHEVTFAKNALHPRFIIEETAKALGPETVAVTDVGQHQMWAAQFFPAEKPRSFISSGGLGTMGFGLGAACGVKIANPQKPVVLFTGDGSFRMNCAEMATLTNNKIPLLIIVFNNGVLGMVRQWQSFFYEKRYSQTTLGAAPDFIKLCEAYGINGFRANNRESFKKALHAAGEELSAGRAALIEADIDRDEXVLPMVPSGKPIDEQIL

SEQ ID NO: 58665 - DNA, 1149 bp, Unknown
  Obtained from environmental sample
  misc_feature (1)..(1149): n is a, c, g, or t
ttgagagcttcgttcgccgtacacgccacggtcgttgaggcgcttttggaggcgggcgcggtggtggtcgggaagactaacctcgacgagttcgcgatgggttcgtccaacgagacctcttacttcgggccggtgcggaacccccgcgatccccgaaagatacccggcggctccagcggcggcagcgcgtcggcggtaggggcggcggcagtgccggcggcgctcggcaccgataccggcggctctatacgccagccgtccagccactgcggaacggtcgggctcaagcccacctacgggcgggtatcgcgctacggcgcggtggccttcgcctcgtctctcgaccaaataggccccatagcctcgaacgtgcgcgacatcggtctgctgctgtcggtgatatccgtgccggacaagcgtgattcgacctgcgccggcaggcagttcgccgattccgaagatttatacaacggcgacgtctccggcctgcggataggtatgcccaaagagtacttcggggagggtctttccaacgaagtgcgttccgccataacgccggccgccgatgagttgaagcgtcgcggggcctcggtcgtcgaggtatcgctctcgaatgtcaaatacgccgttgccacctactacatcatagccgcggcggaagcctcgtcgaacctattaaggttcagcggcgtaggctacggcttcagggcgtccggcgccaaaacgcttgacggcatgtacagtgccacgagggcgcaaggcttcggaacggaggtcaaaaggcggattatgctcggaacatacgtcctatcctccggctactacgacgcctactacatgaaagccgcgaaggttcgcaccctgatagccaacgatttcgagagggcgcttgaaagctgcgacgtaatcttagcccccgtctccccgtcgcccgcgtgcaacttaggcgagagcgacggcgatccgttgagtgtttacttgtctgatatttacacagtctcagccaacttagccggaatccccgccatgagcgtcccatgcaaggtctccgaaggatcgttaccggtaggagcgcaattaatgacgagcaaatggcgggaagatttgctgttaaaagtagggagcgccatagaatcaggtgttttctag

SEQ ID NO: 58666 - protein, 382 aa, Unknown
  Obtained from environmental sample
  DOMAIN (2)...(371): Amidase
  misc_feature (1)..(382): Xaa is any amino acid
MRASFAVHATVVEALLEAGAVVVGKTNLDEFAMGSSNETSYFGPVRNPRDPRKIPGGSSGGSASAVGAAAVPAALGTDTGGSIRQPSSHCGTVGLKPTYGRVSRYGAVAFASSLDQIGPIASNVRDIGLLLSVISVPDKRDSTCAGRQFADSEDLYNGDVSGLRIGMPKEYFGEGLSNEVRSAITPAADELKRRGASVVEVSLSNVKYAVATYYIIAAAEASSNLLRFSGVGYGFRASGAKTLDGMYSATRAQGFGTEVKRRIMLGTYVLSSGYYDAYYMKAAKVRTLIANDFERALESCDVILAPVSPSPACNLGESDGDPLSVYLSDIYTVSANLAGIPAMSVPCKVSEGSLPVGAQLMTSKWREDLLLKVGSAIESGVF

SEQ ID NO: 58667 - DNA, 954 bp, Unknown
  Obtained from environmental sample
  misc_feature (1)..(954): n is a, c, g, or t
atgtcaaaaaacaaatatgtggatatgctgccggcaaacatcggcccgtacaaaattctcgggaagatcggcaagggcggcatgggcgacatctacaaggcgatgcaggagccgctcaaccgcgtcgtggccataaaggtgctgcccctgcaactgtcgcgcgacgacgagttcgctaagcgcttcgtgatcgaggccaaagccatctcgatgctgcagcaccaaaacatcgtgaccatacacgaatacggcgaagacgaggggtatcgctacatcgccatgcagtacatagacggcatggacctcggcaattacatagccgagacaaaggttatagccgtttccgacattattgacttttccaagcagatttgcagggggctgctctacgcgcaccaccacaacgtcgtccaccgcgacatcaaaccgcagaacatactccttgacaaaaataacatcatacacataaccgatttcgggatagctaagatattttcgaccacggatatcacggtgaccggatcgaccgtgggcacaccggagtacatgtcgccggaacaggctcaggggaagaagatcgacgcgcagtccgacatctactcgctcggcatagtgatgtacgagatgctgacccgcaagccgccgttcgtggcgaacaactccatggcggtggcctacaaacaggtgcacgagccgcccatgccgccctccgtcaaacgcaaagacacgccgaagcaattggagctgatcattctcaaggcgatcaaaaaggataagcgcgaccgctacgagtcggtagaggagcttttgacgcacttagacaaagttgacccgagcgagcgcgtagaccgccagacgctgctcttccaccccgcgcacaagcacgcgccggccgccgaatcggacgatcaaaggatcaccgaccgtcgcagcggcgacagctcggccatctga

SEQ ID NO: 58668 - protein, 317 aa, Unknown
  Obtained from environmental sample
  DOMAIN (17)...(273): Protein tyrosine kinase
  misc_feature (1)..(317): Xaa is any amino acid
MSKNKYVDMLPANIGPYKILGKIGKGGMGDIYKAMQEPLNRVVAIKVLPLQLSRDDEFAKRFVIEAKAISMLQHQNIVTIHEYGEDEGYRYIAMQYIDGMDLGNYIAETKVIAVSDIIDFSKQICRGLLYAHHHNVVHRDIKPQNILLDKNNIIHITDFGIAKIFSTTDITVTGSTVGTPEYMSPEQAQGKKIDAQSDIYSLGIVMYEMLTRKPPFVANNSMAVAYKQVHEPPMPPSVKRKDTPKQLELIILKAIKKDKRDRYESVEELLTHLDKVDPSERVDRQTLLFHPAHKHAPAAESDDQRITDRRSGDSSAI

SEQ ID NO: 58669 - DNA, 813 bp, Unknown
  Obtained from environmental sample
  misc_feature (1)..(813): n is a, c, g, or t
gtgcgtcaaaagctcctctaccgactcgtagcggtcgcgcttatcctttttgatcgccttgagaatgatcagctccaattgcttcggcgtgtctttgcgtttgacggagggcggcatgggcggctcgtgcacctgtttgtaggccaccgccatggagttgttcgccacgaacggcggcttgcgggtcagcatctcgtacatcactatgccgagcgagtagatgtcggactgcgcgtcgatcttcttcccctgagcctgttccggcgacatgtactccggtgtgcccacggtcgatccggtcaccgtgatatccgtggtcgaaaatatcttagctatcccgaaatcggttatgtgtatgatgttatttttgtcaaggagtatgttctgcggtttgatgtcgcggtggacgacgttgtggtggtgcgcgtagagcagccccctgcaaatctgcttggaaaagtcaataatgtcggaaacggctataacctttgtctcggctatgtaattgccgaggtccatgccgtctatgtactgcatggcgatgtagcgatacccctcgtcttcgccgtattcgtgtatggtcacgatgttttggtgctgcagcatcgagatggctttggcctcgatcacgaagcgcttagcgaactcgtcgtcgcgcgacagttgcaggggcagcacctttatggccacgacgcggttgagcggctcctgcatcgccttgtagatgtcgcccatgccgcccttgccgatcttcccgagaattttgtacgggccgatgtttgccggcagcatatccacatatttgttttttga

SEQ ID NO: 58670 - protein, 270 aa, Unknown
  Obtained from environmental sample
  misc_feature (1)..(270): Xaa is any amino acid
MRQKLLYRLVAVALILFDRLENDQLQLLRRVFAFDGGRHGRLVHLFVGHRHGVVRHERRLAGQHLVHHYAERVDVGLRVDLLPLSLFRRHVLRCAHGRSGHRDIRGRKYLSYPEIGYVYDVIFVKEYVLRFDVAVDDVVVVRVEQPPANLLGKVNNVGNGYNLCLGYVIAEVHAVYVLHGDVAIPLVFAVFVYGHDVLVLQHRDGFGLDHEALSELVVARQLQGQHLYGHDAVERLLHRLVDVAHAALADLPENFVRADVCRQHIHIFVF

SEQ ID NO: 58671 - DNA, 984 bp, Unknown
  Obtained from environmental sample
  misc_feature (1)..(984): n is a, c, g, or t
gtgtacatacagaccggcaagatactcttttccggcgcgcccgacgctatttgcgggcacttcggcgtcccgtccctatcgcaggtctacgagaagtccggcgacaggtctattgccgacgccgccgaaggggggcggccggcgggcgccgcgaacgcgtcaactcacgccgtagccgcgtccgcgcaggatttgccccgccgcgattggacggcgacgctgcgacacccgcttcgggcgctgaggttcttctcccgccaatcgtacgcgctcgcggagcggtacgcgaaggtatacgtgagggataagcgcaacatgctgcttttgatggcgcaaacgccgctcattacgctgcttctcggctttgtctacaagatgtcgatattgcagctgcctataagtttcttcttttgcctcactgtgaccggcatttgggtgggcgggctcgacgcggtgcgcgaggtggcctcggaactgccgctcttggcgcgggaggcgcggtgcgggatgaaccgctgggcgtacatcatagcgcggatagccgtcgccgccgccctttccgccgcgcaggcgctgttgtttactgtgtcggcggtcgttatcttcaggcagttggagttttcgtggccgctattggcgttgctctacacggcgatattctccggcaatcttttgggcctcgccgtgagcgtatgcagcggcagcgtgggccgggcgatcagcacgcttcccatagtcctcatcccgcagatattcttttcggggatattagtcatgttcgagcacatggcggagctcgggcggcaaatctcgcgcctgacaatatcgcgcccggtcttcgggatcatgaagaaggtcttctttttggacaggccgctcttttggcatagcgaatgggtagagttaattttgctttgcgccgggctaattattatattttggatagcgctcaggagccgtaccggccgccgcggcgcagcttag

SEQ ID NO: 58672 - protein, 327 aa, Unknown
  Obtained from environmental sample
  DOMAIN (86)...(288): ABC-2 type transporter
  misc_feature (1)..(327): Xaa is any amino acid
MYIQTGKILFSGAPDAICGHFGVPSLSQVYEKSGDRSIADAAEGGRPAGAANASTHAVAASAQDLPRRDWTATLRHPLRALRFFSRQSYALAERYAKVYVRDKRNMLLLMAQTPLITLLLGFVYKMSILQLPISFFFCLTVTGIWVGGLDAVREVASELPLLAREARCGMNRWAYIIARIAVAAALSAAQALLFTVSAVVIFRQLEFSWPLLALLYTAIFSGNLLGLAVSVCSGSVGRAISTLPIVLIPQIFFSGILVMFEHMAELGRQISRLTISRPVFGIMKKVFFLDRPLFWHSEWVELILLCAGLIIIFWIALRSRTGRRGAA

SEQ ID NO: 58673 - DNA, 648 bp, Unknown
  Obtained from environmental sample
  misc_feature (1)..(648): n is a, c, g, or t
ttgcccccggcgcagaggccgcgcgaacggcttatcagcaatggcccagacgcgctttccgacgccgagcttttggctgtcattttgaatacgggaatcaaggggaaaggcgtcgcggaactggccggggagcttttatccatgcttgacaataacaaggagattcccacggttgaaaaactttcaaagctttccggcatgggtatgtcaaaagcgtgcgccgtggccgccatgctggagtttggaagacggcgatggggcgctgtcggttccgccatcaggcagccggcggagatttacgccctgatacggcataacgccgacagaaaacaggagcgttttctcagcctgtccctcaacggcgcgcacgaggtattgtcagtccgggtggttaccatcggccttgtcaacaggacaatagtccatccccgtgaagttttcgccgacattatccaggatcgcgcctccgctttcattgtcgcccacaaccacccttcgggccgggttcgcccttccggtgaggacgacgagattaccgaacagctcgcgagggcggcggaaatcctcggcctgcatttccttgaccacctgattttctccgataacgactggtggagttacaggcagaacgggaggataatcaaataa

SEQ ID NO: 58674 - protein, 215 aa, Unknown
  Obtained from environmental sample
  DOMAIN (90)...(213): RadC, DNA repair protein
  misc_feature (1)..(215): Xaa is any amino acid
MPPAQRPRERLISNGPDALSDAELLAVILNTGIKGKGVAELAGELLSMLDNNKEIPTVEKLSKLSGMGMSKACAVAAMLEFGRRRWGAVGSAIRQPAEIYALIRHNADRKQERFLSLSLNGAHEVLSVRVVTIGLVNRTIVHPREVFADIIQDRASAFIVAHNHPSGRVRPSGEDDEITEQLARAAEILGLHFLDHLIFSDNDWWSYRQNGRIIK

SEQ ID NO: 58675 - DNA, 543 bp, Unknown
  Obtained from environmental sample
  misc_feature (1)..(543): n is a, c, g, or t
atggcaagcaaactaacgcaaattcaaaaacggatatatgttatccgcgggaaaaaagtaatgctggacagtgatttagcatatctttatgaggttgaagttaaaaagctcaatcaagccgtaagaagaaacataaagcggtttcccgttgattttatgtttcggttaacaaaaaatgaatttgccgaggtggtcacaaattgtgaccaccttcaaagccttaaattcagacctaccctgccttatgtattcacggaacagggtgtagcgatgttagcggctgtattgaacagccagaaagcaattgatgtcaatattcagattatgagggcttttattaaattaaggcattatgtactcgcaaaaagcgacacaaatgaacaaattgcggaattacggaaactgctcatggtgtatattgaaaatactgacaataaaatttcaagacacggcaaagcaattaaacaaattatcatcgctctgaataaccttatagcaaaaccgccagaaaccaaaagaataggctttaacgccggggattaa

SEQ ID NO: 58676 - protein, 180 aa, Unknown
  Obtained from environmental sample
  misc_feature (1)..(180): Xaa is any amino acid
MASKLTQIQKRIYVIRGKKVMLDSDLAYLYEVEVKKLNQAVRRNIKRFPVDFMFRLTKNEFAEVVTNCDHLQSLKFRPTLPYVFTEQGVAMLAAVLNSQKAIDVNIQIMRAFIKLRHYVLAKSDTNEQIAELRKLLMVYIENTDNKISRHGKAIKQIIIALNNLIAKPPETKRIGFNAGD

SEQ ID NO: 58677 - DNA, 582 bp, Unknown
  Obtained from environmental sample
  misc_feature (1)..(582): n is a, c, g, or t
atgggagctttaccaaaggaaaaaaaatattttacgtatgccgattacaaggaatgggaactcgctgaaggtgaacgtttcgaagttatccggggcgaagctttcgctatggctgcgcctaacgccgggcatcaggctattctcgcagcgttagtcagccagttttatatttttctggaagacaagccatgcgaggtatatcccgccccctatgatgtcaggctgttctacaaggaagacgaaagcgacgatacaatagtgcagcctgatattgttgttgtctgtgatgaagaaaagcgcggacacgaaggctgcaggggcgctcctgatctggcggtagagatattatcgccttcaaacaccgcgatagaaatggaacgaaaacttaatctgtacagggaggcgggggtcagggaatactgggttgtagaccccgaaaacctcagcctcacggtctattgtttcagggaaacgggaagtatatacaattataaaaacaccgcaaaagttcccgtcgcgatccttcccggattaaatattgagcttgaaagggtatttagaaaaatagggaccggggactag

SEQ ID NO: 58678 - protein, 193 aa, Unknown
  Obtained from environmental sample
  DOMAIN (44)...(154): Protein of unknown function (DUF820)
  misc_feature (1)..(193): Xaa is any amino acid
MGALPKEKKYFTYADYKEWELAEGERFEVIRGEAFAMAAPNAGHQAILAALVSQFYIFLEDKPCEVYPAPYDVRLFYKEDESDDTIVQPDIVVVCDEEKRGHEGCRGAPDLAVEILSPSNTAIEMERKLNLYREAGVREYWVVDPENLSLTVYCFRETGSIYNYKNTAKVPVAILPGLNIELERVFRKIGTGD

SEQ ID NO: 58679 - DNA, 1335 bp, Unknown
  Obtained from environmental sample
  misc_feature (1)..(1335): n is a, c, g, or t
ttgaagtacacgttgcaggtggcccccgaagactgctcgggttgcggtctgtgcgttaaggtctgccccgtcaacgccaagaacaaagactcagccctcaagatggaacatcagactccgctacgcgcccccgaggccgccaactggagcttcttcctcaaactccccgaaaccgatccggcgaagttcaaagtggccaccgtcaaaggcagtcagtttgtccgcccgctcttcgagttcagcggcgcgtgccagggttgcggcgagacggcatacgtcaaactgctcacgcagcttgtaggcgacaggctctacatcgccaacgccacgggctgctcgtcgatctacggcggcaacctgcccaccacgccatacgcgcaacgcgccgacgggcgcggccccacgtggaacaactcgctcttcgaggacaacgccgaggtcgcctacggtatgcgcctctccgtcgataagttcgcggagtacgctaaagagctcgccaagaaggtttccgagtccggctcgtccgatctcaaagccgtcctaggcgaaatcctgagcgccgaccagtcctccaacgagctgatcgaagcccagcgcgcccgcgtcgccaaagccaaagatttactgaagaaaggctccgacgaggcgagcaaggaattgctcagcgttatcgactaccttgtcaaaaagtccatttgggctctcggcggcgacggttgggcgtacgacatcggttacggcggcctcgaccacgttttggccgctggcaagaacgtcaagatcttggtcttggacaccgaagtttactcgaacaccggcggtcagatgtcaaaggcgaccccggtaggcgccatcgccaagttcgccaacgccggaaaggaaattaccaagaaagacctgggcgcgatagccatgagctacggttacgtctacgtcgccaaggtatcgctaggcgcggacatgaaccagacgatcaaagccttccgcgaagcggaatcctataacggcccctcgcttatcatcgcctactcgcactgtatcaaccacggcatcgacatgagcaaggggcttgagcacggcaaggcggtagtcaccagcggcctgtggcccctgtaccgctacgatcccaggctcaaggaccagggcaagaaccccttccagcttgactccaaggatcccaccaccagcattgaggatttcatgtacagcgaagtccgcttcaagagcctcaaacaggccgaccccgcgcgcgccgacgcgctgctcgcgaaagcgaaagcccacgcggaaagggtccggaaggagtacaagtacctggcggacaggccgttctaa

SEQ ID NO: 58680 - protein, 444 aa, Unknown
  Obtained from environmental sample
  DOMAIN (5)...(28): 4Fe-4S binding domain
  misc_feature (1)..(444): Xaa is any amino acid
MKYTLQVAPEDCSGCGLCVKVCPVNAKNKDSALKMEHQTPLRAPEAANWSFFLKLPETDPAKFKVATVKGSQFVRPLFEFSGACQGCGETAYVKLLTQLVGDRLYIANATGCSSIYGGNLPTTPYAQRADGRGPTWNNSLFEDNAEVAYGMRLSVDKFAEYAKELAKKVSESGSSDLKAVLGEILSADQSSNELIEAQRARVAKAKDLLKKGSDEASKELLSVIDYLVKKSIWALGGDGWAYDIGYGGLDHVLAAGKNVKILVLDTEVYSNTGGQMSKATPVGAIAKFANAGKEITKKDLGAIAMSYGYVYVAKVSLGADMNQTIKAFREAESYNGPSLIIAYSHCINHGIDMSKGLEHGKAVVTSGLWPLYRYDPRLKDQGKNPFQLDSKDPTTSIEDFMYSEVRFKSLKQADPARADALLAKAKAHAERVRKEYKYLADRPF

SEQ ID NO: 58681 - DNA, 645 bp, Unknown
  Obtained from environmental sample
  misc_feature (1)..(645): n is a, c, g, or t
gtgcttgtttcgatagctgtatcccttcccataggaattgctaccgctattttcttaaacgaatactccggcaattcctcatggataaaaatcctgcgtctcgcgatagaaaccctcgccggaattccttccattatttacggacttttcggccttcttatgttctgcaggctgttaaatttcggccagtccataattgccggagctttcactttaagcataatgatactgccagttattatccgcacaaccgaagaatcgctaaaatcagtacccgatattttccgcgaaggctctctcgctttaggcgcgactaaattccaaacgattgttcacgttgtgctgccctccgcgcttcccggaattgtaacctccgtgattcttgcgataggcagggtagtgggagaatccgcgcccgttctgcttacggtcggtcttacaaaaaatatgcctcgtacaatttttgagtccggaagaacacttacaattcatctttattacctgacaaatgaagctgtgcgtcccgaggatttcggcatagctttcgcgacagcttttatgctgataattcttgttgtcgttattaatacagcgacaaagattataaccgcgaatttcagaaaaaaactgggaggaatacaatga

SEQ ID NO: 58682 - protein, 214 aa, Unknown
  Obtained from environmental sample
  DOMAIN (2)...(212): Binding-protein-dependent transport system inner membrane component
  misc_feature (1)..(214): Xaa is any amino acid
MLVSIAVSLPIGIATAIFLNEYSGNSSWIKILRLAIETLAGIPSIIYGLFGLLMFCRLLNFGQSIIAGAFTLSIMILPVIIRTTEESLKSVPDIFREGSLALGATKFQTIVHVVLPSALPGIVTSVILAIGRVVGESAPVLLTVGLTKNMPRTIFESGRTLTIHLYYLTNEAVRPEDFGIAFATAFMLIILVVVINTATKIITANFRKKLGGIQ

SEQ ID NO: 58683 - DNA, 756 bp, Unknown
  Obtained from environmental sample
  misc_feature (1)..(756): n is a, c, g, or t
atgaacagtaaaaaaatagaagtaaacggactggatctttattatggtgattttaaggccttgtcaaaaatcaatttttcgctcgcgaagcaggatgtggcggcgcttatcggaccttcaggctgcgggaaatcaacgtttatccgcatattaaaccgtatgaacgatttaattccttcatgcagaataacgggcgaagtttttctggatggcaaggatatttacggaacgatggacgttacggaactgcgcagcagagtggggatggtgtttcaaaagccaaatccatttaacatgagcgtgtttgataatgtcgcgtacgggaagagaatgcagggcttaaaaaacaaaggacgcattgcggacattgtggaaatctcacttaaaaaagcggctctttgggacgaggtgaaggacaggctgaaaaaacccgcgcaggctctttcaggcggacaacagcagaggctgtgtatcgcaagaactgtagcaatggagcctgaaattatccttatggatgagccgacaagcgcccttgatccgattgcgaccgggcgcatagaagagcttatcggagagctgaaaaaagaatacagtataattattgtaacgcacgcgatgcatcaggcttccagggtcagcaataagacagcgtttttcctcttgggtgaattgatcgaatacaatgatacaagagaggtttttacaagaccaaaagataaacggacagaagattatatttccggcagatttggatga

SEQ ID NO: 58684 - protein, 251 aa, Unknown
  Obtained from environmental sample
  DOMAIN (31)...(222): ABC transporter
  misc_feature (1)..(251): Xaa is any amino acid
MNSKKIEVNGLDLYYGDFKALSKINFSLAKQDVAALIGPSGCGKSTFIRILNRMNDLIPSCRITGEVFLDGKDIYGTMDVTELRSRVGMVFQKPNPFNMSVFDNVAYGKRMQGLKNKGRIADIVEISLKKAALWDEVKDRLKKPAQALSGGQQQRLCIARTVAMEPEIILMDEPTSALDPIATGRIEELIGELKKEYSIIIVTHAMHQASRVSNKTAFFLLGELIEYNDTREVFTRPKDKRTEDYISGRFG

SEQ ID NO: 58685 - DNA, 465 bp, Unknown
  Obtained from environmental sample
  misc_feature (1)..(465): n is a, c, g, or t
gtgcgtacttctctcgcaagttccgtattgcgagtccttaaagcggcaagcgctttgccgagatttccctctactcttgtcgccattgccaaaatatcatggcgaaggcggcttaattcttccgaaaaaatgtttcgtgtattcatattctcctcatccaaatctgccggaaatataatcttctgtccgtttatcttttggtcttgtaaaaacctctcttgtatcattgtattcgatcaattcacccaagaggaaaaacgctgtcttattgctgaccctggaagcctgatgcatcgcgtgcgttacaataattatactgtattcttttttcagctctccgataagctcttctatgcgcccggtcgcaatcggatcaagggcgcttgtcggctcatccataaggataatttcaggctccattgctacagttcttgcgatacacagcctctgctgttgtccgcctga

SEQ ID NO: 58686 - protein, 154 aa, Unknown
  Obtained from environmental sample
  misc_feature (1)..(154): Xaa is any amino acid
MRTSLASSVLRVLKAASALPRFPSTLVAIAKISWRRRLNSSEKMFRVFIFSSSKSAGNIIFCPFIFWSCKNLSCIIVFDQFTQEEKRCLIADPGSLMHRVRYNNYTVFFFQLSDKLFYAPGRNRIKGACRLIHKDNFRLHCYSSCDTQPLLLSA

SEQ ID NO: 58687 - DNA, 747 bp, Unknown
  Obtained from environmental sample
  misc_feature (1)..(747): n is a, c, g, or t
atgatacaagagaggtttttacaagaccaaaagataaacggacagaagattatatttccggcagatttggatgaggagaatatgaatacacgaaacattttttcggaagaattaagccgccttcgccatgatattttggcaatggcgacaagagtagagggaaatctcggcaaagcgcttgccgctttaaggactcgcaatacggaacttgcgagagaagtacgcacggatgatgaagctgtagacgcgcttcaaatgcagattgaagatgatgccgcgattgtaatcgcgacacagcagccggttgcgcgtgatctgcgcgaacttgtttcggtttttaaacttaccagcaatattgaaagggtaggggatcatgccgtacatctggcgcgcgccgcanaaaaacttgcaaaaacaggagattctcctttccggtcgcaggaacatctggagaagatggcggaaaccggacaggaaatgcttcgcgcggccatttccgcttttatggcaaaggacgcgcaggcggccagggaagcggctgcaatggacaatattataaacgcggagcataaaatccttacagaagatatattaagagtgatgaaaaagaattcagaccttgtaaaagaggctcttcagatactacatacttccaaccagcttgagcggcttggtgaccatattacaaatatatgcgaagctgttatttacatgatagaaggcagacatgaggggttaaatgaataa

SEQ ID NO: 58688 - protein, 248 aa, Unknown
  Obtained from environmental sample
  DOMAIN (150)...(235): PhoU family
  misc_feature (1)..(248): Xaa is any amino acid
MIQERFLQDQKINGQKIIFPADLDEENMNTRNIFSEELSRLRHDILAMATRVEGNLGKALAALRTRNTELAREVRTDDEAVDALQMQIEDDAAIVIATQQPVARDLRELVSVFKLTSNIERVGDHAVHLARAAXKLAKTGDSPFRSQEHLEKMAETGQEMLRAAISAFMAKDAQAAREAAAMDNIINAEHKILTEDILRVMKKNSDLVKEALQILHTSNQLERLGDHITNICEAVIYMIEGRHEGLNE

SEQ ID NO: 58689 - DNA, 387 bp, Unknown
  Obtained from environmental sample
  misc_feature (1)..(387): n is a, c, g, or t
atgcctgccggtgtaacaattatgattgttgacgactctaggattatgagaaacacggtaaaaggtgttttttccggagtagagtcttcatgtaacttcatcgaagcaaaagacggtgaagaggctttagcgttgttggaaacgcaaactgttgatttaatcttgctcgactggaatatgccaagattatcgggtattgatttcttaaaacaagtcagagcaatggatcaatataaggatttacctattattatggtaaccagtgaagccgcgaagtttaacgttatcgaagcgttaaaacacggagccactgattatattacaaaaccaattaagcttgatttgttcaagcaaaaattgtctaaactgcgattattcaggatgtaa

SEQ ID NO: 58690 - protein, 128 aa, Unknown
  Obtained from environmental sample
  DOMAIN (5)...(121): Response regulator receiver domain
  misc_feature (1)..(128): Xaa is any amino acid
MPAGVTIMIVDDSRIMRNTVKGVFSGVESSCNFIEAKDGEEALALLETQTVDLILLDWNMPRLSGIDFLKQVRAMDQYKDLPIIMVTSEAAKFNVIEALKHGATDYITKPIKLDLFKQKLSKLRLFRM

SEQ ID NO: 58691 - DNA, 327 bp, Unknown
  Obtained from environmental sample
  misc_feature (1)..(327): n is a, c, g, or t
gtgtgcaacggcgtagagctttcctccggcgctgtccgtaatcatcttccagaagtgatggtgaaggcttttgagattgccgggtacacgcaggctgaccttgagaagaagttttcttcactgtataacgctttccactacggtgcgccgcctcacgcgggcatggctcccggcattgaccgcattgtgatgcttcttgcggaagaagaaaacatccgcgaagttacagttttcccgatgaacagcaatgcgcaggatttgttaatggaagccccctgcgaagtatcagaacagcagctccgtgaggcgcatatccgtattcgatga

SEQ ID NO: 58692 - protein, 108 aa, Unknown
  Obtained from environmental sample
  misc_feature (1)..(108): Xaa is any amino acid
MCNGVELSSGAVRNHLPEVMVKAFEIAGYTQADLEKKFSSLYNAFHYGAPPHAGMAPGIDRIVMLLAEEENIREVTVFPMNSNAQDLLMEAPCEVSEQQLREAHIRIR

SEQ ID NO: 58693 - DNA, 783 bp, Unknown
  Obtained from environmental sample
  misc_feature (1)..(783): n is a, c, g, or t
gtggctggtcgcctgcgggggcgtaggggctttttaataaaaagggcgatcgctcgctgggcgggcaaatattcaaatgcccagggcggctttcctccgggcttaaaagtggtatggataatttcgcaagaggcatgtctgtttggcaatatagtaaaaagattttctatattctctcttatgacattcgaactcccaaaactgccttatgggttcaatgaccttgaacctcactatgactccgccacggtggagattcattactcaaaacatcacgctacttatgcggcaaatttgaacaaggctgtggaagcagctaggtggcagggcaaaagcataacggaaattttaaccagtttggatgcagctccagagcagcaaaaggcggctttgagaaatcacggcggcggttatcacaatcattgcttgttttgggaatcactttgcccaaaaagcacaggaataaattctggaaaattggcagaggcaataaatgcaaaatggggaaattttgaaagttttgccgaagcatttaccgcaaaagccttaggacattttggttccggctgggcttggcttgtgaaaaacaaagctggcgaattggaaattgttgacacccacgaccaaattagccccattagccttggattcaaacccataactgtaattgatgtttgggaacacgcttattatttgaaatacaaaaatgttcgtgcagactggatcaaagcgtggtggaatattgtggattggaaaaaagccgaagaacgttacgtcaattag

SEQ ID NO: 58694 - protein, 260 aa, Unknown
  Obtained from environmental sample
  DOMAIN (62)...(149): Iron/manganese superoxide dismutases, alpha-hairpin domain
  misc_feature (1)..(260): Xaa is any amino acid
MAGRLRGRRGFLIKRAIARWAGKYSNAQGGFPPGLKVVWIISQEACLFGNIVKRFSIFSLMTFELPKLPYGFNDLEPHYDSATVEIHYSKHHATYAANLNKAVEAARWQGKSITEILTSLDAAPEQQKAALRNHGGGYHNHCLFWESLCPKSTGINSGKLAEAINAKWGNFESFAEAFTAKALGHFGSGWAWLVKNKAGELEIVDTHDQISPISLGFKPITVIDVWEHAYYLKYKNVRADWIKAWWNIVDWKKAEERYVN

SEQ ID NO: 58695 - DNA, 549 bp, Unknown
  Obtained from environmental sample
  misc_feature (1)..(549): n is a, c, g, or t
atgcctcttgcgaaattatccataccacttttaagcccggaggaaagccgccctgggcatttgaatatttgcccgcccagcgagcgatcgccctttttattaaaaagcccctacgcccccgcaggcgaccagccacaggctattgaggcaataaccaaggctttccaagacggcgaaaagtttcaagttcttttgggagtaactggtagcggaaaaacattcacaatggcaaatgtcattagaaatttatcaaagccaactttggttttaacacacaacaaaacgctcgcagcacagctctaccacgaattcaaagcattttttccagaaaacgccgttgaatattttgtaagctattacgactactaccaacccgaagcctacattgtgtctagcgatatttttatagacaaagatgcctccataaacgatgaaatagataaattgcgactccgcgccacaaaaaatttgctcactcgcagagatacgataatagttgcctccgtgagttgcatttacgggttgggaagccctgcgggaatattttga

SEQ ID NO: 58696 - protein, 182 aa, Unknown
  Obtained from environmental sample
  DOMAIN (37)...(166): Type III restriction enzyme, res subunit
  misc_feature (1)..(182): Xaa is any amino acid
MPLAKLSIPLLSPEESRPGHLNICPPSERSPFLLKSPYAPAGDQPQAIEAITKAFQDGEKFQVLLGVTGSGKTFTMANVIRNLSKPTLVLTHNKTLAAQLYHEFKAFFPENAVEYFVSYYDYYQPEAYIVSSDIFIDKDASINDEIDKLRLRATKNLLTRRDTIIVASVSCIYGLGSPAGIF

SEQ ID NO: 58697 - DNA, 1659 bp, Unknown
  Obtained from environmental sample
  misc_feature (1)..(1659): n is a, c, g, or t
ttgaggcgctacgtggtttacagcgaaggcggccaaatcaaggtaaaggttgattctaaccgctgcatcgcctgcggcgcatgcatccaagcttgccgccacggttgccgcaattacaatgacgataccgagcgttttttgagcgatttgcggagcggaacgtccatatccctcttcgccgcgccggccaaccgcgccaacggcgaaaactggggccgcctcctgacctggctcaggaatatgggggtgaagaaaatatacgacgtctccgtgggggcggatatctgcacttgggcgcatattcggtatatccaaaagaataacccgagttccgtcatcacgcagccctgtccggccatcgtgaactatatccttatgcacaggcaggaattgataccgtacctctctccggtgcaaagccctatgctgtgcacggctgtcttcatgaaaaaatacgaaggcataaaagaccgtatagccgccctgtccccgtgcatcgcgaagtcggacgaattcgccgcgacggggtacgtggattacaacgtgacgctgaagaggctctacgagcatatcgagacgcacggaatcgcgctgccgaaagaggagtccggctttgaccacgcggagtcgtcgctcggatgcctgtactccatgcccggcgggttgcgggagaacgttgagcagtatctcggcaagtcgctgcgcatcgataagtccgagggtcaggagatggtctaccacgccttagacaggttcgccaagaagcgcgggaccaacctgcccgcgatattcgacgtgctgaactgccccgaaggctgcaacttagggacaggctgcgcccacgagcgcgacgagttcgacgtaaacgccatcatggacgaggcgcggcagaacattttgcagcagcgcagccaagaagatttcgaggcgctgtacgccggttacgacgaaagactgaatctgagcgatttcatccgaaagtacacgcctgtgcgccttgctcagtacaccgcctcccaagagcagatacaccgctctttcgagcagctcggcaaagatacggagttaaagcaaaatttcgattgttccgcgtgcggcgccgatacctgcctcgatatggctaaaaaagtggcgtgcggactgaatattccggaaaactgcgttcaaaaagcccgcgacgagatcaaaaaggatcaagacgcaatgattgacatgtcaaaagataacatccgcgacattaacggtatgctcacggacatctcagcggtcaaggaactatgcgatgagatagtgggatgcgttaccgatgtgaccacagcgatagagcagtacaacaagatggctatggagatagacaagatcgccatgcaaatcaacatcatatccctcaacgcctccatagaggccgccagagcgggtgaggccggcgcggcgttcgcggtcgtggcgtcggaggtgcgccaactcgcgtattcgtccaagagcacggtctccgcgaccgagcggatagaggcggaagcgacggagtccatacataagataaactcgaagaccggcaacatcagcgccgcggtgaggaagacgcaccaaaatatttccgaagtttccaaaaagatgcagggcgcgctggagagggcggagcatattaacgatgattga

SEQ ID NO: 58698 - protein, 552 aa, Unknown
  Obtained from environmental sample
  DOMAIN (389)...(552): Methyl-accepting chemotaxis protein (MCP) signaling domain
  misc_feature (1)..(552): Xaa is any amino acid
MRRYVVYSEGGQIKVKVDSNRCIACGACIQACRHGCRNYNDDTERFLSDLRSGTSISLFAAPANRANGENWGRLLTWLRNMGVKKIYDVSVGADICTWAHIRYIQKNNPSSVITQPCPAIVNYILMHRQELIPYLSPVQSPMLCTAVFMKKYEGIKDRIAALSPCIAKSDEFAATGYVDYNVTLKRLYEHIETHGIALPKEESGFDHAESSLGCLYSMPGGLRENVEQYLGKSLRIDKSEGQEMVYHALDRFAKKRGTNLPAIFDVLNCPEGCNLGTGCAHERDEFDVNAIMDEARQNILQQRSQEDFEALYAGYDERLNLSDFIRKYTPVRLAQYTASQEQIHRSFEQLGKDTELKQNFDCSACGADTCLDMAKKVACGLNIPENCVQKARDEIKKDQDAMIDMSKDNIRDINGMLTDISAVKELCDEIVGCVTDVTTAIEQYNKMAMEIDKIAMQINIISLNASIEAARAGEAGAAFAVVASEVRQLAYSSKSTVSATERIEAEATESIHKINSKTGNISAAVRKTHQNISEVSKKMQGALERAEHINDD

SEQ ID NO: 58699 - DNA, 786 bp, Unknown
  Obtained from environmental sample
  misc_feature (1)..(786): n is a, c, g, or t
atgtcaacacagataatacaggggcctaaggggactagggatttctaccccgaagatatgtcttttctgcagcatatctttgactcttggcaccgctcctgccggctctacgggtttgagcagtacgaggggccgatgttcgagcatcttgacctgtacacgcagaaatccggcgccgagattgagaagcagctctattcgtttgaggacaagggggggcggctgatggcgttgcggcccgagcttacgcctactttggctcggatggccgcgtcgcaggggacgaacctaaagaggccggtgcggtggtactccatatcgcgcttgttccggtacgagaggatgcagaaggggcggctaagggagttcatacagcttaatatggacatcttgggcattgaggacgtgagcgccgacgcggagcttatcgcggcggcggtcgatatgatgagggctttcgggtttgacgagagagattttaaggcgcgggtgtcgagccggacgcttttggaggagatgtttttggcttgcggggtcggtcaagacaaactgccgacgctctacgcgctgcttgataaaaaggggaagatcgcgccggaagaatttgaacgagagctttcggaggcggcggggggcggggaagtttgcggcaaggtcaaggcgctttttaactgcgccgggcttgacgatatcgagaagttcgcggaatctatcgggatagatacatccgtatcaatacaacaaggatcgacacaacaggtatcaacacaacagcaacaaggataa

SEQ ID NO: 58700 - protein, 261 aa, Unknown
  Obtained from environmental sample
  DOMAIN (22)...(187): tRNA synthetase class II core domain (G, H, P, S and T)
  misc_feature (1)..(261): Xaa is any amino acid
MSTQIIQGPKGTRDFYPEDMSFLQHIFDSWHRSCRLYGFEQYEGPMFEHLDLYTQKSGAEIEKQLYSFEDKGGRLMALRPELTPTLARMAASQGTNLKRPVRWYSISRLFRYERMQKGRLREFIQLNMDILGIEDVSADAELIAAAVDMMRAFGFDERDFKARVSSRTLLEEMFLACGVGQDKLPTLYALLDKKGKIAPEEFERELSEAAGGGEVCGKVKALFNCAGLDDIEKFAESIGIDTSVSIQQGSTQQVSTQQQQG

SEQ ID NO: 58701 - DNA, 1305 bp, Unknown
  Obtained from environmental sample
  misc_feature (1)..(1305): n is a, c, g, or t
ttgggaaaacttccctcggccgacccgcttgacgaaaacgtcgccgaatggtggaaaaaaagggctgcgctcatttataaatacatcccggatttggccggttttcttgtaaaagccgattccgaaggtgagccgggaccttttcaatacaaccgaacccacgcggacggcgcgaatatgctggcaaaggcggtaaaacctttcggcggggtaataatttggcgttgttttgtatacaactgcgtacaggattggagggataaaaacacagaccgcgcccgcgccgcttacgaccactttatgcctcaagacggcgcgtttgacgacaatgttatcctgcagataaagcacggaccttacgattttcaggtgcgcgagcctgtatccccgcttttaggagcgttaaagaaaacccgccatgtgatggaattgcagataacgcaggaatacaccggccaccagatagacctctgttttttgccttatatgtgggaagacattatgcgctacgacagcgcgcatggggaaaaaagcagtatcatggagttagttgccggacgcagagaaagctctccgggtatagagggatttgttgcggtagtaaacgtaggacttgataaaaattggacagggcacaccttggcgcaggcgaacctttacggttacgggcgcatggcgtggaatccggcgattacggcgaaggaaatcgcgggcgaatggagcgcgctttcattcggagaatgtgaagcggcgaaaaaaacagaaaaaatccttcttaaatcatatcccgcgtatgaaaaatacaacgctcccttcggcgtttgtttcatggtaactccgaacactcattacggtccaaatatcgaaggttacgaattcagccgctggggtacataccaccgcgccgacgcaaacgcaatcggcattgaccgtacaacatccggcaccggctacacaacccagtattctcagaaaaacgccgcgctttatgccgacacttctgcctgcccagaaaacttaatcctgtttttccaccgcctgcgctacgactataaaatgaaaaacgggcagaccttattacagaatatctacgacacccactttgagggatatgacgaagttgaatccatgctggaagactggaaaagtttgaagaattcactggaaagcgaagtgtacaattcggttttatcccgctttgaacgtcagcttgcgaacgcccgcgagtggagggatcagattaacacttattttaggcgcaagacagggatagatgatgggaagggaagaaagatttatgattaa

SEQ ID NO: 58702 - protein, 434 aa, Unknown
  Obtained from environmental sample
  DOMAIN (1)...(209): Glycosyl hydrolase family 67 middle domain
  misc_feature (1)..(434): Xaa is any amino acid
MGKLPSADPLDENVAEWWKKRAALIYKYIPDLAGFLVKADSEGEPGPFQYNRTHADGANMLAKAVKPFGGVIIWRCFVYNCVQDWRDKNTDRARAAYDHFMPQDGAFDDNVILQIKHGPYDFQVREPVSPLLGALKKTRHVMELQITQEYTGHQIDLCFLPYMWEDIMRYDSAHGEKSSIMELVAGRRESSPGIEGFVAVVNVGLDKNWTGHTLAQANLYGYGRMAWNPAITAKEIAGEWSALSFGECEAAKKTEKILLKSYPAYEKYNAPFGVCFMVTPNTHYGPNIEGYEFSRWGTYHRADANAIGIDRTTSGTGYTTQYSQKNAALYADTSACPENLILFFHRLRYDYKMKNGQTLLQNIYDTHFEGYDEVESMLEDWKSLKNSLESEVYNSVLSRFERQLANAREWRDQINTYFRRKTGIDDGKGRKIYD

SEQ ID NO: 58703 - DNA, 1899 bp, Unknown
  Obtained from environmental sample
  misc_feature (1)..(1899): n is a, c, g, or t
ttgattatgaaatttacagacggctactggttaatcaaagaaggtgtacaggcgcattttgcatcttgcgcgtttgagacagaacaacaaggggatgaacttgttgtttacgcgcctganaggccaatcagacacaggggcgatacgctgaatacgcctcttcttacggttcgctattcaagccctttacgaaatgttataagagtgcgaatttctcattttgaaggcgcgttggacaaggggccgcattttccgcttaacattgacgcgcaaaaaaaaattaagccggtagtgcgggtaacagacgacatctctgttttagaaagcggggaactttctgtaactgtaaaacacggcgataaatggaataacgtttttatgggcggcggaaaaatactgaccggaaatgacggcaagtctacaggttatatggtaaatgatgaaaaaacattcgttaaggaagaattaaatttatcggttggagaacttgtgtatgggcttggagagcgttttggccccttagtgaaaaacgggcagactgtggatatatggaacgccgacggaggcagcgcgagtgaacaggcgtataaaaacatcccgttctacatgacaaataaaggttacggcgtttttattaacgatacgggaaaagtgtcgtttgaagtcggcagtgaaaaaacttcgcgcgtccagttctgtgtaagcggggaagttttggaatatttctttatttacggtcctgagcctaaaaagattttagaactctataccgctcttaccggaaggcccgccatgccgcctgaatggagtttcggcctgtggctttcaacttcatttacaacttcgtacgatgaaaatacggtaatgggctttatcaacggcatggaagagcggaaaatccctctttctgtttttcattttgactgtttctggatgaaaggatttaactggtgcgactttacatgggataaagaagtttttcctgatcccgcgggaatcttgtcgcggattaaggcaaaaggtataaaaatctgcgtatggattaatccgtatattgcgcagaggtcttgtctttttgaggaaggaaagaaaggcggatattttttaaaacaaaagaacggttctgtataccaaaccgatcaatggcaggcgggaatggctattgtggatttttccaatccggacgctgttaaatggtatttaagttatcttgaaaaactgcttgatatgggagttgactgttttaagactgacttcggcgagcgtattcccgaagacgcggttttttttgacggaggtgatcctgagcgtcatcataatttttattcttatctgtacaataaaagcgtatttgagcttttggaaaaaaagcgcgggaaaggggaggcgtgcctgtttgcccgttgtgcggccgccggctgtcagaaatttcctttgcattggggcggcgactgcgaatcaacttttgaggcaatggcggaaactttgcgcggtggtttatctcttgggctttctggttttggcttttggagccatgatataggcggttttgagggagtaccgaacgccgcgctttttaaacgctggcttgccttcggtcttttatcttcccattcaaggcttcacggcagttactcttaccgcgtcccgtggaatgtagacgaagaatccgcggaagtttgccgcttttttaccgaattaaaatcacgattaatgccgcatattctggaagccgcgcgggaggctcatgaaaaaggcattccggtattacgcgcaatgtttatcgaataccccgatgaccccgcgtgcgcgtaccttgacaggcagtacatgcttggaagcaaactgctggccgctcccgtattcaagaaaacggagaagtaccctcggccgatctga

SEQ ID NO: 58704 - protein, 632 aa, Unknown
  Obtained from environmental sample
  DOMAIN (242)...(632): Glycosyl hydrolases family 31
  misc_feature (1)..(632): Xaa is any amino acid
MIMKFTDGYWLIKEGVQAHFASCAFETEQQGDELVVYAPXRPIRHRGDTLNTPLLTVRYSSPLRNVIRVRISHFEGALDKGPHFPLNIDAQKKIKPVVRVTDDISVLESGELSVTVKHGDKWNNVFMGGGKILTGNDGKSTGYMVNDEKTFVKEELNLSVGELVYGLGERFGPLVKNGQTVDIWNADGGSASEQAYKNIPFYMTNKGYGVFINDTGKVSFEVGSEKTSRVQFCVSGEVLEYFFIYGPEPKKILELYTALTGRPAMPPEWSFGLWLSTSFTTSYDENTVMGFINGMEERKIPLSVFHFDCFWMKGFNWCDFTWDKEVFPDPAGILSRIKAKGIKICVWINPYIAQRSCLFEEGKKGGYFLKQKNGSVYQTDQWQAGMAIVDFSNPDAVKWYLSYLEKLLDMGVDCFKTDFGERIPEDAVFFDGGDPERHHNFYSYLYNKSVFELLEKKRGKGEACLFARCAAAGCQKFPLHWGGDCESTFEAMAETLRGGLSLGLSGFGFWSHDIGGFEGVPNAALFKRWLAFGLLSSHSRLHGSYSYRVPWNVDEESAEVCRFFTELKSRLMPHILEAAREAHEKGIPVLRAMFIEYPDDPACAYLDRQYMLGSKLLAAPVFKKTEKYPRPI

SEQ ID NO: 58705 - DNA, 876 bp, Unknown
  Obtained from environmental sample
  misc_feature (1)..(876): n is a, c, g, or t
gtgctgaaagaaatagggaaaaccgacgggaccggcagcgccacggttatactcaacccgcaagcaactacggcgggcaacccgatgaagtacgttgtggaagccacgatcaccgacgccgatatacagacggtgtcgggacgccacacggttatcgcgttgccgccgtttatactcggcgtacgcgcaaacaggcacataacaagcggaagtaccatatccgcccgcatcgccgccataggcgtcaacgattctctcgtcgccgggcagaaggtgcacgtggaactcaaacgggtctcgtggacttcttacttgacggattctgatttctcttccggtaaacctaagtatataacaaacgagtcggcggatttggttgaggagagggaaacggttacgggcgcgaacccgacaccgatagagttcaagaatcaacaaccgggcgtgtacatattgtcgctgtcgtcgcgtgacaaacttgggcggttgcagacggttaagattgacctataccttgccggaggcgagcagcagtcttggaagaaggccgagcagaacgtctttgagacggtgatggacagaaactcctacgaacccggccagcaggcgaagattttgctgaaaagcccgtacaaaaaagcgctcgcgttggctgtgacggagatgccgaacggcgagaactcgtacaagtgggtaaacgtagacaacggccagggcacgtttacgctcgacatcaagcaggagatggcgccgcgtgtccccgtgagttttttgcttatgcgtccgcgagccgccgcgccgcgccgcgcgtcggacggctcgtcggtagacgccgaaagccggaaacggtggggaacacgacgtggctcacggtga

SEQ ID NO: 58706 - protein, 291 aa, Unknown
  Obtained from environmental sample
  misc_feature (1)..(291): Xaa is any amino acid
MLKEIGKTDGTGSATVILNPQATTAGNPMKYVVEATITDADIQTVSGRHTVIALPPFILGVRANRHITSGSTISARIAAIGVNDSLVAGQKVHVELKRVSWTSYLTDSDFSSGKPKYITNESADLVEERETVTGANPTPIEFKNQQPGVYILSLSSRDKLGRLQTVKIDLYLAGGEQQSWKKAEQNVFETVMDRNSYEPGQQAKILLKSPYKKALALAVTEMPNGENSYKWVNVDNGQGTFTLDIKQEMAPRVPVSFLLMRPRAAAPRRASDGSSVDAESRKRWGTRRGSR

SEQ ID NO: 58707 - DNA, 747 bp, Unknown
  Obtained from environmental sample
  misc_feature (1)..(747): n is a, c, g, or t
gtgctgataaatgtaaaagacgcggttgtcggcctgttggttgccgtcttcctaggggccctggtagctttggtttaccattacgaattgaacaagagctacagggatttggcaaaacgcattgtcgggctaagctccaagggcagaacgcccgaaaccattgatgatttgaaaaaagccatcgccctttacgagaaccagattgagcttaatgtaaagaccggcgcgcagacaggtgtgtactggaagatactcgcaatccgtcttgcggacaaaggcatgcacaaagacgcccttcaagcctttgagcgggcgctgtatttcaaagcggatgatccgaccatattttatcttacaggcgagtcagcatccgtggcggcggcttcgacagtgaattttaactccaattccactgaggagaaggagcgttatcagaaacttgccgagtccgcgtatctgcggtcaatagaactggatcccacctacggcaagccgaaaatcggccttggcattttatatgcatttgacatgaacaggtccgatgaggcgatcccccatttggagcgttatatgcaaataatgcccaatgacataaggggtatgtttgttacggcgcgggcttattatatgacggagaatttcgatcgcgccattgagctttacggcaggatactttcccgaaccaaggatcccaaagttaaaaccgaggcgcagaataatatagatcttataaggggcttgatgtaa

SEQ ID NO: 58708 - protein, 248 aa, Unknown
  Obtained from environmental sample
  SIGNAL (1)...(23)
  misc_feature (1)..(248): Xaa is any amino acid
MLINVKDAVVGLLVAVFLGALVALVYHYELNKSYRDLAKRIVGLSSKGRTPETIDDLKKAIALYENQIELNVKTGAQTGVYWKILAIRLADKGMHKDALQAFERALYFKADDPTIFYLTGESASVAAASTVNFNSNSTEEKERYQKLAESAYLRSIELDPTYGKPKIGLGILYAFDMNRSDEAIPHLERYMQIMPNDIRGMFVTARAYYMTENFDRAIELYGRILSRTKDPKVKTEAQNNIDLIRGLM

SEQ ID NO: 58709 - DNA, 372 bp, Unknown
  Obtained from environmental sample
  misc_feature (1)..(372): n is a, c, g, or t
ttgaggaatcaaggcccgctttggcaaaggggaagacgctcagcggctgtgcaaccgttggctgccaggccctttttgtcacaagngggcgggaagaggctttcgcgcaaggggatatggaaaaactattccaagtatgccacactggcaggaacgggtactaaagtccacacgctaaggcacagttttgccacggggcttctggaaggcggagccgatttaagaacagtgcaggccctgttgggacatgccgatcttggtaccacgcagatatatacccatgtagacgcgggtttgctgaaggaaagccatcggaagtaccttccaagactagataaatcccggtttggggaaaggagcggtcagtgctga

SEQ ID NO: 58710 - protein, 123 aa, Unknown
  Obtained from environmental sample
  DOMAIN (1)...(102): Phage integrase family
  misc_feature (1)..(123): Xaa is any amino acid
MRNQGPLWQRGRRSAAVQPLAARPFLSQXGGKRLSRKGIWKNYSKYATLAGTGTKVHTLRHSFATGLLEGGADLRTVQALLGHADLGTTQIYTHVDAGLLKESHRKYLPRLDKSRFGERSGQC

SEQ ID NO: 58711 - DNA, 759 bp, Unknown
  Obtained from environmental sample
  misc_feature (1)..(759): n is a, c, g, or t
ttgcaaataatgtcttcggcgcctgaactgaaaatgcccatactggacaggttttgcgcctggcttgccgccgtggaacgccgctccgcgctgactgtcgccgcctataagcaggaactgcggcgctttcttgagtttacatccgaatcggaaattaaaaacgtcaatgttgataagcttgccgcttacctggactggcgcaagcaatgtggggggctggattcccggtctttggcaaaggctgtttcgtgcctgcgttctttctttcgtttcgcgatgggcgaaggaatacgccccgacaaccccgcgtcccttttggacagcccccggcggcgtttgaagttacccgagactatggacagggaaacggtggagaggcttttgggcacaatggatgccggaacgccccttggacttcgggacagggctctttttgaattaatatactcatcgggcctgaggatatccgaagcggtcggattgaacctgcgcgacatagattttaaagaaagcgtcgcacaggtaaagggaaaaggaaacaaacagaggcttgcggtttttggcggggaagccgcggcgtggctaaagcgctaccttgaggaatcaaggcccgctttggcaaaggggaagacgctcagcggctgtgcaaccgttggctgccaggccctttttgtcacaagngggcgggaagaggctttcgcgcaaggggatatggaaaaactattccaagtatgccacactggcaggaacgggtactaa

SEQ ID NO: 58712 - protein, 252 aa, Unknown
  Obtained from environmental sample
  DOMAIN (127)...(250): Phage integrase family
  misc_feature (1)..(252): Xaa is any amino acid
MQIMSSAPELKMPILDRFCAWLAAVERRSALTVAAYKQELRRFLEFTSESEIKNVNVDKLAAYLDWRKQCGGLDSRSLAKAVSCLRSFFRFAMGEGIRPDNPASLLDSPRRRLKLPETMDRETVERLLGTMDAGTPLGLRDRALFELIYSSGLRISEAVGLNLRDIDFKESVAQVKGKGNKQRLAVFGGEAAAWLKRYLEESRPALAKGKTLSGCATVGCQALFVTXGREEAFAQGDMEKLFQVCHTGRNGY

SEQ ID NO: 58713 - DNA, 1104 bp, Unknown
  Obtained from environmental sample
  misc_feature (1)..(1104): n is a, c, g, or t
atgataacagcggactctaccggggttgaatttatagccgtaaatacggataaacaagaccttgtaaataaaagcatggccgaaaccaaattgcagattggcgccaagctcacgggcggaaggggagccggcagcaaaccgtctgtcggagaggacgccgccaaagaggatcaggaggagatcaacgacgtctcgcgcggcgccgacatggtgtttgtcaccgccggcatgggaggcggcaccggcaccggagccgcgcctgtaatcgcaaagatcgcaagagaccacgagtcgctggttgtcggggttgttacaaaacccttcgagttcgaaggcgaggcaaaaatgcggaaagccgaggaagggattaaaaagctgcgcgaatttgttgacaccctgataataattccgaatgagaatctgtttaaacttgttgacagcaaaacgacctcggtccaggcctattcccttgctgatgatgttcttcgccaggcggtgcagagcatagttgagttaattatcaagacagggttaataaatatagattttgcagatgtccagtcgaccatgaaagatcagggagacgcccacatgggaatagggattggcagaggagacaaccgcgccaaggcggcagccgacgcggccatagacaaccctcttctggaagacaccggcatcgagggcgcgacgcggcttttggtcaacatttccggtcccgaaaccgtctccatgcttgaggttaaggatataatggcggccatcaaggcaaaggcgtctccaaatgttgaaattatatttggccaatacattgagcctgaactgggtgaggatatcaaggtaaccgtcatcgccaccggtttcagcgccaaaagcgcgtcatcggcaaaaagctccgacacaggcagaaaatcggaagccgttctcggcgacgttctcagcattgatcattttaacagaataaagcacggctccagcgtccacagtaatgacaactatgtcggacttgtaaacaagcccagagataacagcaataacctggaaattcccacgtatgtccggaaaaacatccttgaagatcttgacaaggcggcttgcaaataa

SEQ ID NO: 58714 - protein, 367 aa, Unknown
  Obtained from environmental sample
  DOMAIN (179)...(302): Tubulin/FtsZ family, C-terminal domain
  misc_feature (1)..(367): Xaa is any amino acid
MITADSTGVEFIAVNTDKQDLVNKSMAETKLQIGAKLTGGRGAGSKPSVGEDAAKEDQEEINDVSRGADMVFVTAGMGGGTGTGAAPVIAKIARDHESLVVGVVTKPFEFEGEAKMRKAEEGIKKLREFVDTLIIIPNENLFKLVDSKTTSVQAYSLADDVLRQAVQSIVELIIKTGLINIDFADVQSTMKDQGDAHMGIGIGRGDNRAKAAADAAIDNPLLEDTGIEGATRLLVNISGPETVSMLEVKDIMAAIKAKASPNVEIIFGQYIEPELGEDIKVTVIATGFSAKSASSAKSSDTGRKSEAVLGDVLSIDHFNRIKHGSSVHSNDNYVGLVNKPRDNSNNLEIPTYVRKNILEDLDKAACK

SEQ ID NO: 58715 - DNA, 2706 bp, Unknown
  Obtained from environmental sample
  misc_feature (1)..(2706): n is a, c, g, or t
atggcatccgccgcgcccaagaaattcggcaaattccttgtctcaatagccggttacccgtcgtccgcgtttaccgtgaccaagtttagcggcagagacgcgataggtacgccatattcgttcgacatagagtttcaaccctccgaatcggcgttagtatccggcgctcaggcgccggaacttaccgtggaacgcgttctcggcaaacactgccgccttgagctgatccgcgataggaacggcgagatcaccgaatatgacggcgtcgtctcggagttcaagaaaatgattcggtcgaaacccgtatacgctatccgcttggtaccgtggatggaactcctgtcgctcaacataaacaacagggtcttccaaaagcggaaagtagtggatatcatcaaacatgttatcgggaacgccggcatagatacgcgttgcgcctttaaatacaagtgcggcgagtccgcgaatccgaaaatagatttttgcgtgcagtaccgtgagagcgatctcaattttatctcgcggctcatggagcaaaacggtatatggtactactttgagggcggcaggaacgtagtcgttaccgatgctttcgcctattttcccaagatggccgatagcataccatttgttgaaaatatcggctttgcggagactgcgaagcgtttgcgcgacgacgctgaagaaacgcataattccgcagagccggtcgatgtcggaggggaatcgtctgttgatagtgttgacaatacggttgcggatggatccgaaacgctgcggcaggaataccgctacggcggcgaattcggagaatcggtctactcgctgacctccgtatccgccgttattcccaaaatggttagactgcgcaaccaaaactaccgcactccggaaacgccgccggaaggcgcttcagagggtgttgatataggcggcgcgtgggggagcgtgtacgagtacggcggcacgttcaagaacgatgaggagggaaaacgtttggcgtcgctttatttaacgcgattgcagacggagaatttgcaaacagtcggtagcagcaggtgcgcggcgtttcgcgccgggcggataatttatattgacggcgtcggcgaatttttgctgctctccgtggaacataaaggcgggcaaggggaggggagcggtaatcaagagtatacctacaacaatcacttccgctgtatagactcaaccaagaaggcctacgccccgccgctgcgcgccaagccgccgatagcctcaggactaatcaccgcgcccatagacgcgcttggggaagatttgcccaacatcgacgaaatggggagataccgcgtcaaactccccttcgacctctcggaaacgccggagtatggcgcgaccaaggacatacggctgtctcagatatccggcggcgacggctacggcgtccacttcccgtcaaagaagaactcggagatgatacttggctacgtggacggaaacccggacaaacccataggcctgggcctgctgcccgacgccaacgcgaaatcggtttcaaacagcggaaacagaacggaaaacgtcatacgcacatggggcggcaacgaacttgtcatggacgacgagagagagaaatccaagatcgccatgagtaccacggacggacataaactcgttatggacgatttgaaaggattggcgcaaatcgctatgcgcaccgccgcgggccatgggctcattatgaaagacgaggataaaaaagagatggtcactctgcataccgtaggcggcaacgaacttgtcatggacgacgacccggaaggagaaactgtcacgttgtcaacgccgaaggttgagggcaaaccgagtgtgctcagcagagtaaaaccgcttttaaccgcggcaagcgcggcgaaggatgcggttaagcgcatatcgctggcaaaaatcgggcttccggagagcggcgccgttgttaatgaaaacattgaaaaaagcgagctcgcgttggataataaggagtcttcagccgtacttaaagcgtacggacaggagatctccctcaaagaggatgtcaataaatctaagtgcggaataaacttcaccacatcgactatgcttcaaatagagatgaacgatatcgagcgtaaacttgctatacgtacgccgaggggcaactcaatagaactaagcgatataaaaaacaacatcgttatcggtaacgcgtccaaaataagaacagtcctgcgcaaactgaaagaaaaagccacggatgttttggattccgtcaaaaaaggggattggaaagtgctcaaaaaagataagcgcgaaaagacgctcaaagagataaaggatttgctgaaaaaggcaaaaaccgacatccaaaagacgataaacagcattattctggaatccgacggcggcaaaatactcctgacgacaagcggtaacgacggaacgatagagatggacaacgagaaggacaccatcacgctgcataacgcgaaagggaagaataagatcgtcctagacgggaaaaagaagagcataagcatggattcccccggagacataaacatccacgcaggcggaaacataactatcagcggcaaagggaagacggttctgggagccaaaaaagatatcgtcgtcaacgctaacggagaaacgtttgtaggcggcaaaaaagaggttaaggtcaagggagggaagattaaactgaattaa

SEQ ID NO: 58716 - protein, 901 aa, Unknown
  Obtained from environmental sample
  DOMAIN (425)...(499): Protein of unknown function, DUF586
  misc_feature (1)..(901): Xaa is any amino acid
MASAAPKKFGKFLVSIAGYPSSAFTVTKFSGRDAIGTPYSFDIEFQPSESALVSGAQAPELTVERVLGKHCRLELIRDRNGEITEYDGVVSEFKKMIRSKPVYAIRLVPWMELLSLNINNRVFQKRKVVDIIKHVIGNAGIDTRCAFKYKCGESANPKIDFCVQYRESDLNFISRLMEQNGIWYYFEGGRNVVVTDAFAYFPKMADSIPFVENIGFAETAKRLRDDAEETHNSAEPVDVGGESSVDSVDNTVADGSETLRQEYRYGGEFGESVYSLTSVSAVIPKMVRLRNQNYRTPETPPEGASEGVDIGGAWGSVYEYGGTFKNDEEGKRLASLYLTRLQTENLQTVGSSRCAAFRAGRIIYIDGVGEFLLLSVEHKGGQGEGSGNQEYTYNNHFRCIDSTKKAYAPPLRAKPPIASGLITAPIDALGEDLPNIDEMGRYRVKLPFDLSETPEYGATKDIRLSQISGGDGYGVHFPSKKNSEMILGYVDGNPDKPIGLGLLPDANAKSVSNSGNRTENVIRTWGGNELVMDDEREKSKIAMSTTDGHKLVMDDLKGLAQIAMRTAAGHGLIMKDEDKKEMVTLHTVGGNELVMDDDPEGETVTLSTPKVEGKPSVLSRVKPLLTAASAAKDAVKRISLAKIGLPESGAVVNENIEKSELALDNKESSAVLKAYGQEISLKEDVNKSKCGINFTTSTMLQIEMNDIERKLAIRTPRGNSIELSDIKNNIVIGNASKIRTVLRKLKEKATDVLDSVKKGDWKVLKKDKREKTLKEIKDLLKKAKTDIQKTINSIILESDGGKILLTTSGNDGTIEMDNEKDTITLHNAKGKNKIVLDGKKKSISMDSPGDINIHAGGNITISGKGKTVLGAKKDIVVNANGETFVGGKKEVKVKGGKIKLN

SEQ ID NO: 58717 - DNA, 1713 bp, Unknown
  Obtained from environmental sample
  misc_feature (1)..(1713): n is a, c, g, or t
atgatatgcgcgtccgagcagtccgtcatcgccttgcaaagtatttacgaaaaagtgaaagccgaattcaaacgccggggctgttacttccttacgcccgaagaaaccgagaaagtgcgagaaacaatcattgtcaacggatcgctgaacgcgaaaatcgtcgggcagaaagcggcgaaaatcgcggagcttgccggcgtaaaggttgaggaggcaacgaaaatcctcatcggcgaagtagagagcgtggagctgacggaagaattcgctcacgaaaaactttccccggtgctggcgatgtacagggcgaaagattttgacgacgcgctggacaaagccgaccatttggtaaaagacggcggctacggccacaccgccagcgttttccttaatccgcataccggcgcggacaaactcgccgctttcagcgcgcgcatgaagacctgccgcattgtgcttaacacgccctcggcgcacggcggtatcggtgacctgtacaactttcacctgcggccttcgcttacacttggctgcggcagttggggcggcaattcagtttcagataacgtcggcgttaagcacctgttaaatataaaaacactggcggcaaggagggaaaatatgctgtggttccgcgctcccgaaaaagtatatatcaagaggggatgcctccccgtggctctggacgaacttaaaaccgttatggggaaaaaacgagcttacatcgtcaccgacacattcctctacgaaaacggttacaccaaaacgataaccgaaaaattggacagcatgggcattgtccacgaaactttttttgatgtcgcccccgacccgactcttgcctgcgcgaaaaaaggcactgctcagatgagcgccttcaagcccgatgtgattatcgcgttgggcggcggctcggcgatggacgcgggaaaaatcatgtgggtgctctacgaacaccccgaagttgattttgaagatatggctatgcgcttcgccgacattcgcaagcgcgtctacaccttccctaaaatgggagagaaggcttattttatcgccgtaccgacctccgcgggaacgggcagcgaggtgacaccctttgccgtcatcaccgatgaaaccaagggcatgaagtatccgcttgcggattacgagcttttacccgacatggcgatagtggatgccgacgtgcagatgaacgcgcccaagggacttacaagcgcaagcggcatcgacgcggtgacacacgcgctggaagcctatgtttcggttatggcgaccgactacaccgacgggcttgcgatacaggcgctcaaggtgattttcgagtggcttcccgccgcgtacaacgaaggcgcggcaaaccctgttgcgcgcgagaagatggcgaacgccgcaacgattgcgggcatggcttttgccaacgcgttcctcggcgtgtgccactcgatggcgcacaagctcggcgcgttccaccacctgccccacggcgttgccaacgccctgatgatcagcgaagtgcttcggtacaactcatgcgaggttccgcccaagatgggatccttcccccaatatgatcacccaaaaactttatccagatatgcgcagattgcggatgcgctggctctcggcggctcaacagacgaggataaacttgaaagattaatcgcggccgtggaaaaattgaagagcagatggggatcaggaagacaataa

SEQ ID NO: 58718 - protein, 570 aa, Unknown
  Obtained from environmental sample
  DOMAIN (214)...(570): Iron-containing alcohol dehydrogenase
  misc_feature (1)..(570): Xaa is any amino acid
MICASEQSVIALQSIYEKVKAEFKRRGCYFLTPEETEKVRETIIVNGSLNAKIVGQKAAKIAELAGVKVEEATKILIGEVESVELTEEFAHEKLSPVLAMYRAKDFDDALDKADHLVKDGGYGHTASVFLNPHTGADKLAAFSARMKTCRIVLNTPSAHGGIGDLYNFHLRPSLTLGCGSWGGNSVSDNVGVKHLLNIKTLAARRENMLWFRAPEKVYIKRGCLPVALDELKTVMGKKRAYIVTDTFLYENGYTKTITEKLDSMGIVHETFFDVAPDPTLACAKKGTAQMSAFKPDVIIALGGGSAMDAGKIMWVLYEHPEVDFEDMAMRFADIRKRVYTFPKMGEKAYFIAVPTSAGTGSEVTPFAVITDETKGMKYPLADYELLPDMAIVDADVQMNAPKGLTSASGIDAVTHALEAYVSVMATDYTDGLAIQALKVIFEWLPAAYNEGAANPVAREKMANAATIAGMAFANAFLGVCHSMAHKLGAFHHLPHGVANALMISEVLRYNSCEVPPKMGSFPQYDHPKTLSRYAQIADALALGGSTDEDKLERLIAAVEKLKSRWGSGRQ

SEQ ID NO: 58719 - DNA, 759 bp, Unknown
  Obtained from environmental sample
  misc_feature (1)..(759): n is a, c, g, or t
atgagcagttacaggcttgatactttacttgccgaccgcgggtcgaagaaaatataccgcgacggggacaaggtgataaagctcaggagcgaggaataccccgcgccggacgtgctttctgaagcgcacaaccttgccgcggtggaagagactgccctcaaagtcccccgtctggtggaagtaacgaaaattgacggcaagtgggcagtagtatgggaatacattgagggaaccacccttgacatgctgatgaaaaaaaacaaagacaaggaacagcagtatcttgaacgttttgttgacattcagcttgacatgtaccgttatcatgcgacaaggcttccgcttcttaccgaaaaaatggagcgcaagataaaagcctccggtcttgacgcaaccgccagctacgaaattttgggaaggctggcgagtatgcccaagcacaccaaactctgccacggcgattttaatcccagtaacattgtgattaacgaaaaagacgaggcatatatcatcgactggtgccatgccactcagggcaacgcttcggcggacgcagcgcacacatatatgctgttccggcttaaaggttacgccgacattgcggaaaagtacctttctttattttgtaaaaagagtaacacgtcgaaacactacgtggagaagtggctgtctattgtggcggcgtctcagctttacaagaaaaaaccggaagagaaagaattgttattacattgggctaatattgtagaatacgcataa

SEQ ID NO: 58720 - protein, 252 aa, Unknown
  Obtained from environmental sample
  DOMAIN (5)...(218): Phosphotransferase enzyme family
  misc_feature (1)..(252): Xaa is any amino acid
MSSYRLDTLLADRGSKKIYRDGDKVIKLRSEEYPAPDVLSEAHNLAAVEETALKVPRLVEVTKIDGKWAVVWEYIEGTTLDMLMKKNKDKEQQYLERFVDIQLDMYRYHATRLPLLTEKMERKIKASGLDATASYEILGRLASMPKHTKLCHGDFNPSNIVINEKDEAYIIDWCHATQGNASADAAHTYMLFRLKGYADIAEKYLSLFCKKSNTSKHYVEKWLSIVAASQLYKKKPEEKELLLHWANIVEYA

SEQ ID NO: 58721 - DNA, 552 bp, Unknown
  Obtained from environmental sample
  misc_feature (1)..(552): n is a, c, g, or t
atgttgagtgaaaaaagcagaaaggaattgaagattgcggtttcaggaaaaagcggttgcggcaacactactgtaagccgccttttggcagacactctggatgtcaggtttattaatttcaccttccgcaacctggcccaggaaaaacgcttgagcctgaaagaggtgcttgaccttgcggcaaaggatgattcctgggatagggaagtggacaccagacagactgaaatggcaagggaaaaaggcggttgcgtccttggttccaggcttgccatttggatgctgcctgaagccgaccttaaagtatttcttaccgcacggcctgaaaccagggcaaaacggatacagggcagggaaggggcgcgtcttacagatgttgctgaatttacagcttcaagggacaggcaggatcatgaacgttacttgcggatttacaatatcaataacgatgattattcttttgcggatttaataattgaaacagatgaaattgatccgggggaaattgtccaactgattattaccgtacttgaaaaaaagtattctgactaa

SEQ ID NO: 58722 - protein, 183 aa, Unknown
  Obtained from environmental sample
  DOMAIN (18)...(178): Shikimate kinase
  misc_feature (1)..(183): Xaa is any amino acid
MLSEKSRKELKIAVSGKSGCGNTTVSRLLADTLDVRFINFTFRNLAQEKRLSLKEVLDLAAKDDSWDREVDTRQTEMAREKGGCVLGSRLAIWMLPEADLKVFLTARPETRAKRIQGREGARLTDVAEFTASRDRQDHERYLRIYNINNDDYSFADLIIETDEIDPGEIVQLIITVLEKKYSD

SEQ ID NO: 58723 - DNA, 867 bp, Unknown
  Obtained from environmental sample
  misc_feature (1)..(867): n is a, c, g, or t
atgaaaagcatgacctgttacgcttacaaaaaagaatccaaagacaatgttacggtttcagtcgaggtgaagggatacaacagccgttttctggatctttcaatcaaccttcccttctggctttcttctcttgaaccgtccataagagcatatcttaattcccgtttttcaaggggaaaactggaagttggaataagggtaaaagaagaaggagtcccgctttcggtttcaataaatgaaaccgccgcgatgaattataaaaacgcgatcgacaagcttgccaaaactttgggcttacagcaggaagctggccttgaccttcttctgggccttgagggagttatagaaactgaaacagacagggacgccgaaaagtaccgcagtttcattgagagcgttcttgctgccgcctctgatcaggcggaagccgagcgtgaacgggaaggtcggcacacgatggatgatatacttgcccatgtcgccgttttggaagaatctgtgcggggtattagctcctatgtgcctgagatcgaaaaagcaataaaggaaaatctgcgttcccgttttgccgagcttttgggagataaaatagacgaaaaccgcattctttcggaaacagcggttctattgatgaagtataccatttccgaggagctttccaggctttcttcgcatctgaaagaattcagactggaagcggaaagaaatccaagcccgggtaagaagcttgattttctttcccaggaaataaaccgggaaattaatactgtcagttcaaaaacgcccatgcttgaagtaagcaggatcgttgttgaaatgaaaaacgcgctggaaaacataagggagcaattaaggaatgttgagtga

SEQ ID NO: 58724 - protein, 288 aa, Unknown
  Obtained from environmental sample
  DOMAIN (1)...(155): YicC-like family, N-terminal region
  misc_feature (1)..(288): Xaa is any amino acid
MKSMTCYAYKKESKDNVTVSVEVKGYNSRFLDLSINLPFWLSSLEPSIRAYLNSRFSRGKLEVGIRVKEEGVPLSVSINETAAMNYKNAIDKLAKTLGLQQEAGLDLLLGLEGVIETETDRDAEKYRSFIESVLAAASDQAEAEREREGRHTMDDILAHVAVLEESVRGISSYVPEIEKAIKENLRSRFAELLGDKIDENRILSETAVLLMKYTISEELSRLSSHLKEFRLEAERNPSPGKKLDFLSQEINREINTVSSKTPMLEVSRIVVEMKNALENIREQLRNVE

SEQ ID NO: 58725 - DNA, 1452 bp, Unknown
  Obtained from environmental sample
  misc_feature (1)..(1452): n is a, c, g, or t
ttgatgaaggtcgaaagccagttgtatacatcctcggtgtttgcgaaaggtgttgaagcaagcatatgtttttatataccatatcttatgggttcagaaaaagccttgaggtcaggccgggagatattgaaaaagggcgctaaagtttactttgtcggaattaaaggtacaggcatgtgcgcccttgccgaattgatgtacaacagcggaatggttgtttcaggctctgatcgcgaagaagttttttacaccgatgagatccttaaagagctggggatacctttttacgaatcttttaagacagagcacatcggggaaggggaagatactcccgatatggttgtttattcggcagcctactcgccagaagaaaatcctgaaatcgccgaagccgccagacgcggcattcctgtttgcaagtataccgatgctttgngagcgtattcggccggttttgattcggcgggggtaaccggaagtcacggcaagaccactacgaccgccctcaccggcactttgcttcgcggcgcgggcttaccggcccaggttctggttggtagcgcggtcaacggctttgggggccgctgtacgctaaacctgggggataaatattttttggccgaaacctgcgagtacaggcggcattttttatcttttcatccgcgaaggataatcctgaccagcgtggaaagcgaccatcaggattattaccctcgctacgaagacatcagagacgctttcatcgaatacggaaggcttcttccgcccggcggggaactaatttactgtgccgatgatccaggcgcttccgaagtcgccgcagttctaaaaaaagaaaaaccggaaattaaacttgtcccttacggttttagcgcccagggcgattttcaaataaaaagctatcatgttattagcgaaaggatagtgatgacgcttaatggttttccgggcgaattaaagatccgcatacccggaaagcatacggccctcaatacggcggcggccattgccttgtgttcacttctggtaaagaaggaattcggagacgaaggcggcgacgggtggaatgaagagagaagggaaggagtcagaaaagagctggaagaattttcaggttcaaaaagaaggtcggaaattctgggcgaggcgggcggtatcctttttatggacgattacggccatcacccgacagcggtgaaaacgactctccagggcttaaaagatttttatccccggcgcagactggtaataagttttatgtcccatacattcacaagaacggcgacgctgtttgacgagtttgcttcctgttttaacgacgccgatataatcttgttgcataaaatctacggttccgccagagaagtctacaagggaggcgttacaggcagaacgcttttgaaaaggcaaaagaaaactatggcgagcgggtattttatgccgaagaagtag

SEQ ID NO: 58726 - protein, 483 aa, Unknown
  Obtained from environmental sample
  DOMAIN (155)...(339): Mur ligase middle domain
  misc_feature (1)..(483): Xaa is any amino acid
MMKVESQLYTSSVFAKGVEASICFYIPYLMGSEKALRSGREILKKGAKVYFVGIKGTGMCALAELMYNSGMVVSGSDREEVFYTDEILKELGIPFYESFKTEHIGEGEDTPDMVVYSAAYSPEENPEIAEAARRGIPVCKYTDALXAYSAGFDSAGVTGSHGKTTTTALTGTLLRGAGLPAQVLVGSAVNGFGGRCTLNLGDKYFLAETCEYRRHFLSFHPRRIILTSVESDHQDYYPRYEDIRDAFIEYGRLLPPGGELIYCADDPGASEVAAVLKKEKPEIKLVPYGFSAQGDFQIKSYHVISERIVMTLNGFPGELKIRIPGKHTALNTAAAIALCSLLVKKEFGDEGGDGWNEERREGVRKELEEFSGSKRRSEILGEAGGILFMDDYGHHPTAVKTTLQGLKDFYPRRRLVISFMSHTFTRTATLFDEFASCFNDADIILLHKIYGSAREVYKGGVTGRTLLKRQKKTMASGYFMPKK

SEQ ID NO: 58727 - DNA, 1329 bp, Unknown
  Obtained from environmental sample
  misc_feature (1)..(1329): n is a, c, g, or t
ttgggaagacggaagaaaaatatcggaaaccagggtaagaaattgaaaaagtcgtggatattctttgtagcgtcgcgttatatttttaaaggacgaagcagttctcccgttttagctgttttgggaatagcgataggagtgcttgccctgatagtgattatcgccgttatgaacggatttcaattgggttttatagagagtattttggaagtttcgtcgtttcatttacgcatagagtcttttgatcaaaaaaatattaatgaaatacaggatattatgctggggattcccggcgtaagagcggctgttccttttaaggaatatcaggctatcgcgagggggagacgtttaaaccagcaagcggtgttaataagagggttaggtgaaaatactctggaaatagataaggcaatggccggtaaattggattttgaagacggctcttttgatttatcaaaaaacaaaaatatattattgggttcagagctggcttacaggcttggtctttccataggagacgatataactcttttttcgctgacaggcattttgtcgcangaggacggaagcagttttgacggacaggttacgggaatattcagaaccggatattatgaatatgactgcagttgggcttttatcaacatagaaaacgtttcttttatgcaaaacgaatctgatttaatgcttgggattaaacttgcaaaccgttttcttgacaaaacggcgttggaacaggcgcgaaagaggctgtcagcttatgaggacgttaaaataacaagctggcgcgattataaccgttctttctttggcgctcttagaacggaaaaactgtttatgttcatacttgtcgggcttatttttattgttgtcggcatgaacatattccaagcgcaaagaagatcggttttgcaaaggcgcgaggaaatcggtttgttgcgcgccgtaggcggcacgaagaaggccgtgcgttttgtatttgtccttgacggcgcgattatagggcttacaggcgcgtccattgggctgttttttggattggccgtcgccctgaacatatcaggcttttttacattagtagaaaatattataaattggtttatagatataataaatatattggcgggtttttttggagcgggaatgacgggaaatttcgccgtattttcgcctgcggtattctacataaaagaaataccgtcgcggatattgccctttgaagtaacgttaatatttatgtttggatttatatccgctcttgcggcggcttggtttgcgtcaagaaaagtttctaatatacaaccggcggaggtattgcgttatgagtga

SEQ ID NO: 58728 - protein, 442 aa, Unknown
  Obtained from environmental sample
  DOMAIN (227)...(435): Predicted permease
  misc_feature (1)..(442): Xaa is any amino acid
MGRRKKNIGNQGKKLKKSWIFFVASRYIFKGRSSSPVLAVLGIAIGVLALIVIIAVMNGFQLGFIESILEVSSFHLRIESFDQKNINEIQDIMLGIPGVRAAVPFKEYQAIARGRRLNQQAVLIRGLGENTLEIDKAMAGKLDFEDGSFDLSKNKNILLGSELAYRLGLSIGDDITLFSLTGILSXEDGSSFDGQVTGIFRTGYYEYDCSWAFINIENVSFMQNESDLMLGIKLANRFLDKTALEQARKRLSAYEDVKITSWRDYNRSFFGALRTEKLFMFILVGLIFIVVGMNIFQAQRRSVLQRREEIGLLRAVGGTKKAVRFVFVLDGAIIGLTGASIGLFFGLAVALNISGFFTLVENIINWFIDIINILAGFFGAGMTGNFAVFSPAVFYIKEIPSRILPFEVTLIFMFGFISALAAAWFASRKVSNIQPAEVLRYE

SEQ ID NO: 58729 - DNA, 1284 bp, Unknown
  Obtained from environmental sample
  misc_feature (1)..(1284): n is a, c, g, or t
atgcttgccgatttcatagaccccagccacgagcttgttcttctgtccaagaaggtagactggcagtatttcgaggacgaattcgcacccctctattgcaccaacaacgggacgcccagcgtccccatccgcctgatggtagcctgcctcatgctcaagcagttgtataatttaggcgatgagagcctgcccgcctattgggtcagggatgtctacttccagtatttcagcgggatgaccttttttgagcatgagttcccgttcaatcctagcgatttttcccatttccgcaaacgtataggcgttgatggatttgagaagatatttgcttacagcgttaagcttcacggcaaagatgtttccaagcaggctagattcgctctttccgacacgaccgttcaagagaacaacaccgcattcccaaccgatgcgaagctgtgcaagaaagtgatagacaaatgcaacgagatagcggattcggaaggcatccggcaacgtcagaagttccgcaaggagagcaagcagctagtccgcgaagcctacaacggcaaacacccgaagcgtttcaggaaggctcagaaggcaaagaaacgccttcgcaccatagcctgccatcagatacgcgagcttgagcagaagatgagcgagagccagaacttggtctatcgcaatgagttggagcttttcaagcgcgttgccaatcagcagagaaacgacaaggacaaggtttacagcctgcacaagtcattcaccaagtgcatagccaaaggtaagccgcacaggcagtatgagttcggcaacaaggtggggattgtttccggcggagtgaaagggaggaagataatactcgccgtcaagggcttcatagacaatgtttttgacgggcataccattgagccgttgcttgcgcagatgcaggcaaacaaaatagctcttcccgatgagattgcctacgaccgtggcggcaaaggcaggagcgagataatgggcgtaaaaattctgataccctctgttcctaaaaaaacggacactgctttgcaaaagctatccaagcggctgaagcaccgccgaagggcagcaatagaaccgataatcgggcacttgaagagcgatttccgcatggctaggaactatctcggcggagtggagggcgttgaaataaatgcgttcatgtctgcctgcgcttggaatctgaggaaaatgatggaaatgctcaagaagaaattcttgctctttattttgcaaacgcttttcccgcaaaatttattccgtatcgccgcttaa

SEQ ID NO: 58730 - protein, 427 aa, Unknown
  Obtained from environmental sample
  misc_feature (1)..(427): Xaa is any amino acid
MLADFIDPSHELVLLSKKVDWQYFEDEFAPLYCTNNGTPSVPIRLMVACLMLKQLYNLGDESLPAYWVRDVYFQYFSGMTFFEHEFPFNPSDFSHFRKRIGVDGFEKIFAYSVKLHGKDVSKQARFALSDTTVQENNTAFPTDAKLCKKVIDKCNEIADSEGIRQRQKFRKESKQLVREAYNGKHPKRFRKAQKAKKRLRTIACHQIRELEQKMSESQNLVYRNELELFKRVANQQRNDKDKVYSLHKSFTKCIAKGKPHRQYEFGNKVGIVSGGVKGRKIILAVKGFIDNVFDGHTIEPLLAQMQANKIALPDEIAYDRGGKGRSEIMGVKILIPSVPKKTDTALQKLSKRLKHRRRAAIEPIIGHLKSDFRMARNYLGGVEGVEINAFMSACAWNLRKMMEMLKKKFLLFILQTLFPQNLFRIAA

SEQ ID NO: 58731 - DNA, 1272 bp, Unknown
  Obtained from environmental sample
  misc_feature (1)..(1272): n is a, c, g, or t
atgaaatacttcaatcctgcgaatttagccattattgcctgtcccggaggggacatttttgcaaatgaagtaattcagcatcttcgtcataaataccgtataagccgtaaacaaacagtagaggaccttgccaaacgttacaatatagaagcgaacagggttgaccttcaaatagatcttataaacaaaattgttgcgaaaggagcgcttgcccaaagcggttccgataaaaataacgcgcccattaaagttcccgttaaatttaccttgtttccgaacggagagataaaatccgaaattcaagaatctatccgaggcaaagacgtgtatatttttcaggatgttgaaaatcattatcctgtaaatttttcaggcgagattgtaagtaatttatcgacaaacgatcaccttatgactatttttgttacggtggacgcagcaaagcaggcgggagcggagagaattactctggtaataccgaattatccttattcgcgccagcacaaggcaaagggaagggaagggcttaccgccagcagaataggaaaaatatttgaaagtctcggcgtagatcacattattacccttgatattcattccagggatataatgaacgtctttaacaatgtacgccttgaaaaccttcacgcaagttatcaaattatacaaacgttgataggcatggacgatattttaaacgacgattttgtcgtagtttctcctgacaccggtgctgttgacagaaataaattctacgcttccgcgctgaaaagacctttagctttgctgtataaagaaagagattactcaaaaatatcgaaggacgcgtcccagtcaaatatttcgcagatacgcctgttaggcaatgtaagggataaaaccgtttttatggctgatgatatacttggaacaggcggcacgctgataaaaggcatgaggcatcttaaagaaaacggcgcgcgcagaataatctgctctatcagtctgcctcttttctcggggaactctatagcgcactttgacgaggcgtacaacgaagggcttttttaccggcttataggaacaaacgccgtctatcaggaagaagttgtaaagcgcgagtggtatgtaaacgtcaatgttacgcgtctgtttgccgatgttatttcgcgccttcatcaaaatcaatctgtttcgagcctgcttgataatgccgctatcattaaccgcctgctttccaaaaaagcgatagaacctcagcacgagctcccttttacgcacccctcggactaa

SEQ ID NO: 58732 - protein, 423 aa, Unknown
  Obtained from environmental sample
  DOMAIN (209)...(343): Phosphoribosyl transferase domain
  misc_feature (1)..(423): Xaa is any amino acid
MKYFNPANLAIIACPGGDIFANEVIQHLRHKYRISRKQTVEDLAKRYNIEANRVDLQIDLINKIVAKGALAQSGSDKNNAPIKVPVKFTLFPNGEIKSEIQESIRGKDVYIFQDVENHYPVNFSGEIVSNLSTNDHLMTIFVTVDAAKQAGAERITLVIPNYPYSRQHKAKGREGLTASRIGKIFESLGVDHIITLDIHSRDIMNVFNNVRLENLHASYQIIQTLIGMDDILNDDFVVVSPDTGAVDRNKFYASALKRPLALLYKERDYSKISKDASQSNISQIRLLGNVRDKTVFMADDILGTGGTLIKGMRHLKENGARRIICSISLPLFSGNSIAHFDEAYNEGLFYRLIGTNAVYQEEVVKREWYVNVNVTRLFADVISRLHQNQSVSSLLDNAAIINRLLSKKAIEPQHELPFTHPSD

SEQ ID NO: 58733 - DNA, 735 bp, Unknown
  Obtained from environmental sample
  misc_feature (1)..(735): n is a, c, g, or t
atgctgtttgaaaagggcgatgcaaaatgcacttacggaacaggttgtttcctgttgatgaacacaggcgcagacgccgccgaaagcggaaacgggttattaacaaccatagccgcagggttaagcgaaaaagttcaatatgcgcttgagggttcggtctttacaggcggcgctgttattcaatggctgagggatgaactgcgtattattcacgacagcgcagacagcgagtattttgccggaaaagtaaaagatacaggcggcgtttatcttgttccagcgtttacggggcttggagcgccgtattgggatatgtacgctcgcggctgtataatcggtattacccgcggaacaaagagagcgcacattatcagggcggcgcaggaatctattgcttatcaagtaatggatcttttgaacgcaatggaaaacgatcttagtgttaaactaaaagagttaaaagttgacggaggggcaagcagggataaatttcttatgcagtttcaggcggatatgtgcggcgcaaaaatcatccgccctgttatccgcgaaacaacggctctaggagcggcgtgtcttgccggaattaccgtagggttttggaaagacttaaacgaagttaaaaaacgctggatgcaggatactgttttttcccccgaaatggacaatgaaaaacgcgggaaattaatatccggctggcataaagccgtggaaagaagccggaactgggcttga

SEQ ID NO: 58734 - protein, 244 aa, Unknown
  Obtained from environmental sample
  DOMAIN (2)...(228): FGGY family of carbohydrate kinases, C-terminal domain
  misc_feature (1)..(244): Xaa is any amino acid
MLFEKGDAKCTYGTGCFLLMNTGADAAESGNGLLTTIAAGLSEKVQYALEGSVFTGGAVIQWLRDELRIIHDSADSEYFAGKVKDTGGVYLVPAFTGLGAPYWDMYARGCIIGITRGTKRAHIIRAAQESIAYQVMDLLNAMENDLSVKLKELKVDGGASRDKFLMQFQADMCGAKIIRPVIRETTALGAACLAGITVGFWKDLNEVKKRWMQDTVFSPEMDNEKRGKLISGWHKAVERSRNWA

SEQ ID NO: 58735 - DNA, 1335 bp, Unknown
  Obtained from environmental sample
  misc_feature (1)..(1335): n is a, c, g, or t
ttgattatgtcttatacgatgagagtgctggatcaggcaattaagcgaaaccccggtgagcctgaattccatcaggcaatgacagagattttgactacgcttaagccctatgttgacgcgcggcccgaatatgagaaagcgggtattcttgagcgccttgtcgagccggaacgcgcggttttgttcagggtcccctgggttgacgacgccggaaaagtgcaggttaacaagggctttagggttcaattcaacagcgccataggcccatacaagggcgggctgcgtttccatcccagcgtctccatcagcatcatcaaattcctcggttttgagcagattttcaaaaattcactgacaagcctgcccataggcggcggcaagggcggctctgattttgaccccaagggcaaatcggatcgcgaggttatggcgttctgccagagctttatgacagagttgttccgccatgtcggggaaaataccgacgtgccggcgggtgatattggcgtcggcgggcgtgagatcggatatatgtacggccaatacaaacgtttaacaaaccgctctgaaggggtgctgaccggcaagggcctgacttacggcggttcgctcgcccgcacggaggcgaccggctacggccttgtctaccttgtggatgagatgctccgccaacatgggaaatctttgcagggtaaaaccgttctggtttccggatcgggcaatgtcgccatatacgcaaccgagaaagcgcaggccctgggcgctaaagtggtcgctttatccgattcaaacgggttcatccacgacgccgaaggcatcgatctcgcggctgttaaggaaattaaggaaataaaacgcggcaggatttcggagtataaaaactaccgccccaaagcggtttataccgaaggcttaggcatctggaatatcaagtgcgatgtcgccctgccctgcgcgacacagaacgagctgaatgaacaggacgcgaaaacgctggttaataacgggtgcttcgccgtggccgaaggcgcgaatatgcccagtacccttgaggctaccgaagtgtttttgaagaacaaggtgctgtttgctcccggcaaagcggctaacgcgggcggcgtagcgacatcggcgctggagatgtgccagaactccatgagattgtcatggtcatttgacgaggtggatcaaaagctcaagagcatcatggtgaatatttacaacaatatttccaccgccgcgaaagaagccggctccgaaggacattttgtcgtgggggcgaatatcgcgggtttcaaaaagtcgcggaagcatgnagcagcagggtacggttaa

SEQ ID NO: 58736 - protein, 444 aa, Unknown
  Obtained from environmental sample
  DOMAIN (56)...(186): Glu/Leu/Phe/Val dehydrogenase, dimerisation domain
  misc_feature (1)..(444): Xaa is any amino acid
MIMSYTMRVLDQAIKRNPGEPEFHQAMTEILTTLKPYVDARPEYEKAGILERLVEPERAVLFRVPWVDDAGKVQVNKGFRVQFNSAIGPYKGGLRFHPSVSISIIKFLGFEQIFKNSLTSLPIGGGKGGSDFDPKGKSDREVMAFCQSFMTELFRHVGENTDVPAGDIGVGGREIGYMYGQYKRLTNRSEGVLTGKGLTYGGSLARTEATGYGLVYLVDEMLRQHGKSLQGKTVLVSGSGNVAIYATEKAQALGAKVVALSDSNGFIHDAEGIDLAAVKEIKEIKRGRISEYKNYRPKAVYTEGLGIWNIKCDVALPCATQNELNEQDAKTLVNNGCFAVAEGANMPSTLEATEVFLKNKVLFAPGKAANAGGVATSALEMCQNSMRLSWSFDEVDQKLKSIMVNIYNNISTAAKEAGSEGHFVVGANIAGFKKSRKHXAAGYG

SEQ ID NO: 58737 - DNA, 540 bp, Unknown
  Obtained from environmental sample
  misc_feature (1)..(540): n is a, c, g, or t
atgaaaagacgcttgcctataggcatacaggattttatcagcatccgtgaggaaggtttttgttatgttgataaaaccgcccgcattcatcaattaattagcggatccggcagggcgttttttctttcccgcccccggcgttttggaaaatcgctgctgtgttcaacccttggagcggtgtttgaaaacaggcgggaactgtttggcgggatagcgggacaaccggcccttgcgattgattcaatggaatgggaatggaagaagcatccaataatatatattgatctaaacccgggaaattattcggctggaggaatcaacacgctttacgaaataattaatatggcgcttgattcatgtgcaaggaaatattctgtgtctctggatgccggtatctgtgcaggacgttttattcgccttattgaaatgctatatgacactcagaaggagaaggttgttgtcatagttgatgaatatgacaagcccctgctcgctaccattgacgatccacagcttcatgccaggatgagggatgaataa

SEQ ID NO: 58738 - protein, 179 aa, Unknown
  Obtained from environmental sample
  misc_feature (1)..(179): Xaa is any amino acid
MKRRLPIGIQDFISIREEGFCYVDKTARIHQLISGSGRAFFLSRPRRFGKSLLCSTLGAVFENRRELFGGIAGQPALAIDSMEWEWKKHPIIYIDLNPGNYSAGGINTLYEIINMALDSCARKYSVSLDAGICAGRFIRLIEMLYDTQKEKVVVIVDEYDKPLLATIDDPQLHARMRDE

SEQ ID NO: 58739 - DNA, 468 bp, Unknown
  Obtained from environmental sample
  misc_feature (1)..(468): n is a, c, g, or t
ttgatcctccctattctacattccagcctacaaaaaaagagccaaacatacctaacgtcaacaccgttcctggcgaggacgctttccactacgatatgcggatacttccaagcgtttcggtcgatgatgtttttaaggaagttgatcgcatcaaggccgaagttgaagcccaggcacaaagtaacgattagttacaaaatagattatagaacagaatcccctcccacttcgcaggattccccgttggtaaaattcctttccgacagtataaagaatgtgtacaaggttgaaaccaaaaccataggcatcggcggaggaaccttcgcggcatacttgcggaaactgggcattgattgcgccgtgtgggcgcgttttgacggtacagcccaccagcccaacgagtactcccttttggaaaatatccttggggacgcaaaggtcatggcactgatgatgataagcggctag

SEQ ID NO: 58740 - protein, 155 aa, Unknown
  Obtained from environmental sample
  misc_feature (1)..(155): Xaa is any amino acid
MILPILHSSLQKKSQTYLTSTPFLARTLSTTICGYFQAFRSMMFLRKLIASRPKLKPRHKVTISYKIDYRTESPPTSQDSPLVKFLSDSIKNVYKVETKTIGIGGGTFAAYLRKLGIDCAVWARFDGTAHQPNEYSLLENILGDAKVMALMMISG

SEQ ID NO: 58741 - DNA, 993 bp, Unknown
  Obtained from environmental sample
  misc_feature (1)..(993): n is a, c, g, or t
atgaaagaagagatttttcagtttatcgataattcttccgagcttgctgtagagcttgaaacagggctttgcaaatatcccgcgatttcgccggaatcgggaggcgaaggggagctggacaaatgcgagttccttgcggcctggctaaaggcccaggggataaaccggcttgagcgttacgatgcccctgacccgcgcgcgaaaggcggcgtcagaccaaacctcgtggcaaccattcccggaaaagaccaatcggaggatgatccgcgcttttgggtgatgagccacatcgacgtggtaccgcccggcgaggcttctttttggaacagcgatccctggaaggcaattatcgctgaagggggcgtgcggagcgatggaaccccgctgggcaagcggatcattggccggggcgtggaggacaaccagcaggggcttacttcttctgtaatagcggcgctggctctggtcaagcaggggattaccccaagcaggacggtaaagctcctctttgcgtcggacgaggaaatcggcagcgtctacggccttcaatggctcataaaaaaccacccggatcttttccataaaaacgacatggcaatagttccggattctggctgcgcttccggggcggagattgaaatcgccgaaaaaagccatgtatgggcaacgtttacaacaaagggaattcagacccacgccgcccatccggagcatggtgcgaacgcctaccttgccggcgcggatctgacagtacggctccacttcgggctttcggaaaaattctccgacaggaaccagctttttgatcctccctattctacattccagcctacaaaaaaagagccaaacatacctaacgtcaacaccgttcctggcgaggacgctttccactacgatatgcggatacttccaagcgtttcggtcgatgatgtttttaaggaagttgatcgcatcaaggccgaagttgaagcccaggcacaaagtaacgattag

SEQ ID NO: 58742 - protein, 330 aa, Unknown
  Obtained from environmental sample
  DOMAIN (92)...(309): Peptidase family M20/M25/M40
  misc_feature (1)..(330): Xaa is any amino acid
MKEEIFQFIDNSSELAVELETGLCKYPAISPESGGEGELDKCEFLAAWLKAQGINRLERYDAPDPRAKGGVRPNLVATIPGKDQSEDDPRFWVMSHIDVVPPGEASFWNSDPWKAIIAEGGVRSDGTPLGKRIIGRGVEDNQQGLTSSVIAALALVKQGITPSRTVKLLFASDEEIGSVYGLQWLIKNHPDLFHKNDMAIVPDSGCASGAEIEIAEKSHVWATFTTKGIQTHAAHPEHGANAYLAGADLTVRLHFGLSEKFSDRNQLFDPPYSTFQPTKKEPNIPNVNTVPGEDAFHYDMRILPSVSVDDVFKEVDRIKAEVEAQAQSND

SEQ ID NO: 58743 - DNA, 738 bp, Unknown
  Obtained from environmental sample
  misc_feature (1)..(738): n is a, c, g, or t
atgcaaaagccggaaaagtattcattaaacaatattaacggaaccgtaaatatactcaacgccatggctgaggcgggaattaaacgtattattttttcttccagcgctgcgatctttgggcagccccaatatctgccaattgatgaaaaacaccctctaaaccccgagagctactacggctttaccaagcttgaaattgagcgcttcatggaatggtacgacaggctcaagggaatgcgttttgccagcctccgctactttaacgccgccggctacgatgtaaaaggcagaatcacggggctggaacaaaacccggcgaacctgattccgataattatggaagtcgcggttggcatacggagggagctcttgattttcgggaacgattacgaaacaagggacggtacctgcatcagggactacatacatgtaaacgatcttgctgccgcacactcggcagctctggattacataagcaaaaacgacaagagcctgacagtcaacctgggaagcgaaaccggcactacagttctggaaattctcgaagccgcgcggcgcattaccggcaggcctataccttcaagcgttaccgggcggcgcagcggagacccggcaactctgacagcttcatcaaaacttgccagagaacttttgaattggaaaacggatcattccggcattgacaccataattcaaagcacctgggaagtgtataaaatgaccggcataagggcataa

SEQ ID NO: 58744 - protein, 245 aa, Unknown
  Obtained from environmental sample
  DOMAIN (1)...(170): NAD dependent epimerase/dehydratase family
  misc_feature (1)..(245): Xaa is any amino acid
MQKPEKYSLNNINGTVNILNAMAEAGIKRIIFSSSAAIFGQPQYLPIDEKHPLNPESYYGFTKLEIERFMEWYDRLKGMRFASLRYFNAAGYDVKGRITGLEQNPANLIPIIMEVAVGIRRELLIFGNDYETRDGTCIRDYIHVNDLAAAHSAALDYISKNDKSLTVNLGSETGTTVLEILEAARRITGRPIPSSVTGRRSGDPATLTASSKLARELLNWKTDHSGIDTIIQSTWEVYKMTGIRA

SEQ ID NO: 58745 - DNA, 948 bp, Unknown
  Obtained from environmental sample
  misc_feature (1)..(948): n is a, c, g, or t
atgaaaatactggttactccaacctctcttaagccggattcgcaaagtcctgccatgggtaaactgcgttcctttgcctcggagcttgtttttaaccccaccgaaaaaccgctgaccgaggacgaattaattccgctgatttcaggctgcgaaggctgtatcgctgggcttgattttttcacagccggggtaattcaaagcgcaggaaaccttaaggtaatttccagatacggcgtcggggtggatcggatagacctggccgcggcaaaggcaaagaacatcatcgtctgcaatactcccggagcgaatacccaggcggtcgccgacctaaccatcggcctgcttatctgtctggcccgcaagataccagtacttgacaagcaaacaaaggaaggccagtggccgcgttccaccggcattgaattatacggcagaaccatcggcatcctgggtctgggcgcggtaggcaaggcagtagcgaagcgcgcctccggtttttccatgagggtacttgcccgcgacccaatcatcaacaaggagtatgtcgaagcaaacggcatcgttccagtcgatttcaatacgcttattcgtgaggctgattttctctgccttcacctgcccaaaacagacgaaaccagaaacatcatttcggcggacgtgcttaagtccatgaaaagaggcgcaatccttgtgaacacggcgcgcggcggtcttgttgacgaagccgcggcttatgaactccttgtttcggggcatttgggcggaatgggactggacgtatatgaaaccgaacctcccaaaaaatcgcctttgtttgagctggaaaacgtagtgctgaccccccacaccgccgcccacaccgccgaagcgaccgaggcaatggccgaaatgtcggtgcaaaacctaatcgacgtgctttcaggcagggaatgtcctaatattttgtaa

SEQ ID NO: 58746 - protein, 315 aa, Unknown
  Obtained from environmental sample
  DOMAIN (3)...(313): D-isomer specific 2-hydroxyacid dehydrogenase, catalytic domain
  misc_feature (1)..(315): Xaa is any amino acid
MKILVTPTSLKPDSQSPAMGKLRSFASELVFNPTEKPLTEDELIPLISGCEGCIAGLDFFTAGVIQSAGNLKVISRYGVGVDRIDLAAAKAKNIIVCNTPGANTQAVADLTIGLLICLARKIPVLDKQTKEGQWPRSTGIELYGRTIGILGLGAVGKAVAKRASGFSMRVLARDPIINKEYVEANGIVPVDFNTLIREADFLCLHLPKTDETRNIISADVLKSMKRGAILVNTARGGLVDEAAAYELLVSGHLGGMGLDVYETEPPKKSPLFELENVVLTPHTAAHTAEATEAMAEMSVQNLIDVLSGRECPNIL

SEQ ID NO: 58747 - DNA, 384 bp, Unknown
  Obtained from environmental sample
  misc_feature (1)..(384): n is a, c, g, or t
ttgaaatcgactggaacgatgccgtttgcttcgacatactccttgttgatgattgggtcgcgggcaagtaccctcatggaaaaaccggaggcgcgcttcgctactgccttgcctaccgcgcccagacccaggatgccgatggttctgccgtataattcaatgccggtggaacgcggccactggccttcctttgtttgcttgtcaagtactggtatcttgcgggccagacagataagcaggccgatggttaggtcggcgaccgcctgggtattcgctccgggagtattgcagacgatgatgttctttgcctttgccgcggccaggtctatccgatccaccccgacgccgtatctggaaattaccttaaggtttcctgcgctttga

SEQ ID NO: 58748 - protein, 127 aa, Unknown
  Obtained from environmental sample
  SIGNAL (1)...(22)
  misc_feature (1)..(127): Xaa is any amino acid
MKSTGTMPFASTYSLLMIGSRASTLMEKPEARFATALPTAPRPRMPMVLPYNSMPVERGHWPSFVCLSSTGILRARQISRPMVRSATAWVFAPGVLQTMMFFAFAAARSIRSTPTPYLEITLRFPAL

SEQ ID NO: 58749 - DNA, 786 bp, Unknown
  Obtained from environmental sample
  misc_feature (1)..(786): n is a, c, g, or t
ttgtacgataatttttgctgcatggttttaaacaagcctgcggggctttctgtacagggcggggaaggggttaagatttccctggattccattctttcggaaaaaataaaccccaggccgtttttggttcaccggctggacaaggatacctcaggcgtaattcttgtcgctaaaacaaaagaagccgccggaagtttttccgcccttttcgcgaattcacgaacaatgagccattttaaaaactttgttagttttgaaaatggctttagaaaaactggtcaaacgaccagtttttcatataaatctaagggtgcttttccaaaaactgaagttttggaaaagccctctaatacaaagctttacctgggtttatgttcaggcgtcattgagccggctgagggagcgataaagctttcacttgatatgaaggggaaagggcggagcagaatcaaaaaagaatcggaaactaattataagctgctttcgagcgggtgtttgggagaaacaccttgcgctctcttggaacttaagcttggaacagggcgcatgcaccagatcaggcggcacctcgcccttataggtcatccgcttttgggagatgacaagtacggggattttgcgcttaacaaaaagctaaaagcccggttgggactaaagagcctgtgtctgcacgcgtcccggcttgttattccggttttgccggggctgctgccggagggcctggatgttacggcagaaccgccggagagtttttcgcggtttttagaaatgttatacaaacgttaa

SEQ ID NO: 58750 - protein, 261 aa, Unknown
  Obtained from environmental sample
  DOMAIN (6)...(192): RNA pseudouridylate synthase
  misc_feature (1)..(261): Xaa is any amino acid
MYDNFCCMVLNKPAGLSVQGGEGVKISLDSILSEKINPRPFLVHRLDKDTSGVILVAKTKEAAGSFSALFANSRTMSHFKNFVSFENGFRKTGQTTSFSYKSKGAFPKTEVLEKPSNTKLYLGLCSGVIEPAEGAIKLSLDMKGKGRSRIKKESETNYKLLSSGCLGETPCALLELKLGTGRMHQIRRHLALIGHPLLGDDKYGDFALNKKLKARLGLKSLCLHASRLVIPVLPGLLPEGLDVTAEPPESFSRFLEMLYKR

SEQ ID NO: 58751 - DNA, 591 bp, Unknown
  Obtained from environmental sample
  misc_feature (1)..(591): n is a, c, g, or t
atgaaacttaactctccatttttgaataacttaggctttatcgctctggtattcttcgcttgctccgcgttttctgcgcctgcttccctttacgggagcaacaacctgtactccaacaacctgtacacagacaaaaaaggcaaaaaagccggggatgtggtgacaatcctgattatggaagccgcaaaggcagatagcaagacccaaacccaaactgggaaaaagaacgacataaacttgtcgcagcaggcatcggtaggcagtaagatttttagctggataccgggttttggagtcaaaggctcggcagatatcaactacgatggcaaaggaaacaccgctcgcaacggagagttgaaagcaaccgtaacggctcgcataacagaagtcttggacaacggaaatctgctaattgaaggatctaaactcgttgcgataaacagcgaagaagagattttggaagttagcggtacgataagagcagacgatattaatcccgacaatacagtatatagctataaaatagccgaggcggttattcgctactctggaagcggaacgaatgccgatgcggcaaaacctggactataa

SEQ ID NO: 58752 - protein, 196 aa, Unknown
  Obtained from environmental sample
  SIGNAL (1)...(25)
  DOMAIN (21)...(196): Flagellar L-ring protein
  misc_feature (1)..(196): Xaa is any amino acid
MKLNSPFLNNLGFIALVFFACSAFSAPASLYGSNNLYSNNLYTDKKGKKAGDVVTILIMEAAKADSKTQTQTGKKNDINLSQQASVGSKIFSWIPGFGVKGSADINYDGKGNTARNGELKATVTARITEVLDNGNLLIEGSKLVAINSEEEILEVSGTIRADDINPDNTVYSYKIAEAVIRYSGSGTNADAAKPGL

SEQ ID NO: 58753 - DNA, 1212 bp, Unknown
  Obtained from environmental sample
  misc_feature (1)..(1212): n is a, c, g, or t
gtgattattcttccccccgacattactcgttttcactcgcgcgcaggttttttcactgagtcagcagcgcgccgtcttggagacaggcttggagccgttcttcccgcccttggcacgcatatggcaatgaacgacgcggaactttcgcgtatgttcggcagcactccaaaagacaaatttcttgttcacgactggcggaacgacgttacagagcttggacgcatagaagcggattgggtagaaaaagcgtcggctggagcggtaaagtacgactggcctgttcaggttaataaaattctgcgtaaaggcgcgaaggacagcggcaacttctctctcgccttgagtatcggacaggttgttccgcatgaagtcgccggaatggcaaaccacggaaaaaacatctttgtaggaaccggcggaaaagaagcaatcgataaaagccattttgtaggagccgcctacggaatggaaaaaataatgggcaaggttgacacccccgtccgcgcccttttcgacgaaggactgcgccgcttcagcgcagaactgccgccgattctttgggtgttaacggttatctcggcgcggacagagagcgaagccgccggcggcaaagaacgcggctctctcgctgttcgagggctttatatcggctttggcagggaatgttttgaaaaagccgccgccttatcacgtcaagttaacgttaacctcatgaatgaatcggttaacaaagcggtagtttaccttgaaccggacgaattccgcactacatggcttggaaacaaggcgatttatcgtacccgcatggtaatcgccgacggcggcgagcttttaatccttgcccccgcccttgagcgtttcggcgaagattcggggatagacgcgttaatacgcaaacacggctaccgccccagcagggaaataatcgccaaagcggcaaccgaccctgagcttggcggcaatttaagcgccgccgcccacctgatacacggctcaagcgaaaatcgctttacaatacgctattgtccggggagcaaggttacaaggcaggaaattgagtctgtgggcttccaatggggcgatttgaaagaagcgcaggaaaaatacgacattaacaaactttcttccggctggaataccgtaggcggcgaaaggattttctttgtccctaaccccgcgcttggattgtgggctgagaaatcgaagttttag

SEQ ID NO: 58754 - protein, 403 aa, Unknown
  Obtained from environmental sample
  misc_feature (1)..(403): Xaa is any amino acid
MIILPPDITRFHSRAGFFTESAARRLGDRLGAVLPALGTHMAMNDAELSRMFGSTPKDKFLVHDWRNDVTELGRIEADWVEKASAGAVKYDWPVQVNKILRKGAKDSGNFSLALSIGQVVPHEVAGMANHGKNIFVGTGGKEAIDKSHFVGAAYGMEKIMGKVDTPVRALFDEGLRRFSAELPPILWVLTVISARTESEAAGGKERGSLAVRGLYIGFGRECFEKAAALSRQVNVNLMNESVNKAVVYLEPDEFRTTWLGNKAIYRTRMVIADGGELLILAPALERFGEDSGIDALIRKHGYRPSREIIAKAATDPELGGNLSAAAHLIHGSSENRFTIRYCPGSKVTRQEIESVGFQWGDLKEAQEKYDINKLSSGWNTVGGERIFFVPNPALGLWAEKSKF

SEQ ID NO: 58755 - DNA, 1161 bp, Unknown
  Obtained from environmental sample
  misc_feature (1)..(1161): n is a, c, g, or t
atgaaatttaatattgcggtaattcccggagacggaatcgggcctgaagtgatagacccggctcttgaagttcttgacgcggtggaagacaagtacggtcatatttttaactatgtccggcttgaggcgggcggtcttgctatcgatcactcaggagagccgctgcccaaagaaactcttgaggcggcgaaacagtgcgacgcggttcttcttggcgcggtcggcggtcccaagtgggacaatcttccggggcatcttcgtcctgaaagagcgctgctgggtcttcgcgccgggctcggtgttttcgctaaccttcgtcccgcggctctgcttcctcaattaaagtcagcctgcccgcttaaagatgaagttctcatctcaagcagcggcgaggggaaagccgctttcgatttattaattgtaagagaattaacgggcgggctttacttcggcaagcgcggaagattggaagagccttcaaacggccacactcccggctcggcttttgatacagaaacatattcatggatggaaattgagcgcgtgcttcgcgccggttacgaggcggcgaaggtgagacggaaaaaactctgcgtggtggacaaggccaatgtgcttgagtcgtcacgtttttggcgcgaagtcgccgcggtagtttcaaaagactatcccgacattgaaacaagttacctctacgttgacaatgccgccatgcagttgatccgcgctccgggacaattcgatgttatcgtaacttcaaatctctttggggacatactctccgatgaggcttccgtgcttacgggttcaatcggaatgcttgcttcggcaagtcttggagacaaggtgcagagcgggacaagaccgggaatgtacgagcctattcacggctcggcgcccgacatcgcgggaaaggacttagccaatcctctcgcgacaattctttcggcggcgatgatgctccgctactcattcggtcttgaaaaggaagctgacgctgttgaaaccgctgtcaacaatgtgctggatcagggattgaggacgggagacattgcaagccgcagcggagacatcgcagcaagcagcgcggcaaataacgaaaaaattgtgggtaccaaagcgatgggcgaagcggtactcaaggcattggagaaattatga

SEQ ID NO: 58756 - protein, 386 aa, Unknown
  Obtained from environmental sample
  DOMAIN (4)...(379): Isocitrate/isopropylmalate dehydrogenase
  misc_feature (1)..(386): Xaa is any amino acid
MKFNIAVIPGDGIGPEVIDPALEVLDAVEDKYGHIFNYVRLEAGGLAIDHSGEPLPKETLEAAKQCDAVLLGAVGGPKWDNLPGHLRPERALLGLRAGLGVFANLRPAALLPQLKSACPLKDEVLISSSGEGKAAFDLLIVRELTGGLYFGKRGRLEEPSNGHTPGSAFDTETYSWMEIERVLRAGYEAAKVRRKKLCVVDKANVLESSRFWREVAAVVSKDYPDIETSYLYVDNAAMQLIRAPGQFDVIVTSNLFGDILSDEASVLTGSIGMLASASLGDKVQSGTRPGMYEPIHGSAPDIAGKDLANPLATILSAAMMLRYSFGLEKEADAVETAVNNVLDQGLRTGDIASRSGDIAASSAANNEKIVGTKAMGEAVLKALEKL

SEQ ID NO: 58757 - DNA, 1719 bp, Unknown
  Obtained from environmental sample
  misc_feature (1)..(1719): n is a, c, g, or t
atgaaaagcgattctgtaaacaagggaaccccacgcgcgccccaccgttcactttttaaagcgttgggatttattgaggaagagtttaaaaagccgctggttgggattgcctgcgcgaagagcgagatagtgccgggtcatctgcaccttgacaacatagcgcgagctgctgcggacggcgttcgtatggcaggcggcgtgcccgtggtattccctgtaatcggcgtatgcgacggaatcgctatgggccacattggaatgaagtactcacttccgacaagggaattgatagccgactcggttgagtgcatggctttagctcacgcctttgacggacttgtctttatccccaactgcgacaagattgtgcccggcatgttgatggcgtcggcgcgtcttaaccttccatcggtttttgtttcaggcggacctatgcttgccgggcgcaaggacgggaaaccgctgacgcttacgaccatgttcgaggcggtgggagcggtagccgcgggaaagctcagcgaacaggaacttgaggaacttgaaaatctttcctgcccgggctgcggttcatgcgcgggaatgtttacggcgaactcgatgaactgtgtgacagaagcgcttggtatggctctgccgggtaacggtactatacccgccgtgatggcggagcgcatccgccttgcaaaaaaaaccggaatgttgatcatggacgttcttaaaaaagatttgcgtccgaaacaaatacttacgcaagccgcgtttatgaatgccctcgctctcgacatggcgctcggctgttcaacgaataccgcgcttcatcttcccgcggttgcgggagaggcgggtatcaaactcgatctggaacttcttaacaaggtaagcgcggtaactcccaatctttgcaggcttgcccccgcgggaaaggacgcaattgaggacttgcacacggcgggaggaattcccgcagtcttaaaagaactttccaaaaagaacctagtcgatcttaaagccgcgacggtgtacggttgtcttggcgactctttggacagggccgttaaccgcaaccccgatgtcataagacccctggagaacccctactccgctacaggcggacttgccgcgctgaagggaaacatcgcccaggacggctgtgttgtaaagcgcagcgcggtcgccgcctctatgctgaagcatgaagggccggcaagggttttcgattccgaggaaacggcgtttgacgcaatcatggggaaaaagataaaagcgggggacgtggttgttatacgttacgaagggcccaggggcggccccggcatgaaggaaatgctcgcgcccacggcggctctcgccggcatgggccttgacgacaaagtcgcccttattaccgacgggcgtttttccggcgcctccaaaggcgcgtccataggccacgtttcgccggaagccgcgatgggaggaaacatcggcatcatcaacgaaggagacattatcgccatcgacattgacggtctttccataaacgtgaagataagcgaagaagagatcgcgcggcggcggaaagactggaagcctctttcaaagacccatacgggctatcttgcgcgctatgccgcgcaagtcggatcagccgcttccggcgccgttttttcacaaccgtgtttgtctaacactaaaccggacgctgagcttgccgaagcgtcttttaatcggagaaattaa

SEQ ID NO: 58758 - protein, 572 aa, Unknown
  Obtained from environmental sample
  DOMAIN (31)...(550): Dehydratase family
  misc_feature (1)..(572): Xaa is any amino acid
MKSDSVNKGTPRAPHRSLFKALGFIEEEFKKPLVGIACAKSEIVPGHLHLDNIARAAADGVRMAGGVPVVFPVIGVCDGIAMGHIGMKYSLPTRELIADSVECMALAHAFDGLVFIPNCDKIVPGMLMASARLNLPSVFVSGGPMLAGRKDGKPLTLTTMFEAVGAVAAGKLSEQELEELENLSCPGCGSCAGMFTANSMNCVTEALGMALPGNGTIPAVMAERIRLAKKTGMLIMDVLKKDLRPKQILTQAAFMNALALDMALGCSTNTALHLPAVAGEAGIKLDLELLNKVSAVTPNLCRLAPAGKDAIEDLHTAGGIPAVLKELSKKNLVDLKAATVYGCLGDSLDRAVNRNPDVIRPLENPYSATGGLAALKGNIAQDGCVVKRSAVAASMLKHEGPARVFDSEETAFDAIMGKKIKAGDVVVIRYEGPRGGPGMKEMLAPTAALAGMGLDDKVALITDGRFSGASKGASIGHVSPEAAMGGNIGIINEGDIIAIDIDGLSINVKISEEEIARRRKDWKPLSKTHTGYLARYAAQVGSAASGAVFSQPCLSNTKPDAELAEASFNRRN

SEQ ID NO: 58759 - DNA, 963 bp, Unknown
  Obtained from environmental sample
  misc_feature (1)..(963): n is a, c, g, or t
ttggaactttcttctcaaatttcatcggaattggattttcttttggatggtttgccaattcgttcttttttggcaatcgggagcatcagtcttgaccgtcaaattgaaaattttaaaaagaccaaacccgatattgtcgtaggaaacccgaatcggcttcttcttcttgcccaaaaaaaaatccttaaattgaataacttatcttcgcttgtttttgacgaagccgaccgccttgtaagcggtgaaatgatagacgatacaacggaactatgttcgctaatccgcaaattcgcaaagaccgatagtattcttcttgccgcgtgttccgctactataaacaaaaaatgcgtggaaaaagtacaaaccgtctttttcggcgatggggagagcaggggagtctcctttattgaatccgaggataatgaaattctgcgcgataaaattgaacattgggctattttcagcgagaaacggcgcaaggatcaaactttgcgctcattgttagccgccattaaaacaaaaaaatcccacgttaaagcgctggtgttcataagcaagggcgatgaagccgcgttagtcctttcgcgcctccagtaccaccatgtcccagctgccggactttttggaaaaataggcaataaaccgctctccggcgcggaacgcaaggagtcgctcgatttattcagaagcggaagcgtagatgtgcttgtttccacagacttagccgcccgcggtttggatattcccgatattacccatgtgattgcccttgatgttcccgccgacagtgaagtatacatacaccgctgcggcagaacgggacgcgccggaaaacgcggaataatggtaacaatcggcgatgaaacccagatgcgtcttctttcatcgctcgaaaaaaaattaaagattagggtaaatccaaaagaattgtacatgggcaaagtctgcgtgccgcagatttaa

SEQ ID NO: 58760 - protein, 320 aa, Unknown
  Obtained from environmental sample
  DOMAIN (2)...(120): DEAD/DEAH box helicase
  misc_feature (1)..(320): Xaa is any amino acid
MELSSQISSELDFLLDGLPIRSFLAIGSISLDRQIENFKKTKPDIVVGNPNRLLLLAQKKILKLNNLSSLVFDEADRLVSGEMIDDTTELCSLIRKFAKTDSILLAACSATINKKCVEKVQTVFFGDGESRGVSFIESEDNEILRDKIEHWAIFSEKRRKDQTLRSLLAAIKTKKSHVKALVFISKGDEAALVLSRLQYHHVPAAGLFGKIGNKPLSGAERKESLDLFRSGSVDVLVSTDLAARGLDIPDITHVIALDVPADSEVYIHRCGRTGRAGKRGIMVTIGDETQMRLLSSLEKKLKIRVNPKELYMGKVCVPQI

SEQ ID NO: 58761 - DNA, 726 bp, Unknown
  Obtained from environmental sample
  misc_feature (1)..(726): n is a, c, g, or t
atgaatgaagaattttaccacgaaccaacacgaaattttaactcatatcttgccttagatttacaagatcatcatactatcaacatgataaaacttgccgcctttttgggtaatccgggacgggaacacgctcttaacagacacaacgccgggtggatgcttgccgaggctttgccgtttttctcttccctctcatggcaaaaaaagtacaaggggctttactcttcgcgggagaattttcactttttaaagccggaaacctacatgaatctttcgggagaatcggtctttgccgccgcctctttttataaggttaatatagaagaaataatcgtagtccacgatgaattggaactccctctcgggacaatttcgctgaagttttcaggcggccttggggggcataacgggcttcgctccatgaaaaaagttttcggaagcgcggacttttggcgtcttcgcgtcggcatcggccgccccgactcgcggcttccgggcgagggcggacccaagggcagcggcgagggagtatatgactgggtgctgtccgacttttccggggcggagagggaaatacttaaccccgcgcttgatgccggagcggggcttttacagcagttgatttcaagcgaacctgaaactttgctggacgaatggaagaaaaaaaatgtatcgggggcttcgccgcgcagaaaaagcgaagagccgcccgcggaggctgtatga

SEQ ID NO: 58762 - protein, 241 aa, Unknown
  Obtained from environmental sample
  DOMAIN (32)...(221): Peptidyl-tRNA hydrolase
  misc_feature (1)..(241): Xaa is any amino acid
MNEEFYHEPTRNFNSYLALDLQDHHTINMIKLAAFLGNPGREHALNRHNAGWMLAEALPFFSSLSWQKKYKGLYSSRENFHFLKPETYMNLSGESVFAAASFYKVNIEEIIVVHDELELPLGTISLKFSGGLGGHNGLRSMKKVFGSADFWRLRVGIGRPDSRLPGEGGPKGSGEGVYDWVLSDFSGAEREILNPALDAGAGLLQQLISSEPETLLDEWKKKNVSGASPRRKSEEPPAEAV

SEQ ID NO: 58763 - DNA, 1809 bp, Unknown
  Obtained from environmental sample
  misc_feature (1)..(1809): n is a, c, g, or t
atggattacgatactattgtcatcggtggcgggcatgcggggatcgaggcatccctcgcgacaagccgtctcggtttctcaacgctccttgtcactcaaaacccggacaggatcgggacgctttcctgcaaccccgctattggcggcctttcaaaaggcaaccttgtaagagaggtggacgctctcggcggagagatgggcaggctgacagacgcgacaatgatccagtaccgcgttcttaaccgctcgcgcggaccggcggttcaagcgccaagagcgcaggcggacaaacacgcataccctgcggcggcgcgttccgttcttgagaaacagaaaaatctgacaattttcatggacacagttacggattttattattgaaggagcgaacgcggacggagttgtaaaagacgcttctcttgcgaaaattatcggagtaattacaaaacgcggccaccgcatatcggcgcgcaccgtgattcttgccgccggaacttttatggaaggaaagatatttatcggcgaatatgacgcgccgaacggacggcttggggaagaggcggctttggggcttggcgcttctttgcgccgacttggttttccggtgggaagacttaaaaccggtactcctgcgcggcttgccggagacacgattgattattccgttatggaaaaacaggacagcgaggaaatgcgcccgttctcatttttcgccgccgctgacattgtcgccgacagacccgccatgccctgctgggtcacgtacacaaacacaaaaacgcacgaaatcatcaaggcaaatatcggacgctctccgttgtacggcggaaaaataataggtacgggagcgcgttattgcccttctatcgaggacaaggtaatgcgcttttcacacagggagcgtcatcatgtttttattgaaccggaaggactttctacaaacgagatgtacatgaacggcgcgtccagttccctgcctgaagacgtgcagagcgattttatccacagcatttcaggacttgagcaggcgcatattgtccgccccggctacgcggtggaatacgattatatcgatcctcttgatctttttccgtcgctggagtcaaagcgcctgtcaggttttttcacggctgggcagaccaacggttcttccggttatgaagaagccgccgcccagggaataatagcgggaatcaacgccgcgatgaaaatgcagggaaagccgccctttatcctcagccgcgccgaagcctacatcggcgtgcttgttgacgatcttaccacgcttggaacaaaggaaccgtaccgaatgttcacaagccgcgccgaacaccgtcttatgctccgccacgacacagccgacacaaggcttactcccaaaggggcgcgaagccggtcttgtagacgacgcccgctgggaacactttttgaaaagacaaaaaaactggacgaaattaaagaattgcttgcccggcgaaaaacggacgaagttgcagataacgcacttgaaggcaagtcccttgcaagcaaaacgcttgccgactatcctgcggaactggtagaacgcgccctcttggacaaaaagtacgcgggctacatcgaaaaggaaatccgttttgccgcgaaagccgccaaaatggacgccatcaaacttaatcccaatacggactactccgccatcagcggcctttcctccgaggcaaaagagaaactccaatccgtgaaaccgctcaacgtgggacaagcggcgcgaatcccgggcgtaaggcagggagatatagctatgttgattattctcgcaaggaaatga

SEQ ID NO: 58764 - protein, 602 aa, Unknown
  Obtained from environmental sample
  DOMAIN (4)...(408): Glucose inhibited division protein A
  misc_feature (1)..(602): Xaa is any amino acid
MDYDTIVIGGGHAGIEASLATSRLGFSTLLVTQNPDRIGTLSCNPAIGGLSKGNLVREVDALGGEMGRLTDATMIQYRVLNRSRGPAVQAPRAQADKHAYPAAARSVLEKQKNLTIFMDTVTDFIIEGANADGVVKDASLAKIIGVITKRGHRISARTVILAAGTFMEGKIFIGEYDAPNGRLGEEAALGLGASLRRLGFPVGRLKTGTPARLAGDTIDYSVMEKQDSEEMRPFSFFAAADIVADRPAMPCWVTYTNTKTHEIIKANIGRSPLYGGKIIGTGARYCPSIEDKVMRFSHRERHHVFIEPEGLSTNEMYMNGASSSLPEDVQSDFIHSISGLEQAHIVRPGYAVEYDYIDPLDLFPSLESKRLSGFFTAGQTNGSSGYEEAAAQGIIAGINAAMKMQGKPPFILSRAEAYIGVLVDDLTTLGTKEPYRMFTSRAEHRLMLRHDTADTRLTPKGARSRSCRRRPLGTLFEKTKKLDEIKELLARRKTDEVADNALEGKSLASKTLADYPAELVERALLDKKYAGYIEKEIRFAAKAAKMDAIKLNPNTDYSAISGLSSEAKEKLQSVKPLNVGQAARIPGVRQGDIAMLIILARK

SEQ ID NO: 58765 - DNA, 957 bp, Unknown
  Obtained from environmental sample
  misc_feature (1)..(957): n is a, c, g, or t
ttggccgagaatgagcagttagcagtgagcagtgagcaaaggaaagaggggaaacgcaactttgttattggcattccgcgcgcgttttctgttcatactttgtatcctttgtattcgtggtttttccatgaacttggaatcaaaactttcctgtctactgaggtagcgcacgcgggagtcgcgagatcggaatctacctattgtttcccggcggagatcgcgcacggcgcggtgcaggattgtctggacaagggcgcggactttgtgttcttgccccatttcagggatatgccaagttacgaggatgaaatccacgctaatttttgccccatcacgcaggctctgccgtattatattgagaaagcgtttcccgatattgataaaagccgctggcttcccttggtagttagctttaagtttggcgaagggaaggcgctggagcttttttgcgagatgacgaagcggctgggcattgacgaggctgaaacaaaggcggcctttaacgtcgctatgtccaaacagcaagcgtactttgacgcgatacacgcgatgggaaaagaggcgcttgaagaggcgcgtaagtcagacaggcctgtcatcgccacactgggcaggccctacaacgcctttaccccggaagcgaacatgggcataccgcgcaagttcaccacgcgcggttattcgatcattccttttgatatccttcccttccacgatgaagttatattcccgaacatgtactggtattacggccagcaggatttgaaggcggctaacctcctcaaaaaagaggataatatctatcttgcttttattacaaatttttcatgcgcccctgattcttttatcctgcattacgtcaaatggacgatgggacaaaagcccttcctcgtgctggaactggattcacattcagcggacgcgggcgttgacacgagggtggaggcgtttccttga

SEQ ID NO: 58766 - protein, 318 aa, Unknown
  Obtained from environmental sample
  misc_feature (1)..(318): Xaa is any amino acid
MAENEQLAVSSEQRKEGKRNFVIGIPRAFSVHTLYPLYSWFFHELGIKTFLSTEVAHAGVARSESTYCFPAEIAHGAVQDCLDKGADFVFLPHFRDMPSYEDEIHANFCPITQALPYYIEKAFPDIDKSRWLPLVVSFKFGEGKALELFCEMTKRLGIDEAETKAAFNVAMSKQQAYFDAIHAMGKEALEEARKSDRPVIATLGRPYNAFTPEANMGIPRKFTTRGYSIIPFDILPFHDEVIFPNMYWYYGQQDLKAANLLKKEDNIYLAFITNFSCAPDSFILHYVKWTMGQKPFLVLELDSHSADAGVDTRVEAFP

SEQ ID NO: 58767 - DNA, 951 bp, Unknown
  Obtained from environmental sample
  misc_feature (1)..(951): n is a, c, g, or t
gtggggaacaaacgggtaaaactgcttctttccaacatgggcgccatatccaccgagtacatgggcgctgcggttcgcagccagggcgtcaacggcgaggctctgcctgtggctaccgcaaaaacaatacagattgcccgcgcccacgcgtccgggaaagaatgcgttcccagccatctggttttgggaagcgccctggaattctttttcagcaagaaataccgcaaagacgagctgtacctgctttttgtccccataaccacaggcccttgccgaactggacagtactatgtgttttatgaaaaccttttccgcgacttgagacttgaaaatgtcgttgtattcatactttcagcggacaattcctataccgagcttggcggcagctttgccagggagatgtggaaggggcttgttctttccgattatctaaaggacatacagtgcgctcttaaagcctgcgctgtcgatcccaaaaaagcccaggctgaattcgaacattcgtggcgtagaattatgcacgcggtagagcataatccaaagtatttgtggaaagaacttaagcatgtagcgaatgatgttaagaagattcctctaaaaagaaaagtcgctgatcgcccccgcgtgcttgtcgtgggtgaaatttacgttcgccgcgatgattttgcggtgggcgaattgacagaccttatgagcgagaggggaatagtagtaaaggttgcgggcatttccgaatggatacactacctggactttgtgcgggaatacgccctcaaaaaactgataaagctgcaaaaacccggcaaacggctcttttccaaaccatggaaggacctaaaaaaacttgagatagaagaatggtggaaacactctgtgaaaaaaaggtgctttcaattctactgcccacgggccttatcccggaaacgccccacgatatgcgcgagatcatga

SEQ ID NO: 58768 - protein, 316 aa, Unknown
  Obtained from environmental sample
  misc_feature (1)..(316): Xaa is any amino acid
MGNKRVKLLLSNMGAISTEYMGAAVRSQGVNGEALPVATAKTIQIARAHASGKECVPSHLVLGSALEFFFSKKYRKDELYLLFVPITTGPCRTGQYYVFYENLFRDLRLENVVVFILSADNSYTELGGSFAREMWKGLVLSDYLKDIQCALKACAVDPKKAQAEFEHSWRRIMHAVEHNPKYLWKELKHVANDVKKIPLKRKVADRPRVLVVGEIYVRRDDFAVGELTDLMSERGIVVKVAGISEWIHYLDFVREYALKKLIKLQKPGKRLFSKPWKDLKKLEIEEWWKHSVKKRCFQFYCPRALSRKRPTICARS

SEQ ID NO: 58769 - DNA, 456 bp, Unknown
  Obtained from environmental sample
  misc_feature (1)..(456): n is a, c, g, or t
atgagcgttgcggaattgtataaatggattctcgaggccaagcattttgtggcttttacgggcgcaggggtcagcacgctttcgggtataaaggattttcgcggcaaagacggaattgcgaacggtgaaacaatttttaatattgatgtttttgaacaggatccttccgtgtactataacaacgcccgttcatttatctataaccttgacgagagagagccgtccatagtgcatattgttcttggggaactggagaaaaggggacttctcaaggcgctgataacacagaatatcgatcttttacaccagaagggcggaagcacaaacgtgatagaagtccacggttctcccaaggttcattactgcctccgctgtcccgggattcgtatgggctttgaggaagccgccgccattgtgcgctccggcggcatgccccaatgccctcggccgatctga

SEQ ID NO: 58770 - protein, 151 aa, Unknown
  Obtained from environmental sample
  DOMAIN (21)...(150): Sir2 family
  misc_feature (1)..(151): Xaa is any amino acid
MSVAELYKWILEAKHFVAFTGAGVSTLSGIKDFRGKDGIANGETIFNIDVFEQDPSVYYNNARSFIYNLDEREPSIVHIVLGELEKRGLLKALITQNIDLLHQKGGSTNVIEVHGSPKVHYCLRCPGIRMGFEEAAAIVRSGGMPQCPRPI

SEQ ID NO: 58771 - DNA, 1647 bp, Unknown
  Obtained from environmental sample
  misc_feature (1)..(1647): n is a, c, g, or t
gtgaggatgcaactgcgcgagaaactgggtcttaacgccgtgatgattcaaatccctatagggcttgaagacaaacttgaaggcattatcgatcttattacgatgaaagcggtttattttgacggagaacaaggcgaaacaatacgccttgcggaaattcccccgcacttaaaagcggatgcggaaaaaaaccgcgaggaaatgatagacgcggtctcgcatttttccgacgagcttgcggaaaaatttcttgccgaagaggcgattcccgaagacatgatccgagcggcaatccgcgccggcacgcttgcagaaaagtttgtgcctgtcatgctcggctccgcttacaagttcaaaggcatacagacgctgatggacgggataatgtactatcttcccaatcctacggaagtaacaaattacgcgctggatcttgataacaacgaaaaaaaagtcgagctttcccccgacgaaaaaagtcccacagtcgcccttggttttaaactggaagacggcaaatacggacagcttacttatgtgcgtatttatcagggcagcttaaaaaaaggcgacgagcttatgaacacgcgcgcgcggagaaaattcaaagtggggcggcttgtccgaatgcacgccgacagcatggaagacatcaacgaaggagaccccggcgacattgtcgcgttattcggaattgagtgcgcgtccggcgacactttctgcggaggaagcctcaactacgcgatgacttcaatgttcgttccgaatcctgttatatcgcttgcggtgacaccgaaagataaaaaaagcgccgaccagatggcgaaggcgctgaaccgttttaccaaagaagaccctacatttcaaacttatgttgatcccgaatcgaaccagacgattatcaaaggaatgggcgagcttcatctggaagtttatatcgaaagaatgcgccgcgaatacaaatgcgaagttgatacgggaatgcctcaggtcgcctaccgcgaaacgattacgcagaaagcggaattcaattacacgcacagaaaacaaacaggcggcgcgggacaattcgggcgggtagcgggttacatggaaccttacgcggacggagactacgagtttgtagacatgatcaagggcggatctatccccaccgagtatgtgccaagctgcgacaaaggatttaaggaggcggttaaaaaaggcagccttatcggcttccccattgtaaacatacgctgcgtaataaacgacggacagagccaccctgttgactcgtcagatatcgccttccagtccgcggcaataggcgctttccgcgaagcgtacaacaaagcaaagcccgtcattctggaaccgattatgaaagtttcggtagatggtcccacggaatttcagggaaatatttacggttctatcaaccaaaggcgcggaataattttgtcgtccgtagaggacgggcttatctcccgcgttgaatccgaagtcccattaagcgaaatgttcggctactccacggcgctgcgctcgttaacgcagggcaaggcggaattttctatggtatttgaaaaatactcaaaagtgccccaaagcgtttcggaagcgttaattaaagaagcggaaaacaagaaaaggaaggagagataa

SEQ ID NO: 58772 - protein, 548 aa, Unknown
  Obtained from environmental sample
  DOMAIN (175)...(241): Elongation factor Tu domain 2
  misc_feature (1)..(548): Xaa is any amino acid
MRMQLREKLGLNAVMIQIPIGLEDKLEGIIDLITMKAVYFDGEQGETIRLAEIPPHLKADAEKNREEMIDAVSHFSDELAEKFLAEEAIPEDMIRAAIRAGTLAEKFVPVMLGSAYKFKGIQTLMDGIMYYLPNPTEVTNYALDLDNNEKKVELSPDEKSPTVALGFKLEDGKYGQLTYVRIYQGSLKKGDELMNTRARRKFKVGRLVRMHADSMEDINEGDPGDIVALFGIECASGDTFCGGSLNYAMTSMFVPNPVISLAVTPKDKKSADQMAKALNRFTKEDPTFQTYVDPESNQTIIKGMGELHLEVYIERMRREYKCEVDTGMPQVAYRETITQKAEFNYTHRKQTGGAGQFGRVAGYMEPYADGDYEFVDMIKGGSIPTEYVPSCDKGFKEAVKKGSLIGFPIVNIRCVINDGQSHPVDSSDIAFQSAAIGAFREAYNKAKPVILEPIMKVSVDGPTEFQGNIYGSINQRRGIILSSVEDGLISRVESEVPLSEMFGYSTALRSLTQGKAEFSMVFEKYSKVPQSVSEALIKEAENKKRKER

SEQ ID NO: 58773 - DNA, 516 bp, Unknown
  Obtained from environmental sample
  misc_feature (1)..(516): n is a, c, g, or t
gtggctctgtccgtcgtttattacgcagcgtatgtttacaatggggaagccgataaggctgccttttttaaccgcctccttaaatcctttgtcgcagcttggcacatactcggtggggatagatccgcccttgatcatgtctacaaactcgtagtctccgtccgcgtaaggttccatgtaacccgctacccgcccgaattgtcccgcgccgcctgtttgttttctgtgcgtgtaattgaattccgctttctgcgtaatcgtttcgcggtaggcgacctgaggcattcccgtatcaacttcgcatttgtattcgcggcgcattctttcgatataaacttccagatgaagctcgcccattcctttgataatcgtctggttcgattcgggatcaacataagtttgaaatgtagggtcttctttggtaaaacggttcagcgccttcgccatctggtcggcgctttttttatctttcggtgtcaccgcaagcgatataacaggattcggaacgaacattga

SEQ ID NO: 58774 - protein, 171 aa, Unknown
  Obtained from environmental sample
  misc_feature (1)..(171): Xaa is any amino acid
MALSVVYYAAYVYNGEADKAAFFNRLLKSFVAAWHILGGDRSALDHVYKLVVSVRVRFHVTRYPPELSRAACLFSVRVIEFRFLRNRFAVGDLRHSRINFAFVFAAHSFDINFQMKLAHSFDNRLVRFGINISLKCRVFFGKTVQRLRHLVGAFFIFRCHRKRYNRIRNEH

SEQ ID NO: 58775 - DNA, 705 bp, Unknown
  Obtained from environmental sample
  misc_feature (1)..(705): n is a, c, g, or t
atgatattaagcgaacttatacagagaagtcctatccgtatttttgaacagtccattcacggcggcctgaaaccgggagaaatcggggttatcgcttcacctaacggggtgggaaaaacctcggttttggtgcagcttgctctggacaaactgcttcaggggaaaaaggtaatacatgtttctttttcacagcacacccagtatgtccccgtatggtacgaagacatattttcggaatttatcagtaaaaaaaatcttgaaaacgccctggaaataaaaaacgatttggtaaaaaaccgcgttttaatgacatttaatcaggacggaatatccaacaatcagattttaaaaagccttagggcaatgattattgagggcggttttaaggcggactcgattattattgacggttttgattttacgcgcatggacaaaaaaagcatcgatgactttaaaaatttcgccacggagcttggcatcagcgtctggtacagttgttcagttaaagacgaggggaaccagtacgataaagagaacgttcctttattgctgggcggttatattgataatattgatattgtgatcgtgttgcagcccaagcctgatcatgttgagctctctatatctaaggacaggggatccgttatttccagggcgaagtcgatgaaattggatccgaggactttgttgattttggaagcgtga

SEQ ID NO: 58776 - protein, 234 aa, Unknown
  Obtained from environmental sample
  misc_feature (1)..(234): Xaa is any amino acid
MILSELIQRSPIRIFEQSIHGGLKPGEIGVIASPNGVGKTSVLVQLALDKLLQGKKVIHVSFSQHTQYVPVWYEDIFSEFISKKNLENALEIKNDLVKNRVLMTFNQDGISNNQILKSLRAMIIEGGFKADSIIIDGFDFTRMDKKSIDDFKNFATELGISVWYSCSVKDEGNQYDKENVPLLLGGYIDNIDIVIVLQPKPDHVELSISKDRGSVISRAKSMKLDPRTLLILEA

SEQ ID NO: 58777 - DNA, 846 bp, Unknown
  Obtained from environmental sample
  misc_feature (1)..(846): n is a, c, g, or t
atgcgcaaactcatactgactacggcggcggtcgcggcggcgattggattggcggggtgctcgatgcctcccgcgccgaaatccgtctccgcgacgcctgatacggcggccctatcggtcgatacgccgcccgccgacgcttccgctttttccgaaacggcggtcggcgggcaaagttttgaaatggcgttcgtggcgggggggacgtttacgatggggtgcgccgccgaacaagacagcgattgcgacgacgatgaacgtccggcgcattccgtgacgctgagcgattactacatcgggaagcgcgaggtgacgcaggggttgtggaaagcggtgacgggcggtaacccgtcacattttacaaggagcgataatttgcccgttgaaaacgtcagttgggatgaggtcaacgcgtttatagactgtttgaatagaaagaccggcaggatgtatagattgccgacggaggcggagtgggagtatgcggcgcgcggggggaataaaagcggaggatacaaatattcaggtagtaatacgttggatagcgtcgcttggtataaagataatagcggcagtaaaacacaagaggcaggtacgaaagcgcctaatgaacttggtatctatgacatgagcggcaacgtgtgggagtggacgggcgattggtatggagattacggttcggatgcgcagactaatcctacagggccgtcaacgggctctttccgcgtgcggcggggcggtagttggttcggcaacgcggggtgctgccgtgtctctagtcgcttcatcggcgaccccggctaccgcgacggcgacgtaggcttccgccttgctgtttccccctag

SEQ ID NO: 58778 - protein, 281 aa, Unknown
  Obtained from environmental sample
  SIGNAL (1)...(27)
  DOMAIN (58)...(279): Domain of unknown function (DUF323)
  misc_feature (1)..(281): Xaa is any amino acid
MRKLILTTAAVAAAIGLAGCSMPPAPKSVSATPDTAALSVDTPPADASAFSETAVGGQSFEMAFVAGGTFTMGCAAEQDSDCDDDERPAHSVTLSDYYIGKREVTQGLWKAVTGGNPSHFTRSDNLPVENVSWDEVNAFIDCLNRKTGRMYRLPTEAEWEYAARGGNKSGGYKYSGSNTLDSVAWYKDNSGSKTQEAGTKAPNELGIYDMSGNVWEWTGDWYGDYGSDAQTNPTGPSTGSFRVRRGGSWFGNAGCCRVSSRFIGDPGYRDGDVGFRLAVSP

SEQ ID NO: 58779 - DNA, 882 bp, Unknown
  Obtained from environmental sample
  misc_feature (1)..(882): n is a, c, g, or t
ttgctgcttacccctaaccccaaaggatcaaccacaatgcgcaaactcatactgactacggcggcggtcgcggcggcgattggattggcggggtgctctaagacaccgacaccgaagtccgtctccgcgacgcctgatacggcggccctatcggtcgatacgccgcccgccgacgcttccgctttttccgaaacggtggtcggcgggcaaagttttgaaatggcgttcgtggcgggcgggacgtttacgatggggtgcgccgccgaacaggacagcgattgcgacgaagacgaacgtccggcgcattccgtgacgctgagcgattactacatcgggaagcatgaggtaactcaggggttgtggaaagcggtgacgggcggcaatccgtcatattttacagggagcgatagtttgcccgttgaaaacgtccgttggaatgaggtcagcgcgtttatagacagtttgaatagaaagaccggcaggacgtatagattgccgacggaggcggagtgggagtatgcggcgcgcggggggaataaaagcggaggatacaaatattcaggtagtaatacgttggatagcgtcgcttggtataaagataatagcggcagtaaaacacaagaggcaggtacgaaagcgcctaatgaacttggtatctatgacatgagcggcaacgtgtgggagtggacgggcgattggtatggagattacggttcggatgcgcagactaatcctacagggccgtcaacgggctctttccgcgtgcggcggggcggtagttggttcggcaacgcggggtgctgccgtgtctctagtcgcttcatcggcgaccccggctaccgcgacggcgacgtaggcttccgccttgctgtttccccctag

SEQ ID NO: 58780 - protein, 293 aa, Unknown
  Obtained from environmental sample
  SIGNAL (1)...(24)
  DOMAIN (70)...(291): Domain of unknown function (DUF323)
  misc_feature (1)..(293): Xaa is any amino acid
MLLTPNPKGSTTMRKLILTTAAVAAAIGLAGCSKTPTPKSVSATPDTAALSVDTPPADASAFSETVVGGQSFEMAFVAGGTFTMGCAAEQDSDCDEDERPAHSVTLSDYYIGKHEVTQGLWKAVTGGNPSYFTGSDSLPVENVRWNEVSAFIDSLNRKTGRTYRLPTEAEWEYAARGGNKSGGYKYSGSNTLDSVAWYKDNSGSKTQEAGTKAPNELGIYDMSGNVWEWTGDWYGDYGSDAQTNPTGPSTGSFRVRRGGSWFGNAGCCRVSSRFIGDPGYRDGDVGFRLAVSP

SEQ ID NO: 58781 - DNA, 444 bp, Unknown
  Obtained from environmental sample
  misc_feature (1)..(444): n is a, c, g, or t
ttgcaagaagtacggcagattgtacgattggaaaacggcaaagaagatttgtcccactggatatcatctataccctctcgtcgggaatggaacgatctcgctaaggccgtagaaggtgaaagcgagattataagggatgtaggcgataataatctttatgttttttgggacaacgcaggtaagaggctgaaagcgaaaagcgattggggcgataatggtaacggtactgacaattacggattttcagcgctacccggcggttaccgtacctccgacggtaatttctactctcaattatacaagagcggctggtggacggctacagagtactataacggtcacgcttaccgtcgggatatggaattcggtcacgacggcgtgaatgaggacaatgatagcacggcctacggcttctccgtccgttgcgtcgccggcagaccatga

SEQ ID NO: 58782 - protein, 147 aa, Unknown
  Obtained from environmental sample
  misc_feature (1)..(147): Xaa is any amino acid
MQEVRQIVRLENGKEDLSHWISSIPSRREWNDLAKAVEGESEIIRDVGDNNLYVFWDNAGKRLKAKSDWGDNGNGTDNYGFSALPGGYRTSDGNFYSQLYKSGWWTATEYYNGHAYRRDMEFGHDGVNEDNDSTAYGFSVRCVAGRP

SEQ ID NO: 58783 - DNA, 864 bp, Unknown
  Obtained from environmental sample
  misc_feature (1)..(864): n is a, c, g, or t
ttgagaaaccgcgccttggtttcgcgcagccggatttttcagttaaagtctttggaaaccggcgatcttatgaaggccgccaaacgtaccctttcagacaaagaaagaggctacggcaagtggaaggttactttcgaggaaggcgcgctggaacaccttgcggaagtggccggaggggacgcgagaagtctgcttaacgccctggagttggctgttgaaacaagcgggacaacctcctggccgccgcctcctgacgcggaaatttttgtcagccttgaagccgccgaagagagcattcagagaagagccctgctttacgaccgtgacggagactaccacttcgacaccatcagcgcttttattaaaagcgtccgtggcagcgatcccgacgcggccctttactggcttgccaagatggtcagggccggtgaagaccccgcttttatttttcgccgcatgataatactggcaatggaggacgttggacttgccgatccgacagttatttcaacggtaatcgcctgtgccgaagcctttgaccgcatcgggttcccggaagggaatttcgcgctttccgaagcctgtttatgcctgtcgacagcgccaaagtcaaacactaccttggcttattttgacgccttanaagaagttgaaaaagaagacgcagatattccagcccacttaagagacgcaagccgcgatgccgagagtttcggccacggggaaggctatatttacccacacgcttacaggaatcattgggcggcccaggcctatctgcctacggcgcttcttggaaggactttctacactccctcgcaggtcgggtacgaaaggcaaaatccgcgaggaagtcctgaataa

SEQ ID NO: 58784 - protein, 287 aa, Unknown
  Obtained from environmental sample
  misc_feature (1)..(287): Xaa is any amino acid
MRNRALVSRSRIFQLKSLETGDLMKAAKRTLSDKERGYGKWKVTFEEGALEHLAEVAGGDARSLLNALELAVETSGTTSWPPPPDAEIFVSLEAAEESIQRRALLYDRDGDYHFDTISAFIKSVRGSDPDAALYWLAKMVRAGEDPAFIFRRMIILAMEDVGLADPTVISTVIACAEAFDRIGFPEGNFALSEACLCLSTAPKSNTTLAYFDALXEVEKEDADIPAHLRDASRDAESFGHGEGYIYPHAYRNHWAAQAYLPTALLGRTFYTPSQVGYERQNPRGSPE

SEQ ID NO: 58785 - DNA, 1131 bp, Unknown
  Obtained from environmental sample
  misc_feature (1)..(1131): n is a, c, g, or t
atgccgagagtttcggccacggggaaggctatatttacccacacgcttacaggaatcattgggcggcccaggcctatctgcctacggcgcttcttggaaggactttctacactccctcgcaggtcgggtacgaaaggcaaaatccgcgaggaagtcctgaataaacgggagattcaggctgcggttattctgggcgataacatcgcccatggcgatagcgcggcaaatgccgagatcctcagttggtcggccgcttccaaaggccgggaaggctggtacaagcgcctggaatcgggccgaagcgccgcgcttttaagcgccagaaacctgatcctggaacaaataaaaatcgcccgccacgatcgcgtacttgtcgcttcggccaatgacggcctgctcctctgggaaagccttagacgctgtccggaagggcttgccgcggcacttgtggatagcgcttccgccatggaagcgctgcttaaattcgcagcgatcctggaagaaaccgacaaaccccttgtcgcggtttttccggaggggaaaattccttccccggaagaagcggaagaagccttctcctgccctgtttttgaccatgttctggccagagagcccttcagacggaaatgggaggaagggacgcttagggcctttgtggccgcctcaaaactcatccttgctccaaagggaaacattgttattttgcagtctttgcccaaaatgggtgaaagaatttcacgtataatacgggaagaatgtagcgccgcttccggccttgtagacgaattggctgcagcggaagaaattttctttgaaagatctatggagtgtaactccaatgaaagcccctccaactggaaaattgacagttccaccctggaaaaatgcttcaaagagcagggttttctaacagaaatcaaaaccatagaatgccaggaagaaaggctcctcaccaaaggggatttggacggatggtttgactcaaagcgttccccctggggtctgtcgataagccgtactcttggtgagaaatcgtttctggcgataagaatgctccttgacgagagggtttcccgagggccggtgtgctggaaatggaaaaaaatgctaataaaagcaaataatccctga

SEQ ID NO: 58786 - protein, 376 aa, Unknown
  Obtained from environmental sample
  misc_feature (1)..(376): Xaa is any amino acid
MPRVSATGKAIFTHTLTGIIGRPRPICLRRFLEGLSTLPRRSGTKGKIREEVLNKREIQAAVILGDNIAHGDSAANAEILSWSAASKGREGWYKRLESGRSAALLSARNLILEQIKIARHDRVLVASANDGLLLWESLRRCPEGLAAALVDSASAMEALLKFAAILEETDKPLVAVFPEGKIPSPEEAEEAFSCPVFDHVLAREPFRRKWEEGTLRAFVAASKLILAPKGNIVILQSLPKMGERISRIIREECSAASGLVDELAAAEEIFFERSMECNSNESPSNWKIDSSTLEKCFKEQGFLTEIKTIECQEERLLTKGDLDGWFDSKRSPWGLSISRTLGEKSFLAIRMLLDERVSRGPVCWKWKKMLIKANNP

SEQ ID NO: 58787 - DNA, 1104 bp, Unknown
  Obtained from environmental sample
  misc_feature (1)..(1104): n is a, c, g, or t
ttgatgccggatatggattcttatttatccataggcggtgatgaggcggtagggaatatggcaggcaagcagaaaacgcagagatttaaagcggtttccctgttcagcggaattcaagaggtgaaagctggcaaaacggaaaaaatcaaattcaaaatgccgcaatatgttggctctgtccgggcgcagttgattggcgtttctcaaaacgcattttccaaaaacgaagccaatatagtggttaaaaaaccgcttatgattttgccaaccgttcccagagcggcaaaacccggcgacaaattcagggttcctgtttctgtgtttgcaatggatgatgatgtgaagaacgtcagcgtgaatttgcaggtttcgcaagaactcaaaattataggcaagagcgattttaccatctctttctcaaagcccggcgaacttgatggcagttttgaagttgagacattgcccattcttggagctgcgaaagtaattgtaaaagcggagagcggcaagcataaaatttccgataccatagatttgcccataatgagttcatccgcatattacacggaagttttgcaagggcaaattacaggtggtgaaacttggcaagccaaaataaatgcctttggaatagacggtacgcacagagcgactcttgtgctcagctcaatgcctaacttaggctcagacgagcgactggattatttaatacattatccttatggttgcttggagcagaccacttctagcgtattcccgcagttgtatatagacaagttaagggatttggattcaaagaaaaagcaggagattacaaataacataaatgatggaatcaagcggcttgcgcaattctctttgagtcaaggattttcttattggcccaaccaaagcggcaatgcggattcttggtcgagcagttatgctgggcattttatgttggaggcaaaaaccgcaggctattccattccgcagaaccttttgaacacatggaagagctgggaagtggagcaagcaaagaaaacatatagccaagatttccgcaatcaggcgtataggttgttcttgctggcaatggctggcgaagagcaatgggcgcgatga

SEQ ID NO: 58788 - protein, 367 aa, Unknown
  Obtained from environmental sample
  misc_feature (1)..(367): Xaa is any amino acid
MMPDMDSYLSIGGDEAVGNMAGKQKTQRFKAVSLFSGIQEVKAGKTEKIKFKMPQYVGSVRAQLIGVSQNAFSKNEANIVVKKPLMILPTVPRAAKPGDKFRVPVSVFAMDDDVKNVSVNLQVSQELKIIGKSDFTISFSKPGELDGSFEVETLPILGAAKVIVKAESGKHKISDTIDLPIMSSSAYYTEVLQGQITGGETWQAKINAFGIDGTHRATLVLSSMPNLGSDERLDYLIHYPYGCLEQTTSSVFPQLYIDKLRDLDSKKKQEITNNINDGIKRLAQFSLSQGFSYWPNQSGNADSWSSSYAGHFMLEAKTAGYSIPQNLLNTWKSWEVEQAKKTYSQDFRNQAYRLFLLAMAGEEQWAR

SEQ ID NO: 58789 - DNA, 351 bp, Unknown
  Obtained from environmental sample
  misc_feature (1)..(351): n is a, c, g, or t
atgcgtcaatttgaagtagtatcgcccttccaacccgccggagatcaaggcgaagcgatttccgcgttagctgaaggcatacaaaccggagacaggtatcaaacattgcagggcgttacgggttcgggcaaaactttcacaatggcgaagattatcgaagcggtacaaatgccgacgttgattgtcagccataacaaaaccctggccgcccagcttttccgggagttcaaggggctttttccccaacaacgcggtggagtactttgtctcttattacgattactaccagccggaagcctatgtcgccagccgcgatctgtacatcgaaaaagacgcttccataaacgatga

SEQ ID NO: 58790 - protein, 116 aa, Unknown
  Obtained from environmental sample
  DOMAIN (9)...(109): Type III restriction enzyme, res subunit
  misc_feature (1)..(116): Xaa is any amino acid
MRQFEVVSPFQPAGDQGEAISALAEGIQTGDRYQTLQGVTGSGKTFTMAKIIEAVQMPTLIVSHNKTLAAQLFREFKGLFPQQRGGVLCLLLRLLPAGSLCRQPRSVHRKRRFHKR

SEQ ID NO: 58791 - DNA, 666 bp, Unknown
  Obtained from environmental sample
  misc_feature (1)..(666): n is a, c, g, or t
ttgtcagccataacaaaaccctggccgcccagcttttccgggagttcaaggggctttttccccaacaacgcggtggagtactttgtctcttattacgattactaccagccggaagcctatgtcgccagccgcgatctgtacatcgaaaaagacgcttccataaacgatgagattgagaggatgaggctttccgcggcgcgcagcatgatggagcgcgaggacgttattatcgtggcgactgtctcctgcatttacggcatggttacgcccgacgtgtacaggaagatgacctctaccttctcgaagggcgagaccgttgacgttgactccctgatgaggcgtttcgtggaactccagtacgagcgtaacgacgcggtgctggatcgggggcgtttccgccgcaggggggacacccttgaaattttccccgcgtacatggaagaagcctaccgcgtcgatctggactgggaccgcgtcgagcgcataaggcgctttaacctcgtgtcgggtgaaattctggaagagcttgacagggcgctgatctacccggcaaaacagttcgtcatgcccgcggaaatggtttttaatgcgataggggccataaagcgggaactggaagacaggcttgagtttttcaaaagcccaggggaaaataatcgaggctga

SEQ ID NO: 58792 - protein, 221 aa, Unknown
  Obtained from environmental sample
  misc_feature (1)..(221): Xaa is any amino acid
MSAITKPWPPSFSGSSRGFFPNNAVEYFVSYYDYYQPEAYVASRDLYIEKDASINDEIERMRLSAARSMMEREDVIIVATVSCIYGMVTPDVYRKMTSTFSKGETVDVDSLMRRFVELQYERNDAVLDRGRFRRRGDTLEIFPAYMEEAYRVDLDWDRVERIRRFNLVSGEILEELDRALIYPAKQFVMPAEMVFNAIGAIKRELEDRLEFFKSPGENNRG

SEQ ID NO: 58793 - DNA, 801 bp, Unknown
  Obtained from environmental sample
  misc_feature (1)..(801): n is a, c, g, or t
ttgagatgcttaatgagatgggctactgttccggcattgaaaattattcggcgcttttggcggggccgcaaacccggcgagtcccccgacaccctggtcgattacctcccccccaaacacctcacttttattgacgaaagccacgttacccttccgcagttaggcgcaatgtacgccggggaccgcagccgcaagcagagcctggtggactacggcttccgcctgccctgcgccctggacaaccgccccctgcgctacgatgaatttgtcgatcgcctggacaagaccgtttttgtgtccgccaccccgggcaaaaccgagatagagcagtccgcccgcgtggtacagcagctaatccggcctaccggccttcttgatcctgaaattgaggtacgccccagcgagggccagatggaagacatctacggcgaagtgcggaaacgcatcaaggccggggagcgatcccttatcctcaccctcaccaaaaaaatggccgaggaccttaccgattacctttccggcctgggcttgaaagtccgctacatccacagcgaggtagaaaccatcgagcgtgtcgagatacttacccggctaaggcagggtgagtttgacgtgcttgttgggatcaaccttttgcgcgagggcatagatctgcccgaggtttcttttatagcgatacttgacgcggacaagatagggtttttacgatcgcacacaagccttgtgcagataatagggcgggcggccaggaacgccgccggcaaggtgataatgtacgctgaccgcctcggccgattctga

SEQ ID NO: 58794 - protein, 266 aa, Unknown
  Obtained from environmental sample
  DOMAIN (171)...(252): Helicase conserved C-terminal domain
  misc_feature (1)..(266): Xaa is any amino acid
MRCLMRWATVPALKIIRRFWRGRKPGESPDTLVDYLPPKHLTFIDESHVTLPQLGAMYAGDRSRKQSLVDYGFRLPCALDNRPLRYDEFVDRLDKTVFVSATPGKTEIEQSARVVQQLIRPTGLLDPEIEVRPSEGQMEDIYGEVRKRIKAGERSLILTLTKKMAEDLTDYLSGLGLKVRYIHSEVETIERVEILTRLRQGEFDVLVGINLLREGIDLPEVSFIAILDADKIGFLRSHTSLVQIIGRAARNAAGKVIMYADRLGRF

SEQ ID NO: 58795 - DNA, 597 bp, Unknown
  Obtained from environmental sample
  misc_feature (1)..(597): n is a, c, g, or t
ttgatgatacttgcctcatggaaaattatccccggcctttcccgtcttgtccatttttgcatagccgcgattttatgcctgcttataggtttttccaggatctatcttggcgttcattttcccactgacgtttttggaggctggctgcttggcggtcttgtacttgctgtatacttctgggccggcagtcggattgaagagtggtttgaaacgcataatccccgtatagggctgatagccgcagccgcccttgcctttgccatgaatatgtaccggccctttgaatatctgctcatgcccagcggtatgatcctcggtttgggcatcggctgtttcctttgccgccgttatattggctttaacgcctccctgaaagacaggtccggaacggaaaaacgcctgaccctgcttgtccgctacgtcctgggaattacggcaattgctttattatatgtggcagccggaaaatttattaacggtttgcgcgattccggcaattaccatctgtatgtttttatacgctatgtccttatggctgtttggatttctgcgggcgccccctgggttttttgcaagctgcgtcttgcgcgggcctaa

SEQ ID NO: 58796 - protein, 198 aa, Unknown
  Obtained from environmental sample
  misc_feature (1)..(198): Xaa is any amino acid
MMILASWKIIPGLSRLVHFCIAAILCLLIGFSRIYLGVHFPTDVFGGWLLGGLVLAVYFWAGSRIEEWFETHNPRIGLIAAAALAFAMNMYRPFEYLLMPSGMILGLGIGCFLCRRYIGFNASLKDRSGTEKRLTLLVRYVLGITAIALLYVAAGKFINGLRDSGNYHLYVFIRYVLMAVWISAGAPWVFCKLRLARA

SEQ ID NO: 58797 - DNA, 1401 bp, Unknown
  Obtained from environmental sample
  misc_feature (1)..(1401): n is a, c, g, or t
atgaaaacattttcttacggagacgactcccccattgcggcgtttgccactacccccggcaggagcgcccttacgttgatccgctgttccggcaaaggatctccggaacttgcggcgggtattttttcccctcangaaaaaatactgcaagccgcgggaaataccgttattcatggatggatagttgcgcataacaaatcgccggacaagcctgccgaacgcgttgacgaggttctgatctcggtgttccgcgcgcctaaaagctacaccggagaggacggtctggacatttcctgccacgggggcaacgccgccgctcaggctgtaatggcggttttgcgggccgttggtttccgcgacgcactgcccggagaatttaccttccgcgcctttatgaacggcaagcttgaccttacccgcgccgagtcggtcatggaactggtctccgccagaacagacagaggccgcggtaacgcggttaaccggctttccggcgtactggaaaaagaaataagcgcgataaagaaaacgcttgtggaagtcctgtcaggcgcggaaattttccttgactattccgaggatgaaattagcgcggacgccgaggagatcgcgggccggcttcccaatgaaacgcttgcccgtgaagcgcttgtccgcctgcaaaaactcgcgaaaacctggcagcttgaacgcatctatcaggaaggggtttccgcggtaatcgcgggccggcccaattcgggcaagtccagcctgttcaatctgttgctgaaagaagaacgctcaattgtcacggagatccccggcacgacccgcgactggattgaggcttgggtttccattaaaggcataccggtgcgccttgtcgacacggccggcctcagagattcatccgatcttgttgaaaaaatcggcgtggaacgcagccgtgatttactggaaaccgccgatcttgttttgtacctcatcgacggcgaagcgggcattacggacgaagattccgcgttaattgacaagctgtcaacaccccgccttgtcatatggaacaagaccgacatcgcccccgggcccgatgatgttcttgccgtcagcgcgaaaacgggcgaaggcataacggaactgtcagcggcaatagcatccgctgtacaggttgcagctaacgctgaaagcgccgatcccgccgcgtccccgtcgctcggcaccgtgcggcagaaaaaccttgtggagtcggcggttgccgcgctggaagaggcgctgcgtctggctgaaaaaaatgagccgcttgaccttgtttcccccatgctgagggaagcggtaaacgcgctgggcgaaattacaggcgaggtttccacctcggatatactggaagaaatgttcggtaaattctgcgtgggaaagtag

SEQ ID NO: 58798 - protein, 466 aa, Unknown
  Obtained from environmental sample
  DOMAIN (237)...(352): GTPase of unknown function
  misc_feature (1)..(466): Xaa is any amino acid
MKTFSYGDDSPIAAFATTPGRSALTLIRCSGKGSPELAAGIFSPXEKILQAAGNTVIHGWIVAHNKSPDKPAERVDEVLISVFRAPKSYTGEDGLDISCHGGNAAAQAVMAVLRAVGFRDALPGEFTFRAFMNGKLDLTRAESVMELVSARTDRGRGNAVNRLSGVLEKEISAIKKTLVEVLSGAEIFLDYSEDEISADAEEIAGRLPNETLAREALVRLQKLAKTWQLERIYQEGVSAVIAGRPNSGKSSLFNLLLKEERSIVTEIPGTTRDWIEAWVSIKGIPVRLVDTAGLRDSSDLVEKIGVERSRDLLETADLVLYLIDGEAGITDEDSALIDKLSTPRLVIWNKTDIAPGPDDVLAVSAKTGEGITELSAAIASAVQVAANAESADPAASPSLGTVRQKNLVESAVAALEEALRLAEKNEPLDLVSPMLREAVNALGEITGEVSTSDILEEMFGKFCVGK

SEQ ID NO: 58799 - DNA, 726 bp, Unknown
  Obtained from environmental sample
  misc_feature (1)..(726): n is a, c, g, or t
ttgacggcacggtggagatataactactttcccacgcagaatttaccgaacatttcttccagtatatccgaggtggaaacctcgcctgtaatttcgcccagcgcgtttaccgcttccctcagcatgggggaaacaaggtcaagcggctcatttttttcagccagacgcagcgcctcttccagcgcggcaaccgccgactccacaaggtttttctgccgcacggtgccgagcgacggggacgcggcgggatcggcgctttcagcgttagctgcaacctgtacagcggatgctattgccgctgacagttccgttatgccttcgcccgttttcgcgctgacggcaagaacatcatcgggcccgggggcgatgtcggtcttgttccatatgacaaggcggggtgttgacagcttgtcaattaacgcggaatcttcgtccgtaatgcccgcttcgccgtcgatgaggtacaaaacaagatcggcggtttccagtaaatcacggctgcgttccacgccgattttttcaacaagatcggatgaatctctgaggccggccgtgtcgacaaggcgcaccggtatgcctttaatggaaacccaagcctcaatccagtcgcgggtcgtgccggggatctccgtgacaattgagcgttcttctttcagcaacagattgaacaggctggacttgcccgaattgggccggcccgcgattaccgcggaaaccccttcctga

SEQ ID NO: 58800 - protein, 241 aa, Unknown
  Obtained from environmental sample
  misc_feature (1)..(241): Xaa is any amino acid
MTARWRYNYFPTQNLPNISSSISEVETSPVISPSAFTASLSMGETRSSGSFFSARRSASSSAATADSTRFFCRTVPSDGDAAGSALSALAATCTADAIAADSSVMPSPVFALTARTSSGPGAMSVLFHMTRRGVDSLSINAESSSVMPASPSMRYKTRSAVSSKSRLRSTPIFSTRSDESLRPAVSTRRTGMPLMETQASIQSRVVPGISVTIERSSFSNRLNRLDLPELGRPAITAETPS

SEQ ID NO: 58801 - DNA, 1197 bp, Unknown
  Obtained from environmental sample
  misc_feature (1)..(1197): n is a, c, g, or t
gtggcgaaaaaaatggtacaggcgggattttccctgtacgcgacacggggcaccgcccgcttccttgaggaaaggggtttcgaggttcaaagcgtggaaaaaatccgggactgcgcgactaacaacacggcgacgcttcttgaaagcggcaaagtcagttacatcatctccacgtcaaagaaaggcagggatcccgcgttagacgacgtgaaactgcgcagaaaagcctgctcgctcggcattccctgccttacctcggtcgatacggccaacgcgctggcggacggcctgctttccggttacagcgaaaccaataccgagttaatcgacattaaccacctcagaactgaccgcacaaaactcgctttcacaaaaatgcagagttgcggcaatgattatatttatttcaactgcttcgatatagaggaaatcaattcgccggaatcgctgtccgtgttcctgtccgacaggcatttcggcgtgggcggggacggagtagtgctgatactgcggtccgatatcgccgacgcgaaaatgcggatgttcaaccttgacggcagcgaaggcagcatgagcggaaacgccatccgctgtgtggcaaaatacctgtatgataacggtattgttacaaaacgcgacatgcggatagagaccaagagcggcgtaaaaaaaatgtatctctccacgcggaacggacaggtatcatccgtcaaggttgatatgggccgcgccgaactgcgacccgaacaaatccccgtgaatctggggggggaaagcgtgatcgcgcaaaaggttacaatcgggggcgctgagtacgagattacctgcgtttccatgggcaacccgcacgccgttgtgtttaccaaccgtctggatgatcttgatttgaatgaaacgggccccctgtttgaaaacgatccgctgtttcccgaccgggttaacgcggagtttgtcaatgttattgcccaaaatcatttggaaatccgcgtatgggaacgcggaagcggcgagacgcaggccagcggaaccagcgcctgcgcttcggctgtggccgccgtcttaaacggcttttgcgacaaggacacggatataagggtgcgcttgcccggcggggagctcattgtcaattacactgacgaggtagtatggctgacgggcgactgcgtaaaagtgtttgacggcacggtggagatataa

SEQ ID NO: 58802 - protein, 398 aa, Unknown
  Obtained from environmental sample
  DOMAIN (2)...(85): MGS-like domain
  misc_feature (1)..(398): Xaa is any amino acid
MAKKMVQAGFSLYATRGTARFLEERGFEVQSVEKIRDCATNNTATLLESGKVSYIISTSKKGRDPALDDVKLRRKACSLGIPCLTSVDTANALADGLLSGYSETNTELIDINHLRTDRTKLAFTKMQSCGNDYIYFNCFDIEEINSPESLSVFLSDRHFGVGGDGVVLILRSDIADAKMRMFNLDGSEGSMSGNAIRCVAKYLYDNGIVTKRDMRIETKSGVKKMYLSTRNGQVSSVKVDMGRAELRPEQIPVNLGGESVIAQKVTIGGAEYEITCVSMGNPHAVVFTNRLDDLDLNETGPLFENDPLFPDRVNAEFVNVIAQNHLEIRVWERGSGETQASGTSACASAVAAVLNGFCDKDTDIRVRLPGGELIVNYTDEVVWLTGDCVKVFDGTVEI

SEQ ID NO: 58803 - DNA, 885 bp, Unknown
  Obtained from environmental sample
  misc_feature (1)..(885): n is a, c, g, or t
atgaccgaggctgaagcgctggaagccgccgaaaaactcgggttcccggtgcttatgcgcccgtcatacgtattgggcgggcagaacatgatcatcgcgttttcggcggacgatatccgcgaatatatggaaataatcctgcgctcaaaacaggaaaacccggtgctgattgacaagtacctggaaggaatggagatagaggttgacgccttatgtgacggcgccccttcccagggcggttccggaggcgtgtttattcccggcataatggagcacattgagcgcaccggcatccattccggcgacagcatagccgtatatcccgccatcaatatagacgatgcgttagctgaaaagatttttgatgttaccaaaaagctgtgcatggctctgaatgttaaaggccttgtcaatattcaatatgtattctatgaaaacgacgtgtacgtcatcgaggttaaccccagggcctcccgcacggttccctacctcagtaaggttacgagtatacccatgtgcgagcttgccactaaattaagcgtaggccttaagctttccgacctgggctacaagccgggcatcgggaaaataccgccctatgtcgcggttaaagtgccggttttttcctttgaaaaacttgccggcgtggatacgcatttggggcctgaaatgaagtccacgggggaagttctgggactggggaagaaccttgaagaggccttgtacaaggggcttgtcgccgccggatacaagatgaaaaagaaaggcggcgtgcttattaccgtccggaagaacgacaaggcgggaaattatccgcgtggcgaaaaaaatggtacaggcgggattttccctgtacgcgacacggggcaccgcccgcttccttga

SEQ ID NO: 58804 - protein, 294 aa, Unknown
  Obtained from environmental sample
  DOMAIN (1)...(210): Carbamoyl-phosphate synthase L chain, ATP binding domain
  misc_feature (1)..(294): Xaa is any amino acid
MTEAEALEAAEKLGFPVLMRPSYVLGGQNMIIAFSADDIREYMEIILRSKQENPVLIDKYLEGMEIEVDALCDGAPSQGGSGGVFIPGIMEHIERTGIHSGDSIAVYPAINIDDALAEKIFDVTKKLCMALNVKGLVNIQYVFYENDVYVIEVNPRASRTVPYLSKVTSIPMCELATKLSVGLKLSDLGYKPGIGKIPPYVAVKVPVFSFEKLAGVDTHLGPEMKSTGEVLGLGKNLEEALYKGLVAAGYKMKKKGGVLITVRKNDKAGNYPRGEKNGTGGIFPVRDTGHRPLP

SEQ ID NO: 58805 - DNA, 897 bp, Unknown
  Obtained from environmental sample
  misc_feature (1)..(897): n is a, c, g, or t
ttgaaaatacgctacaaccgattaataggttatttctttgaagtaaaaaacaacagtcttgataaagtgccgaagcattttataagacggcagggaatgtcggacggcgagcgttatacaacggatcatctggcgaaacttgagtcggaaatcaacggcgctgacgacaaagtagttgaacttgaaaaaaaactgtttcttgaaatacgggaagaggcaaaaaaataccttaatcttctttccgtctgcgcccgccgccttgcggaagttgacgcggcgcagtcgctcgcaaaagccgcttcaatcagaaattggacacgcccggcgctgaatgaaagctcaaaccttgaaattcatgaaggacgccatcccgtagttgaggcgcatatcggcagaggcgagtatataccgaacgatattttattaagcacggagtcatcgggaatatctttcgccatgataacgggtcccaatatggcgggaaaatccacctatttgcgcagcgcagctcttataacgataatggcgcaggcgggaagttttgtgcccgcctcgcaggcaagtatcggtatatgcgaccgtatttattgcagggtaggcgcttccgacaatttggcgagaggagaatcaacattccttgtcgaaatgaatgagaccgcttttattttaaacacggcgacggaaaaaagccttgtaatcatggacgaggtgggcaggggaacgggcacaaacgacgggctttcaatagcgtgggctgtaagcgaggaacttttgaacagaataggatgcagaacgctgttcgccactcattttcatgaactttctcttttgtctcatcctcacctcgctaattactcaatggaagttctggagcagggggaaaagatcgtcttttaa

SEQ ID NO: 58806 - protein, 298 aa, Unknown
  Obtained from environmental sample
  DOMAIN (105)...(298): MutS domain V
  misc_feature (1)..(298): Xaa is any amino acid
MKIRYNRLIGYFFEVKNNSLDKVPKHFIRRQGMSDGERYTTDHLAKLESEINGADDKVVELEKKLFLEIREEAKKYLNLLSVCARRLAEVDAAQSLAKAASIRNWTRPALNESSNLEIHEGRHPVVEAHIGRGEYIPNDILLSTESSGISFAMITGPNMAGKSTYLRSAALITIMAQAGSFVPASQASIGICDRIYCRVGASDNLARGESTFLVEMNETAFILNTATEKSLVIMDEVGRGTGTNDGLSIAWAVSEELLNRIGCRTLFATHFHELSLLSHPHLANYSMEVLEQGEKIVF

SEQ ID NO: 58807 - DNA, 804 bp, Unknown
  Obtained from environmental sample
  misc_feature (1)..(804): n is a, c, g, or t
atgatgaagacgaagtacggcctggactggctcaaggtgaacttcatcggagtggaggctacctgcaaaacgctccgcgaaatcgccaagtacttcaacgacccggctttaacgaaaaaggtggaagaggtgatcgcggacgagacggcggccatcaaggacgatatggaccactaccgctccaaactgactggcaagaccgccggcatattctccggcggctcgcggtcgcaccactatcaggcgcttctcaaagacttgggcatgaaaacggtaatcgccggatacgagttcgcccaccgcgacgactacgaggggcgcgacgtcatccccaccatcaaggaagacgccgacaacaagaacatcgagagcattaccgtaaaacccgatgagaaactctaccgcgagaagtacaccgcgcagcagatcgccgacctcaaggcgggcgagagcggcatagagctcgacacgtacgacggcatgatccccgagatgtgcgccggcgacgtggtggtggacgactacaaccacttcgagaccgacgctctcatcaagaccgtgaagccggacattttcctgtcgggcatcaaggacaagcactccatacagaaggcgggcgtgtcgtcgcggcagatacactcctacgactactccggcccctattccggttttcggggcgccgtgattttcgccagggacgtggcgatggccatatacacaaacgcgtggcaattagtcacgccgccgtggaagcacgaaccgatgcttaccggcaaaatcgcggaggagggaaaaaatgcttga

SEQ ID NO: 58808 - protein, 267 aa, Unknown
  Obtained from environmental sample
  DOMAIN (1)...(240): Nitrogenase component 1 type Oxidoreductase
  misc_feature (1)..(267): Xaa is any amino acid
MMKTKYGLDWLKVNFIGVEATCKTLREIAKYFNDPALTKKVEEVIADETAAIKDDMDHYRSKLTGKTAGIFSGGSRSHHYQALLKDLGMKTVIAGYEFAHRDDYEGRDVIPTIKEDADNKNIESITVKPDEKLYREKYTAQQIADLKAGESGIELDTYDGMIPEMCAGDVVVDDYNHFETDALIKTVKPDIFLSGIKDKHSIQKAGVSSRQIHSYDYSGPYSGFRGAVIFARDVAMAIYTNAWQLVTPPWKHEPMLTGKIAEEGKNA

SEQ ID NO: 58809 - DNA, 372 bp, Unknown
  Obtained from environmental sample
  misc_feature (1)..(372): n is a, c, g, or t
atgcaccgcgataacgtctggtccgtacatatcgaatatgttcttcaccgacgtgttgaggttgctcttgccgccgaacaccgacgcgccctctgtaaacgacgacgacgacgcgatcgccggttccttaaagtggcgcgacagcaccgttctatgatacgagcagcaaccctgcgaaccgtggctgtgcggcatgcacttagccacgcccagcgcggcatacatcgcgccgacgggctggcaagttttacacggattcacgcgcaacgcttcgcgcacctttacatccttgtcgtcatatcaagcattttttccctcctccgcgattttgccggtaagcatcggttcgtgcttccacggcggcgtgactaa

SEQ ID NO: 58810 - protein, 123 aa, Unknown
  Obtained from environmental sample
  misc_feature (1)..(123): Xaa is any amino acid
MHRDNVWSVHIEYVLHRRVEVALAAEHRRALCKRRRRRDRRFLKVARQHRSMIRAATLRTVAVRHALSHAQRGIHRADGLASFTRIHAQRFAHLYILVVISSIFSLLRDFAGKHRFVLPRRRD

SEQ ID NO: 58811 - DNA, 1335 bp, Unknown
  Obtained from environmental sample
  misc_feature (1)..(1335): n is a, c, g, or t
gtgcgcgaagcgttgcgcgtgaatccgtgtaaaacttgccagcccgtcggcgcgatgtatgccgcgctgggcgtggctaagtgcatgccgcacagccacggttcgcagggttgctgctcgtatcatagaacggtgctgtcgcgccactttaaggaaccggcgatcgcgtcgtcgtcgtcgtttacagagggcgcgtcggtgttcggcggcaagagcaacctcaacacgtcggtgaagaacatattcgatatgtacggaccagacgttatcgcggtgcataccacatgcctatcggagacaatcggcgacgatttgacgtcgtttatcatggacttggagctgccggaaggcaaactcgtcgtgcacacaaacacgccgagctatgtcgggtcgcatataaacggcttcttcaacatgatgatcggtttcatgaactacttgacaaagaagaccggtacgcccaccggcaagaccgcggtcttcccaggatgggtgaatcccggcgacatacgcgaactcaagcgtatagccgcgctgatgaacgtgccgacggttttcttccccgatcagagcggcgtcctagacgcgcccatgaccggcaggtacgagttttaccccgaaggcggcacgacgctcgatgaaatccgcaccctcggcgacagcgacggcttgattgcgcttggggaaattatcggagtggaacccgccgaggttctcaataagaagttcaaagtgccgtatacgctgttgccgctgcccgttggcgtcgcgtacaccgaccaatacgttctcgcgttgcggaagcagtcgcgtacggaagtccccgccgcgcttgaggcggaacgcggccggctcgttgacttgttgttggattcctctcaatacacatgcggaaaaaaagtcgctatattcggtgaccctgatattgtcataggtcttacgtcgctcgtgcttgagatgggtatggttcccaagtacgtcatcaccggaacgcccaaagaggagtttacgcgcagggttacggaactcttcgacaagtacggcgtaacggactgcaaagctaaagcgaacgccgacctcttcgagttgcaccagtggataaagaacgagccggtcgatttgctgatcggttcgacctacggcaagcagatagcgcgagccgaagacatccccttcatccgcgccggtttcccggtgctcgacagatacggcggcccgctgctgccgacggtaggttacagcggtggtgttctgttcgtagagagaatcgtcaacgcattgttggataagttcgacaagacgtgcgccgaggaggattttgagattgtgctgtag

SEQ ID NO: 58812 - protein, 444 aa, Unknown
  Obtained from environmental sample
  DOMAIN (5)...(429): Nitrogenase component 1 type Oxidoreductase
  misc_feature (1)..(444): Xaa is any amino acid
MREALRVNPCKTCQPVGAMYAALGVAKCMPHSHGSQGCCSYHRTVLSRHFKEPAIASSSSFTEGASVFGGKSNLNTSVKNIFDMYGPDVIAVHTTCLSETIGDDLTSFIMDLELPEGKLVVHTNTPSYVGSHINGFFNMMIGFMNYLTKKTGTPTGKTAVFPGWVNPGDIRELKRIAALMNVPTVFFPDQSGVLDAPMTGRYEFYPEGGTTLDEIRTLGDSDGLIALGEIIGVEPAEVLNKKFKVPYTLLPLPVGVAYTDQYVLALRKQSRTEVPAALEAERGRLVDLLLDSSQYTCGKKVAIFGDPDIVIGLTSLVLEMGMVPKYVITGTPKEEFTRRVTELFDKYGVTDCKAKANADLFELHQWIKNEPVDLLIGSTYGKQIARAEDIPFIRAGFPVLDRYGGPLLPTVGYSGGVLFVERIVNALLDKFDKTCAEEDFEIVL

SEQ ID NO: 58813 - DNA, 813 bp, Unknown
  Obtained from environmental sample
  misc_feature (1)..(813): n is a, c, g, or t
ttgggctacgccgtcgcgtcggagagctgcgcgcttgaaatatgcgggttcgagtttgtaagagacgtgaaacccggcgagatcatcaccataaaaaacggggtgataacgtacgagagcataagcctgagccacaaggaggaggggcgcgggttttgcatattcgaatacgtctacttcgcgaggcccgactcggtgctcgacgggctctcgatctatgaggcgcgctacaacatgggcgcgattttggctaaggagtatccggtcgacgccgacgtggtctgcggcgtgccggacagcggcttggtcgcggcgaacggatacagcgcggcaagcggtataccgctcgctgacggctttgtcaagaacaggtacatagggcgcagtttcatctaccccacgcagacgcagcgcgacagcgccgtgcggcaaaagctgaacccgctgacggcaaacgtgaaggggaaaagggtcgttctcgtagacgactccatagtgcgcggcacgacctgcgagaaaatcattaggagcctcagaagcgccggggcggcggagattcacatgagagtgtcgtcgccgccgttccgccacacttgccactacggaaccgacataggcagcgaagataatctcatcgcgaacaaaatgggcatagacgaaatccgccaaaagttcggcgcggacactctcggatatataagcatagacgggctgaagaaagcctgcgagaaatgcgttctgccgttttgcacggcctgcttcaccggccacgacgaaacggaagagcgtaccagaaaagatattttcgaataa

SEQ ID NO: 58814 - protein, 270 aa, Unknown
  Obtained from environmental sample
  DOMAIN (64)...(212): Phosphoribosyl transferase domain
  misc_feature (1)..(270): Xaa is any amino acid
MGYAVASESCALEICGFEFVRDVKPGEIITIKNGVITYESISLSHKEEGRGFCIFEYVYFARPDSVLDGLSIYEARYNMGAILAKEYPVDADVVCGVPDSGLVAANGYSAASGIPLADGFVKNRYIGRSFIYPTQTQRDSAVRQKLNPLTANVKGKRVVLVDDSIVRGTTCEKIIRSLRSAGAAEIHMRVSSPPFRHTCHYGTDIGSEDNLIANKMGIDEIRQKFGADTLGYISIDGLKKACEKCVLPFCTACFTGHDETEERTRKDIFE

SEQ ID NO: 58815 - DNA, 915 bp, Unknown
  Obtained from environmental sample
  misc_feature (1)..(915): n is a, c, g, or t
atgtcgaataccgcgtatttgattttggaaaacgggacggtcttcgagggaaagcgcttcggcgcggagggcgaggtaaccggcgagatcgtcttcacgaccggcatgaccggatacttagaaacgctgacagatcagagttaccacggtcagatagtcctgcaaaccttcccgctcatcggcaattacggcgtaataccaagcgactttgagagcggcggcgtaggggccaaagcgtacattgtcaagtacccctgcgagcacccatccaactttaggagcgaaggaactctcgacgcctttttgcgtgatcgcggcatcgtagggctccacggaatcgacacacggaagttgacaaaaatcatccgccaaaacggcgtgatgaacggaaagataaccgcttccccgccgacggacgccgaccgcgccgaggtcaaaaactactcggtcgccgcccccgtcgccaacgtctcgcggcgcagcgccgaaaaactctccgacggcgaacgccgcgtcgccctgctcgactgcggcgcgaaacgcggcatagccaacgccctcgcggcacgcggatgcgaggtgtggtcgttcccgtacaacgctccggcggatgaaataatgaaggtcaacccgcacggcgtaatgctaagcaacggccccggcgatccggccgaccccgcgaacgacgccatcgtcgaagcgatacgcgccataacaaaaaacggcacacccattttcggtatctgcctcggccaccaactgctcgccctcgcaagcggctacaaaacccaaaaactgaaattcggccaccgcggcgcaaaccaacccgtcaaagaaaccgcgacaggcccgcgtctacattaccagccaaaaccacgggtacgccgtcgtgacagacaacangctcttttataa

SEQ ID NO: 58816 - protein, 304 aa, Unknown
  Obtained from environmental sample
  DOMAIN (173)...(303): Glutamine amidotransferase class-I
  misc_feature (1)..(304): Xaa is any amino acid
MSNTAYLILENGTVFEGKRFGAEGEVTGEIVFTTGMTGYLETLTDQSYHGQIVLQTFPLIGNYGVIPSDFESGGVGAKAYIVKYPCEHPSNFRSEGTLDAFLRDRGIVGLHGIDTRKLTKIIRQNGVMNGKITASPPTDADRAEVKNYSVAAPVANVSRRSAEKLSDGERRVALLDCGAKRGIANALAARGCEVWSFPYNAPADEIMKVNPHGVMLSNGPGDPADPANDAIVEAIRAITKNGTPIFGICLGHQLLALASGYKTQKLKFGHRGANQPVKETATGPRLHYQPKPRVRRRDRQXALL

SEQ ID NO: 58817 - DNA, 1209 bp, Unknown
  Obtained from environmental sample
  misc_feature (1)..(1209): n is a, c, g, or t
atgcataatataccatcagaaagaattacagcgtactttcagcctattctttccgccgataccaaagagatatacgcttatgaagttttggggcgttatataagcgataacggaacagtacaatcgttaggcgattttttcaccaatcctgatacctcgcatgaagaagccctaagcatagacagaatagtgagaaagaatgcttttaaaaagtatgtggaagaaaaacgaaacgaatatctgtttgttaatatcagactggcatggctattgccgtatgcggaaaaccctgaagaaatgattactttgcagctggtaaaagaattcggaatagcccccgaaaaacttgtcatagaaattactgaagaagagtttaacgcaagcgaggaatatctccgcgccatagtccactacaaaaaaatcggctgccgcatcgctcttgacgattacggaaaaagcgcaagcaatattgaccgtttggcaaaacttcagcccgacattataaagatcaatattgattatatacacaggagcgagaggtcttatcattatcgtgagtatttgcgatcccttgccgcctttgccgactctgtcggtatcgaagtactgtatgagggagtagagacagagcgtcaacttgatatttgtatttcctcaagaggaaggttttatcagggattcttgcttgctgtccctcaagtatccatgatcaatccggatattaacaagtatgttttntcagcgttagtctcagccgcttatacggcgatacaaaacacggtaaacgacgcggaattcctaaaaaattccattaatgttctggttgaacattttctgcttgaaaacccgtttgatgacaagaagataaataacgacgaataccttatccgccttttctgtgaattgccggaggtgatacggatttatctgtgcaatacagaaggcatccagatttccaataatattgagcggcaatcgggtgatattgtatgccgcgattataaaaacaagaattgggcatggcgcggatattttcatgaaataataaaggcttttattagaggcagaaaaagctgcctgacaaacccgtaccgcgattttacaacaaaagaaaagatatgcacttattcttacgctattaaagaagatgtgtttttattggcggatattgtaaaagattctgaaaggacggacgaccatgccgcttga

SEQ ID NO: 58818 - protein, 402 aa, Unknown
  Obtained from environmental sample
  DOMAIN (1)...(232): EAL domain
  misc_feature (1)..(402): Xaa is any amino acid
MHNIPSERITAYFQPILSADTKEIYAYEVLGRYISDNGTVQSLGDFFTNPDTSHEEALSIDRIVRKNAFKKYVEEKRNEYLFVNIRLAWLLPYAENPEEMITLQLVKEFGIAPEKLVIEITEEEFNASEEYLRAIVHYKKIGCRIALDDYGKSASNIDRLAKLQPDIIKINIDYIHRSERSYHYREYLRSLAAFADSVGIEVLYEGVETERQLDICISSRGRFYQGFLLAVPQVSMINPDINKYVXSALVSAAYTAIQNTVNDAEFLKNSINVLVEHFLLENPFDDKKINNDEYLIRLFCELPEVIRIYLCNTEGIQISNNIERQSGDIVCRDYKNKNWAWRGYFHEIIKAFIRGRKSCLTNPYRDFTTKEKICTYSYAIKEDVFLLADIVKDSERTDDHAA

SEQ ID NO: 58819 - DNA, 2091 bp, Unknown
  Obtained from environmental sample
  misc_feature (1)..(2091): n is a, c, g, or t
ttgatggccgagacggggctttttcggcaactggaaactctccttgccattggcggcggcgacgatggcgatgtaaattcgcaaaaagagacacagcggtttaaacccgtagtgcgtttctttggaccctttgaactcggcaaaaacggacaaaaaaccgaaacttttgagctgccgccgtatatcggcgcggtgcgtataatggttctcgccgcttccgccacaagcgaatctcagaccggcagaacgttacgcggttatggaaccgcccaaacaacggtaagggttacttccgatctcatggttttcgcctccctgccgcgcatactttcacccggcgatgaatttgaagtgcctgtttatgtaaattcccaaaagggcggaaagagaaatgttaaagtaaatctctccgtgcagggcgcggcaattcagggcgcttcaacgcaggacgtatcatttgacaagatcgaagaaaagttaatccgctttaaggtaaaatctccagataacccgggaagcttaaagtttaccgtaacggcagaatcatcgggattaaaaacagcccagcatgttgtggatatcgaagttcgttccacggcgattccggtaacaaagtctgtgcaaagccttctcacagcaggtgagacatggaagggtacccttgattatcctggcagagacggaacaaattctcttgttgcaagtttctcaaggctgccgccgcttaatcttgaatcgcggctgaattatttaattaagtatcctcacggctgcgctgaacaaacgacaagcggctcgttccctcaactttatcttgataaagttcttttgcttgacgacaaacaaaaagcggaaatcagaactaacgtaaacggtggaatagatcgcgttttgggaatgcagttaatgtcgggaggttttgcgtactggcccggcgaatccagtgtaaatgactggtgttcttcttatgtagggcacttcctcttggaagcccggcgtttgggatatgaagtgcggacaaccgctcttaaaagctgggttaactatcaaaagaacgccgcggcgcagtggcaggcaaacgacagtaaattcaccgaacaggcgtaccgtctttatactttggctctcgccggagaaaccgatcttggatcgatgaaccgcctgcgaagccataaactgccggttcaggcaagctggcgtcttgccgcggcgtactggctcgccggacagcgcgacacagcccgcaacatgataaaaggtttgtctctgcctgaaggaaactatcgtgaactttccgcaacattcggctcgaacctcagagacaaggctatgattcttgaaactctcattttattaaattctccggatgaagtgggaagaaccaaacagctctttgaagaaataacaacaacgctttctcaggacaaatggctttccactcaggagacggcttatgcccttatagctttagttccgtatatgacaggtaacgccggaagcggcgcgttgacattggattataccgcggccggaaaaacgggaaacatctcttttagttctcccgccgcggaacgccagcttggaagcgtaagcggaacaagctcggcattgtcggtgactaaccgttcatcttcccctgtttatgtaaggttcacggctaaaggacttcccgttgagggaaaagagcccgcgctttccgaaggtctttcgcttaacgttgaataccgcgacgccggcaacaaggtaatcgcccctgaaaatttaaaactgggcgaagacatggtaatctccgtcagtgtgcgtaatacatttactcagcctgtggaagaagccgccctcattgttccgcttcccgcgtcatgggaaatcgtcaacacccgtgtcggcggaagctcctcttcgtctaatttccgttatcaggacataagagacgacagggtgatgacttactttaaccttaaaaggggcgaagagagaacgataaatttcagggtaaacaaagcctatgaaggctctttcttcaggccggcaatacatgtttacgctatgtatgacgagtcgataagggctttaattcccggctcaagatag

SEQ ID NO: 58820 - protein, 696 aa, Unknown
  Obtained from environmental sample
  misc_feature (1)..(696): Xaa is any amino acid
MMAETGLFRQLETLLAIGGGDDGDVNSQKETQRFKPVVRFFGPFELGKNGQKTETFELPPYIGAVRIMVLAASATSESQTGRTLRGYGTAQTTVRVTSDLMVFASLPRILSPGDEFEVPVYVNSQKGGKRNVKVNLSVQGAAIQGASTQDVSFDKIEEKLIRFKVKSPDNPGSLKFTVTAESSGLKTAQHVVDIEVRSTAIPVTKSVQSLLTAGETWKGTLDYPGRDGTNSLVASFSRLPPLNLESRLNYLIKYPHGCAEQTTSGSFPQLYLDKVLLLDDKQKAEIRTNVNGGIDRVLGMQLMSGGFAYWPGESSVNDWCSSYVGHFLLEARRLGYEVRTTALKSWVNYQKNAAAQWQANDSKFTEQAYRLYTLALAGETDLGSMNRLRSHKLPVQASWRLAAAYWLAGQRDTARNMIKGLSLPEGNYRELSATFGSNLRDKAMILETLILLNSPDEVGRTKQLFEEITTTLSQDKWLSTQETAYALIALVPYMTGNAGSGALTLDYTAAGKTGNISFSSPAAERQLGSVSGTSSALSVTNRSSSPVYVRFTAKGLPVEGKEPALSEGLSLNVEYRDAGNKVIAPENLKLGEDMVISVSVRNTFTQPVEEAALIVPLPASWEIVNTRVGGSSSSSNFRYQDIRDDRVMTYFNLKRGEERTINFRVNKAYEGSFFRPAIHVYAMYDESIRALIPGSR

SEQ ID NO: 58821 - DNA, 1494 bp, Unknown
  Obtained from environmental sample
  misc_feature (1)..(1494): n is a, c, g, or t
atgtcaggccagcttaacagcctcagcctgcttgattttaaaggtaataaaaaaggaaacgtcgccaacatcacagttgaaggcgtcggcaatgacgcaaccgcatacggatggggcatccatatacgctcgtactacaatctggaagtgcgcaatcttggctttatgatgttcccggacgacggagtttcgcttgaagttgacaaccagaatatctgggtgcataacaacgatttcttctacggcaaggacggaggcggcgacaaggacaagggcgacggttcgcttgacagtaaaacatccggttataccagcatgtcttacaaccatttctgggactccggcaagtgtaacctgctgggtaacggcattgagcctgcggaatatcttacttaccatcacaactggtatgatcactcggacagccgacatccacgggtgcgttttcattccgtccacgtttacaacaactactatgacggcatttcaaaatacggcatcggcgctaccaggaattcttccatttttgccgaaggtaattatttccgcaacagtaaaaatccaatgctgatctcaatgcagggtacagacaccaagtccggcgcggacgagaaaggcggaactttctcaagcgaagacggcggcatgatcaaggcttacaacaactatatggaaggaataagttccgccacctacaaaccctggagcggttccaatacggttcattttgacgcatatcangtgaacagcagggcggaaaccgtgccggatactgtaacgaccaaacagggaggatttacttacaacgactttgacaccgctcctgccatgtacagttacactgcggatactcccgaaaaagccaaagaaaacgttataaaatacgcaggacgcatgggcggcaaagcgaaagccgatttaacctatgatttcagttccgccgatgacagcgattacagcagaatcggcgctttagacgctcttatcagcggctacaagtcaaaacttatttccattcagggcggcaatacaacgagcgacagcggcggaggcggcggtgacaccggaggcggcagtggaggcggtgacatcggcggaggtgacaccggcggcggcggcggcggtacgaccccgaccccttccggtacaattatttgcacatttacaggcaacggcggaaacaattctttcttttcaatcaccggaaatacctccaaagacaaggggacggcgaccgtaaacggcgtaaaatatacttatggcctaaaaatggaatccaccacaaagatagagttcaccacagtacaacccatgacgctgaagctggtattcggtcttgaaaaagagtcagcctcgggcaaaaacgtcaagataaacggggcaaaccaaaaagtcggatcagacggaacgctgacaatgaaccttgccgcaggcagtcacactattacaaagggcgatacgatgaacctgttctacatctcgctcagcgaataa

SEQ ID NO: 58822 - protein, 497 aa, Unknown
  Obtained from environmental sample
  DOMAIN (5)...(182): Pectate lyase
  misc_feature (1)..(497): Xaa is any amino acid
MSGQLNSLSLLDFKGNKKGNVANITVEGVGNDATAYGWGIHIRSYYNLEVRNLGFMMFPDDGVSLEVDNQNIWVHNNDFFYGKDGGGDKDKGDGSLDSKTSGYTSMSYNHFWDSGKCNLLGNGIEPAEYLTYHHNWYDHSDSRHPRVRFHSVHVYNNYYDGISKYGIGATRNSSIFAEGNYFRNSKNPMLISMQGTDTKSGADEKGGTFSSEDGGMIKAYNNYMEGISSATYKPWSGSNTVHFDAYXVNSRAETVPDTVTTKQGGFTYNDFDTAPAMYSYTADTPEKAKENVIKYAGRMGGKAKADLTYDFSSADDSDYSRIGALDALISGYKSKLISIQGGNTTSDSGGGGGDTGGGSGGGDIGGGDTGGGGGGTTPTPSGTIICTFTGNGGNNSFFSITGNTSKDKGTATVNGVKYTYGLKMESTTKIEFTTVQPMTLKLVFGLEKESASGKNVKINGANQKVGSDGTLTMNLAAGSHTITKGDTMNLFYISLSE

SEQ ID NO: 58823 - DNA, 858 bp, Unknown
  Obtained from environmental sample
  misc_feature (1)..(858): n is a, c, g, or t
atgccgcgaataggcttgcgggcgcatgattacggaacgaatgtatccccggaaaaactggcggacgcgctcgctccgtacaaacccgcttcaattcaacttgcattggcaaaagctttatcgggcgttccgggagcgggaggaatcacccccggttatgcccgcgggataaagaaaatctttgaggaacggggaataacaatcgccgtgcttggctgttacataaaccccgttcatcctgatcccgcgattcgcgaaaaacatctgcgccgttttgaagaacacctgcgctatgcccgtgattttggctgttccattgtgggaaccgaaacaggctcatgcaacggcgactgttcgtttcatccggatactgaaaaagaggagacttttgacctgctttgcaattcgctggaacggctgattaaaaccgcggaaaaatgcggctgtatcgccgctattgaagccgtcgcggatcagcacactgtttcaagcattgaaaaaatgcaggccgttatgcgaaggctttcctctccctgccttaaagtcatatacgatcccgtaaatttaatccccaataccggtcttcgcgaaagcccgtcttttcaaagccaaaaggattttttcgagaaagcctttgccgcttttggagacgaaatcgccgccattcacgcaaaagactttaaaatgggcgctaaaggaaaaatcggcaccttccccgccggaaccggtgaattggactaccctgccctcttatctctgatcgcggaacgcaaacccggcattgatattctgcttgaaaattcaagtcccgataccggcaaacatgcaatggagtttttaatgtcccttgatcattga

SEQ ID NO: 58824 - protein, 285 aa, Unknown
  Obtained from environmental sample
  DOMAIN (34)...(245): Xylose isomerase-like TIM barrel
  misc_feature (1)..(285): Xaa is any amino acid
MPRIGLRAHDYGTNVSPEKLADALAPYKPASIQLALAKALSGVPGAGGITPGYARGIKKIFEERGITIAVLGCYINPVHPDPAIREKHLRRFEEHLRYARDFGCSIVGTETGSCNGDCSFHPDTEKEETFDLLCNSLERLIKTAEKCGCIAAIEAVADQHTVSSIEKMQAVMRRLSSPCLKVIYDPVNLIPNTGLRESPSFQSQKDFFEKAFAAFGDEIAAIHAKDFKMGAKGKIGTFPAGTGELDYPALLSLIAERKPGIDILLENSSPDTGKHAMEFLMSLDH

SEQ ID NO: 58825 - DNA, 444 bp, Unknown
  Obtained from environmental sample
  misc_feature (1)..(444): n is a, c, g, or t
ttgtacccatttgacggagtcggcatttatgacagggagcgttttatccagttgggaggctttgacgggacgcttaaaaacagtttctggcagcttatggattttggattccgcgcatacctctggggagaagaaatatcccttagtcagacgctcaagttttcttatgaggccgcaatccccgccgaggacaactcggcgggcgaggactactcccgtttttatattaaaaatctcgccccggtattccgcaatgactgcgcttatctgcctatgcgccgtttcccgggttttcttttcaagtcgaataacggcatactcggcgcgtgggatgatttttccgaaagccgacgctgggtaaataccaacagcttccggtggcgctgcaatcccaaaaccatcgccagttactggaatctggaaacctcgaataaggagatctaa

SEQ ID NO: 58826 - protein, 147 aa, Unknown
  Obtained from environmental sample
  misc_feature (1)..(147): Xaa is any amino acid
MYPFDGVGIYDRERFIQLGGFDGTLKNSFWQLMDFGFRAYLWGEEISLSQTLKFSYEAAIPAEDNSAGEDYSRFYIKNLAPVFRNDCAYLPMRRFPGFLFKSNNGILGAWDDFSESRRWVNTNSFRWRCNPKTIASYWNLETSNKEI

SEQ ID NO: 58827 - DNA, 720 bp, Unknown
  Obtained from environmental sample
  misc_feature (1)..(720): n is a, c, g, or t
gtgctggccattgtcttgcaggcccgcgttgattcctcgcgtctgccggggaaagcgctgctcccccttgggggaaggcccatgatattacgcgtaatggaagccctgaacaggatacccgcggaaatgagagtgcttgcctgccccgaagattcaaaatccgcttttgctgaacttgccgctgaggccggttttattttgtttgccggccctaaagaagacgtgcttggccgcttctgcctctgtctgcgcaattttgacatacgtcatctgataagggccaccggcgacaatccctttgtttttgccgacgcggcctatgccattataaccgagggactgactcttggcgctgactacgccggatacggcggcttgcccctcggcgcgggagttgagtcggtaaacgctaaggccctgctgctcgccggaaccgaagccgcctcccaatatgatcgtgaacatgtctgcccctacctgtatacccaccctgaaaaatttctcctccaccgcccgcttgccccgcagcattggcaataccctgaacttcgcctaacggtagacaccaaacaggactacgaacaggcgcaacttttgtacgccgcgctggatagcctggaaaaggccggcaaactggccgaaggtgaacgttataaaggggaggtgataattaaaacaattaggaatgaggaattaggagttaggaataaagagaattag

SEQ ID NO: 58828 - protein, 239 aa, Unknown
  Obtained from environmental sample
  DOMAIN (3)...(212): Cytidylyltransferase
  misc_feature (1)..(239): Xaa is any amino acid
MLAIVLQARVDSSRLPGKALLPLGGRPMILRVMEALNRIPAEMRVLACPEDSKSAFAELAAEAGFILFAGPKEDVLGRFCLCLRNFDIRHLIRATGDNPFVFADAAYAIITEGLTLGADYAGYGGLPLGAGVESVNAKALLLAGTEAASQYDREHVCPYLYTHPEKFLLHRPLAPQHWQYPELRLTVDTKQDYEQAQLLYAALDSLEKAGKLAEGERYKGEVIIKTIRNEELGVRNKEN

SEQ ID NO: 58829 - DNA, 1380 bp, Unknown
  Obtained from environmental sample
  misc_feature (1)..(1380): n is a, c, g, or t
atgaacgtaagattatattccctcggcgcagccgaggaagttaccggctccaagcatgttatagaagttgacgggctaagctaccttattgactgcggcgcttttcaagggtcaaggaaggacacgaacgacagaaacaagaaaatcggcatatccccggaccgcattgaaagcgtcatactgacgcacggccaccacgaccattgcggccttttgccgcttcttgtaaaacaaggcttcaaaaataatatatacgcgactcccgcgacaagggatatcgcgagccttatcatgatggattccgccaacatacaggcgcgcgacgccgtatatttaaagaataaggccgataagaacggcgaagaattcgactggactcctctttacgatgaacaggacgtaatcgcggcggtaagccaaacaataggggtttcgtataacaggccgatgtttctggacaacgtggtaagtattgaattttacgacgcgggccatattttaggctccgccattgcggatataaagataaaaaaaggcggcgaagaattgaacatccttgccacgggagaccttggacggaagggcaagcctattatccgcaatccctcgattccgagccccgccccggactatattatcgtagaaagcacctacggcgaccgccgccatgacaaaaccagcgacgctatggaaaaacttgcggagctggccaaacgcgccgtggagaccaggggaaggattatcatcccctcgtttgccatagagcgtacccaggaactggtttattatttccatctgcttgttgacgatgggataataccggaaatcccgatctatgtggattccccaatggcgactaacgcgacgtcgattttccaggtacaccctgaatgttacgacgaggaaataatgaaagcctttatcaaacaccacaaaaacccatttggttttaacaatcttcactttactaccagcgtccaggaatccaaagctctgaacgatgaaaagggcccccttatcatcatctccgcggatgggatgtgcgaggccgggcgtatccagcaccacctgatccacagcatacaggatcccaacacaaccattcttctcgtggggtacatggcggaaaacaccttgggccgccgcatacgcaaccgcgagagcgaggtaaaaatccatgggatgtggctcaaactaaaggcccatgtcgagcagataaacgcgttcagcgcccacgcggattatgaggaaacggtagaatggctaaatgagcttgacaggtcgcgcctgaagggtctttttatggttcacggcgaaaaaaaggcgcaggcagcgttaaaaaataccttgccgaacaagggtacgccaacacggagatag

SEQ ID NO: 58830 - protein, 459 aa, Unknown
  Obtained from environmental sample
  DOMAIN (397)...(441): RNA-metabolising metallo-beta-lactamase
  misc_feature (1)..(459): Xaa is any amino acid
MNVRLYSLGAAEEVTGSKHVIEVDGLSYLIDCGAFQGSRKDTNDRNKKIGISPDRIESVILTHGHHDHCGLLPLLVKQGFKNNIYATPATRDIASLIMMDSANIQARDAVYLKNKADKNGEEFDWTPLYDEQDVIAAVSQTIGVSYNRPMFLDNVVSIEFYDAGHILGSAIADIKIKKGGEELNILATGDLGRKGKPIIRNPSIPSPAPDYIIVESTYGDRRHDKTSDAMEKLAELAKRAVETRGRIIIPSFAIERTQELVYYFHLLVDDGIIPEIPIYVDSPMATNATSIFQVHPECYDEEIMKAFIKHHKNPFGFNNLHFTTSVQESKALNDEKGPLIIISADGMCEAGRIQHHLIHSIQDPNTTILLVGYMAENTLGRRIRNRESEVKIHGMWLKLKAHVEQINAFSAHADYEETVEWLNELDRSRLKGLFMVHGEKKAQAALKNTLPNKGTPTRR

SEQ ID NO: 58831 - DNA, 1002 bp, Unknown
  Obtained from environmental sample
  misc_feature (1)..(1002): n is a, c, g, or t
atgatcctcgaagaaatattaaaagatgattatgacgttataacggcttataatggaatggaagctcttgataaattaaaaaacgcttctgttcttccaaagataatactgctggatgttgttatgcctcacatggacgggcgcgagttatttaataaaattaaaagcgataaagcgtatcagcgaatacccattatttttattaccgcggaaaacgattcggaaagcgaactccttgccgcgggagccgttgattttattaataagccgtttttgccggaaattgtcaaacttcgcgtaaagaaccaaatagcgttaaaaaattacagcgacaatttggaagtaatggttgcggaaaaaaccgaggaagcgaccagaactctggataacgccctgcagggacttgcgaatgttattgagcacagggatttggaatcgggcgagcatgttaagaggacgcagttatttgtaaaagcgttaatagattatttagtagcttccaattctgtttatgcggaagatataaagaaactccagccggagatgatcgtaaggtctatggctctccatgatgtcggaaaaatagccatcccggataaaattcttcttaagcccggcaagcttgatccggaagaatatgaaataatgaaaacacacactactcgcggcaaggatattatccatgaactcggcgatataaattcatctatatacctgaagcattgcgaagacatttgttacggacatcatgaacgctgggacggaaaaggatatccccggcagttaaaggaacatgaaataccgctttccgcgcgccttgcggcgttagctgacgtatatgacgcgttagtatgcgcccgcgtctacaaagtcgccatgccgtacgaagaagcgcttgatattatcgcgcaggggaaaggaactcaatttgatccgattattgcggaagccgttatacatatccaaaatgaatttcaggaaatatcacgaacgtatcaataa

SEQ ID NO: 58832 - protein, 333 aa, Unknown
  Obtained from environmental sample
  DOMAIN (1)...(101): Response regulator receiver domain
  misc_feature (1)..(333): Xaa is any amino acid
MILEEILKDDYDVITAYNGMEALDKLKNASVLPKIILLDVVMPHMDGRELFNKIKSDKAYQRIPIIFITAENDSESELLAAGAVDFINKPFLPEIVKLRVKNQIALKNYSDNLEVMVAEKTEEATRTLDNALQGLANVIEHRDLESGEHVKRTQLFVKALIDYLVASNSVYAEDIKKLQPEMIVRSMALHDVGKIAIPDKILLKPGKLDPEEYEIMKTHTTRGKDIIHELGDINSSIYLKHCEDICYGHHERWDGKGYPRQLKEHEIPLSARLAALADVYDALVCARVYKVAMPYEEALDIIAQGKGTQFDPIIAEAVIHIQNEFQEISRTYQ

SEQ ID NO: 58833 - DNA, 618 bp, Unknown
  Obtained from environmental sample
  misc_feature (1)..(618): n is a, c, g, or t
atgatcagatcggccgagtatcgcgccttgcgcaaggcggcaattttgctttcaccgtatttcaaaaaggatcaaaaccatgaccgatttcctcgacctcgccgccgcccgttactccgtgcgcagtttctgcccgcgcgctatcgaacccgaaaaacttgcgcgggtgctctccgcagcccgcctcgcgcccacggcctgcaacaaccagccccagcggataaaggtcatctccgaccccgccgacctcgccaaagccgacgagtgcaccccctgccgcttcggagcgccggtcgtgctgctcgtctgctacgacaagaccgtctgctggcgccaccccgaaaacagcgccctgaccagcggcgcgatagacgcgagcatagtgaccacgcacctgacgctggccgccaaagacatagggttgggcagctgctgggtgatgaagttcgacgtcgcgaaggccgcggaactcttcgccctgccggaaaacttcgtccccgtggcgatgctccccataggctaccccgccgccgacgccgcgccgtccgaaaggcacggggcgaggttcgaggtcgagaaaatagtgttttgatgtcgatttgggatatcgccaaatga

SEQ ID NO: 58834 - protein, 205 aa, Unknown
  Obtained from environmental sample
  misc_feature (1)..(205): Xaa is any amino acid
MIRSAEYRALRKAAILLSPYFKKDQNHDRFPRPRRRPLLRAQFLPARYRTRKTCAGALRSPPRAHGLQQPAPADKGHLRPRRPRQSRRVHPLPLRSAGRAARLLRQDRLLAPPRKQRPDQRRDRREHSDHAPDAGRQRHRVGQLLGDEVRRREGRGTLRPAGKLRPRGDAPHRLPRRRRRAVRKARGEVRGRENSVLMSIWDIAK

SEQ ID NO: 58835 - DNA, 513 bp, Unknown
  Obtained from environmental sample
  misc_feature (1)..(513): n is a, c, g, or t
atgaccgatttcctcgacctcgccgccgcccgttactccgtgcgcagtttctgcccgcgcgctatcgaacccgaaaaacttgcgcgggtgctctccgcagcccgcctcgcgcccacggcctgcaacaaccagccccagcggataaaggtcatctccgaccccgccgacctcgccaaagccgacgagtgcaccccctgccgcttcggagcgccggtcgtgctgctcgtctgctacgacaagaccgtctgctggcgccaccccgaaaacagcgccctgaccagcggcgcgatagacgcgagcatagtgaccacgcacctgacgctggccgccaaagacatagggttgggcagctgctgggtgatgaagttcgacgtcgcgaaggccgcggaactcttcgccctgccggaaaacttcgtccccgtggcgatgctccccataggctaccccgccgccgacgccgcgccgtccgaaaggcacggggcgaggttcgaggtcgagaaaatagtgttttga

SEQ ID NO: 58836 - protein, 170 aa, Unknown
  Obtained from environmental sample
  DOMAIN (8)...(148): Nitroreductase family
  misc_feature (1)..(170): Xaa is any amino acid
MTDFLDLAAARYSVRSFCPRAIEPEKLARVLSAARLAPTACNNQPQRIKVISDPADLAKADECTPCRFGAPVVLLVCYDKTVCWRHPENSALTSGAIDASIVTTHLTLAAKDIGLGSCWVMKFDVAKAAELFALPENFVPVAMLPIGYPAADAAPSERHGARFEVEKIVF

SEQ ID NO: 58837 - DNA, 372 bp, Unknown
  Obtained from environmental sample
  misc_feature (1)..(372): n is a, c, g, or t
atgggaggaattaaaagaagcgatgtaagtgaagaatgggcacattctgggattgttgaggcaggaaactttgtttttataaactattgtgttggtaatgtcggtcagccaatcgaaaatcaaataaatggcgcgttagaccatttaacaaatcggttagaatcaatcggcttaacgctggaatctgttgtaaaactggattgcttgtttagggatatatggaatataccagtaatggaaaaagtatttaaggaaaggttcaatggaaaatatcctgcgagaaaatcaatacaaacagagttcgctcatgttggcggacaagaaggacttttgtttcaacttgatgcgatagcttttaaagacaaacaatag

SEQ ID NO: 58838 - protein, 123 aa, Unknown
  Obtained from environmental sample
  DOMAIN (3)...(120): Endoribonuclease L-PSP
  misc_feature (1)..(123): Xaa is any amino acid
MGGIKRSDVSEEWAHSGIVEAGNFVFINYCVGNVGQPIENQINGALDHLTNRLESIGLTLESVVKLDCLFRDIWNIPVMEKVFKERFNGKYPARKSIQTEFAHVGGQEGLLFQLDAIAFKDKQ

SEQ ID NO: 58839 - DNA, 345 bp, Unknown
  Obtained from environmental sample
  misc_feature (1)..(345): n is a, c, g, or t
atgtgcgacaaatccgtcttggacgagataacgtcaaaggtctgcgtcgccgccaaagaggtgttgggcgacaagttggagaaggtaatccttttcggctcatacgccaggggcgattacgacgaggagtcggacatagacatcatgataatatccgacatcgcgctggaggaggcgaacgagacgcgcaggaagattcatgcgcaaaccggagaccttgatttggaatatgatgttattgtcagtctgaggatggcgtgtagcgacatattccacaaataccaagacgcttcgggtttctacaaaaacgtgaggagagacggggtagaattgtatgctgcctaa

SEQ ID NO: 58840 - protein, 114 aa, Unknown
  Obtained from environmental sample
  DOMAIN (11)...(111): Nucleotidyltransferase domain
  misc_feature (1)..(114): Xaa is any amino acid
MCDKSVLDEITSKVCVAAKEVLGDKLEKVILFGSYARGDYDEESDIDIMIISDIALEEANETRRKIHAQTGDLDLEYDVIVSLRMACSDIFHKYQDASGFYKNVRRDGVELYAA

SEQ ID NO: 58841 - DNA, 582 bp, Unknown
  Obtained from environmental sample
  misc_feature (1)..(582): n is a, c, g, or t
ttgaacaaccccgaagacgaatcggcgggaagccgcaaggtgccgttctcgcgtgtaatctacatagaacgcgacgatttcatggaggatccgcccaagaagttctacaggctctcccccgggcgcgaagtgcggttgcgctacgcctactttatcacctgcaaagaggtcattaaagacgatagcggaaatatcgtagagttacggtgcacctacgacccgcagacacgcggcggagccacgccgccagacgggcgctcgccaaaggccacgatccactgggtctcggcgcaacacgccataggcgcggaagtgcgaatctacgacaacctctttacaaaagagaatcctatggatgcggagagcggaaactttttggataatatcaacccggaatcgctcaaagtagtaacagactgcaaattagagccgtcgttggcaaacgctaaacccggcgagaagtatcagttcgagcggttggcctacttttgcgttgacgacgactcaacgcctgagaaattagtctttaaccgcacggttacgcttaaagacgcttgggcgcggatacagaagagggggtaa

SEQ ID NO: 58842 - protein, 193 aa, Unknown
  Obtained from environmental sample
  DOMAIN (1)...(166): tRNA synthetases class I (E and Q), anti-codon binding domain
  misc_feature (1)..(193): Xaa is any amino acid
MNNPEDESAGSRKVPFSRVIYIERDDFMEDPPKKFYRLSPGREVRLRYAYFITCKEVIKDDSGNIVELRCTYDPQTRGGATPPDGRSPKATIHWVSAQHAIGAEVRIYDNLFTKENPMDAESGNFLDNINPESLKVVTDCKLEPSLANAKPGEKYQFERLAYFCVDDDSTPEKLVFNRTVTLKDAWARIQKRG

SEQ ID NO: 58843 - DNA, 810 bp, Unknown
  Obtained from environmental sample
  misc_feature (1)..(810): n is a, c, g, or t
gtgcgtgtagtcccatacgtaaacagcgtatctgacgcgctttccaatggaattatcaactttgtaatagaagttttaaacatattttttataattttcttcatgtacaaagtagatccacaccttgcgacggttacggtaatcggccttcccctgctcgccatttttatatggacgataaaaccagcccagcgcagggcatggcaggcggtatcaaacaaaaactcaaatcttaacgcctatatacaggaatcaatagacggggtaagaattacgcaagcttttgacaggcaggaaaaaaatcttgaaataatgaatgatctgactgatgaacgcaacaatgcatggatgaaagcgatttatatttccaacacggtatggttttccacggaatcaataagccagttagtctggtcgtttgtttacatcatgggcgttttctggatgaacccgatggcaagtttcgggatgttgcttgttatgggaaactacgcgtggcgtttttggcagccgatcattaacctcgcgaatatttacaatacgtttatcaccgccatggcgtaccttgacagaattttcgacacgatagcggaacctgtgacaattaaagacattcccaacgccgtggagtttccttttgtgcgcggacatgttgagtttaaaaacgtaagtttcagctatgacggagtccgtaaggtactgaacaatatcagttttaacgcgcatccgggacagagtatcgccattgtaggccctacgggagccggaaaaaccaccatcgtaaatctgctttcacgttttacaatatga

SEQ ID NO: 58844 - protein, 269 aa, Unknown
  Obtained from environmental sample
  misc_feature (1)..(269): Xaa is any amino acid
MRVVPYVNSVSDALSNGIINFVIEVLNIFFIIFFMYKVDPHLATVTVIGLPLLAIFIWTIKPAQRRAWQAVSNKNSNLNAYIQESIDGVRITQAFDRQEKNLEIMNDLTDERNNAWMKAIYISNTVWFSTESISQLVWSFVYIMGVFWMNPMASFGMLLVMGNYAWRFWQPIINLANIYNTFITAMAYLDRIFDTIAEPVTIKDIPNAVEFPFVRGHVEFKNVSFSYDGVRKVLNNISFNAHPGQSIAIVGPTGAGKTTIVNLLSRFTI

SEQ ID NO: 58845 - DNA, 714 bp, Unknown
  Obtained from environmental sample
  misc_feature (1)..(714): n is a, c, g, or t
atgaaaaagggagaaacaaaagagtttgagaaaaaatatgctgatgatttttcagaagcagctcttgccggaaaaacaaggaaatttcagataacgctgacagccctaaaggaaaaaaagcttcccgatctggacgatgatctagctcaggatgtcgatgaaaaatttaagactcttgacgatcttaaaaacagcataaaagaaaaacttgaaaaaatcctagaaacgcgtcttcgaagtgtaaaaactaacgagttgttaaaatcaataatggaaaacacgccggttataatacctgaatcaatgattaaagcggaagttgaaggccgcttgagcaggcttgcccgttattacaacacaaacgcggaagcattgatccaaatgatgaacgccggcgaaggacacgatgaaatagaaaaagaatggcgtgaaacagcgcaaaaggcgcttcactcccgcttaattatggaaaccctgcttgaagaacagaagatcgaaattaccgatgacgatgtagagaaggaaattgaacgtattgcggacgaaaacggcacggaagtaagcgaaattaagaagcattatgacgatcaagcgctaatttaccttaaagaagaaataaaagaacagcgtcttattgatattatgtttactgaaaataccatgaaaccggggaaaaaggagaattatctggattttatttcaaataattcgtaa

SEQ ID NO: 58846 - protein, 237 aa, Unknown
  Obtained from environmental sample
  DOMAIN (35)...(212): Bacterial trigger factor protein (TF) C-terminus
  misc_feature (1)..(237): Xaa is any amino acid
MKKGETKEFEKKYADDFSEAALAGKTRKFQITLTALKEKKLPDLDDDLAQDVDEKFKTLDDLKNSIKEKLEKILETRLRSVKTNELLKSIMENTPVIIPESMIKAEVEGRLSRLARYYNTNAEALIQMMNAGEGHDEIEKEWRETAQKALHSRLIMETLLEEQKIEITDDDVEKEIERIADENGTEVSEIKKHYDDQALIYLKEEIKEQRLIDIMFTENTMKPGKKENYLDFISNNS

SEQ ID NO: 58847 - DNA, 603 bp, Unknown
  Obtained from environmental sample
  misc_feature (1)..(603): n is a, c, g, or t
atgagtaatcttgtacctattgtagttgaacagacaggattgggagaacgttcctatgatatttattcccgccttttaaaagaccgtattgtatttttggacggtgaaatcaacgatgtttccgccgatttgatagtagcccagcttctcttcctggatggacaggatacggaaaaagatattcacctctatgttaattcacctggcggctcggttacagccggccttgcgatttacgacacaattcaacatgtaaaatccgatgtacagacaatatgcctcggtcaggctgccagtatggccgctcttattttgacagccggaaccgctggaaaacgcatggtgcttccgtcatcgcgggtacttattcaccagccgtggggcggcgcacagggacaggcgcgtgacatcggcattcaatcacgggaaattattcgtttaaaaaaaatgacaattaattatttcgcccagcataccggaaaaaccatagaacaggtcgcctccgatatggaaagggatttgtatatgtcggcggaagatgcggttgcctatggcgttgccgattctgtattaaagagggaaaaaaatggcaaaacttcgtaa

SEQ ID NO: 58848 - protein, 200 aa, Unknown
  Obtained from environmental sample
  DOMAIN (13)...(194): Clp protease
  misc_feature (1)..(200): Xaa is any amino acid
MSNLVPIVVEQTGLGERSYDIYSRLLKDRIVFLDGEINDVSADLIVAQLLFLDGQDTEKDIHLYVNSPGGSVTAGLAIYDTIQHVKSDVQTICLGQAASMAALILTAGTAGKRMVLPSSRVLIHQPWGGAQGQARDIGIQSREIIRLKKMTINYFAQHTGKTIEQVASDMERDLYMSAEDAVAYGVADSVLKREKNGKTS

SEQ ID NO: 58849 - DNA, 948 bp, Unknown
  Obtained from environmental sample
  misc_feature (1)..(948): n is a, c, g, or t
ttgatcgccgagagtcgagagagagcaagaaacgccgatattttcgccgctcaattaatgatgattgaggacgtggattttcaagaccagattgaaagaaagataaaagagacccaggaaaacatagaatgggtgctttacgatacttccaaggctatagtgcagaaaatgctgtcttcgccggatccggttttcagggaaagagcgtccgatattgaagatgtttcccgccgtgttttgagcaggctgctttcaataaaaagagtttctcttgccgaattggacagtgacgtaattctagtcgcccatgaccttttgccgtcagaagtgcttacaatgaaccgcgaccatgtcaaaggaattgtaatggatatgggaggtaatacttcacacacggcaattcttgccagagctttcaacattccggcggtgcttggcctgtcgtctgccacaacggagatcagtaacggggacactcttgtcctgaacgcagttgccggcgaggtcttcatcaaccctgaacaaaaagagctggaaaaatgggatcggcaaaagaccaggcaaagtaaaaagcttaatgaatccctaaaaacaagcgagttgatagcggagaccaaagacggcctccgggttgtcctaaaggcaaacattggaataccagaggaagcggaggctttgcagcgttttggcgcggaaggcataggcctatacaggtctgagttccttttcctaaaccccgatcaggccgccggggaggagatgcagatcgacgcttacagccgtgtccttctggctatgggaaaactgcctgtaacgattcgtaccgttgacataggcggcgacaaaatactgccgggtttttccgatgtctcggaaaaaatcccctcctgggctggcgtgcaatacgtttctccctttccatgcctgagttttttaaaacccagctga

SEQ ID NO: 58850 - protein, 315 aa, Unknown
  Obtained from environmental sample
  DOMAIN (190)...(313): PEP-utilising enzyme, TIM barrel domain
  misc_feature (1)..(315): Xaa is any amino acid
MIAESRERARNADIFAAQLMMIEDVDFQDQIERKIKETQENIEWVLYDTSKAIVQKMLSSPDPVFRERASDIEDVSRRVLSRLLSIKRVSLAELDSDVILVAHDLLPSEVLTMNRDHVKGIVMDMGGNTSHTAILARAFNIPAVLGLSSATTEISNGDTLVLNAVAGEVFINPEQKELEKWDRQKTRQSKKLNESLKTSELIAETKDGLRVVLKANIGIPEEAEALQRFGAEGIGLYRSEFLFLNPDQAAGEEMQIDAYSRVLLAMGKLPVTIRTVDIGGDKILPGFSDVSEKIPSWAGVQYVSPFPCLSFLKPS

SEQ ID NO: 58851 - DNA, 636 bp, Unknown
  Obtained from environmental sample
  misc_feature (1)..(636): n is a, c, g, or t
atgcctgagttttttaaaacccagctgagggcaatactgcgttccagcgtaaacggaaacgtaaagatcatgttccccctgatttcggggcttgaagaacttgacgcggccctcgccctgctggaagaagcaaaaagcgaatgtcgcaaaagggggcaggcctttgctgacaatatcgaggttggaacgatgatcgaagttccttccgcagccatgatcgcggatatcctggcaaagcgctctgattttttttcgattgggaccaacgatcttgtgcaatactccatggccgttgaccggggtaacgaaaaagtgagctacctggcccagagcgcccatccggccatacttcgctttctaaaaaccacgattgacgcggcccataaacgcggcatcaaggccgccatgtgcggagaaatggcgggcaacagcgcggttaccgctctgcttttggggctgggccttgacgagtttagcatggcggcctcgtccattccccttgtaaagagaatcatccgcgaagtaagcgtcgctgaatgtaaggagcttgcgaaagagcttttaaagggtgtctccttcatggcaaataacgcccttttaaaagggtggatggctgaaaagtttcccaaagattaa

SEQ ID NO: 58852 - protein, 211 aa, Unknown
  Obtained from environmental sample
  DOMAIN (1)...(177): PEP-utilising enzyme, TIM barrel domain
  misc_feature (1)..(211): Xaa is any amino acid
MPEFFKTQLRAILRSSVNGNVKIMFPLISGLEELDAALALLEEAKSECRKRGQAFADNIEVGTMIEVPSAAMIADILAKRSDFFSIGTNDLVQYSMAVDRGNEKVSYLAQSAHPAILRFLKTTIDAAHKRGIKAAMCGEMAGNSAVTALLLGLGLDEFSMAASSIPLVKRIIREVSVAECKELAKELLKGVSFMANNALLKGWMAEKFPKD

SEQ ID NO: 58853 - DNA, 822 bp, Unknown
  Obtained from environmental sample
  misc_feature (1)..(822): n is a, c, g, or t
gtggtaggtcttatctttcaatcagccccggttttttcacgagaagcggcaaagacaatattttttctgatcctactaatgagagaattatattgtctgtccaatacaaatatttttgggatttcaggtttgggaaaaatgagcctaaagcagaataagcaaataattttagacagaatagcaaaagcctgcaatgcctgtggtagagaccctagtgaagttcgccttgtttgggttagcaaaacacatccatcttctgcggtagaagaagccattgccctaggggcgcatgagtttggagaaaacaaggtgcaagaggctttggaaaaatttttgcctcaaagagaaagcgtaatttgccgcataattgggccggtgcaaaaaaataaacttaaaaaagccgcctatgttgcacaggcaatagattcccttgccgatttagaaagcgtgctaaaactagaagctctatgcgaagaagcaaataaaaatttggatgttctttttcaagtaaacgcctctgaagaaaacactaaaagcgggctttcaatgcaagaagcctttgattttttgaacagcttgccagaaccaaagaggcttgtttacaagggtttgatgaccattggcaaaaacacgggaaacccagaagattctagggcttgttttgcttttttgagaaatttgaaagagagaattttgggttctaatcccaagtttgcaaacttcaccgaactctctatgggaatgactttggatttggaggtagccattgcggagggagcaacaatggtaagggtgggaactgcgttgtttggggaaaggtag

SEQ ID NO: 58854 - protein, 273 aa, Unknown
  Obtained from environmental sample
  DOMAIN (46)...(273): Alanine racemase, N-terminal domain
  misc_feature (1)..(273): Xaa is any amino acid
MVGLIFQSAPVFSREAAKTIFFLILLMRELYCLSNTNIFGISGLGKMSLKQNKQIILDRIAKACNACGRDPSEVRLVWVSKTHPSSAVEEAIALGAHEFGENKVQEALEKFLPQRESVICRIIGPVQKNKLKKAAYVAQAIDSLADLESVLKLEALCEEANKNLDVLFQVNASEENTKSGLSMQEAFDFLNSLPEPKRLVYKGLMTIGKNTGNPEDSRACFAFLRNLKERILGSNPKFANFTELSMGMTLDLEVAIAEGATMVRVGTALFGER

SEQ ID NO: 58855 - DNA, 306 bp, Unknown
  Obtained from environmental sample
  misc_feature (1)..(306): n is a, c, g, or t
atgattatacacttagttctttggaaaatgaagcctattgcagaaggccgcacgggaagggaaaatgccgaaattctcgtaaagagactgaaggccttgaaaagcgttattccctgcgttgtttcaatagaggctggtcttaattacagagatttgcctttagcttacgatgtaggcttgtgcacaactttcaaaacaaaagaagatttggaaacttatcaaaatcaccctgcgcatgttccagttgcagactggtcaagatcaggcattgcagaatcaatagctatggcagattatgaagtttag

SEQ ID NO: 58856 - protein, 101 aa, Unknown
  Obtained from environmental sample
  DOMAIN (2)...(101): Stress responsive A/B Barrel Domain
  misc_feature (1)..(101): Xaa is any amino acid
MIIHLVLWKMKPIAEGRTGRENAEILVKRLKALKSVIPCVVSIEAGLNYRDLPLAYDVGLCTTFKTKEDLETYQNHPAHVPVADWSRSGIAESIAMADYEV

SEQ ID NO: 58857 - DNA, 1233 bp, Unknown
  Obtained from environmental sample
  misc_feature (1)..(1233): n is a, c, g, or t
atgaaagtttggattaagctgcttatcggggcgatcctgggaattatcctgggacattttctgcctgacaatcaacgcgttatggacagtctgatctggctggaacagtttgtcctgagtatcggacgttatgcgattattccggtattggttttctctttggccataagtatttatgaactgcggcaggacggccaattctggcccctggttataaagaacctccttttgatcgccggtatttcaatgctggtaatcggcattggggttctcgccactctcgccttttctcccggaagaattcccgttatggccgaagagcagcttgatgtaatccgtcttgatgtcgcggaaaatatcaaagaccttttcccctataatatgttcagcgtccttaccggcgagggcgtgtacctgtttcccgtatatgtgtttgcttttttctttggcatggggctttcttacgataaaagttacagcaaaccgattatttccattaccgactccctttcgcggattttcctgtatatcctggtcctctttatcgagattctcggctttatgatgattgtgctttcatcgtattggatggntcgttttaggggtgttttgcaggccggcattttctttaatttggtattgctgctgggatttattgccgctgtactgggttttggaatacttccgctgtttctctatcttctaaggccgaaagtaaacccctggacggttctgtacggatcgctggggccggcaatagcggccttcttttccggcgatattaattttacgctgccggtactgatacggcataccaaagagaatttcggcgtcaggcggaggagcaatgttgtcagcatggcgctgtttagttctttctgccgggccggaagcgcgatggtggccgccgtcgcttttatcttcatttttaaatcctactccagaatggagatggatttttccgtggtcatgtcgataggagttcgcgcgtttgtcatttcattcctgcttgcccgccatcccggcgacggggcgttcatggcccttaccgtgctttgcctcggctatgggcagggttttgaggccggctggcttatcctcaagccgatggcgttttaccttatcgccgtgggcactttccttgacgttatgatcgcctcatttggttcctttgccatagcgcggcttaacggctatatagtagaagaaaagagcatgaaacgttttgtgtag

SEQ ID NO: 58858 - protein, 410 aa, Unknown
  Obtained from environmental sample
  DOMAIN (3)...(396): Sodium:dicarboxylate symporter family
  misc_feature (1)..(410): Xaa is any amino acid
MKVWIKLLIGAILGIILGHFLPDNQRVMDSLIWLEQFVLSIGRYAIIPVLVFSLAISIYELRQDGQFWPLVIKNLLLIAGISMLVIGIGVLATLAFSPGRIPVMAEEQLDVIRLDVAENIKDLFPYNMFSVLTGEGVYLFPVYVFAFFFGMGLSYDKSYSKPIISITDSLSRIFLYILVLFIEILGFMMIVLSSYWMXRFRGVLQAGIFFNLVLLLGFIAAVLGFGILPLFLYLLRPKVNPWTVLYGSLGPAIAAFFSGDINFTLPVLIRHTKENFGVRRRSNVVSMALFSSFCRAGSAMVAAVAFIFIFKSYSRMEMDFSVVMSIGVRAFVISFLLARHPGDGAFMALTVLCLGYGQGFEAGWLILKPMAFYLIAVGTFLDVMIASFGSFAIARLNGYIVEEKSMKRFV

SEQ ID NO: 58859 - DNA, 663 bp, Unknown
  Obtained from environmental sample
  misc_feature (1)..(663): n is a, c, g, or t
ttgataaggagcaataataatatgatgattgatgggattaaaaaaataaagataatcccatttattggtatactttcggtatttttttattttctccatgtaattctcggggggttattttatgaaggctataacccgctcgcgcaggcagtaagcgatttaaccgcctcaaattctccgtcgagaaacatagcgagaccgttttcggcgctttatggtatatgcgccgtaacattttcaattggattttttgtatatttaaagaataagataaataaagccgtcactgtctcctcatttattttttgtataatgaatataatatcatttttcgggtataccttttttccgttgtccgaatccggttatgccggcgcatttcaggataaaatgcacatggttgtcaccgtatctgtagtattattgacgatagcttcattaatactatttttcattggattttacagagcaaaagaacataaatggctgggcatcgtttcaataatcacattgctgatattaatgacaggggcaatgttaataaatatattgccaaaagaatattttggcgttgcggaacggataaatgtgtattcaataatactatatacaggggtactgtcattatggatgaaaaaaaatattaaaaataacggtgtatag

SEQ ID NO: 58860 - protein, 220 aa, Unknown
  Obtained from environmental sample
  misc_feature (1)..(220): Xaa is any amino acid
MIRSNNNMMIDGIKKIKIIPFIGILSVFFYFLHVILGGLFYEGYNPLAQAVSDLTASNSPSRNIARPFSALYGICAVTFSIGFFVYLKNKINKAVTVSSFIFCIMNIISFFGYTFFPLSESGYAGAFQDKMHMVVTVSVVLLTIASLILFFIGFYRAKEHKWLGIVSIITLLILMTGAMLINILPKEYFGVAERINVYSIILYTGVLSLWMKKNIKNNGV

SEQ ID NO: 58861 - DNA, 453 bp, Unknown
  Obtained from environmental sample
  misc_feature (1)..(453): n is a, c, g, or t
atgatagctcctgtcagtgtgggttctccgtccgatatgaatgtcgcagttccgatggatactgcagttcgtgttgtaaacaactcaaaacccggcgcgaagatgacaaggataaccatcatcaccaacccggacaaacttgcggctcttcactacggtctggacaagatcggaataacaggccttacggttacaaatgtcctcggccacgggatgcaaaaaggccatacggaactttaccgcggcgcacaggtagaaatacggctgcttccaaaagtgcagattgatattgtcgtaagcaaaataccgcctgaaactgtaatagaagaagcgaaaaagatactgtatacgggaaaagtcggcgacgggaagatattcgtttccgatattgaaaacgtcattaaagtccgcacgggtgagcaaggatatgacgccttgcaggataacgattag

SEQ ID NO: 58862 - protein, 150 aa, Unknown
  Obtained from environmental sample
  DOMAIN (38)...(139): Nitrogen regulatory protein P-II
  misc_feature (1)..(150): Xaa is any amino acid
MIAPVSVGSPSDMNVAVPMDTAVRVVNNSKPGAKMTRITIITNPDKLAALHYGLDKIGITGLTVTNVLGHGMQKGHTELYRGAQVEIRLLPKVQIDIVVSKIPPETVIEEAKKILYTGKVGDGKIFVSDIENVIKVRTGEQGYDALQDND

SEQ ID NO: 58863 - DNA, 456 bp, Unknown
  Obtained from environmental sample
  misc_feature (1)..(456): n is a, c, g, or t
atgtgcgcaaccagcacggtgaaacagaatagcaatgccaatgaagcggaactgcggatactgtcatgccggggagggaggtcatgcttcctcgacctttcagacctcgacctttcagacctcggcctttccgaagtccccgatgaaatcaaaaatatgccgtaccttcggtctatcaacttaagcgagaactgccttacggaactgcctgactttatttgctcctacgcttccctcgaaagccttgacgtaagctacaacaggctctcgcatttgccggacggcatcggaagcctcggctcccttgaacggctgaacgcacgatgcaaccagcttgacgcaatccctgaatcaatcgggatgctctcgatgctaagcctccttgacttaagctacaaccgcctttcttccttgcccgacgtttttaaccgcctctccggcttctggacaacctga

SEQ ID NO: 58864 - protein, 151 aa, Unknown
  Obtained from environmental sample
  misc_feature (1)..(151): Xaa is any amino acid
MCATSTVKQNSNANEAELRILSCRGGRSCFLDLSDLDLSDLGLSEVPDEIKNMPYLRSINLSENCLTELPDFICSYASLESLDVSYNRLSHLPDGIGSLGSLERLNARCNQLDAIPESIGMLSMLSLLDLSYNRLSSLPDVFNRLSGFWTT

SEQ ID NO: 58865 - DNA, 1026 bp, Unknown
  Obtained from environmental sample
  misc_feature (1)..(1026): n is a, c, g, or t
atgcaatgcgctttgtcaaattcaaactgcgagaggtttaatatgaattttctatctggcgagaagaagctccagacaagctggaagcttacaagcaaagcaatacctaggggggcgaggaagcccggcctttacaggaacaggatgtatcccttctgcttacccttggaatacgcccaatacaatcttttccacggcatcagggatgaagcacttcaaacgtggaagcgccacggaatcgtctggcatagttccgcccttcccggccttccttctaaccatttatgctcatcccaggtgttctgcgtcaaccttcttttccctttcgctgacaagcatgaagcattggccggcgcgttgcgcccgttctttccagacattgcccggatgctccctgtggaagacaaacggtttgtcgcctttgaatggattggggacgttaattacttgaaagaagaacccatgcttggagaaagccgcaagcgtggcgcagggaatacctctattgacgcaatgatgatgtacgagactgaagacggcaaaaaggcaatgcttcttgtcgagaccaagtactccgaatcctacggcgtattttataaacgctttcgctctgacgggacagaccgctttgggaattacgaggaattcttttacggcaaagatagccctatcaatctcgaagtggctcccaaccttactgacttcctttacgaacctttttaccaacttttacggcattcccttctggcttcgcagataatggctacaggcaagcccaaagtaagcagggtacaggtagtccaccttactgtttcaggcaaccgggatttattggcggttaccgctcccaagttccggcatttgggaagcacaagttatgaagtgtggctgaaacttctcaaagacccttcggcatttaacctcgtttcagttgaggatttcttcaaaggcatagactttgaaagcaatagcgatcttgagccttgggcgctttttatgaaagggcgttattctttcttgcggtga

SEQ ID NO: 58866 - protein, 341 aa, Unknown
  Obtained from environmental sample
  misc_feature (1)..(341): Xaa is any amino acid
MQCALSNSNCERFNMNFLSGEKKLQTSWKLTSKAIPRGARKPGLYRNRMYPFCLPLEYAQYNLFHGIRDEALQTWKRHGIVWHSSALPGLPSNHLCSSQVFCVNLLFPFADKHEALAGALRPFFPDIARMLPVEDKRFVAFEWIGDVNYLKEEPMLGESRKRGAGNTSIDAMMMYETEDGKKAMLLVETKYSESYGVFYKRFRSDGTDRFGNYEEFFYGKDSPINLEVAPNLTDFLYEPFYQLLRHSLLASQIMATGKPKVSRVQVVHLTVSGNRDLLAVTAPKFRHLGSTSYEVWLKLLKDPSAFNLVSVEDFFKGIDFESNSDLEPWALFMKGRYSFLR

SEQ ID NO: 58867 - DNA, 1500 bp, Unknown
  Obtained from environmental sample
  misc_feature (1)..(1500): n is a, c, g, or t
atgaaatatgttattatcggcaattccgccgcgggcataggcgctgtagagggtattcgccatatagacaagaatggcgagatcaccattatcaccaacgaaccgcatcatacctattcgcgcccgctgatttcctatcttctgcttggcaaggttacaagagaagggattaaataccgaaacgacagtttctacaaggattataactgtactctgcttgcgaacacaactgtaacgggaattgactctgtggcgaagaacgtaattttacaagacggcggaaaaatcccctacgacaagctgctggtcgccactggttcttctccctttgtgcctgtctttgaggggcttgataccgtagttaacaaacatacgtttatgagccttgacgacgcggacaggctggacgccgtgctgggtgaagacaagcgggtattgataatcggcgcgggactcatcggcctgaaatgcgccgagggcatcctgaagcatgtgcatcacgtaacggtggttgaccttgcgccgcgcattttatcaagcattcttgataatgaaggggcaaagctgattcagaaccacctggaaagcaaaggcatcgagttcaggctttcaactaacgtaaagagttttttgtttaacagggccactttggatagcggtgaggtaatagaatttgatatccttgtcctcgccgtgggcgtgcgtcccaatacctcgcttttaagcgggatagcgaagatagagcgcggtatcgtcgtaaatgaaaaatcagagacgacggcccctgacatttacgccgccggcgactgtacccaggcgcttgacgtgtcaagcggggagaacaaggtcatggcgcttttgccgaacgcctatatgcagggcgagtgcgccggaatcaacatgacggacagcgccgtcggcggcgcgcgctttgacaaggcgatacccatgaacgccatcggttttttgggactgcacgtcattaccgccggcagctacgacgggaaagtatatatcgaaaacagtaaatccaaaaccaatgaagacagctataagcgcctttattacagcaataacaaactgaacgggtacatccttatcggcaacgtggaaaaagcggggatttatacaaaccttatccgtgagcgcactcctcttgacaccatcgactttcagcttgtctgtgaaaaaccggggctcatggcgtttaccaaagaacaaagaatggaaaaatgggaaaagcggcatcatgaagatagggactggggactggggcaaagacaggtaacaaaggacgggtatgacggcgtatttggttttacagaacggcgctgtaatgaaaggcagttctttcggcagccagggcgaaattaccggagaagtggtgtttgccaccggcatgaccggctatctggaaacccttaccgatcccagctattacgggcaaattgttctgcagacgtttcccctgattgggaattacggcgttattccccctga

SEQ ID NO: 58868 - protein, 499 aa, Unknown
  Obtained from environmental sample
  DOMAIN (144)...(233): Pyridine nucleotide-disulphide oxidoreductase
  misc_feature (1)..(499): Xaa is any amino acid
MKYVIIGNSAAGIGAVEGIRHIDKNGEITIITNEPHHTYSRPLISYLLLGKVTREGIKYRNDSFYKDYNCTLLANTTVTGIDSVAKNVILQDGGKIPYDKLLVATGSSPFVPVFEGLDTVVNKHTFMSLDDADRLDAVLGEDKRVLIIGAGLIGLKCAEGILKHVHHVTVVDLAPRILSSILDNEGAKLIQNHLESKGIEFRLSTNVKSFLFNRATLDSGEVIEFDILVLAVGVRPNTSLLSGIAKIERGIVVNEKSETTAPDIYAAGDCTQALDVSSGENKVMALLPNAYMQGECAGINMTDSAVGGARFDKAIPMNAIGFLGLHVITAGSYDGKVYIENSKSKTNEDSYKRLYYSNNKLNGYILIGNVEKAGIYTNLIRERTPLDTIDFQLVCEKPGLMAFTKEQRMEKWEKRHHEDRDWGLGQRQVTKDGYDGVFGFTERRCNERQFFRQPGRNYRRSGVCHRHDRLSGNPYRSQLLRANCSADVSPDWELRRYSP

SEQ ID NO: 58869 - DNA, 411 bp, Unknown
  Obtained from environmental sample
  misc_feature (1)..(411): n is a, c, g, or t
gtgttttgggaatgccattctgtgcgaaatattactgcgctttttggcgggaacccggggaaaacgaacatggcgcgcgcgttaaagggcatgaaaataaacccgaatatccgcatagaggaaaaagacgggatcagcttcgccgtttcatgccggcattgcaagacgccgttatgcgttaagggatgtatcaccggcagcctgaccatcacggacggcgtaattaccattaacaggtcaagatgcgtcagttgttatacctgcattctgagctgccctttcggcgcggtggccccttcggatgacggcgccgtgcaaaaatgcgagctgtgcgttaatacgaccgaaggaaccccggcctgcgtaaaaggctgccccaacaacgcgattgtttttgaggaaagaggctaa

SEQ ID NO: 58870 - protein, 136 aa, Unknown
  Obtained from environmental sample
  DOMAIN (75)...(98): 4Fe-4S binding domain
  misc_feature (1)..(136): Xaa is any amino acid
MFWECHSVRNITALFGGNPGKTNMARALKGMKINPNIRIEEKDGISFAVSCRHCKTPLCVKGCITGSLTITDGVITINRSRCVSCYTCILSCPFGAVAPSDDGAVQKCELCVNTTEGTPACVKGCPNNAIVFEERG

SEQ ID NO: 58871 - DNA, 741 bp, Unknown
  Obtained from environmental sample
  misc_feature (1)..(741): n is a, c, g, or t
ttgccgaaacccgtgctcaataaaggaaaagttttgaacgccgtttccctgttttggtttaatttcacaaaagacattattcccaatcacattatctcaagccagttgaaagatatgccggaatttttccaaaaggacgaattcgagggacgcgctgttttggttaaaaaggttaaaatacttccgtttgaatttatcatcaggggatatatgttcgggaatatgtggtcggcctattcaaaaggcgaggaattctgcggccagaaaataaaagccggatacaaactggccgggaagctggacgccccgctgtttaccccttcgacaaaggcccacgtcgggcatgacgagtatatcaccgttaaacatgtcgcggatacgattggcgcggatctggcaaaaaaaattgaaaaagtctgttttgatatttataacacatgttacaattacgcttacaggaaaaacattattatcgccgatacgaaatttgaattcggccttgacgagaaaaataaccttatcctcgcggatgaggtattaactccggattcaagcaggttctgggatctttccggttatcaggcgggaatttcgccgaaaagttatgataaacaatttgtaagggactggctcctcaataataaaaaagacggtgagatgcaatttgacaaagtgccggatgacgttctgcaaaaaacatcggagatttacgcggaatgtttgaaaaagataacaggctga

SEQ ID NO: 58872 - protein, 246 aa, Unknown
  Obtained from environmental sample
  DOMAIN (2)...(229): SAICAR synthetase
  misc_feature (1)..(246): Xaa is any amino acid
MPKPVLNKGKVLNAVSLFWFNFTKDIIPNHIISSQLKDMPEFFQKDEFEGRAVLVKKVKILPFEFIIRGYMFGNMWSAYSKGEEFCGQKIKAGYKLAGKLDAPLFTPSTKAHVGHDEYITVKHVADTIGADLAKKIEKVCFDIYNTCYNYAYRKNIIIADTKFEFGLDEKNNLILADEVLTPDSSRFWDLSGYQAGISPKSYDKQFVRDWLLNNKKDGEMQFDKVPDDVLQKTSEIYAECLKKITG

SEQ ID NO: 58873 - DNA, 843 bp, Unknown
  Obtained from environmental sample
  misc_feature (1)..(843): n is a, c, g, or t
atggttttctccgttttcgagaacttgcgcntggagtttcccgagcgtttcttgaacacgggcattgcggagcagacngccatgggcgtcgcggcgggtctgtcgctangcggatttaagccgtacatatactcgatagcgcccttcgcgctgatgcgttgctacgagcaggtgcgtatcgacgccgcctacatggagaccaacataaagatagtaggggccggcggaggcgtctcatacgggccggccggcgccacccaccacgcgatagaggatttcgccgtcgccaaggcgctgcccaacatgatagtctgcgcgcccgccgatccggtggaggcgcggcggatcttcgaacaaagcgccgccatagcgtcgcccatgtacatccgaatcgcgaagaatagagaaccggtattccacgatacaagcgacgagataacggtgggcaaagcgtttcgcttgtcgcgtgggaatgacctggagatattgaccacaggcgtaatcacaaatagaatccgcgagtggctgccggagcttgacaaacagggaatatcggcgggcctctccgtcttcccgacgatcaaaccgctggacgccgcctacctcgacgagctggccgccgcaggaagagacatactcgtctgtgaggagcataacaccgtcggcggcttcggcgaaagcgtgtgctcgtaccttacgcaaagggacgcgccaaaccgcgtcaggatacttgggataccggacaaatacagccactacgtaggcagccaatcctacatattggataagatgggcttgtggaacgtcccggacataagggcgttattcggaggtcgtttataa

SEQ ID NO: 58874 - protein, 280 aa, Unknown
  Obtained from environmental sample
  DOMAIN (149)...(266): Transketolase, C-terminal domain
  misc_feature (1)..(280): Xaa is any amino acid
MVFSVFENLRXEFPERFLNTGIAEQTAMGVAAGLSLXGFKPYIYSIAPFALMRCYEQVRIDAAYMETNIKIVGAGGGVSYGPAGATHHAIEDFAVAKALPNMIVCAPADPVEARRIFEQSAAIASPMYIRIAKNREPVFHDTSDEITVGKAFRLSRGNDLEILTTGVITNRIREWLPELDKQGISAGLSVFPTIKPLDAAYLDELAAAGRDILVCEEHNTVGGFGESVCSYLTQRDAPNRVRILGIPDKYSHYVGSQSYILDKMGLWNVPDIRALFGGRL

SEQ ID NO: 58875 - DNA, 1839 bp, Unknown
  Obtained from environmental sample
  misc_feature (1)..(1839): n is a, c, g, or t
gtgatcagatacgagttattgaggaagaaaatggaaaaaaaaacgggcaattacgtgtcggatattcataacgaggattacgaaagcgtatacctggagaccaggctggatgcttcaaccttgatcaacatcgcgggccgggaaacagaatcgcttaacggcaaatggaattttgcggctgacctttacgatacctgccgccgggcgcattggtacagatcgaaacgctatagtccagacgggagagagttcccgttggactatgactgggaaggctgggacaggatcaaggttccggcgtcctggaacctggaaaagccggaactgcattattttgaggcttcgggcttatacaccagaacttttcgctatattccaaaatataaaggtgagcgcctcttgctccgttttgaaggcgcatcgtaccgcaccacagttttcctcaacggaaaaatcatcggaacgcatgacggagcgtccaccccctttaacgccgatatcagcgatgttgtcgaaacagaaaaccgcatcgtggttgtggctgacgcccgccgcagtcccatacgggtaccaacggacaacaccgactggttcaactacggcggtatttatcgcgacgtttaccttgtccgcgttccatcgatctttatcaaagactggtttgtacgccttgcgcctgacggaacctattcgacaattttggccgatattacgctcgcaagcgtagtcaatgatcgggcgcaagcgaacggcacagcatgtcttcaaattcctgagctttctattaaacaggaaattgttataaaagaaggaaagggcgaggcaaaaatttccgccaggccagaactttggagtacggataatcccaaactttacgatgtctccgtttcttttggatccggcgatgttgttgacacagtaaacgaccgcatcggcttcagggaaataaaagccaatgggcatgaaattacccttaacggcaaaaaaatattcctgagcggcgtttgcgttcacgaagaccatttcgtcctgggaaaaacaaccacagaggaaattatccggcagaccattcgcgaccttaaaacgatgaacggcgtctatttcaggcttgcgcattatccccatgacgcgcgctttgccaggatagcggacgaggagggggttcttctctgggaagaagtgcctgtttattggtctgttgcttttgataatccagatacttacgccgacgcggagaatcagttgagcgagctggtgctgagggatcgcaaccgggcaagcgttataatttggtcggtaggcaacgaaaacgcggatatcgattcaaggcttgcctttatgtcgaagctggcgcaaaaggcaaaagctatggacagttcgcggcttgtgtctgcggcttgccttatcaaccacgagaaacttctaattcaggatcgtcttactgattttcttgacgttattggaatcaacgaatattacggctggtatagtccgaattttgaccacctgcctaagatattcgcgaattccaatcccggaaaacccgtgcttatttgcgaattcggcgcggatgcccgcctgggacagcggggaagcgttgacgaactttggactgaggacaaacaaaaacggctctatgaacagcaagtggaaactttcaagaagtgcccctacatagctggtacgactccctggatactgtacgatttccgttgtccccggcggcttaaccgctaccaggagggctttaaccgaaagggccttatcgacgctgaccgaaagaccaaaaagcccgctttttatgtgatgcaaaaattctacgaggagatgaatcgataa

SEQ ID NO: 58876 - protein, 612 aa, Unknown
  Obtained from environmental sample
  DOMAIN (232)...(314): Glycosyl hydrolases family 2, immunoglobulin-like beta-sandwich domain
  misc_feature (1)..(612): Xaa is any amino acid
MIRYELLRKKMEKKTGNYVSDIHNEDYESVYLETRLDASTLINIAGRETESLNGKWNFAADLYDTCRRAHWYRSKRYSPDGREFPLDYDWEGWDRIKVPASWNLEKPELHYFEASGLYTRTFRYIPKYKGERLLLRFEGASYRTTVFLNGKIIGTHDGASTPFNADISDVVETENRIVVVADARRSPIRVPTDNTDWFNYGGIYRDVYLVRVPSIFIKDWFVRLAPDGTYSTILADITLASVVNDRAQANGTACLQIPELSIKQEIVIKEGKGEAKISARPELWSTDNPKLYDVSVSFGSGDVVDTVNDRIGFREIKANGHEITLNGKKIFLSGVCVHEDHFVLGKTTTEEIIRQTIRDLKTMNGVYFRLAHYPHDARFARIADEEGVLLWEEVPVYWSVAFDNPDTYADAENQLSELVLRDRNRASVIIWSVGNENADIDSRLAFMSKLAQKAKAMDSSRLVSAACLINHEKLLIQDRLTDFLDVIGINEYYGWYSPNFDHLPKIFANSNPGKPVLICEFGADARLGQRGSVDELWTEDKQKRLYEQQVETFKKCPYIAGTTPWILYDFRCPRRLNRYQEGFNRKGLIDADRKTKKPAFYVMQKFYEEMNR

SEQ ID NO: 58877 - DNA, 1143 bp, Unknown
  Obtained from environmental sample
  misc_feature (1)..(1143): n is a, c, g, or t
atggattttcaattgaagggctccgacagggagtgggcagaaacgatctttgaaaagcttaacgcaaaactgaaagccgaatgtatcaggctggggaatacaattccttatattgcaaaagacggtcattatagcgacattgacacaggcgaaagtatctactggtggactaacggtttctggccggggatgctttggcagatgtaccacgccacaaacgacgctgtgtacaggaaaagtgccgaggctgtggaaaaacgctttgatgaggcactggaaggcttcgaaggactccatcacgacgtgggctttatgtggctccacacggcggcggcaaactaccgtctttcaggtagcgcggactcccgccgccgcgccctccacgcggnaaacatcctggcaggccgttacaacccggccggcaaatttatctgcgcctggaacggcaaagaccgagccggatggatcatcattgataccatgatgaacctcccgttgctttattgggccgccaaagaaaccggcgatccccgttattcgcaaattgcccaatcacacgccgataccgcgatgagcatcatagcccgtccggacggaagctgtaaccacatcgcagttctttcacctgaaacaggcgagcttcttgaaacccccggcggacagggctgcgcgcccggttcttcatggagccgcggccaaagctgggctgtgtatggttttgctttaagctttcaccactccgctcagatgaagtacctggacgccgcgaaaagaactgcccactatgttatttccaatctggccctgaacaactggctcccgctggtggactttcgttccccgccacagccgcttaaatatgactccaccgcggccatgattactgcctgcggcctgctggaaatagcggagcacgctggtgaatatgagcgtaccctttacgtcggttccgccctgaacatactcaagacctgtgaaaaaactttcgccaactgggacaccgaaaccgacggcgttatcggcggcggaactgcggcctactacgccagtgacaaagacacggatatccccataatttacggcgattatttttttaccgaagcggtattacggcttttgggaaaagatttccttatttggtaa

SEQ ID NO: 58878 - protein, 380 aa, Unknown
  Obtained from environmental sample
  DOMAIN (44)...(373): Glycosyl Hydrolase Family 88
  misc_feature (1)..(380): Xaa is any amino acid
MDFQLKGSDREWAETIFEKLNAKLKAECIRLGNTIPYIAKDGHYSDIDTGESIYWWTNGFWPGMLWQMYHATNDAVYRKSAEAVEKRFDEALEGFEGLHHDVGFMWLHTAAANYRLSGSADSRRRALHAXNILAGRYNPAGKFICAWNGKDRAGWIIIDTMMNLPLLYWAAKETGDPRYSQIAQSHADTAMSIIARPDGSCNHIAVLSPETGELLETPGGQGCAPGSSWSRGQSWAVYGFALSFHHSAQMKYLDAAKRTAHYVISNLALNNWLPLVDFRSPPQPLKYDSTAAMITACGLLEIAEHAGEYERTLYVGSALNILKTCEKTFANWDTETDGVIGGGTAAYYASDKDTDIPIIYGDYFFTEAVLRLLGKDFLIW

SEQ ID NO: 58879 - DNA, 801 bp, Unknown
  Obtained from environmental sample
  misc_feature (1)..(801): n is a, c, g, or t
atggtaactgtttttctggcgttatatacgttcagcataataccaaatttccaatttggatattattttcatattttaaaagataatacttatataaggggaattttatttttccttcaaataataataagttattttccaataataataattttagtcgatataagccttgcctacaaatatatcaaacataatcaaattttaatgattattatttttgttctcattacgtctgttggagcggctatggatattttactgggaacaacaaagttgatctggccatgcgttacggcatcaatactatatgtatatttctttatgcttagatacgatttaaaagttgacagtcttacaggtatgggcaaccgcaatgacttttataaatacattaacaaattttaccttgacagcaggagttataaacaaaaaaataaaaatgaatacgcgtttataaaaattaatataaacaaattaggggaaataaacgacatctacggtcatctggaaggcgataacgccgtgcgggacattgccacaattattaaaacttatttcaggcatactgactttgcggtacgttatggcggagatgaatttattctgattactacggctaanaacgacgttcaacgcattattgagcgcataaataacgcagttgacaaccaaaacaaaaaaaatatacgtccctacaaactcaatataagttacagttatgacatatataaagttaattccgacatacaaattcaggattttcttgcgcaactggacagtaaaaacaaaataaatcaataa

SEQ ID NO: 58880 - protein, 266 aa, Unknown
  Obtained from environmental sample
  DOMAIN (109)...(266): GGDEF domain
  misc_feature (1)..(266): Xaa is any amino acid
MVTVFLALYTFSIIPNFQFGYYFHILKDNTYIRGILFFLQIIISYFPIIIILVDISLAYKYIKHNQILMIIIFVLITSVGAAMDILLGTTKLIWPCVTASILYVYFFMLRYDLKVDSLTGMGNRNDFYKYINKFYLDSRSYKQKNKNEYAFIKININKLGEINDIYGHLEGDNAVRDIATIIKTYFRHTDFAVRYGGDEFILITTAXNDVQRIIERINNAVDNQNKKNIRPYKLNISYSYDIYKVNSDIQIQDFLAQLDSKNKINQ

SEQ ID NO: 58881 - DNA, 2640 bp, Unknown
  Obtained from environmental sample
  misc_feature (1)..(2640): n is a, c, g, or t
ttgatggccgagcagagaacgaacngagctttttcatttatcataaattttaacgaaaccgaaaacgacgattacacgctgtataatccggaaggccgtcttatcgaacaggcgcttgcagccggtattctgcgcgacgaggaaaacaaaatactgttcatggcggaaggggagtaccgttgcgccgttcgtatcgaaaatcttccgaacgcgaacacacttacagagcagtatgtaaatgtttctctggaactccaaagcgaatcgggcgaagtggtcgcgggagaccgccggttttataccatctctccgcgtttggcggtatcgggaaccagtgtttatcaaattcgcgatcttggcatacgttgggcggaaacagacagaatatattctcgtttgcaaaaaaatgatttgcctgctttcctttcgcttgttttttccggtttttccaatctggaactactgtatgaaggctggtctgtaaaaaagatcaggccggcagcggctcttccggctcttttattcatggagattgacaagtacggttacctccatgtgcgacctatcagtttcctccggggcttcccgcccaactttctggaaaacgaagagattgttacggttgtggaagtatatgaaaacgaaaaaatctttggcgttgcggaagtgatctttccggagccacctgaggatcaatttagggcaatactgattcgcggtaataaaatagcggcgaaaaattcagttcacgaagaaaacggccgttttattattgcgcctaaatttgccagagaattttttgcggagaatattgtcgaattatcccagcgttttgtgctgctggaagcggaagtgctttcaggctacaagctcagtttctcgcggccaaaaatccgcttgtccatgggaaagggcattgattatctttccggtaacgcggttgtggaaatcgcgggggaaagttattccttcgcaaagtttatggccgaataccgcaaggcatcctgtattaccctgtcggacgggacgcgctcctttcccgacaaacggactatggatcgccttgatcgcctggtaacgcaaatcaagggaaacgaaaacgcggtagagctatcgtactttgatattcccctgttgttgcaggatgaggccattgagattgaaggcgccgcctgggaagaagcgcgcccatttttctcaaaatacaattcgattcaggatcgtaaaggtacctggtcgctggagaacgggcagctcaggccctatcaggaatatggtgtgcgttggcttgattacctgcgcgaatacaaaatgggcgcgtgccttgccgatgaaatgggccttggaaaaaccattcaggtaatatccctcctgcgatccattaataaggcgggcgttaagggaaactgccttatcctctgtccaaaaacattggtgtttaactgggtctcggaattggaacgctttgcccccgaactgtcccgcacggtgcattacgggacaggacgggatagtgccaaattggaagcggacagcttcaggataatacttagcacatacgctactttgcggcgagacatcgaagattttcaaaagatcaattttttgtatatcatccttgatgaatcccagaatattaaaaaccttacaacccagactacggcggcggtactttccctgaaaggcgtataccggcttgccttgagcggaactccaatcgaaaataatctgggggaattgtacagcttgttccggtttctgaacccttcgttcttcggctccgaaaggctttttgttcagcgctacctgcatcccattcaggatgataacgacgaagacgccctcaaagacctaaaggcaaggatatacccttttatgctcaggcgtcttaagcgcgatgtcttaaaagagcttccagcaaaaaccgaagaaaccgcgtatatcgagctggaagaaagccaccttgctgtttaccatcgcaggcggcaggaatacaaacaactaatagacaatatcatagcaaggggagaagcggcaaaatcccagtttgtcatcttcaaggcgttaggtgaactgcgccgcctcgccagcgttcccgaggcggacggcgagtacgccgggccctcggcaaagcgtcagtacctgcttgatcggatcgcggagttggtagagaacaaccacaagtgccttatctttaccaactttcttgcgacagttgatatcataagcgaggaccttgccggactgggaatccaaaatctcaccatgaccggggctacggttgatcgccagacgctggttagccgcttccaaaccgatgacaatgttaaggcttttatcatgactttaaaaaccgggggaatcggccttaaccttactgcggcggattacatttttataatggatccctggtggaacaacgccgctgaaaaccaggctattgaccgcgcccaccgtatcgggcagcaaaaccccgtgttttgttatcggctcattgccaaagatacaattgaggaacggattttggaacttcagaaacggaagaccgatctggcgggggcgcttcttgccgatgatccgggggcgctcaaggctttaagcccggaagacgtggcctaccttgttggagactcgccgtga

SEQ ID NO: 58882 - protein, 879 aa, Unknown
  Obtained from environmental sample
  DOMAIN (416)...(574): Type III restriction enzyme, res subunit
  misc_feature (1)..(879): Xaa is any amino acid
MMAEQRTNXAFSFIINFNETENDDYTLYNPEGRLIEQALAAGILRDEENKILFMAEGEYRCAVRIENLPNANTLTEQYVNVSLELQSESGEVVAGDRRFYTISPRLAVSGTSVYQIRDLGIRWAETDRIYSRLQKNDLPAFLSLVFSGFSNLELLYEGWSVKKIRPAAALPALLFMEIDKYGYLHVRPISFLRGFPPNFLENEEIVTVVEVYENEKIFGVAEVIFPEPPEDQFRAILIRGNKIAAKNSVHEENGRFIIAPKFAREFFAENIVELSQRFVLLEAEVLSGYKLSFSRPKIRLSMGKGIDYLSGNAVVEIAGESYSFAKFMAEYRKASCITLSDGTRSFPDKRTMDRLDRLVTQIKGNENAVELSYFDIPLLLQDEAIEIEGAAWEEARPFFSKYNSIQDRKGTWSLENGQLRPYQEYGVRWLDYLREYKMGACLADEMGLGKTIQVISLLRSINKAGVKGNCLILCPKTLVFNWVSELERFAPELSRTVHYGTGRDSAKLEADSFRIILSTYATLRRDIEDFQKINFLYIILDESQNIKNLTTQTTAAVLSLKGVYRLALSGTPIENNLGELYSLFRFLNPSFFGSERLFVQRYLHPIQDDNDEDALKDLKARIYPFMLRRLKRDVLKELPAKTEETAYIELEESHLAVYHRRRQEYKQLIDNIIARGEAAKSQFVIFKALGELRRLASVPEADGEYAGPSAKRQYLLDRIAELVENNHKCLIFTNFLATVDIISEDLAGLGIQNLTMTGATVDRQTLVSRFQTDDNVKAFIMTLKTGGIGLNLTAADYIFIMDPWWNNAAENQAIDRAHRIGQQNPVFCYRLIAKDTIEERILELQKRKTDLAGALLADDPGALKALSPEDVAYLVGDSP

SEQ ID NO: 58883 - DNA, 1803 bp, Unknown
  Obtained from environmental sample
  misc_feature (1)..(1803): n is a, c, g, or t
ttgtttatcttgcaagaaggaagagcggttatgaaatttaacagtctaacccgccactcgccgttctttttatgcgctgtgtatgtcattgcggcaagcgcgatcatcatggtttttcgctatatttttccgggtgaaacttccccgcttccgattttttacaagaattggaaactggtaaggggtattatagaggttattaccctgtttcccgcattggttttttccggccttgttgtcccgtttggaatgcccaccgaagaggattttttcgagggcgaggaaactccccagaatctttttcaccgatttcaaactcctattattacggcaattatcgccgcgctggtgtatgccctgctgtttttcctggttcttcccctggctcaaaacagcgaaaagaatatgcgctttcagggggaattattcaagcaggctaaacgtcaggcggaaacccacaggaaggcccacgaatggtttcaggcgtcacagtttatcggcatttgcgacggtgtatggaaaaacagccccgagatggatgatttgcgtgttgatattagagaaaacatcgataaaatagaagcatcggacagacggcaagcgtcaaagccaaaaaccgccgatgcttccgccctgccgggacagaagcagccgatagatgccggagaagcaatctttatgggcgaagccgcttttaacaaaggggattttcttgacgctcattggcttgccaccctggccaggcgcatagccagaccgggcagtccggaagtagccaaagcggccgatcttgccgcaaaagcgtggaatcagattgaagcctttcagacaagcatcggcgaggaaaacgctcatgcgttatacctgctaaagaaatcgggttatgaggcaatgctctcaggcgattatatacgcgcctattacatttttaaggaacatgccgaaaaaagccccaatgaccccgatacaaaacgttatcttgctaaatgtgaagaagcgacaaaagaaatcgcgttctttatggatgaagttgaagtatcaattggagacagacaaaccaacgtgattttatcgctgcccattgttgagaaaggcattccggggcgctcggtgattcgaataggaagcctttcctcaaccccagatgtcacgtacggaataagcattgagtatatggcttttgatccccggtcccgcctcctgtttagcctgtatgcgcctaacgctaaaatcctgccaataaccattgaaggcagacaccaggttcatatattgatgcgggcattggatcgccattcctccagggaacgctcggaaccggtgtggaccgtacggaattccaatttacgtcatcctgacgatgctcagctcattctggatatgagttacgagacattccttgaagtcgtaaaattacggcaaggactggggagtctgggtatcaatgaactttttattgccgcggaaatggctaataaggcgggttacattccccaagtgtatgaggcggagattattaaccgttttggcggctgtttgtttttcctgccaatggcagtcgtcgcaattgccatgggctggtatttccgcgcgaggcggcgtccgcgctatttttttgtgcctctgctccccgtttttccggttgttttttacggtattgtctttttatacaggaaggcgatttctgtcttgggcgcgtctttggtttttgccgttggttattccaacgcagttgtgacgttaattatttttttggcgctttcgttttttgtatcccttattgttctggttaagcagcattga

SEQ ID NO: 58884 - protein, 600 aa, Unknown
  Obtained from environmental sample
  misc_feature (1)..(600): Xaa is any amino acid
MFILQEGRAVMKFNSLTRHSPFFLCAVYVIAASAIIMVFRYIFPGETSPLPIFYKNWKLVRGIIEVITLFPALVFSGLVVPFGMPTEEDFFEGEETPQNLFHRFQTPIITAIIAALVYALLFFLVLPLAQNSEKNMRFQGELFKQAKRQAETHRKAHEWFQASQFIGICDGVWKNSPEMDDLRVDIRENIDKIEASDRRQASKPKTADASALPGQKQPIDAGEAIFMGEAAFNKGDFLDAHWLATLARRIARPGSPEVAKAADLAAKAWNQIEAFQTSIGEENAHALYLLKKSGYEAMLSGDYIRAYYIFKEHAEKSPNDPDTKRYLAKCEEATKEIAFFMDEVEVSIGDRQTNVILSLPIVEKGIPGRSVIRIGSLSSTPDVTYGISIEYMAFDPRSRLLFSLYAPNAKILPITIEGRHQVHILMRALDRHSSRERSEPVWTVRNSNLRHPDDAQLILDMSYETFLEVVKLRQGLGSLGINELFIAAEMANKAGYIPQVYEAEIINRFGGCLFFLPMAVVAIAMGWYFRARRRPRYFFVPLLPVFPVVFYGIVFLYRKAISVLGASLVFAVGYSNAVVTLIIFLALSFFVSLIVLVKQH

SEQ ID NO: 58885 - DNA, 774 bp, Unknown
  Obtained from environmental sample
  misc_feature (1)..(774): n is a, c, g, or t
atggtaaataacggcaaaatagatctggacgagctttcgcaccactggtgttttgatccggggcaggatacaggcattgccgtaattagaacaaaagatctggaactcagttttgaatatgtcaaaattcgctcgactggtacgcaatcctggcgttttgaggggacgcccttgcagatgaacctgcgttccgataccacgctggcggtacagttcactgaaaataacggagtgttgcgaactctgctctttgtcgccctgccctcttctgtcgatgacatcattttgcaagaaacagcccgcagagaagaactcttccgtactatttatgaatatgggccggtatacagcagcaataattacggaacccttatctttagcgaagacggacgttttacctggagcggaaattatcttttggtgcctcaagtgatttccgcgtcggctcttggaagcggcggtctggatatgcggctccatgtgtccgatgttttgagtagccgttatgacggagcgtttaccatgcgttttgacggaatcggcggcatcgggacaacaacggatttcatttacgccatagatccgcagggtctcagaatggaatatgttccggaaacaagcctggacggagttacagttgtcaggcgggcttcttctcccgtggtggtttacttctttaaaaacgatattctggatgatagtacttccctttttccgcaagactatcaggcagaggacagcgattcggaattcttatttgagttattgaactga

SEQ ID NO: 58886 - protein, 257 aa, Unknown
  Obtained from environmental sample
  misc_feature (1)..(257): Xaa is any amino acid
MVNNGKIDLDELSHHWCFDPGQDTGIAVIRTKDLELSFEYVKIRSTGTQSWRFEGTPLQMNLRSDTTLAVQFTENNGVLRTLLFVALPSSVDDIILQETARREELFRTIYEYGPVYSSNNYGTLIFSEDGRFTWSGNYLLVPQVISASALGSGGLDMRLHVSDVLSSRYDGAFTMRFDGIGGIGTTTDFIYAIDPQGLRMEYVPETSLDGVTVVRRASSPVVVYFFKNDILDDSTSLFPQDYQAEDSDSEFLFELLN

SEQ ID NO: 58887 - DNA, 2076 bp, Unknown
  Obtained from environmental sample
  misc_feature (1)..(2076): n is a, c, g, or t
atggcctttgtccagttttccagggtctgccttgcttttggcgatagggacatacttaaagatgtaagcctcaatcttgcctccggttcccgaacggctctggcgggagccaacggggcgggcaagtctaccttaatgaaggtcatcgccggaaaactcccggccgattcaggcgagcgttccgtgcagaaaggctgccgcgtctcttacctgccgcagtccggcattgtacaccatggcaaaaccctaagggaagaagccgaaaccgcttacgaaagcatactgcggttcattgcgcgggtggaagaattgggaagggagcttgaaaaaaccacaggcgactcaggccacacccgcgcgcttctggaagagcatcaccgcttattaagcgaagttgaaaattccggttattaccgtcgtgatgctgttattgcccaggttctttcgggccttggattttccgaaagtgatgtggagagggatacgggcgagttttcaggcggctggcagatgcgcattgctctggcaaaaattcttttggaaaatccggacatcatgctcctggacgagccgaccaattatctggatatagaagcccgcgcctggcttgaatcatggctggaatctttttccggcggctgtcttctggtttcccacgatcgttattttttggacgttaccgtaaatgaggtttacgaaatatttcaggggaaccttaagcgctatgtgggtaactacagcgcatacgaaaagatccgtactgcggaactggaaagcctggtcaagcgctatgaactccagcaggaagaaattgaaaagaccgaggccttgattcgccgcttccgctacaaggcaacaaaagccgcctttgcgcaggaacttatcaagcggcttgataaaatggaacgcattgaaattccggaaaatttaaagaagataagtatcagctttccgccgcctccccattcgccgcgtatagtcatgacgctggaagggcttggaaaaagctacggccaaaggcaggttctctcacaccttgacctgacccttgacgccggggagcggctgctcgtggcaggtcccaacggcgcgggaaaaaccacccttttaagaattatttccggtggggatacagattacgaagggctggtcaaatacggcgcgggtatttccgtcgggtacttttcgcaggacgcggcggaaaacctttcaggcagtcagacggtagagcaatatatcgagtccgaagcgcccacatacctgattccaaaagtaagaggcatgcttggggcctttcttttccggggcgatgacgttttcaaatccctttcggtattgtcaggcggcgaaaaaagccggcttgccatgctcaggatgcttcttaaacccatgaatattttgatattggatgagcctacaaatcacctggatttacaaagcaaggacatactgcttgactgccttaaagcttttgaagggacaataatctttgtttcccatgaccgtggttttatggaagccctgtcaacaaaaacgctggaactgtccatcgggagaacgacgagtgatgcggaaccgaagcggtgtcatcgtcttttctatggcaactacgcttattatctggatcgcgtagcaaatgaggaatcaaaccaaaggtttgtcggagatataagcacaagcgataatattgagatgaagccttcaaaaagccagccgacggccccatctgtcattgatgtttccccggagccgcttccaaaggtcattcttgttaaagcaggagatgagaggccgcttagcgcagcggaacgccgcgagcaggaaaagcaaagacaggcccttgcgcggcggcttgagcgtcaggaagcagaaacgttaagggccatggaaaagctggaaaccgaaaagaagcggcttgaagaagaacttggcaaaccggcggtttactcgtccggcgagaaagcaagggccgttaagctcgctctggacgaaacagcggcggctctggaagctaaatccaaagaatgggaaagcattgcaggggagctggaaagggccaggaagagcaccttgtaa

SEQ ID NO: 58888 - protein, 691 aa, Unknown
  Obtained from environmental sample
  DOMAIN (18)...(522): RecF/RecN/SMC N terminal domain
  misc_feature (1)..(691): Xaa is any amino acid
MAFVQFSRVCLAFGDRDILKDVSLNLASGSRTALAGANGAGKSTLMKVIAGKLPADSGERSVQKGCRVSYLPQSGIVHHGKTLREEAETAYESILRFIARVEELGRELEKTTGDSGHTRALLEEHHRLLSEVENSGYYRRDAVIAQVLSGLGFSESDVERDTGEFSGGWQMRIALAKILLENPDIMLLDEPTNYLDIEARAWLESWLESFSGGCLLVSHDRYFLDVTVNEVYEIFQGNLKRYVGNYSAYEKIRTAELESLVKRYELQQEEIEKTEALIRRFRYKATKAAFAQELIKRLDKMERIEIPENLKKISISFPPPPHSPRIVMTLEGLGKSYGQRQVLSHLDLTLDAGERLLVAGPNGAGKTTLLRIISGGDTDYEGLVKYGAGISVGYFSQDAAENLSGSQTVEQYIESEAPTYLIPKVRGMLGAFLFRGDDVFKSLSVLSGGEKSRLAMLRMLLKPMNILILDEPTNHLDLQSKDILLDCLKAFEGTIIFVSHDRGFMEALSTKTLELSIGRTTSDAEPKRCHRLFYGNYAYYLDRVANEESNQRFVGDISTSDNIEMKPSKSQPTAPSVIDVSPEPLPKVILVKAGDERPLSAAERREQEKQRQALARRLERQEAETLRAMEKLETEKKRLEEELGKPAVYSSGEKARAVKLALDETAAALEAKSKEWESIAGELERARKSTL

SEQ ID NO: 58889 - DNA, 453 bp, Unknown
  Obtained from environmental sample
  misc_feature (1)..(453): n is a, c, g, or t
ttggataacgctatcactcaaaagatactatttgagatcgaacaaatagacgaacttataaacgcctcaagccctttgctcggcttatgtaaaaacagagacccagatttcgttgaaaaatgcggaatagcgttgatccttcaatccttctatagtggaattgaaaaaataatgctattaataattaaagataaagacaccgtattacctaatggagttaaatggcataaagatttactcgataacgcgctcaaagacacctcaaacagaacacacatattcagagaaaatttatccgaacagttaaatgattaccttaaattcagacaccttgtaaaacattcatacggttttcaactaaaatgggagaaaatgaaaaacatattgttcgacatggttcctgtatggaaagagataaaagaagatgtaaatatattcatcaaaaataactaa

SEQ ID NO: 58890 - protein, 150 aa, Unknown
  Obtained from environmental sample
  misc_feature (1)..(150): Xaa is any amino acid
MDNAITQKILFEIEQIDELINASSPLLGLCKNRDPDFVEKCGIALILQSFYSGIEKIMLLIIKDKDTVLPNGVKWHKDLLDNALKDTSNRTHIFRENLSEQLNDYLKFRHLVKHSYGFQLKWEKMKNILFDMVPVWKEIKEDVNIFIKNN

SEQ ID NO: 58891 - DNA, 915 bp, Unknown
  Obtained from environmental sample
  misc_feature (1)..(915): n is a, c, g, or t
atggatacaatgctacggtgctatgaattggaggataaaagacaaattattagggattggtacaacggctatctgtttggaaatacggaggtgtataatccgtggagttccgtgcatgttgtgacaaattggcttgcgtacaaaaatgaacatccaaagccatattgggcaaacaccagcggtaacgatattgtccgcaaattggtagacatcgccaacgccgaaatgaaaaccgatttggaaaccctgatgaccggcggaaaaatctcaaaaacgattcacgaggacatcacgtacgaagaaatagatgaagataaaaataaagaccccgacaacttttggaacttcctatttttcaccggctatctgaaaaaagtcggagaggaacgtatggacggcgtaaaaacggttttggatttatccattccgaacttggaattactgtacatttatgaaaccaaaatacaggaatggtttaaggagaaggtcagccggaaagattttgatccattatatagggcgcttttaggcggtgacgcggagctggtgcagaaagaactgggcgacttccttttggagactataagttatttggatgctaaggaagatttttatcacggagtgctgattggcgtactaggcggattgcgtgattttacggcgaaatccaaccgcgagaccggtcttggccggtgtgatattgttttgcggcatacaagcggtcgcggcaaagccatcatacttgaacttaaatgtacgcacgatatgcacgagatagtaaaaaagtgcgaagaggccgtgaaacagattgcggacggcaagtacgtcaaagaactggaatcggagtgttataccgatattatcaagtacgggatcgcgttttgtaagaaaagctgtgaagtgaggaaaggatga

SEQ ID NO: 58892 - protein, 304 aa, Unknown
  Obtained from environmental sample
  DOMAIN (1)...(304): Protein of unknown function (DUF1703)
  misc_feature (1)..(304): Xaa is any amino acid
MDTMLRCYELEDKRQIIRDWYNGYLFGNTEVYNPWSSVHVVTNWLAYKNEHPKPYWANTSGNDIVRKLVDIANAEMKTDLETLMTGGKISKTIHEDITYEEIDEDKNKDPDNFWNFLFFTGYLKKVGEERMDGVKTVLDLSIPNLELLYIYETKIQEWFKEKVSRKDFDPLYRALLGGDAELVQKELGDFLLETISYLDAKEDFYHGVLIGVLGGLRDFTAKSNRETGLGRCDIVLRHTSGRGKAIILELKCTHDMHEIVKKCEEAVKQIADGKYVKELESECYTDIIKYGIAFCKKSCEVRKG

SEQ ID NO: 58893 - DNA, 879 bp, Unknown
  Obtained from environmental sample
  misc_feature (1)..(879): n is a, c, g, or t
ttgattgccggcgggcgtaatttatattttgaaatgatccgcggcgcgcgggtcaaaataggcctaaaaggagcgcctgatattatggcaggtataaacgtagataataaaccgctgcctgtctgcgagtcgatttttgatttgatgatagaagacggctattattatgtcgataaaacgctgttaataaaggatatgctggatagaaaatccagagccgtcctatgcacccgtcctcgccgattcggcaaaacgctgaaccagactatgctcaagtgttttttcgaggatacgtcgcgagtcggcggcaaggacacgcgggcgctgtttcgcgggttgaagatagaggaggccggagagcggtacatggagcatcaggggaagtatccggtgatattccttagtttcaaggaagggaagcacaacagttttgacggagcgtgcgattggctaaaagattgcatagcccaagaatttaagcgacatacctactctatagaaaagatacacaatgatgatgaccgcgagctgtttaaaagactgtcttcctgcggcggctctatcaatgattattccgcatcgctcaaatttttgagcgaatgcttggaaaattaccacggcaaaagagcggtaatcctgatcgacgagtacgacgtcccgcttgagaattcgtggtcacgcggtttttatcagcagatgatcgatttcatccgcccgatcctcagcagcgcgctcaaagacaatccgcacctgcaattagccgtgatgaccggatgtctgcgggtttccaaagagagcatattcacggggttgaacaattgggatgtgatctcaatactcaacaaacattttccgaatactttgtttcacccaagatga

SEQ ID NO: 58894 - protein, 292 aa, Unknown
  Obtained from environmental sample
  DOMAIN (29)...(292): Protein of unknown function (DUF1703)
  misc_feature (1)..(292): Xaa is any amino acid
MIAGGRNLYFEMIRGARVKIGLKGAPDIMAGINVDNKPLPVCESIFDLMIEDGYYYVDKTLLIKDMLDRKSRAVLCTRPRRFGKTLNQTMLKCFFEDTSRVGGKDTRALFRGLKIEEAGERYMEHQGKYPVIFLSFKEGKHNSFDGACDWLKDCIAQEFKRHTYSIEKIHNDDDRELFKRLSSCGGSINDYSASLKFLSECLENYHGKRAVILIDEYDVPLENSWSRGFYQQMIDFIRPILSSALKDNPHLQLAVMTGCLRVSKESIFTGLNNWDVISILNKHFPNTLFHPR

SEQ ID NO: 58895 - DNA, 669 bp, Unknown
  Obtained from environmental sample
  misc_feature (1)..(669): n is a, c, g, or t
atgcacaaggggataatacttgccggcggctcaggaacgcgtctctacccaacgaccatcgccgtttccaaacagttaatgccgatctacgataagccgatgatctactacccgctgaccacgctgatgctggccggaataacggacatattgatcatcacgacgccggaggacggcgccgcgtttaggcgtcttctccgcgacgggacgcagtggggcgttaagctctcatacgcggagcagccgcgtcccgacggcttggcgcaggcgttcataatcggcgaggagtttgtcggaggaggcccggcggccctgatcctcggcgacaacatcttttggggccacggcttggttgagcgtttgaaaatagccgtggatcgtcccgatgtcgccacaatcttcgcctaccgtgtaaacgaccctaagcgctatggtatagttgaggttgacacgacgggaaaggccgtatcaatagaagagaaaccatcggcgccgaagtcaaaattagccgtgacggggctctatttttatgataccgatgtctgtaagttagccaaaacgcttaaaccgtcgtcaagaggggaattggagataaccgacctaaaccgcttgtatctggaacaaggaaagctgcaagtagtggatttgggccgcggcatagcctggtag

SEQ ID NO: 58896 - protein, 222 aa, Unknown
  Obtained from environmental sample
  DOMAIN (3)...(220): Nucleotidyl transferase
  misc_feature (1)..(222): Xaa is any amino acid
MHKGIILAGGSGTRLYPTTIAVSKQLMPIYDKPMIYYPLTTLMLAGITDILIITTPEDGAAFRRLLRDGTQWGVKLSYAEQPRPDGLAQAFIIGEEFVGGGPAALILGDNIFWGHGLVERLKIAVDRPDVATIFAYRVNDPKRYGIVEVDTTGKAVSIEEKPSAPKSKLAVTGLYFYDTDVCKLAKTLKPSSRGELEITDLNRLYLEQGKLQVVDLGRGIAW

SEQ ID NO: 58897 - DNA, 648 bp, Unknown
  Obtained from environmental sample
  misc_feature (1)..(648): n is a, c, g, or t
ttgcggacaaaatcagtgatgttgacaaaaggcaaattttttacgtttgaaggcatagacggttgcggcaagagcacccaattagcccgcgttgccgaacgtctgcgtgaaaagggtacatcctatctagtcacccgcgaacccggcggcgcggttatcagtgagaagattagggaattattgatgtccccggacaataaaggaatgtgtaatgaaacggaactgcttctgtatttatccgcacgtgcccagcatgtaagagaaatcataaaacctgctattgacagaggggaaatagttctttgcgatagatttgaacaggctacgtttgcctatcagggtagcggcagaggtcttgatgttgacgctattcgcggtatcaacgctttcgccacgggtgggattgttccggatatgacatttatcatggatatttccgtagagatttcacaggagcgtctgaataagataggtaagggcaaagaccgaatggagagcgccggtacacaattctttgagcgcgtcagagatgggtatatcaatgcggctaaggcgtttcctcaaaagataaagctgcttgacggtacaaaaggattggacgagttgacggatgagatattgggggtgatagaatgcacaaggggataa

SEQ ID NO: 58898 - protein, 215 aa, Unknown
  Obtained from environmental sample
  DOMAIN (16)...(206): Thymidylate kinase
  misc_feature (1)..(215): Xaa is any amino acid
MRTKSVMLTKGKFFTFEGIDGCGKSTQLARVAERLREKGTSYLVTREPGGAVISEKIRELLMSPDNKGMCNETELLLYLSARAQHVREIIKPAIDRGEIVLCDRFEQATFAYQGSGRGLDVDAIRGINAFATGGIVPDMTFIMDISVEISQERLNKIGKGKDRMESAGTQFFERVRDGYINAAKAFPQKIKLLDGTKGLDELTDEILGVIECTRG

SEQ ID NO: 58899 - DNA, 1551 bp, Unknown
  Obtained from environmental sample
  misc_feature (1)..(1551): n is a, c, g, or t
atggactacgacgacgagatatacaaaactcaccgcgagaagtacaatgccatcgtgcaggacataaaggcgatgagcgagcttggccgcccgtgtttggtcggcacgacatctattgagaaatcggagcttttgagccgtatgcttttgcgggctggtgttcagcacgaggtgttgaacgcgaagcagcacgcgaaagaggcggcgatcgtggcgcaggcggggcgtttgggcgctgtaacgatagccacgaacatggcaggccgcgggacggacatagtgcttggcggcaacttcgaggccatggcaaaccacgagttgcacaaggaaagcgtcgatcccgacacgatgacgctggaggagaagcgccaaaagttcgccaagctgtttacgcaagtcggggaggagcatgacaaagtgttgagccttggcgggttgcatatcataggcacagagcgccacgagagccgccgcatagacaaccagttgcgcgggcgcgccggacgtcagggcgaccctgggtcgtcaaagtttttcttgtcgttagacgacgaccttatgcgcatattcggcgccgagaggatcaggctggtgatggacaaactcggcacaccggaaggcgaggcgatcagccacccgatggtttccggttcgatagccggcgcccaaaagcgtgtggaagggcgcaacttcgacatccgcaagcatttgaaagagtacgacgacgtaatgaaccttcagcgccgtgagatatacggcctgcgccagcgcatattgcgcggtgagaacttgaaggatgagattctcgaccaaatagccaacgccgtggaagatatggtgatgaaatacgcccccgaacgcgtctactcggaagagacatggaacataaacggtttgcgcgacgagacgcagacggcgttcggagtgctgtacagccccgagcagatcaaagtagagtcaatgaaccaaaaggagttgtttgacgatttgtgggagctggtagagaagcgctatacggataaagaggaacgctttggcgcggaagcaatgcgccgcttcgagcgcggcgtttttctcatggtgatagacaacctatggaaggatcatctctttgagatggatcaccttaaaggcggcgtgcagtttagggcgttcggccaaaagaacccgctctttgagtaccaaagggaaggtctgttgatgttcaaggagttgcgaacaaacatatcgagagaaatatcaaactacatcttccgtctggaaagcgccgaacgcaaaccgtcgtcaaacgccttcgccggagcgagagccgtgcacgacgccgcccaaacattgttcggcggttccacaacgtcgtcaggcgaagtatcaataaccgcccgcccaagagcggtacccggcggtacgatgacgacaaacaggggggtaggcgaagacggccgccctgtcccgcaacagccgataagagtaggccccaaagtagggaggaacgatccttgtccttgcgggagcggaaagaagtataagaactgttgcggacaaaatcagtga

SEQ ID NO: 58900 - protein, 516 aa, Unknown
  Obtained from environmental sample
  DOMAIN (496)...(516): SEC-C motif
  misc_feature (1)..(516): Xaa is any amino acid
MDYDDEIYKTHREKYNAIVQDIKAMSELGRPCLVGTTSIEKSELLSRMLLRAGVQHEVLNAKQHAKEAAIVAQAGRLGAVTIATNMAGRGTDIVLGGNFEAMANHELHKESVDPDTMTLEEKRQKFAKLFTQVGEEHDKVLSLGGLHIIGTERHESRRIDNQLRGRAGRQGDPGSSKFFLSLDDDLMRIFGAERIRLVMDKLGTPEGEAISHPMVSGSIAGAQKRVEGRNFDIRKHLKEYDDVMNLQRREIYGLRQRILRGENLKDEILDQIANAVEDMVMKYAPERVYSEETWNINGLRDETQTAFGVLYSPEQIKVESMNQKELFDDLWELVEKRYTDKEERFGAEAMRRFERGVFLMVIDNLWKDHLFEMDHLKGGVQFRAFGQKNPLFEYQREGLLMFKELRTNISREISNYIFRLESAERKPSSNAFAGARAVHDAAQTLFGGSTTSSGEVSITARPRAVPGGTMTTNRGVGEDGRPVPQQPIRVGPKVGRNDPCPCGSGKKYKNCCGQNQ

SEQ ID NO: 58901 - DNA, 750 bp, Unknown
  Obtained from environmental sample
  misc_feature (1)..(750): n is a, c, g, or t
gtggaagggttgataaatttctatatcccctatatcacaatcgagccaattatgggaaaattatcaactcaattttggtttagtatatatcagaaaaaaacaccgataaccatatcagatgtcttgttgggggacattcctgtccgcctcagcgccgaagtcttaaggcgcgattatcctttaaatgaaatattgaaatgggatattggaacagttatcctgccgcttcgtccgctcagccctggttattgttatctgaggcttggggacaggcgcgtatggcaatgccaaatactgccgaattgcaagtggttcctgaaaagaatcgctattgtcaattatgctgaaaaaccatttggaacggagggaaatatggaaatggaaaaagttaatccgctcgtaagggatgccctgtccagcgcgatgatgaagatcaccgtggaactgggagccacctttcataccgtgaaggaagtttcttcaatgggcgaggggacaatcctcgagcttaataagcttgccggggaaccgttggatgtaaaagccaatggagtcctcatcggctatggggaggcggtagttatcgacgagaattttggggtaaggattaccgagatactacagcctgcgcctgaaccgccagccccgcnaatgtcaaaaaaagcatttccagaactagatgaggaatcgtttaaggaagctttgngaaaggccaaaaaggaaacaacaagcgaggaatcaagggactga

SEQ ID NO: 58902 - protein, 249 aa, Unknown
  Obtained from environmental sample
  DOMAIN (134)...(210): Surface presentation of antigens (SPOA) protein
  misc_feature (1)..(249): Xaa is any amino acid
MEGLINFYIPYITIEPIMGKLSTQFWFSIYQKKTPITISDVLLGDIPVRLSAEVLRRDYPLNEILKWDIGTVILPLRPLSPGYCYLRLGDRRVWQCQILPNCKWFLKRIAIVNYAEKPFGTEGNMEMEKVNPLVRDALSSAMMKITVELGATFHTVKEVSSMGEGTILELNKLAGEPLDVKANGVLIGYGEAVVIDENFGVRITEILQPAPEPPAPXMSKKAFPELDEESFKEALXKAKKETTSEESRD

SEQ ID NO: 58903 - DNA, 834 bp, Unknown
  Obtained from environmental sample
  misc_feature (1)..(834): n is a, c, g, or t
ttgatgattaaaattggaatagtcttcgccctaatatggcttgtaacaacattttttattttccgccatattaacaagcttaagaatgatttgcttaataaacattccgatactgaaagacagcctgaaaaaagcgaagatatttccaaagaaaaaacatacaagccttttgaaaacatcaacagcgtagatccggcgcatcttttaaatttcatcaaacaggaacatccgcaagttatcgcgcttattctttcgcacatggaaccggacaaagcctcaattattctgcaaaatcttccgcatgaaacgcaaagcgacgttgcgcggcgtatcgctgttatggatcgtgtcagccatgaaataacgcgtgaaatagagcgagttgtggaaaaaaaattatcctcgctggcaaacgaagattattccttagccggcggcgttgaaagcatggttaatatccttcactttgtagaccgcgcttccgaaaaacagattatcgaagatcttgaagacaacgatcccgaacttgccgaagagatcaaaaaaagaatgttcgtgttcgaagacattatttttctcgacgacaacgccattcagaaagtcatacgcaaagttgactcaaaagaactcgcaaaggcgcttaaagtcgtcgacccggaagtgcagaacaaaatttataaaaatatgtccaagcgcgcggcaaatacgctaaaactggatatggagtatatgggaccattgcgcttgaaagacatggaagaatcacagcaaaaaattatttccattatccgctattttgaggaaaccggcgaaattaggattacatgcaattaa

SEQ ID NO: 58904 - protein, 277 aa, Unknown
  Obtained from environmental sample
  DOMAIN (166)...(275): FliG C-terminal domain
  misc_feature (1)..(277): Xaa is any amino acid
MMIKIGIVFALIWLVTTFFIFRHINKLKNDLLNKHSDTERQPEKSEDISKEKTYKPFENINSVDPAHLLNFIKQEHPQVIALILSHMEPDKASIILQNLPHETQSDVARRIAVMDRVSHEITREIERVVEKKLSSLANEDYSLAGGVESMVNILHFVDRASEKQIIEDLEDNDPELAEEIKKRMFVFEDIIFLDDNAIQKVIRKVDSKELAKALKVVDPEVQNKIYKNMSKRAANTLKLDMEYMGPLRLKDMEESQQKIISIIRYFEETGEIRITCN

SEQ ID NO: 58905 - DNA, 336 bp, Unknown
  Obtained from environmental sample
  misc_feature (1)..(336): n is a, c, g, or t
gtgcccgagaaagcgcctatagaacaaaggaagccgcgcgctttcagggttgatcttcagtcgccggccggcggtgaagattccgccctttttgaaataatcagcgaatcttttgtaaaccgcgattgggataaagcgcgcgtggatttacagcactatctttcactgccgcactcaaaagacgtggaagcgcgcgcccgtttttatcttggacagaccctttactttaccggaaatttcaagggagcgttatttgaatttttatccattaagtcgattcatcctgtggaagcgaatatgtggatagattctattttagcggcgatggtgtactaa

SEQ ID NO: 58906 - protein, 111 aa, Unknown
  Obtained from environmental sample
  misc_feature (1)..(111): Xaa is any amino acid
MPEKAPIEQRKPRAFRVDLQSPAGGEDSALFEIISESFVNRDWDKARVDLQHYLSLPHSKDVEARARFYLGQTLYFTGNFKGALFEFLSIKSIHPVEANMWIDSILAAMVY

SEQ ID NO: 58907 - DNA, 552 bp, Unknown
  Obtained from environmental sample
  misc_feature (1)..(552): n is a, c, g, or t
atggccgagcatcctttctcgcttcttgagtattctgtagtacacaacggcgagatatcctcttacgataccaaccggcgctcaatcgaaatgtacggctataagtgctcgctccagaccgacaccgaagttatcacctacatagttgattatctgcacagaaaacaccagcttgccttcaaggaaatcgcttcggttatcgcggccccgttctggtcgactatcggacgtatgaaaccggacgattttgaaacccatgagtacctgcgcatcatgttcagcggacaactgataaccggcccgttttcaattctcgtgggctttgacggcggactgatggcgttaaacgacagacttaaactgcggagcatggtggtaggagaaaaggacgaactggtttacatcgcaagcgaggaagcggctatccgcgtcattgaaccgaaccttgacacaatctgggcgcccagaggcggccagcctgtgatcgtctttatgaatgggcgtgttcctgattccggaccagccatatacagaggtgaagaatggcattga

SEQ ID NO: 58908 - protein, 183 aa, Unknown
  Obtained from environmental sample
  misc_feature (1)..(183): Xaa is any amino acid
MAEHPFSLLEYSVVHNGEISSYDTNRRSIEMYGYKCSLQTDTEVITYIVDYLHRKHQLAFKEIASVIAAPFWSTIGRMKPDDFETHEYLRIMFSGQLITGPFSILVGFDGGLMALNDRLKLRSMVVGEKDELVYIASEEAAIRVIEPNLDTIWAPRGGQPVIVFMNGRVPDSGPAIYRGEEWH

SEQ ID NO: 58909 - DNA, 1506 bp, Unknown
  Obtained from environmental sample
  misc_feature (1)..(1506): n is a, c, g, or t
atggcattgaattatgtatatcctgaatatgaagttataaggaatggcgacaggtgtatcacctgccgcgcctgtgagcgccagtgcgcaaacgaggtgcacgaatatctcgcggaagttgacaaaatggtcagcaacgaaacaaaatgcgtaaactgccaccgctgcgtcacgctctgtcccacccatgccctgaaggttgtaaaaagcggcaacacatataaacataattcgaactggaacgccaaaaccatcgacgagatttacaagcaggcggccacgggcggcgtattgttgtcaagcatgggcaatcctgaaaattaccccgtgtactttgataaaattttattaaacgcgtcgcaggttaccaacccttcaatagaccccttgcgcgagcctatggaaacaaggatttctctcggcgccagaccgaaacacatagagcgtgacaagaacggacgcattaaaaacaacctaccgccccagatacacctgtcaatgcccgttatgttctcggcgatgagttacggttccataagttacaacgcccacgagagtctggctcgcgccgccgaggagttgggcattctgtacaacaccggcgaaggcggactgcatgaggatttttataaatacggtaagaacactattgtgcaggtagcgtcagggcgtttcggtgttcatcccgattaccttaactcgggcgcggctgtcgagatcaaaatggggcagggcgcgaaaccaggcataggcgggcatcttcccggaactaaaatcgtaggcgacatttcccgtaccaggatgatccccgaaggctccgacgcgatctcgcccgcgccgcaccacgacatttattccattgaagacttgcgccagcttgtcttttcccttaaagaggcgactaattatcagaagcctgtcattgttaaaatcgcggcggtgcataatgttaccgccatcgcgagcggcatcgccagaagcggcgcggatattatagccattgacggcttccgtggcggaacgggcgcggctcccacgcgcatacgcgatcatgtcggcatccccatagagcttgcccttgccggcgttgataaacggttacgcgatgagggcatacgcgacaacgtgtccatcgtcgttggcggcagtatccgctcaagcgcggacatcataaaagcaatcgcccttggcgcggattgcgtttacatagcgacatcggcgctgattgcgcttggctgtcatttgtgcagaagctgtcacgcgggaaaatgcaactggggtatcgccacgcaggttcccgaactggtcaagcgcctgaatcccgacatagggtacaaacgccttatcaatcttttaacggcgtggcaacatgaaataaaagagatgatgggcggcatggggatcaattcaattgacggattaaaaggaaatcgtttaatgcttcgcggagtaggattaaatgaaaaagagttagaaattttaggcattaagcacgctggagaataa

SEQ ID NO: 58910 - protein, 501 aa, Unknown
  Obtained from environmental sample
  DOMAIN (43)...(66): 4Fe-4S binding domain
  misc_feature (1)..(501): Xaa is any amino acid
MALNYVYPEYEVIRNGDRCITCRACERQCANEVHEYLAEVDKMVSNETKCVNCHRCVTLCPTHALKVVKSGNTYKHNSNWNAKTIDEIYKQAATGGVLLSSMGNPENYPVYFDKILLNASQVTNPSIDPLREPMETRISLGARPKHIERDKNGRIKNNLPPQIHLSMPVMFSAMSYGSISYNAHESLARAAEELGILYNTGEGGLHEDFYKYGKNTIVQVASGRFGVHPDYLNSGAAVEIKMGQGAKPGIGGHLPGTKIVGDISRTRMIPEGSDAISPAPHHDIYSIEDLRQLVFSLKEATNYQKPVIVKIAAVHNVTAIASGIARSGADIIAIDGFRGGTGAAPTRIRDHVGIPIELALAGVDKRLRDEGIRDNVSIVVGGSIRSSADIIKAIALGADCVYIATSALIALGCHLCRSCHAGKCNWGIATQVPELVKRLNPDIGYKRLINLLTAWQHEIKEMMGGMGINSIDGLKGNRLMLRGVGLNEKELEILGIKHAGE

SEQ ID NO: 58911 - DNA, 849 bp, Unknown
  Obtained from environmental sample
  misc_feature (1)..(849): n is a, c, g, or t
atgaaaaggataataagtgggaaagtaagggatgtatacgagatttcagacgacaggcttgtcattgttacgacggacaggatttcagcgtttgacgttatcatgtcaaaacccgtacttaataaaggaaaagttttaaacgccatttctttattttggtttaattatacaaaagacatcattcccaatcattttatttcaagcgacttaaaagacatgcctgaatattttcaaaaaagcgaatttgaggggagggcgattttagtaaaaaaacttaaaatactgccgtttgaatttgtcgttaggggatatatgttcggtaatatgtgggaagcatatcccaaaggcgaaaaattctgcggccagcatattgaaggtaattacaatctgncagagaaactggccgtcccgctttttaccccttccacaaaagcgcgtgtcgggcatgacgagtatatctccgttcaacacgttaaggacgtgattggcgcggagctggccggcaggatagaaacagttagcctaaagctttacaacacctgctacaactacgcttacaacaagaacataatcatcgccgataccaaatttgaattcggcctagacgagcacaacagcctttatgtcgcggacgaaatacttacgccggattcaagcaggttctggagccttttggattataaggcgggggtttctccaaaaagttacgacaagcaattggtaagggactggctcacggaaaacaaaataaacggcgagatgcagtttgacaacgtgagcgacgaggttctaagaaaaacgtcggagatctacgcggaatgtctaacgaaaataacaagccttgtatga

SEQ ID NO: 58912 - protein, 282 aa, Unknown
  Obtained from environmental sample
  DOMAIN (1)...(263): SAICAR synthetase
  misc_feature (1)..(282): Xaa is any amino acid
MKRIISGKVRDVYEISDDRLVIVTTDRISAFDVIMSKPVLNKGKVLNAISLFWFNYTKDIIPNHFISSDLKDMPEYFQKSEFEGRAILVKKLKILPFEFVVRGYMFGNMWEAYPKGEKFCGQHIEGNYNLXEKLAVPLFTPSTKARVGHDEYISVQHVKDVIGAELAGRIETVSLKLYNTCYNYAYNKNIIIADTKFEFGLDEHNSLYVADEILTPDSSRFWSLLDYKAGVSPKSYDKQLVRDWLTENKINGEMQFDNVSDEVLRKTSEIYAECLTKITSLV

SEQ ID NO: 58913 - DNA, 660 bp, Unknown
  Obtained from environmental sample
  misc_feature (1)..(660): n is a, c, g, or t
ttgcttgacagtgaaatattgagctgcgttgatcacacgttgttgaagatgaccgcctcatggtcagagataaagaccctctgtgatgaggcggtttgtttcaaaacggcgtccgtatgtatcccgccggcgtatgtaaaacctgttttcaaggaattcgggaatgatttggtcatctgcacggtgattggtttccccctggggtacacctatacatctgttaaggttaatgaaacaggcctcgcgttggaaaacggcgcttccgaagttgacatggtaataaacgcgggcgacgtgaaaaacggcgattacgattcggttctgcgcgagataaaagccgtaaagagagtatgcggactaaaaatcctcaaggttattatagaaacctgttatctgaccgaagaagaaaaaatacggctctgcgatattgtcacagaggcgggtgctgactttataaaaacttcgacgggtttcggaacggcgggcgcgacgattgccgacgtaaaactgttcaaacagcatattggcccgcaagttaaggttaaggccgccggcggcataaaaacgcgcgaggacattgaggcgtttattcaggcgggggcggaccgcataggcacaagctctgcggtaaaattgctttccggcgctaatacaaaataa

SEQ ID NO: 58914 - protein, 219 aa, Unknown
  Obtained from environmental sample
  DOMAIN (5)...(215): DeoC/LacD family aldolase
  misc_feature (1)..(219): Xaa is any amino acid
MLDSEILSCVDHTLLKMTASWSEIKTLCDEAVCFKTASVCIPPAYVKPVFKEFGNDLVICTVIGFPLGYTYTSVKVNETGLALENGASEVDMVINAGDVKNGDYDSVLREIKAVKRVCGLKILKVIIETCYLTEEEKIRLCDIVTEAGADFIKTSTGFGTAGATIADVKLFKQHIGPQVKVKAAGGIKTREDIEAFIQAGADRIGTSSAVKLLSGANTK

SEQ ID NO: 58915 - DNA, 438 bp, Unknown
  Obtained from environmental sample
  misc_feature (1)..(438): n is a, c, g, or t
gtggaattcaaaccggtacgcgggctgaaaggcgtgaaggccgccgaagttgattttggcgtacccattccgaacggaacgggaacaaaaatccgcatagccgtagcccaccaaatgggaaacatcgccgcggtgctggatcaaatcaaggaagccagacaagcggggaaggaaccgccgtatcactttgtagaagtcatggcctgcaggggcggatgcgtagccggaggcggtcagccttacggcgctaccgatgaaatccgcggcaagcgcgcaaagggcatttatcttgacgatgaaaaatcccagtaccgctgttcgcatcaaaatcccctcatcaaccaggtgtacaaggaattccttgaggagccgaacggccataaggcgcatgaactgctgcacaccaaatatacggaacggaaactgtatatcaggtaa

SEQ ID NO: 58916 - protein, 145 aa, Unknown
  Obtained from environmental sample
  DOMAIN (82)...(141): Iron hydrogenase small subunit
  misc_feature (1)..(145): Xaa is any amino acid
MEFKPVRGLKGVKAAEVDFGVPIPNGTGTKIRIAVAHQMGNIAAVLDQIKEARQAGKEPPYHFVEVMACRGGCVAGGGQPYGATDEIRGKRAKGIYLDDEKSQYRCSHQNPLINQVYKEFLEEPNGHKAHELLHTKYTERKLYIR

SEQ ID NO: 58917 - DNA, 1386 bp, Unknown
  Obtained from environmental sample
  misc_feature (1)..(1386): n is a, c, g, or t
atgataaacttgaaaataaacggcattccgatccaggttgaggaaggaaccacaattctcgaagccgccaagaaggcgaatattattattccttccctttgttacaatccggatcttccggcctgggcttcctgcggtatctgcatagtccgcgttgcgggtagtcccaagctgatccgcgcctgcacgactccggttgacggaggactggaaggcaaggatattattacccatgacggcgagattatagccaccaggcgcaccgtgctggaattgatcctttctaaccatcccaacgattgtctgcaatgcccccgcaacggaaactgcgaactgcagagactggccgccgaattcggcatacgagaatcaccttacaaaaaggtgtcgaacggaatccctgttgacgattccaacccggctattgtccttaacccggaaaagtgcatacgttgcggcaggtgcgtcaaggtctgccaggacgtgcagaacgtctgggcgcttgaatttctgggaagaggcattaagggaaagatcgccagcgccgccgacgcgccgttaggtgaaagtccctgcatcaagtgcggccagtgcgccgcccattgtccggttggggcaatttacgagcgggacgatacggtaaaagtctggaccgctttgcacaaccccgaactccatacggtagtgcagatcgctccggcggttcgcgttgcgttagccgaagaattcggccttaagccgggcacggtgtttaccaaaaaaatatacgccgcgctcagacggctcggtttcaagaccgtatttgacactaacttctccgccgatttgacgatcatggaggaaggttcggaactggttagacgtttgggtgaaaaaggcagcgcaatccccctgattacttcctgctgcccggcctgggttgactatatggaaaaatattacgccgacatgatccccaacttctcaacggcgaaatcgcctcagcagatgatgggcgcgatgattaaagcgtattgggcaaacaaagcgggagtcgccccggaaaaagtgtactccgtttcggtgatgccctgtaccgccaaaaaatgggaaacccaccgcaacgatgacatgaagagcgccggaaaattcctgggtaaggataccggctacgatgtggacattgtgattaccacccgcgagcttgcccgtatgatcaaacaggcaggcattgacatattgaatcttgctgatgaggaagcggacaacccgatggggccgtacaccggcgcgggcacgattttcggcgtgaccggcggcgttatggaagccgcagttcgtagcgcctactacctgtcaacaacaaggagcttccgaatgtggaattcaaaccggtacgcgggctga

SEQ ID NO: 58918 - protein, 461 aa, Unknown
  Obtained from environmental sample
  DOMAIN (4)...(68): 2Fe-2S iron-sulfur cluster binding domain
  misc_feature (1)..(461): Xaa is any amino acid
MINLKINGIPIQVEEGTTILEAAKKANIIIPSLCYNPDLPAWASCGICIVRVAGSPKLIRACTTPVDGGLEGKDIITHDGEIIATRRTVLELILSNHPNDCLQCPRNGNCELQRLAAEFGIRESPYKKVSNGIPVDDSNPAIVLNPEKCIRCGRCVKVCQDVQNVWALEFLGRGIKGKIASAADAPLGESPCIKCGQCAAHCPVGAIYERDDTVKVWTALHNPELHTVVQIAPAVRVALAEEFGLKPGTVFTKKIYAALRRLGFKTVFDTNFSADLTIMEEGSELVRRLGEKGSAIPLITSCCPAWVDYMEKYYADMIPNFSTAKSPQQMMGAMIKAYWANKAGVAPEKVYSVSVMPCTAKKWETHRNDDMKSAGKFLGKDTGYDVDIVITTRELARMIKQAGIDILNLADEEADNPMGPYTGAGTIFGVTGGVMEAAVRSAYYLSTTRSFRMWNSNRYAG

SEQ ID NO: 58919 - DNA, 1131 bp, Unknown
  Obtained from environmental sample
  misc_feature (1)..(1131): n is a, c, g, or t
atggtcagatcggcacgaggagggatgttgatttttgtgcgcaccaaacaggaaaccgcagagatagcggaacgcttggaagcaaggggctttgacgcggttcctctctctggagatttggcgcagagtttaagggaacgcaccttaaaccgcctcaaagagggcaagatagacattgtggttgcaacggatgtagccgctcgcggtttggatgtggacagaataacccacgtgctgaactacgatattccttatgataccgaatcttacgttcaccgcatagggcgcacgggacgtgccggcagggacggcaatgccatattgtttgtgaccccaagggaaacccgcttgctcactatgatagaaaaggaaacccgccaaaaaattgaaaagatgaatttaccgaccggtgagcaaatcagcaataaaagagtagccaaattcaaggaagaaattgcaaaaacggttaatgagaaaagcgatttaaaggatttcagggatttaatagaaaacctggctatggaacaagccatggatattgcggatattgccgctgcccttgcctatatgaaccaagaagagcagcctcttttccccaaaatggagcctttggaagcggatgctccgcgcaaaagggacagggaattttccgggcaaggagcaagggaaggcaggggggagagatccgagagaaggagccgtggttctgatagggggcacagagatggcagctttagcgatatggaatccccagaaagcggaatggagcgttactatcttggcgtaggcagaatggacaatgtttccccgagggacatagttggagccattgcaaacgaagcaaatttagaatcaaaatacatagggcatataaagctatttgaaaaattcagcaccgtggatttaccagaagccatgccagaagatgttctgagcatccttcgcaggatgaccataaaaaaccgcccatctaaaataaggcttatgaccgataagccccctgaacgcgaacagcgcagcgaatattttgaaaaaagcagtagggatggtcgcaaaagggacagagacagaaggcccttcaaaggagatgaccaaccgcctagaaaaacaaggcgatttggcaggcattaa

SEQ ID NO: 58920 - protein, 376 aa, Unknown
  Obtained from environmental sample
  DOMAIN (242)...(330): DbpA RNA binding domain
  misc_feature (1)..(376): Xaa is any amino acid
MVRSARGGMLIFVRTKQETAEIAERLEARGFDAVPLSGDLAQSLRERTLNRLKEGKIDIVVATDVAARGLDVDRITHVLNYDIPYDTESYVHRIGRTGRAGRDGNAILFVTPRETRLLTMIEKETRQKIEKMNLPTGEQISNKRVAKFKEEIAKTVNEKSDLKDFRDLIENLAMEQAMDIADIAAALAYMNQEEQPLFPKMEPLEADAPRKRDREFSGQGAREGRGERSERRSRGSDRGHRDGSFSDMESPESGMERYYLGVGRMDNVSPRDIVGAIANEANLESKYIGHIKLFEKFSTVDLPEAMPEDVLSILRRMTIKNRPSKIRLMTDKPPEREQRSEYFEKSSRDGRKRDRDRRPFKGDDQPPRKTRRFGRH

SEQ ID NO: 58921 - DNA, 510 bp, Unknown
  Obtained from environmental sample
  misc_feature (1)..(510): n is a, c, g, or t
atgtatatttttaacaaaacttggatttatgcgtttgtaggtgtttttgcattagctatggaccaaattaccaaattatgggcaagttcccattatctcggttggagcgtatctgtaatagggaattttcttcgctttacgcttatatataacgagaacgccgctttttccatgaagccgcaaaccattctgccttggctttcgccaactatattctttggagtactcactgttgtagcttgcctaggtgctgtttattttttcaggagcctgcacaaagaagactatatgtccaggcttgggattgttcttataatttccggcgcgcttgggaatttttgcgaccgccttcgcatcggcaaggttgttgattttatagatgtggatttcccggatatgttttatgagcgctggcccacattcaatttagcggactcatgggtcaccatagggattgcgttgcttttcatcagcagccttatacataaaaagccggatgaacagatttaa

SEQ ID NO: 58922 - protein, 169 aa, Unknown
  Obtained from environmental sample
  SIGNAL (1)...(19)
  DOMAIN (6)...(168): Signal peptidase (SPase) II
  misc_feature (1)..(169): Xaa is any amino acid
MYIFNKTWIYAFVGVFALAMDQITKLWASSHYLGWSVSVIGNFLRFTLIYNENAAFSMKPQTILPWLSPTIFFGVLTVVACLGAVYFFRSLHKEDYMSRLGIVLIISGALGNFCDRLRIGKVVDFIDVDFPDMFYERWPTFNLADSWVTIGIALLFISSLIHKKPDEQI

SEQ ID NO: 58923 - DNA, 690 bp, Unknown
  Obtained from environmental sample
  misc_feature (1)..(690): n is a, c, g, or t
atgatatttgaacgttttaatataaaaacagaaaaattaacgccttcaggtacaaatgtaaaacccggtgacgagctgatttcaggcaatgggagaggctgcgatattttcatggcatggaaggtggggcagaatattttggaacactgttcagggatagccacaaaaaccatgcagttagtcaagctggttaaagaaattaatccaaatgttactattttaaccaccagaaaaggatttcccggaaccaaagccctttcggtaaaagcggttatggcgggaggggcggtgccgcaccggctgggtttatccgaaacagtattgatttttaagcagcatgttgattatattggcggatttgacgcccttctttccagaatgcccacgttgaaaaaagaatgctgtgagaaaaaaataatcgtggaaacaaacgattataacgaagcgaagaaactctgcgaagcgggagctgacggcatacaatttgacaaaattcccgcggttaatttgaaggacattgccgaaaaactgaaaaatgaatatcccaaaatagttcttttggcggcgggaggggtaaatgaaaaaaacgccgccgaatacgcgcgatccaatatagacggcattgtaacaacaagcctttataccgcanagccgattgatattggcgttaaaataaaagataaaaaatag

SEQ ID NO: 58924 - protein, 229 aa, Unknown
  Obtained from environmental sample
  DOMAIN (53)...(224): Quinolinate phosphoribosyl transferase, C-terminal domain
  misc_feature (1)..(229): Xaa is any amino acid
MIFERFNIKTEKLTPSGTNVKPGDELISGNGRGCDIFMAWKVGQNILEHCSGIATKTMQLVKLVKEINPNVTILTTRKGFPGTKALSVKAVMAGGAVPHRLGLSETVLIFKQHVDYIGGFDALLSRMPTLKKECCEKKIIVETNDYNEAKKLCEAGADGIQFDKIPAVNLKDIAEKLKNEYPKIVLLAAGGVNEKNAAEYARSNIDGIVTTSLYTAXPIDIGVKIKDKK

SEQ ID NO: 58925 - DNA, 2430 bp, Unknown
  Obtained from environmental sample
  misc_feature (1)..(2430): n is a, c, g, or t
atggcaagaacaccgcttattccggttatacggattgatgaaaaaaagtgcgttaattgttacgcctgtatcgtaatttgtccggtaaaatactgcatggacggttcggcggaaaagttacggataaatcacgacctttgtattggctgcgggaactgcattaacgcctgtacccacaaggcgcggactctcatagacgacacaagccgtttcatggaagacctgaaacaaaacaaaaaaataatcgccgtagccgcccctgctgtcgcttcgttttttcccgatcaatttctcaacttgaacggatacctaaaatcgctgggcgttgaagctttttttgacgtgagcctgggagcggaacttaccgtcatgtcctatcttaattacatcaaggaaaaaaatccccggatggttatatcacagccatgcccggcgattgtaacttttatcgaaattaacctccctgaattgctgccctatcttgctccggcggacagtcctattctgcatattataaaattgatcaaagaatattatcctcaatataaagatcacaaagtagcggtaatttcaccctgtattgccaaacggcgggaatatgacgaaaccggtttgggagattacaacattacgatgattgcgttaaaaaatcttctgaacagtcagaatacggatctttcctcttttccgcgggtagaatataccggagtgaacgcggatcgagcggcgggatttcccattcccggaggacttttggataccgccgagcgttttgaaccgggtattaggcggcgcactgaaaaaattgaaggggtatacgcgatttatccttatttaaaagaagtatcagcgttgttgaacaccaatgccaatctgccgcttttgatagactgccttaattgcgaaaaaggctgcattggcggacccggcacgggaaacgccgataaaccgctggctatgcttgaaaaccccgtgcgaaaacgcatgatcgaactggaaagaaaccaaaaaccccaacccggaaaaaacgcgtacaaaaaatatcataatactttacaaaagtactggaagaagggcctgtataaccggagctaccttgatctttccgctaataacacgatcaaacatccaaacaagtctgaaataaatgaaattttccacagcatgaagaaatacgaaaaggaagacatatacaactgtacctgctgcggttacggaagctgcgaagcgatggcgacggcaatcttcaacaaacttaacaaaccggaaaattgcgcccattatattcttgccttgctaacggaaataactgactccgaagagtctaaccgccttcatcttcaggaacacattgaccacgcgtcacagactattgaaggaataaacagattaataaatgaactgaacgcctctatcatgtcgcagtcggaaacaatcgcccagtcctcggtcgcgaccgagaaaatgatcggttcgatcaaggaaacttcggaagtttcccgaagcaaacaggagatcataaaagggctgatagaagacaccgctaaaagccaggaagccatgcgggagacgattcaatcgattgatgacatttcaaaatcggtggaaggcatatcgcaggcgattaaaataatcagctcaatagcggccaacaccaatttattgtccatgaacgcggcgatagaagccgcgcacgccggcgaagcgggcaggggctttgcagtggttgccggcgagatacgccgcctttctgacagtaccagagaaaattcggtgaacatttccaaaacgctgaaaagcatcattgacggggtagccgttaccgaaaaacaatcggatgacaccggaacacggattaccgcaatgtcaaaagaaatcggcagtttcgctaaaaccatgtccgatctaataaatacctttggagaactgtcagcgcaaagcagtgaaattacctccgctctggataaccttcaaagtcaaagcgacatggtaaaaaccgactatgccgagatactgtcaatgacggataaactacgcatggcaatgattgatttgactatgctgtccaagaaaaaagtccttgtaattgatgatgaggaaaccgtccttattatgacaaaaaacgtcctgaaaaatgattataacgttaccacaatcaattccggcaaggcggctttagaatatttcttaaaggggtatatcccccatttgattttactggatttgtatatgcctgaaatgggcggctgggatacctttctcagaattcgcaatataagccaattacacaacattccgatagcgatatacacgacatcgaacgacccgaaagacaagatcaaagcggaggaacttggcgcggttgaattcatacacaagccgctcaataaagccgaactgcttgaaaaagtaggaagattgttgaggtaa

SEQ ID NO: 58926 - protein, 809 aa, Unknown
  Obtained from environmental sample
  DOMAIN (68)...(312): Iron only hydrogenase large subunit, C-terminal domain
  misc_feature (1)..(809): Xaa is any amino acid
MARTPLIPVIRIDEKKCVNCYACIVICPVKYCMDGSAEKLRINHDLCIGCGNCINACTHKARTLIDDTSRFMEDLKQNKKIIAVAAPAVASFFPDQFLNLNGYLKSLGVEAFFDVSLGAELTVMSYLNYIKEKNPRMVISQPCPAIVTFIEINLPELLPYLAPADSPILHIIKLIKEYYPQYKDHKVAVISPCIAKRREYDETGLGDYNITMIALKNLLNSQNTDLSSFPRVEYTGVNADRAAGFPIPGGLLDTAERFEPGIRRRTEKIEGVYAIYPYLKEVSALLNTNANLPLLIDCLNCEKGCIGGPGTGNADKPLAMLENPVRKRMIELERNQKPQPGKNAYKKYHNTLQKYWKKGLYNRSYLDLSANNTIKHPNKSEINEIFHSMKKYEKEDIYNCTCCGYGSCEAMATAIFNKLNKPENCAHYILALLTEITDSEESNRLHLQEHIDHASQTIEGINRLINELNASIMSQSETIAQSSVATEKMIGSIKETSEVSRSKQEIIKGLIEDTAKSQEAMRETIQSIDDISKSVEGISQAIKIISSIAANTNLLSMNAAIEAAHAGEAGRGFAVVAGEIRRLSDSTRENSVNISKTLKSIIDGVAVTEKQSDDTGTRITAMSKEIGSFAKTMSDLINTFGELSAQSSEITSALDNLQSQSDMVKTDYAEILSMTDKLRMAMIDLTMLSKKKVLVIDDEETVLIMTKNVLKNDYNVTTINSGKAALEYFLKGYIPHLILLDLYMPEMGGWDTFLRIRNISQLHNIPIAIYTTSNDPKDKIKAEELGAVEFIHKPLNKAELLEKVGRLLR

SEQ ID NO: 58927 - DNA, 1464 bp, Unknown
  Obtained from environmental sample
  misc_feature (1)..(1464): n is a, c, g, or t
gtgcgttttatttattcgtgggatgattacgatgtattccgcaaagtgcctaaaaatatgcccaggcaggacgagcttaccaaatacctgcgcttccctatcactatggtgcctgacccgtgggagagggattcaagttacgcccgccaccacgaggttgatgttgaggggacgcttcccattgtgggaatttcacccgaatttatttatcaggcggaacgttacagggcgtcgcgttacgcgcaaggcataagaaaagcgcttgagaagcgcgaggtgttaaaagaaatactggataaattccgcgatgaggagcataagattcagggcgagtggtggcctgtcagcgttttttgcgaaaagtgcaataaggacgaaactgaaattgaaagctgggacggcgattggggattaagctaccgctgcaactcatgcggaaacaaggaaaaacttgatattcaaaacgcgaaaggaataaagctgtcgtggcgcgtagactggcctatgaggtgggaatacgagaaagttgattttgagcctgccggcaaggatcatcacagccaggggggaagttttgataccgcgcgccatgtgtgcaaagacgtgtacaactgggaagcgcccgtaacttttcgctacgattttatcggcacaaaggggatagacggaaaaatgtcctcttcctcaggaaatgtgattaccataggggacgtgttaaaaatttacacgccccaagtcgcgcgttatctttttgccggaaccaggcccaatacggaatttgtcatttcatttgatcttgacgttataaaaatttacgaagactacgataagaccgaacgaatcgcgtggaaaatggaagcagcaaaagacgaggccgtatatcaaaaagaaaaacgcatttatgaactatcacagattagcgtagacgggaaaactccacgcgttgaagacatgcagacgccgtatcagattcctttccgtcatttgtgcaatttgattcaaatagccgacggcggcattgaaaaagcgcttgccgatttagccgccacagaaggcggcccaaaaaaagaacaactgcccgcccttaaaacaagggctgaatgcgccaaatattggatagagaactattcaccagaagatttccgtttccgtttactgcccgcaggcggtgtctcagccctgtccgcacaggagaaagcaaagctccgctctctttcagaggaagaaaaaaacgcggtacgcatcctgcgcgacgacgttatcaataagattgaggaattcggcgacgacaaagtttgcagtacggcggtttacgccgccgccgaaaaagccggagtagacggcaaagttcttttcggcgcggcgtatcaggcgctaataggaaaagatcagggtccgcgcctggcaagtttcttaagatcgataaataagcagaggcttttagagattcttaaaaattattag

SEQ ID NO: 58928 - protein, 487 aa, Unknown
  Obtained from environmental sample
  DOMAIN (1)...(484): tRNA synthetases class I (K)
  misc_feature (1)..(487): Xaa is any amino acid
MRFIYSWDDYDVFRKVPKNMPRQDELTKYLRFPITMVPDPWERDSSYARHHEVDVEGTLPIVGISPEFIYQAERYRASRYAQGIRKALEKREVLKEILDKFRDEEHKIQGEWWPVSVFCEKCNKDETEIESWDGDWGLSYRCNSCGNKEKLDIQNAKGIKLSWRVDWPMRWEYEKVDFEPAGKDHHSQGGSFDTARHVCKDVYNWEAPVTFRYDFIGTKGIDGKMSSSSGNVITIGDVLKIYTPQVARYLFAGTRPNTEFVISFDLDVIKIYEDYDKTERIAWKMEAAKDEAVYQKEKRIYELSQISVDGKTPRVEDMQTPYQIPFRHLCNLIQIADGGIEKALADLAATEGGPKKEQLPALKTRAECAKYWIENYSPEDFRFRLLPAGGVSALSAQEKAKLRSLSEEEKNAVRILRDDVINKIEEFGDDKVCSTAVYAAAEKAGVDGKVLFGAAYQALIGKDQGPRLASFLRSINKQRLLEILKNY

SEQ ID NO: 58929 - DNA, 879 bp, Unknown
  Obtained from environmental sample
  misc_feature (1)..(879): n is a, c, g, or t
ttgatttattacatttttgttaaggaaggaaatattgtggactggcttgataaatttaatgccgtaattgactacattgaagaaaaccttgacgctgaaattgaatataaaaccctcgcaagacttgcctgttgttcagaatttcacttttcaagaatgttttcctctttaataggcatttcgctctctgaatatatcaggcgtagacggcttacaaaagccgcatttgaaatccaaacaggcaatgaaaaaataattgatattgccctcaaatacggctatgagtctccagatgcatttacaagggcttttcgcttgttgcatggtattacacctatagccgcaaaggaaaatggtacgaaactaaaagcttatccgcgtctttccttccaaataactatcagaggagacttagaaatggagtacaggattgaaaacattgattttgaggttcgttttgtcgggaaaggatttcaagttaaaacatcaagtgcatttaggaaaattcccgaacttttgcgaaaagccaaaaaagacggatttcaacaaaaattagttgatatgtcttgggaaagcccaaaatgctcgcttcaaagccttgttggggtttgtggaacagaagccgcaattatggatgaaaagtttacttatttttatggagtacgctatgacggtaaaataccaaaagacatggaagaattaataattcagccatgtgtatatgcagtatttccaaatgttgttgacgcatggaaacggctttattcagagtgggttcccacttctggctatgaacttgctaattcaccatgcattgaacattatttgggaccagggcataaggtcaaacatgaactttgggttcctataattgaataa

SEQ ID NO: 58930 - protein, 292 aa, Unknown
  Obtained from environmental sample
  DOMAIN (73)...(117): Bacterial regulatory helix-turn-helix proteins, AraC family
  misc_feature (1)..(292): Xaa is any amino acid
MIYYIFVKEGNIVDWLDKFNAVIDYIEENLDAEIEYKTLARLACCSEFHFSRMFSSLIGISLSEYIRRRRLTKAAFEIQTGNEKIIDIALKYGYESPDAFTRAFRLLHGITPIAAKENGTKLKAYPRLSFQITIRGDLEMEYRIENIDFEVRFVGKGFQVKTSSAFRKIPELLRKAKKDGFQQKLVDMSWESPKCSLQSLVGVCGTEAAIMDEKFTYFYGVRYDGKIPKDMEELIIQPCVYAVFPNVVDAWKRLYSEWVPTSGYELANSPCIEHYLGPGHKVKHELWVPIIE

SEQ ID NO: 58931 - DNA, 504 bp, Unknown
  Obtained from environmental sample
  misc_feature (1)..(504): n is a, c, g, or t
atgaaacagaaaggattttttgatgaagccgacaggctaaagaagttaagcgagctgggtgattcattggaaaaactcaatgaacacatagaatggaatgattttcaaaggccgttaagcagagcgtttgaaaaagaagcgaaggggccgggcggacggccgccatttgattatgtaatgatgttcaagatattaatattacaaaaaatatataacataagcgatgaccagacagaataccagataaacgacaggctgagttttcaacggtttatagggatacaattatacgacactgtacccgacgcaaaaacgatatggcattttaaggaagtattgaaagaaacggacgtactggaaaaaatatttaagatgtttacagaaaagcttgagaaaaaaggggtaataacccaaagcggaagcatagtggacgcgacatttgtagaagcgccgaaacaaaggaatacgaaagaagaaaacaaagaaataagggagggaaaataa

SEQ ID NO: 58932 - protein, 167 aa, Unknown
  Obtained from environmental sample
  misc_feature (1)..(167): Xaa is any amino acid
MKQKGFFDEADRLKKLSELGDSLEKLNEHIEWNDFQRPLSRAFEKEAKGPGGRPPFDYVMMFKILILQKIYNISDDQTEYQINDRLSFQRFIGIQLYDTVPDAKTIWHFKEVLKETDVLEKIFKMFTEKLEKKGVITQSGSIVDATFVEAPKQRNTKEENKEIREGK

SEQ ID NO: 58933 - DNA, 1485 bp, Unknown
  Obtained from environmental sample
  misc_feature (1)..(1485): n is a, c, g, or t
ttggaaatcctcgacggcgccgaaaagggtatgtccattgactccctgtcgcagatactgcggactaaagcgagacccagcgtggatatcgtatcagaaaagatatccattgttatcgaacataagcgggaattgctgaaacaggccaacaaaaacggcgacgcaattacggcgaaactcaccgtgattatggttctgattatcatcgtgggcgccggcatttccatatacttctccctttacatcgcctccttggtcggcaaacccatcagccgtctctccgaattgatagccgattggagccgggggcgtcttgacaacaagctcgaaatcaaggggcgcacggatgagataggaataatggccgaggccgcgaacgaatgggtggacgacctcaaaaagctcattttatcggacggcggcaaggttctgaaagcggcggcgggcaaagacctgacgcagaggcttacggttcattatcacggcgaatacggcattatgaaaaccaatataaacgccgtgatcgagagcttagacaacgctctcaaccatgtacgcgaggccgcgacgcacgtgtcgagcgagatcgcccaaatctcggccggggcgcagagtctggcgcaaggttcaagccagcaggcgagttcccttgagcaagtgtcggcgagcctcgaccagatatccgccatgactaggcagaacgcggaagactccaactcggctaagaatttggcggaagaggcgcgcagcgccgccaacgagggggacgcctccatgaaaaagatggccgaggctatcagagagatcaagcaatcgtccgacaacaccgcaaaaattatcaagtctatagacgacatcgcttttcagaccaatctgctttcgctgaacgcggcggtggaagcggcccgcgccggagaggcaggaaagggcttcgcggtcgtggccgaggaggtgcgcaacctcgcgatgcgcagcgccgaagcggctaagaacacggcgaacatgatcgaggagtcggtgaagaacgccgacggcggcgtcaagatcacggaagaggtagccaagtcgctcaatcagatcgtagaccgcgtgggcaaggtgggcaaccttatagccgatatcgccgccgcctccaacgagcaggctttgggcatagagcaggtgaacaccgccgtagcgcagatgaaccaagtcacccaaagcaacgcggccaactcggaagagtcggccagcgcctccgaggagctctccagccaagcggcggagttgtcaaacatggtgaacgagttcaaactgagcgccgtcggcagcggggccggcggaaggcgcggtctcccgccgccaagacatcaacaacggccctccgtcgcggctattaccgacaaatcgaagaaggcggccgcgggccagctctccaaacccgcgaaagcggtgaaggcggaggaggtcattccgttggatgaaaacgaattaaacgaattttga

SEQ ID NO: 58934 - protein, 494 aa, Unknown
  Obtained from environmental sample
  DOMAIN (64)...(134): HAMP domain
  misc_feature (1)..(494): Xaa is any amino acid
MEILDGAEKGMSIDSLSQILRTKARPSVDIVSEKISIVIEHKRELLKQANKNGDAITAKLTVIMVLIIIVGAGISIYFSLYIASLVGKPISRLSELIADWSRGRLDNKLEIKGRTDEIGIMAEAANEWVDDLKKLILSDGGKVLKAAAGKDLTQRLTVHYHGEYGIMKTNINAVIESLDNALNHVREAATHVSSEIAQISAGAQSLAQGSSQQASSLEQVSASLDQISAMTRQNAEDSNSAKNLAEEARSAANEGDASMKKMAEAIREIKQSSDNTAKIIKSIDDIAFQTNLLSLNAAVEAARAGEAGKGFAVVAEEVRNLAMRSAEAAKNTANMIEESVKNADGGVKITEEVAKSLNQIVDRVGKVGNLIADIAAASNEQALGIEQVNTAVAQMNQVTQSNAANSEESASASEELSSQAAELSNMVNEFKLSAVGSGAGGRRGLPPPRHQQRPSVAAITDKSKKAAAGQLSKPAKAVKAEEVIPLDENELNEF

SEQ ID NO: 58935 - DNA, 630 bp, Unknown
  Obtained from environmental sample
  misc_feature (1)..(630): n is a, c, g, or t
ttggctggagagctcctcggaggcgctggccgactcttccgagttggccgcgttgctttgggtgacttggttcatctgcgctacggcggtgttcacctgctctatgcccaaagcctgctcgttggaggcggcggcgatatcggctataaggttgcccaccttgcccacgcggtctacgatctgattgagcgacttggctacctcttccgtgatcttgacgccgccgtcggcgttcttcaccgactcctcgatcatgttcgccgtgttcttagccgcttcggcgctgcgcatcgcgaggttgcgcacctcctcggccacgaccgcgaagccctttcctgcctctccggcgcgggccgcttccaccgccgcgttcagcgaaagcagattggtctgaaaagcgatgtcgtctatagacttgataatttttgcggtgttgtcggacgattgcttgatctctctgatagcctcggccatctttttcatggaggcgtccccctcgttggcggcgctgcgcgcctcttccgccaaattcttagccgagttggagtcttccgcgttctgcctagtcatggcggatatctggtcgaggctcgccgacacttgctcaagggaactcgcctgctggcttga

SEQ ID NO: 58936 - protein, 209 aa, Unknown
  Obtained from environmental sample
  misc_feature (1)..(209): Xaa is any amino acid
MAGELLGGAGRLFRVGRVALGDLVHLRYGGVHLLYAQSLLVGGGGDIGYKVAHLAHAVYDLIERLGYLFRDLDAAVGVLHRLLDHVRRVLSRFGAAHREVAHLLGHDREALSCLSGAGRFHRRVQRKQIGLKSDVVYRLDNFCGVVGRLLDLSDSLGHLFHGGVPLVGGAARLFRQILSRVGVFRVLPSHGGYLVEARRHLLKGTRLLA

SEQ ID NO: 58937 - DNA, 795 bp, Unknown
  Obtained from environmental sample
  misc_feature (1)..(795): n is a, c, g, or t
ttgggcagagagcaaaagcaaaggcaaggcgcaacggagaaagaagagggggcggcaaatgtaaatgaaagcaataccaggactacaacgggcacctttatcccggcttgcattgcaaaaggccggaggggcatgggcgcgaagatggtcgtcgtggcgtccgatagcagggacgtgcagaattggctttaccgctatttggagccttacgggctaaagggctatgctttttaccttgtggaaagcgaagaggtattttccgaatacgtggggaagattgacacggtaatggcatttgttgaggatattttttttggcgaaaggacggttggaatgctgggcaatatccgaaagcaatacccgaagctgaagcttgcgctgttttcggcttccgttttgcctttgggtttagcgaccagatatttgtactggagcatgggcagctacctttcattgcgggatagcgagaaggaaatcagggaagcagtggaagcgattttcgggaaacggctggctgtgccatcgtacttaataggttgtcttgatgaatatggacgcctttcggatagaaaaccacatcttactcaccgggaggttgagattgtccgctgtaccggagaagggaagacaggcaaagaaacggcatcggttttgatgctgagccggaggacggtgcagaaccatatttcaaatatctaccagaaattcgggatccgtaacatggtgggggttcttaagctggcggtgtctaaggggatattgccggtagaggagcttatgagttttagggattag

SEQ ID NO: 58938 - protein, 264 aa, Unknown
  Obtained from environmental sample
  DOMAIN (191)...(248): Bacterial regulatory proteins, luxR family
  misc_feature (1)..(264): Xaa is any amino acid
MGREQKQRQGATEKEEGAANVNESNTRTTTGTFIPACIAKGRRGMGAKMVVVASDSRDVQNWLYRYLEPYGLKGYAFYLVESEEVFSEYVGKIDTVMAFVEDIFFGERTVGMLGNIRKQYPKLKLALFSASVLPLGLATRYLYWSMGSYLSLRDSEKEIREAVEAIFGKRLAVPSYLIGCLDEYGRLSDRKPHLTHREVEIVRCTGEGKTGKETASVLMLSRRTVQNHISNIYQKFGIRNMVGVLKLAVSKGILPVEELMSFRD

SEQ ID NO: 58939 - DNA, 1335 bp, Unknown
  Obtained from environmental sample
  misc_feature (1)..(1335): n is a, c, g, or t
gtgtatgtgtacggttcgcatgacaaattcaacggccatgcttattgcctgaacgattatgtatgctggtccgcgtccgaagacgatttaagcgactggcgttatgaaggggtgatatatccaaaaacaaacgatccctttaataaagatggaagcatgtgcctttacgcgccggatgtgacgcttggacctgacgggcggtactatttgttttatgtgcttgacaaggtggatgtcgtgtccgtggcggtttgcgattcccctgccggggaatacaaatttcacggttatgtgcggtatcctgacgggaccatgcttggcaggcggaaaggagatcagccgcagttcgatcccggcgttataacggaaggagaaaaaacatacctctatacgggtttttgcggctatgacacaaaaaccaggataggcgcgacggcggtaacgttggggccggatatgctcactatacttgatgatccggttcttgtcgctcccggagtatacaacagcaagggcacaggttttgaaggacatgaatttttcgaagctccgtccataagaaaacgcggcgacacatattattttatctattcatcaatagcaatgaacgagctctgttacgcgaccagcaaaagcccgacaaaggattatgtatacggcggtgttattatcagcaatgccgatttgcatatcggttcatataaacctgtagggaaacccatgaactgcggcggaaacaaccacggaagtatcatcgaaataaaaaataaatggtatattttttaccataggcataccaacgggcatgagttcagccgtcaggggtgtcttgagccgatagaaataaaagcggacggttctattccgcaggtggagacgacttcgtgcggaccaaacggcaaaccgcttatcggcaagggagaatatccggcatatattgcgtgtaacatattttccgttgataataatcggcagttagaaagacaatggccgcttcacaaccagtctttgccgaaaatttcgcaggacggaaaggacggcgatgaagaagcaggttatgtaacaaatatttcagacaatcacggtattggttttaagtattttgattgtaaaggaattaaaaaaataaagataaaaacacgcggttacaacaacggtgtctttcacgttaaaacaaaatgggacggcgagtctttagcgtgcataaagattgaatacagcaatatttgggtggaatattcttcagagataaaccttcctgacggaatacacgcgctttactttatttataaaggtaatggatacgcttccatagcttcctttactttggaataa

SEQ ID NO: 58940 - protein, 444 aa, Unknown
  Obtained from environmental sample
  DOMAIN (4)...(288): Glycosyl hydrolases family 43
  misc_feature (1)..(444): Xaa is any amino acid
MYVYGSHDKFNGHAYCLNDYVCWSASEDDLSDWRYEGVIYPKTNDPFNKDGSMCLYAPDVTLGPDGRYYLFYVLDKVDVVSVAVCDSPAGEYKFHGYVRYPDGTMLGRRKGDQPQFDPGVITEGEKTYLYTGFCGYDTKTRIGATAVTLGPDMLTILDDPVLVAPGVYNSKGTGFEGHEFFEAPSIRKRGDTYYFIYSSIAMNELCYATSKSPTKDYVYGGVIISNADLHIGSYKPVGKPMNCGGNNHGSIIEIKNKWYIFYHRHTNGHEFSRQGCLEPIEIKADGSIPQVETTSCGPNGKPLIGKGEYPAYIACNIFSVDNNRQLERQWPLHNQSLPKISQDGKDGDEEAGYVTNISDNHGIGFKYFDCKGIKKIKIKTRGYNNGVFHVKTKWDGESLACIKIEYSNIWVEYSSEINLPDGIHALYFIYKGNGYASIASFTLE

SEQ ID NO: 58941 - DNA, 648 bp, Unknown
  Obtained from environmental sample
  misc_feature (1)..(648): n is a, c, g, or t
atgagtttttgggcggtaacgctaaggttattacagggcttccagaccacatttcttctttttgggctgaccctcctgttggcgttaccgctcggacttgtaatttcattcggttccatgtcaaggtttctcccgcttaaatttattgtcaaagtttttgtatggatgatccggggcgtgccgctcatgctccagatatttatcgtgttttatgttcccggctttgtctttggcgcgccaatatcgtcgcggatcaacgcggcgattatcgccttttccattaactacgcctgctatttcagcgaaatattccggggcggaatagaaagcatttcccacagccagtacgaggcggggcaggtactggggatgtcaaagtcccaggtgtttttccgcgtcgtgctgctccaggtgataaaacggattaccgcccccatgtcaaatgaaatcatcacccttgtaaaggataccgcgctggcccgcgtgataatggtagtcgaggtaataaaggtcgccgagacttttgccgcgaccagggcgatgatatggcccctgttctacacgggcgcgttttatttgttgtttgtgggtatcctcactttgttgtttggatatatagaaaaaaaattgagttatttcagggcctag

SEQ ID NO: 58942 - protein, 215 aa, Unknown
  Obtained from environmental sample
  DOMAIN (10)...(212): Binding-protein-dependent transport system inner membrane component
  misc_feature (1)..(215): Xaa is any amino acid
MSFWAVTLRLLQGFQTTFLLFGLTLLLALPLGLVISFGSMSRFLPLKFIVKVFVWMIRGVPLMLQIFIVFYVPGFVFGAPISSRINAAIIAFSINYACYFSEIFRGGIESISHSQYEAGQVLGMSKSQVFFRVVLLQVIKRITAPMSNEIITLVKDTALARVIMVVEVIKVAETFAATRAMIWPLFYTGAFYLLFVGILTLLFGYIEKKLSYFRA

SEQ ID NO: 58943 - DNA, 786 bp, Unknown
  Obtained from environmental sample
  misc_feature (1)..(786): n is a, c, g, or t
atggttattctggaagcgcggaacatcgcgaagcggtttgggccaactcatgtgttaaacgacatcaatttcacgctggaggagggcgaagtccttgccataatcggctcctcgggcagcggaaaaaccacgctcctgcgctgcctgaattttctggaacggctggattccgggcgtattatcctgcgcggcgaaacattgtatgacgcgtccgagaaagtccattatgacgaacagaccatcaggcgaaagaggcttcatttcgggcttgttttccagtccttcaacctgttcccccaatacacggcgtttgacaacgtggtgcttgcgcgcagactggcggcgcaaagacagccggatttcaataaaaataaaaaagcggtttttgaggaaatagaccgggaaggaatgcagcttctggatcaaatcgggcttgccgccaaaagggatttctacccctatcagttatccggcggtcagcagcagagagttgccattgccagggctttggcgcttaaaccggatattctgtgttttgacgagccgacttccgcgcttgatcctgagctgacgggcgaggtattgaaagttattcggggacttgctgaaaagaacacgacaatgatcatcgtgacgcacgagatgcaattcgcccgtcaggttgccgatacagtcttgtttatggacgagggacttgtggtcgaatatggttccccgcaggatgtttttgataatccatcaagcgagcgtatcaaacgtttccttgagcattatgcgtcagtttaa

SEQ ID NO: 58944 - protein, 261 aa, Unknown
  Obtained from environmental sample
  DOMAIN (29)...(231): ABC transporter
  misc_feature (1)..(261): Xaa is any amino acid
MVILEARNIAKRFGPTHVLNDINFTLEEGEVLAIIGSSGSGKTTLLRCLNFLERLDSGRIILRGETLYDASEKVHYDEQTIRRKRLHFGLVFQSFNLFPQYTAFDNVVLARRLAAQRQPDFNKNKKAVFEEIDREGMQLLDQIGLAAKRDFYPYQLSGGQQQRVAIARALALKPDILCFDEPTSALDPELTGEVLKVIRGLAEKNTTMIIVTHEMQFARQVADTVLFMDEGLVVEYGSPQDVFDNPSSERIKRFLEHYASV

SEQ ID NO: 58945 - DNA, 1017 bp, Unknown
  Obtained from environmental sample
  misc_feature (1)..(1017): n is a, c, g, or t
ttgatgcaagccatagacttgtacaataaattgcattccgtgcagaatggaaccgtactttgccagtattcaatggaaacctgtgaaaggttggttggaattataaacgagataaacgaattgaaaaaagaaaggaatgcggcaatcctcgctcacagctatgttgcaccagaaattgtccttggcgttgcagattacagcggagattcttaccaactcagcaaaaatgcaatggaaactcaggcacaaacgataattttcgctgctgtggaatttatgggcgaaacagcgaaaattttaaatccaagtaaaagagtgcttataccaggctcaaacccagggtgcagccttgcaagcagcataacaggtgaacaagttaaagatttgcgaaataaatataaagagcacacatttgtgtgctacataaacacaactgcagacgttaaagccgcttgtgatgtttgcgttacaagctcaaatgtgctgaaaatagttagcaacattccaaacgataaaattgtgtttttgccagacagacttatgggcgaaaatttgaaaaatgaattggaaaaaatgggcataaaaaaagaactcgtgctgcactctggcacctgctatgttcacgagcaatacgaccctgatttggtaaaatacttcagaattcaaaacgaagggcttcgcattgttagtcacccagaatgcagcccgggcgttgccatgctaagcgattttgtgggaagcacatctcaaatgctggactatattcgcagccttccagaaaatgctcccgtgctgcttttaacggaatgtgggctaagtgcccgcttgcaaagcgaattgccaagccgccgctttataggcagttgcaatatgtgcaaatacatgaaaagcaattctctggaaaatattctgcaaaccttgaaagaaccagaaaaagcaaaagaaattaaactgaacacaaacgttttgacaaatgcaaaacgctgcattgataatatgtttaaatatgcggagtag

SEQ ID NO: 58946 - protein, 338 aa, Unknown
  Obtained from environmental sample
  DOMAIN (34)...(336): Quinolinate synthetase A protein
  misc_feature (1)..(338): Xaa is any amino acid
MMQAIDLYNKLHSVQNGTVLCQYSMETCERLVGIINEINELKKERNAAILAHSYVAPEIVLGVADYSGDSYQLSKNAMETQAQTIIFAAVEFMGETAKILNPSKRVLIPGSNPGCSLASSITGEQVKDLRNKYKEHTFVCYINTTADVKAACDVCVTSSNVLKIVSNIPNDKIVFLPDRLMGENLKNELEKMGIKKELVLHSGTCYVHEQYDPDLVKYFRIQNEGLRIVSHPECSPGVAMLSDFVGSTSQMLDYIRSLPENAPVLLLTECGLSARLQSELPSRRFIGSCNMCKYMKSNSLENILQTLKEPEKAKEIKLNTNVLTNAKRCIDNMFKYAE

SEQ ID NO: 58947 - DNA, 432 bp, Unknown
  Obtained from environmental sample
  misc_feature (1)..(432): n is a, c, g, or t
gtgggcaaaactggaactacaaatgactataccgatgcatggtatataggttttaccaancaatacacaatgggcgtgtggattggaaccgatgattttttgccgatggggccaggccacacaggcacagaagatgcactgccggtgtggttgaattctatgccggaaattcataaaaatttgccagaactgcaatttccagttcctcagggagttatttcaagaaaaatttgcaactacactggcaaaatagctggctcatattgcaatcaattcacaggttgcctttacaccgctgcatctccagaaattgaggattgcgatggcaagcattttgagcaaccaaaagaaagcaatgccaccatattcagcaatacttccactccagctgctcctagtaacaaaaccgccaaggcaaggcaggtgttttga

SEQ ID NO: 58948 - protein, 143 aa, Unknown
  Obtained from environmental sample
  misc_feature (1)..(143): Xaa is any amino acid
MGKTGTTNDYTDAWYIGFTXQYTMGVWIGTDDFLPMGPGHTGTEDALPVWLNSMPEIHKNLPELQFPVPQGVISRKICNYTGKIAGSYCNQFTGCLYTAASPEIEDCDGKHFEQPKESNATIFSNTSTPAAPSNKTAKARQVF

SEQ ID NO: 58949 - DNA, 1296 bp, Unknown
  Obtained from environmental sample
  misc_feature (1)..(1296): n is a, c, g, or t
ttggctggcggcaattacggttttcagtccgctgggcagttctattttgggagacctttggatagccttaccattccagagattgccgtactaacagggatgctccaacgccctgaggcataccgcccagaccgcaaacccgaagccgcccttgcccgcaggaacacggttctatacgccatgatggatgctggctatatttcgcgaacggattacgaaggctatgttaaaacccctttaaatgtggaagagcgagctgatgtttccgttgctccatattacatggaggaaattcgcaaatatttagagaataaatacggcgaaaattccctctattcggatggtatttccgtttatagcaccatagaccctgagatacaaaaaatagttgaaaatgcagcttatgagcaacggattaaagttgataggcggcttcgtttgcgtactatttcaaggcttgggattcctaaaaaatatgatatgactagcgacagcatattggtgcattttgattccatctatgcggatttcacaaaaaattatttggaaaaagataccgcaaaaagaatttatccagattcattgcgctatcgccaagggcagatagctgtgattttgatagagaacgaaactggagctattagagccatggtgggcgggaaagattttaacgagagcaaatggaaccgcgctgtgcaaactttaaggcaaccaggctcttcgtttaagccatttgtctatgcagttgctatggacaacggagcttcgccttgtgactcggtaaacgatgccccaataacaataccagaccctctggatacggcaaaatactggcgcccgggcaactactcaaaagaattcaaagggatgatgacttatcgcagagctttggcactttcgcaaaatttgcccgccatacaagttggtatgaaatacggcttaaattccgtggtgaactatgcacgcaaattcggtgttaaaaaagctccccttcaagcagtgcctagccttgcactcggctcggtaggagcaacccttatggaaatgaccagtgcctacacagtttttccaaacggcggaacccgaattgaaccgtattatatagaagccatagtagggaaaaacggagaggttatagaaactaactacaaagttgagcatgaagttttgaaaaagcccgccgcatatataatggtttccatgctgcaatctgtaaatactggcggcactgcggcaaaggtttggggaagcggatttcaccatccaagcggtgggcaaaactggaactacaaatga

SEQ ID NO: 58950 - protein, 431 aa, Unknown
  Obtained from environmental sample
  DOMAIN (202)...(431): Penicillin binding protein transpeptidase domain
  misc_feature (1)..(431): Xaa is any amino acid
MAGGNYGFQSAGQFYFGRPLDSLTIPEIAVLTGMLQRPEAYRPDRKPEAALARRNTVLYAMMDAGYISRTDYEGYVKTPLNVEERADVSVAPYYMEEIRKYLENKYGENSLYSDGISVYSTIDPEIQKIVENAAYEQRIKVDRRLRLRTISRLGIPKKYDMTSDSILVHFDSIYADFTKNYLEKDTAKRIYPDSLRYRQGQIAVILIENETGAIRAMVGGKDFNESKWNRAVQTLRQPGSSFKPFVYAVAMDNGASPCDSVNDAPITIPDPLDTAKYWRPGNYSKEFKGMMTYRRALALSQNLPAIQVGMKYGLNSVVNYARKFGVKKAPLQAVPSLALGSVGATLMEMTSAYTVFPNGGTRIEPYYIEAIVGKNGEVIETNYKVEHEVLKKPAAYIMVSMLQSVNTGGTAAKVWGSGFHHPSGGQNWNYK

SEQ ID NO: 58951 - DNA, 1419 bp, Unknown
  Obtained from environmental sample
  misc_feature (1)..(1419): n is a, c, g, or t
atgtatgacctaaaatcctcaaaagctgctgaatttatagataatcaggaaattttagatactttgagatatgctgaggaaaataaggataaccgtgaattgctctcacagataataagcaaggcaagggaatgtaaggggctgtctcataaggaagcggctgttctgctggaatgttcttcggaggaacacaatagagagattgaggagctggcaaagcaaataaaagaaaagttttacggcaagagaattgtgatgttcgcaccactctacctgtccaattactgcgtgaatgaatgtgtttattgcccataccatttgaataatcacaacatcaggagaaaaaaattatcgcaggaagaaattcaacgagaggtgattgccttgcaagatatggggcataagcgcctcgctttggaaacaggtgaagacccaactcataaccccattgaatatgttttggaaagcataaaaaccatttatggcattaaacataaaaatggagcaatccgccgagtcaatgtgaatatagcagcgacaagcgttgagaattacaaaaaattaaaagatgctggcataggtacttatatcctatttcaagaaacatacaacagggaaagttatttaaaactgcatcccggaggtccaaagcgcaattacgactaccacacagaagcgatggacagggcaatggaggctggcattggtgatgttggaattggtgtgctgtttgggctttctacatataaatatgattttgcaggtctgcttatgcacgctgaacatttggaagcgacttttggagttggtccgcacaccataagcgttcctcgtattcgcgcagcggatggtataaatccaaaaaaatttgaaaacgcaatcaacgatgatatctttgctaaaattgtagcggtgattcgcatttccgttccatatacgggaatgattatttccacaagggaaagcgaacaggcgagagggagagttttagcacttggcgtatcgcagataagcggtggctcttctacgagcgtaggcggctatgcggaaaaagaaaaagcagaagacaacacggcccagtttgatgtgaacgataaccgccctttagacgaagttataaattggctgctcaaactcggatatgttcctagtttttgcaccgcctgctatcgccaagggcgcactggcgaccgctttatgaaactccttaaaagtgggcaaatagcatatacctgcgaggcaaattctctgctgacattaaaggaatatttagtggattacgcaagcgcagataccaaggcaaacggagaagcggtgataaacgaacagttgaagcatatcccaagcccaaaaataagcgaaaaaacccgcgagtatttgcagcaaatcagcgaagggaaaagggactttagattttaa

SEQ ID NO: 58952 - protein, 472 aa, Unknown
  Obtained from environmental sample
  DOMAIN (90)...(263): Radical SAM superfamily
  misc_feature (1)..(472): Xaa is any amino acid
MYDLKSSKAAEFIDNQEILDTLRYAEENKDNRELLSQIISKARECKGLSHKEAAVLLECSSEEHNREIEELAKQIKEKFYGKRIVMFAPLYLSNYCVNECVYCPYHLNNHNIRRKKLSQEEIQREVIALQDMGHKRLALETGEDPTHNPIEYVLESIKTIYGIKHKNGAIRRVNVNIAATSVENYKKLKDAGIGTYILFQETYNRESYLKLHPGGPKRNYDYHTEAMDRAMEAGIGDVGIGVLFGLSTYKYDFAGLLMHAEHLEATFGVGPHTISVPRIRAADGINPKKFENAINDDIFAKIVAVIRISVPYTGMIISTRESEQARGRVLALGVSQISGGSSTSVGGYAEKEKAEDNTAQFDVNDNRPLDEVINWLLKLGYVPSFCTACYRQGRTGDRFMKLLKSGQIAYTCEANSLLTLKEYLVDYASADTKANGEAVINEQLKHIPSPKISEKTREYLQQISEGKRDFRF

SEQ ID NO: 58953 - DNA, 1344 bp, Unknown
  Obtained from environmental sample
  misc_feature (1)..(1344): n is a, c, g, or t
atggcagtaaaagataaatccctgttttcgttgtcttggccattagttgtcacttttggcataggcatgtcgctccccatgttggatagctggtttttgtcgcgccgttcagtggaagcagcggcaggcgttggtgcgttgatgccagttataggtaccctattcatggctatacacgcctttgcgcaagcaggggcaagcatagcatcgcaatttttaggtggcaataaaccaagacacgctcaggtaactcaaacgattgtcataacgggcagtgcaaccctagggcttgcgatgggtgctatactttggttttcaactcccacgatagtgtctctgatggggcttagtggagaacctgcggacgccgcgattaaatttctgcgcacaatctcgccagcggtgatattcagggctttgcagggaacgctcaccagccttgtggcaacgcacggttacacattgtggaatttgtttgcgaacatcataaccttagttgtaaacacaattttgaacatcatatttttggaaggttattttggtgttccagaatttatgcaaagcgtttatggcgtggctatagcaacaggtttatcttgggctatctctgccatagttttatggattgtggtagtttatctgcttgagcataaaacaaaagcaattgatatcaaaaggggatattacgtacttttgccagaatggttgcgcattggaattcctgcggctattgagccggtgagttttcagctgtttcaagtttttatggtagctctgtttgtaaggcttggcgatgtctccatggagtccagggtttttgcgggcgtatttgctatgttcgctgtggttttgagcgttgggtttgggagcggcagccaaatattggtagctcatctggttggcaacaaggaatttgacaaggctaataagagaatgcatcaaagccttgtgtggagttgcaccagcgcttttttgattgcggtggcagtagcattttttgcgcaacatctgctcctgtttttttacccgaaaataagccaagaaactctgcatctagccggtttgctcctctggtgcgacgtggtattgcagccgtttaaagctgcgaacattgttataacaaatgctctaagggcttcgggggattctgcgttccccgctgtgttcggaacaatatccatgtggactttggggcttggcacagcgttgtttttgtgctatggaatagaattgggtgcaatcggtttatggcttggaatggcatccgatgaattttatcgctccatcgcaaactacacccgttggcacagaggtaagtggaagagcaaaggggtgatcagataa

SEQ ID NO: 58954 - protein, 447 aa, Unknown
  Obtained from environmental sample
  DOMAIN (241)...(404): MatE
  misc_feature (1)..(447): Xaa is any amino acid
MAVKDKSLFSLSWPLVVTFGIGMSLPMLDSWFLSRRSVEAAAGVGALMPVIGTLFMAIHAFAQAGASIASQFLGGNKPRHAQVTQTIVITGSATLGLAMGAILWFSTPTIVSLMGLSGEPADAAIKFLRTISPAVIFRALQGTLTSLVATHGYTLWNLFANIITLVVNTILNIIFLEGYFGVPEFMQSVYGVAIATGLSWAISAIVLWIVVVYLLEHKTKAIDIKRGYYVLLPEWLRIGIPAAIEPVSFQLFQVFMVALFVRLGDVSMESRVFAGVFAMFAVVLSVGFGSGSQILVAHLVGNKEFDKANKRMHQSLVWSCTSAFLIAVAVAFFAQHLLLFFYPKISQETLHLAGLLLWCDVVLQPFKAANIVITNALRASGDSAFPAVFGTISMWTLGLGTALFLCYGIELGAIGLWLGMASDEFYRSIANYTRWHRGKWKSKGVIR

SEQ ID NO: 58955 - DNA, 804 bp, Unknown
  Obtained from environmental sample
  misc_feature (1)..(804): n is a, c, g, or t
atggagctaaacgccgtaattcagggagactgcattgaggtattaaagaatttcagcgataattccatagatttgatctttgccgatcccccgtataatatgcagttggagaacgtcctttacaggccgaacaacacaaaagttgacggtgttgatgatgaatgggataaattcggatcattttccgaatatgacgatttctgcgaagcgtggttagtagagtgcaggcgcgtattaaaagacacaggtacaatatgggtgataggaagctatcataatattttccgcgtgggcaatattatgctcaatctgggttactggattctgaacgacgtgacatggtataaaaccaatccaatgcccaacttcatgggtacgcggtttacaaacgccacggaaacgcttttatggtgttcaaaaaaaaaggaaaataaaaaatatacgtttaaccacaaaatgatgaaaaaatacaacggcggcaaacaaatgacgtccgtttggaagatcggtctgtgtattggggaagaacgcttaaaaggcgaagacggaaagaaggcgcattcaacccagaaaccggaagagcttctaaaaagggtgatcctgtctacgacaaaacagggggatgtggtgcttgacccgttttttggaacaggtacaacgggcgcagtcgcaaaaaagttaaaacgcaattacatagggatagagagagagcaggaatatataaaacttgcggaagacagaatagccaatatcaaggaatattttgaagaggctgactggacggaagaatgcatcacacattaa

SEQ ID NO: 58956 - protein, 267 aa, Unknown
  Obtained from environmental sample
  DOMAIN (23)...(246): DNA methylase
  misc_feature (1)..(267): Xaa is any amino acid
MELNAVIQGDCIEVLKNFSDNSIDLIFADPPYNMQLENVLYRPNNTKVDGVDDEWDKFGSFSEYDDFCEAWLVECRRVLKDTGTIWVIGSYHNIFRVGNIMLNLGYWILNDVTWYKTNPMPNFMGTRFTNATETLLWCSKKKENKKYTFNHKMMKKYNGGKQMTSVWKIGLCIGEERLKGEDGKKAHSTQKPEELLKRVILSTTKQGDVVLDPFFGTGTTGAVAKKLKRNYIGIEREQEYIKLAEDRIANIKEYFEEADWTEECITH

SEQ ID NO: 58957 - DNA, 999 bp, Unknown
  Obtained from environmental sample
  misc_feature (1)..(999): n is a, c, g, or t
gtgggcatcgccgacgtccccgattcccggctgacaaggttaagcgaaatattcaaacccaaaaaaaccattccggcgacggttgaattcgtggacattgccggactggtaaaaggctcctcaaggggggaaggactgggaaatcagttccttgcccatatccgcgaagtgggaattatcgcccatgttgtccgctgttttgacaaccccgacattatccatgtaagcgataaaatcgatcccgaatccgacattgaaacgattaacatagaactcgcccttgccgaccttgaaacccttgccaagcggaaggaaagggcggaaaaaacgttaaaaatccaaagcgagaaaaaaaacgccgagcttgttcttgccgtgctggataaaatcgggcccttgcttgaagacgggaaacccgtccgtttagcaaatttaaatgatgacgaaaaagcccttatctacgactgccatttcatcaccgccaaacccattttgtatgtttgcaatgtggacgaggaagggatgaaaactgtcgtggctgaggggaaagttccttatgtggaagccgtgcgcaaagttgccgccgccgagggttccccggtagtagtcataagcggcaaattcgaagcggaactcatcgccatagaagacccggcggaaaggctcgcctttctggaagagcttggcctgaaagagccgggccttgcgccgcttatacgcgcggcttacgggcttttggggctcaggactttcttcaccgccggggaagacgaatgtcgggcatggactatccgcgccggagatcccgcgcccaaagccgcaagggcgatccacactgattttgaaaaaggctttatcaaggccgaagtgtatacctgcgatgatattttcaaatacggcaccgaggcaaagatcaaggaagccggcaagtaccgcattgaaggcaaggaatacatcgtgcaggacggcgatgtgatgttcttcaagtttaatgtgtga

SEQ ID NO: 58958 - protein, 332 aa, Unknown
  Obtained from environmental sample
  DOMAIN (9)...(114): GTPase of unknown function
  misc_feature (1)..(332): Xaa is any amino acid
MGIADVPDSRLTRLSEIFKPKKTIPATVEFVDIAGLVKGSSRGEGLGNQFLAHIREVGIIAHVVRCFDNPDIIHVSDKIDPESDIETINIELALADLETLAKRKERAEKTLKIQSEKKNAELVLAVLDKIGPLLEDGKPVRLANLNDDEKALIYDCHFITAKPILYVCNVDEEGMKTVVAEGKVPYVEAVRKVAAAEGSPVVVISGKFEAELIAIEDPAERLAFLEELGLKEPGLAPLIRAAYGLLGLRTFFTAGEDECRAWTIRAGDPAPKAARAIHTDFEKGFIKAEVYTCDDIFKYGTEAKIKEAGKYRIEGKEYIVQDGDVMFFKFNV

SEQ ID NO: 58959 - DNA, 408 bp, Unknown
  Obtained from environmental sample
  misc_feature (1)..(408): n is a, c, g, or t
ttgcgaaaactcctgcctaccgctgaattttccgatattatggaactcgcgaaaacaggaaacataagccaggttgatcttttactcggcgacattaccgataccggcataagttttttaagcaaagaaagcaccgccgccaatttcggaaaaatgctggataccgccggtccctccgacatagcgctcgctattatcaacatggtatatcaggtaataggcgtcctttcggtctttgccgcaaaagcaagaaccacagaccgcgtaatcgtcaccggcaacggcagcgccaaccccataggccaaaaaatcttttccggcataacaggaatgtacggaattaaattcatttatcccgagcatgcagaatatactaccgccgtaggggccggaatttttaaaacttaa

SEQ ID NO: 58960 - protein, 135 aa, Unknown
  Obtained from environmental sample
  misc_feature (1)..(135): Xaa is any amino acid
MRKLLPTAEFSDIMELAKTGNISQVDLLLGDITDTGISFLSKESTAANFGKMLDTAGPSDIALAIINMVYQVIGVLSVFAAKARTTDRVIVTGNGSANPIGQKIFSGITGMYGIKFIYPEHAEYTTAVGAGIFKT

SEQ ID NO: 58961 - DNA, 936 bp, Unknown
  Obtained from environmental sample
  misc_feature (1)..(936): n is a, c, g, or t
gtgttcagcgatttcatggaagacatggaatttgaattcggaactatcgacaagattctgaagaatgacgaattatccgcccatgacgcgcttgtaaaagtttatcaatctgttcatgctataaaatctaacgcggtaattttggggttaaacgtattcggcaacaaagtgcataatctggaatcgaagattaaaaagttacgcgaacaggaaggcgaagtgccgtttgtagaaatgctgaatcttactgtagacatagaaaaaatatcgaacgaaagggaaggcttcaaagagattctggacaaactccagtcttatgccggcggcggcggcggattacccggagtcggcggcacgggcggcgcgagacagaacgtaaaagttttggttgaatcccttaccaagaccactacaagagtcgcgcaggacatgggaaaacaaattaaatttgccgctgccgaggtagacccggaagcgttagataacagtccaaggcgcgttattaaagatattcttatgcagttaatccgcaactccgccgtacacggaattgaaacgcctgatgagcgcaagaagaagggcaagaacgagaccggcgttgtaaaattgtcgattaaaatgacggaagatcaaaagcatgtccttgtaaaactttccgatgacggaaacggtcttgattacaaaaagattgccgtaaaagccatacaaaagaaaatgctcaagaaagaagaagccgtcaagaaagatctgttgttaaaagtgatctttatgcccggcttcagcacagcggacgcggaaaccgtccacggcggcagaggcataggtttaaatcttgttcgcgacagaataaaagaagtaaacggcacaataaaaatcaaatccgaagacggcaaaggaactgtgttccttatcactcttcctgtgcagaaaaaataa

SEQ ID NO: 58962 - protein, 311 aa, Unknown
  Obtained from environmental sample
  DOMAIN (167)...(309): Histidine kinase-, DNA gyrase B-, and HSP90-like ATPase
  misc_feature (1)..(311): Xaa is any amino acid
MFSDFMEDMEFEFGTIDKILKNDELSAHDALVKVYQSVHAIKSNAVILGLNVFGNKVHNLESKIKKLREQEGEVPFVEMLNLTVDIEKISNEREGFKEILDKLQSYAGGGGGLPGVGGTGGARQNVKVLVESLTKTTTRVAQDMGKQIKFAAAEVDPEALDNSPRRVIKDILMQLIRNSAVHGIETPDERKKKGKNETGVVKLSIKMTEDQKHVLVKLSDDGNGLDYKKIAVKAIQKKMLKKEEAVKKDLLLKVIFMPGFSTADAETVHGGRGIGLNLVRDRIKEVNGTIKIKSEDGKGTVFLITLPVQKK

SEQ ID NO: 58963 - DNA, 960 bp, Unknown
  Obtained from environmental sample
  misc_feature (1)..(960): n is a, c, g, or t
ttggtaattattgacgagcagcaccgctttggcgtaacgcagagggcgctcatcatggcaaagaacagcgcggcaacgccccatctgctgatgatgagcgccacgccgattccccgcacccttgccatgacggttttcggcgacatggacgtctcggtaataagcgatatgccgccggggagaaagccggtaataacccacctcgcaagggaatccaacgagcagaaggtgtatgactttgtgcgcgataagctgaaagccggttcccaggcttacttcgtatatccgttaatcgaaagcacagaatgcaatgaagaaaaagaaacggtatcaaaagacgccgtcttcctgaaagacgccgtctccatggcggaacggctggcggcaaaagtcttccccggtttcaccgtggccctgatccattcaaaactcgacgaggaagaaaaacgccagactatggatcgtttccgcaaaggcgaaataagggtgttagtcgccaccagcgtcgtcgaggtgggcgtggacgtgccgaacgccaactgcatggtgattgagcacgccgagcgtttcggcctttccgccctgcaccagctcaggggcagggtcggccgcggccaggatcaggcgtactgttttctggtttactcggacaaatacaccgatgacggcaaggcgaggttaaacgtaatgcgtgaaaacaccgacggctttgttattgccgaggaggatctgaagctgcgcggcccgggccagatcgccggaaccgaacagtccggctacctcagcctgggaatcgccaaccccatccgtgacatagacgcgctgacaaaggcccgcgaagacgcctttttcattctggaaaacgaccccggccttgtgctgaggggccacccggatcatagcgcgcgtgctgaagaagcgcgccttttaccggggtggggctgtaagcccgggagctaa

SEQ ID NO: 58964 - protein, 319 aa, Unknown
  Obtained from environmental sample
  DOMAIN (129)...(206): Helicase conserved C-terminal domain
  misc_feature (1)..(319): Xaa is any amino acid
MVIIDEQHRFGVTQRALIMAKNSAATPHLLMMSATPIPRTLAMTVFGDMDVSVISDMPPGRKPVITHLARESNEQKVYDFVRDKLKAGSQAYFVYPLIESTECNEEKETVSKDAVFLKDAVSMAERLAAKVFPGFTVALIHSKLDEEEKRQTMDRFRKGEIRVLVATSVVEVGVDVPNANCMVIEHAERFGLSALHQLRGRVGRGQDQAYCFLVYSDKYTDDGKARLNVMRENTDGFVIAEEDLKLRGPGQIAGTEQSGYLSLGIANPIRDIDALTKAREDAFFILENDPGLVLRGHPDHSARAEEARLLPGWGCKPGS

SEQ ID NO: 58965 - DNA, 708 bp, Unknown
  Obtained from environmental sample
  misc_feature (1)..(708): n is a, c, g, or t
gtgttaaaggacgtgtccctcaccgtggagcagaaggaagtcgtctgcataatcgggccttcaggcgccggcaagtcgacatacctgcgcgccctgaaccatctggaaacgattgacgaaggtcagatatttatagaagacaaactcctctttgactgccacaagggaacgaaccacgtcaaaatgcaccatgacgagtacaacaaaacattgcttgaagtgggcatggtgttccagcgtttcaatctttttccccacaggacggcccttgaaaacgtgatgctcgctcctgtccatgttcgcaaaatttccgtcaatgaagcgcgggaaaggtctaaaactattcttgaacgcgtcggccttggcgataaattcgacgtgtttccctcccagctttccggcggccagcagcagcgagtcgctattgctcgcgccctcgccatggaacccaggataatgctttttgacgagcctaccagcgcgcttgaccctgagcttgtcggcgaggtgttagccgtaatgaaacagcttgcccttgacggaatgaccatgcttgtggtatctcacgagatgggctttgcacgcgaggttgccgacagggtggtattcatgtttgagggtaaaatcctggaagtggctcctcccaaagtcatgttcaacaacccgtcaaacgagcgcacccgccagttcctgcaaagcgttttgtaa

SEQ ID NO: 58966 - protein, 235 aa, Unknown
  Obtained from environmental sample
  DOMAIN (12)...(207): ABC transporter
  misc_feature (1)..(235): Xaa is any amino acid
MLKDVSLTVEQKEVVCIIGPSGAGKSTYLRALNHLETIDEGQIFIEDKLLFDCHKGTNHVKMHHDEYNKTLLEVGMVFQRFNLFPHRTALENVMLAPVHVRKISVNEARERSKTILERVGLGDKFDVFPSQLSGGQQQRVAIARALAMEPRIMLFDEPTSALDPELVGEVLAVMKQLALDGMTMLVVSHEMGFAREVADRVVFMFEGKILEVAPPKVMFNNPSNERTRQFLQSVL

SEQ ID NO: 58967 - DNA, 429 bp, Unknown
  Obtained from environmental sample
  misc_feature (1)..(429): n is a, c, g, or t
atggtcattccgtcaagggcaagctgtttcattacggctaacacctcgccgacaagctcagggtcaagcgcgctggtaggctcgtcaaaaagcattatcctgggttccatggcgagggcgcgagcaatagcgactcgctgctgctggccgccggaaagctgggagggaaacacgtcgaatttatcgccaaggccgacgcgttcaagaatagttttagacctttcccgcgcttcattgacggaaattttgcgaacatggacaggagcgagcatcacgttttcaagggccgtcctgtggggaaaaagattgaaacgctggaacaccatgcccacttcaagcaatgttttgttgtactcgtcatggtgcattttgacgtggttcgttcccttgtggcagtcaaagaggagtttgtcttctataaatatctga

SEQ ID NO: 58968 - protein, 142 aa, Unknown
  Obtained from environmental sample
  SIGNAL (1)...(24)
  DOMAIN (27)...(65): Protein of unknown function (DUF1602)
  misc_feature (1)..(142): Xaa is any amino acid
MVIPSRASCFITANTSPTSSGSSALVGSSKSIILGSMARARAIATRCCWPPESWEGNTSNLSPRPTRSRIVLDLSRASLTEILRTWTGASITFSRAVLWGKRLKRWNTMPTSSNVLLYSSWCILTWFVPLWQSKRSLSSINI

SEQ ID NO: 58969 - DNA, 957 bp, Unknown
  Obtained from environmental sample
  misc_feature (1)..(957): n is a, c, g, or t
atgactattatggcggcaaataccgaaagaatcctgcctataggcatccaagacttcccgaagattcgagagcggggtttcgtctacgtagacaagaccgcccgcatttacgaactccttaccggttccggcgaggcgttcttcctctcgcgtccgaggcgcttcgggaagtctttgctctgttcgacgcttggggcgattttcgagggtcggcgcgagcttttcggggagattgcggggaaaccggcgttggccattgacggcttcgactgggagtggaagccgtatccggttattcggatcgacctgagcaccggggattacccgaattacgggatcaaggcgctcaactccgtcatatgtgacgagatgcggagggaggcccaaaagtatggtgttaaacttgataggaaggctgcatcggccagccaattcaagaacctcatagagggagtcggcgaaaagacaggcgaaaaggccgttgtgattatcgacgagtacgacagtccgctgacgaataccttaaataagctggatttccattttgagttgcgagacgcgctcaaagcgttctacagcgtcctcaaatcatacgacgcatacttgcgcttcgtcttaataaccggcgtgagcaagttctcccacgtaagcctattctccggcatgaaccagctgaccgacctgactttagacccgcgttgcgccgacctctgcggactcacccaagaggagatggttgtcaatttcgggccggaaatagacagtatcttggaaaacaccggacgcaaccgcgaggagtacatggaccaactgcgcctctattacaacggctatcgcttctccaaaaaccgcttacggtctacagcccgttcgggttgctcaagcatttttacggcggcggagaattctcagatcactggtacgaaacaggcaccccgtctttccttgttgatttga

SEQ ID NO: 58970 - protein, 318 aa, Unknown
  Obtained from environmental sample
  DOMAIN (4)...(318): Protein of unknown function (DUF1703)
  misc_feature (1)..(318): Xaa is any amino acid
MTIMAANTERILPIGIQDFPKIRERGFVYVDKTARIYELLTGSGEAFFLSRPRRFGKSLLCSTLGAIFEGRRELFGEIAGKPALAIDGFDWEWKPYPVIRIDLSTGDYPNYGIKALNSVICDEMRREAQKYGVKLDRKAASASQFKNLIEGVGEKTGEKAVVIIDEYDSPLTNTLNKLDFHFELRDALKAFYSVLKSYDAYLRFVLITGVSKFSHVSLFSGMNQLTDLTLDPRCADLCGLTQEEMVVNFGPEIDSILENTGRNREEYMDQLRLYYNGYRFSKNRLRSTARSGCSSIFTAAENSQITGTKQAPRLSLLI

SEQ ID NO: 58971 - DNA, 897 bp, Unknown
  Obtained from environmental sample
  misc_feature (1)..(897): n is a, c, g, or t
ttgcgccgacctctgcggactcacccaagaggagatggttgtcaatttcgggccggaaatagacagtatcttggaaaacaccggacgcaaccgcgaggagtacatggaccaactgcgcctctattacaacggctatcgcttctccaaaaaccgcttacggtctacagcccgttcgggttgctcaagcatttttacggcggcggagaattctcagatcactggtacgaaacaggcaccccgtctttccttgttgatttgatcaccaataacaagatcaatatcctcgacctgaaggacacgcaggtcacgcaaagcgatttcggcaagtacgacgcagacaacatagcgctggcgccgctgctctgccaaaccggctacctaacgatctccgattacgatgaggattccggcgaatatacgctcgatttccccaacaacgaggtacgcgcctgctttgccggttcgttgttgtcgcaatattcggaactatcgggcacggatagattggacacgaaattcatacgcgcaatcgttaaaggcgatatagacacggcaatggatactttgcgccgcttcttcaccgccatcccatacgacattgtggacaataaagaaaaatacttccaaatggcggtgcatctgatattcaccatgctcggtttcaattgccgttcggaagtacgtattgcgaccggtcgtatcgatacgcttgtggtgacgcggaacttcgtctactgtttcgagttcaaattagacggcagcgctgagaaagcgttggcgcagattgacagcaaggaatacgccgttccttggacgggtagcggaaaaaaggttttcaaggtcggggtggactttgactttgagaagcggaatataggggagtgggtgtctgcataa

SEQ ID NO: 58972 - protein, 298 aa, Unknown
  Obtained from environmental sample
  DOMAIN (1)...(295): Protein of unknown function (DUF1703)
  misc_feature (1)..(298): Xaa is any amino acid
MRRPLRTHPRGDGCQFRAGNRQYLGKHRTQPRGVHGPTAPLLQRLSLLQKPLTVYSPFGLLKHFYGGGEFSDHWYETGTPSFLVDLITNNKINILDLKDTQVTQSDFGKYDADNIALAPLLCQTGYLTISDYDEDSGEYTLDFPNNEVRACFAGSLLSQYSELSGTDRLDTKFIRAIVKGDIDTAMDTLRRFFTAIPYDIVDNKEKYFQMAVHLIFTMLGFNCRSEVRIATGRIDTLVVTRNFVYCFEFKLDGSAEKALAQIDSKEYAVPWTGSGKKVFKVGVDFDFEKRNIGEWVSA

SEQ ID NO: 58973 - DNA, 765 bp, Unknown
  Obtained from environmental sample
  misc_feature (1)..(765): n is a, c, g, or t
ttgattatggcaggtgcaaacgcaaacaagaagccgttaccggtggacaagtctttttttgaccgcgttatagagggcggttcttactatgtcgataaaacgctgtttattaaagaccttatagatagagacgccgaagtcatcctctgcacccgcccccgccggtttggtaagacgttgaaccagactatgctcaaatgcttctttgaagatacgacgcggataggcggtaaggatacgcgggcgctgtttcacgggttgaagatagaggaagccggagagcggtatatggagtatcaggggaagtatccggtgatatttatgagcttcaaggacacgaagtttaacaattttgacgaggcgtgcaagaagttaatagagtgcatcgcccaagagtttgaacggcacgcctacgtttcggaaaagatattaagcgattatgacagggatttgtttaagaaactctctaaccgcttgggttctgtcggcgattattccacatcgctgaaatttttgagtgcgtgtttggagaattaccacggtaaaaaagccataatcttgattgacgaatacgatgtcccgctggaaaattcttggtcttgttccaaccgtttttatgatgagatggttgatttcatccgtccgctccttagcagcgcgctcaaggacaacccgcacctgcaattagccgtgatgaccggatgcctacgtgtttccaaagagagcatattcacgggattgaataactggaaggatttgatctaa

SEQ ID NO: 58974 - protein, 254 aa, Unknown
  Obtained from environmental sample
  misc_feature (1)..(254): Xaa is any amino acid
MIMAGANANKKPLPVDKSFFDRVIEGGSYYVDKTLFIKDLIDRDAEVILCTRPRRFGKTLNQTMLKCFFEDTTRIGGKDTRALFHGLKIEEAGERYMEYQGKYPVIFMSFKDTKFNNFDEACKKLIECIAQEFERHAYVSEKILSDYDRDLFKKLSNRLGSVGDYSTSLKFLSACLENYHGKKAIILIDEYDVPLENSWSCSNRFYDEMVDFIRPLLSSALKDNPHLQLAVMTGCLRVSKESIFTGLNNWKDLI

SEQ ID NO: 58975 - DNA, 1848 bp, Unknown
  Obtained from environmental sample
  misc_feature (1)..(1848): n is a, c, g, or t
gtgcgccccatgtccctggaactttgcgagggagacctcaacgcgctgattaacgctcttggcgaatttatccgcgcggaactggagcagtccaatatacggctcctgcttgaactggatgacaagctcccccccgtgcttttcgacgagcgttatatgaaacaggttttgcttaacctgattaaaaacgcccaggccgccatgccaaagggcgggctgttaaccatcgccactgtgggatcggacggcgaggtacggataagcgtatgcgacacgggcacggggattagccaggaaaacctcaaaaaaatatttgaaccttattttacgacaaaaggcaacggcacgggtctcgggctgacccttgtatataaaattatcagggaacatcagggcgagatgtcggttgattcgagggtaggggagggaacggattttgagatcatccttcccgtctatcagaaagaacagcatttgatcaattattcaggggcaaaaatgaagtttaaactccttgttgttgatgatgaaaaaaacatccgtgaggggcttgccgcttctcttgaaatggatggctacaacgcggtctgcgctgcaagcggcgacgaagcgtgggactattattgcaagggcgatatagacctggtcatcaccgacctgcgtatgcccggcatggacggcgaggagcttatgcgacgcatactggcggaaacccccggcctgccggttatcattctcaccgggcacggaaccatagaaaacgccgtcagcgcgatgcacgacggggcatgggatttccttaccaaacctgtcaatctggatcatcttggaatgctggtaaagcgggctctggaaaacagggaacttgtgctgcgtcaccgcgaactgcaagccgatctggagcgtggacggctctcatccagcatgatcggcaaatcaaccgttatgcgaaaagtctttgacacgataagccgcgtcgcgcctaccaaagcctcggttctgattaccggggaatccggcgtcggtaaagaactggtcgccgacgctatccatgagctttcaccccgcaagggcaagcctctgattaaagtgcactgcgccgctcttgcggcaaacctccttgaaagcgaactgtttggccatgagaagggggcgttcaccggcgcgatctcacggcggcgcggacgctttgagcttgcgaacgggggaacgctttttctcgacgagataggcgagatagaccagaacatacagataaagctgctgcgtgtcttgcaggaacgtcaatttgagcgcgtcggcggtgaagaaaccgttgaaaccgatgtccgccttgtcgccgcgaccaacaaagacctcaaagccgagatagaaaaaggcaatttccgcgaagacctttatttccgccttaacgtggtgagcatccatgttcctccgttacgcgaaaggaaagacgacattcccctgatggctgccagcttccttaaggaaatcgccgccgaaaacaacaaaacgattgaaggcatccacgaaaaagcgtattcccggctttacgcctacgactggcccggcaatatccgcgaactccgcaactgcattgaaagcgccgttgtcatgtgccgcaaacccatcatcgccgtggacgatctgccccccgctctgcaatcatattctgacgatgaaggctgggtgcgcgtacctctggattgcactcttgaggatgccgaaaaaatcattatcaaagcggcgattggttttcacaagaacaaaaccaaggccgcagaagttcttggcattggccggaagacgctacacaggaagataatagaagagagcagtgagcagtga

SEQ ID NO: 58976 - protein, 615 aa, Unknown
  Obtained from environmental sample
  DOMAIN (332)...(480): ATPase family associated with various cellular activities (AAA)
  misc_feature (1)..(615): Xaa is any amino acid
MRPMSLELCEGDLNALINALGEFIRAELEQSNIRLLLELDDKLPPVLFDERYMKQVLLNLIKNAQAAMPKGGLLTIATVGSDGEVRISVCDTGTGISQENLKKIFEPYFTTKGNGTGLGLTLVYKIIREHQGEMSVDSRVGEGTDFEIILPVYQKEQHLINYSGAKMKFKLLVVDDEKNIREGLAASLEMDGYNAVCAASGDEAWDYYCKGDIDLVITDLRMPGMDGEELMRRILAETPGLPVIILTGHGTIENAVSAMHDGAWDFLTKPVNLDHLGMLVKRALENRELVLRHRELQADLERGRLSSSMIGKSTVMRKVFDTISRVAPTKASVLITGESGVGKELVADAIHELSPRKGKPLIKVHCAALAANLLESELFGHEKGAFTGAISRRRGRFELANGGTLFLDEIGEIDQNIQIKLLRVLQERQFERVGGEETVETDVRLVAATNKDLKAEIEKGNFREDLYFRLNVVSIHVPPLRERKDDIPLMAASFLKEIAAENNKTIEGIHEKAYSRLYAYDWPGNIRELRNCIESAVVMCRKPIIAVDDLPPALQSYSDDEGWVRVPLDCTLEDAEKIIIKAAIGFHKNKTKAAEVLGIGRKTLHRKIIEESSEQ

SEQ ID NO: 58977 - DNA, 642 bp, Unknown
  Obtained from environmental sample
  misc_feature (1)..(642): n is a, c, g, or t
atgagcggtttttaccggcgggcgctcagcaaacttaacagactcaacctggagcagtgccgggaacttcttgtatcggcttcgcatgaaattttccgtcttgataccgtgcttgattctctgccaagcggcatactggtatgcgatgaaaaacaccgcttgctcatggcgaataaagccgccctgcgttttctgcctatcagccacgcggaaggcgaagttttatgggagcttatccccgacgagcatatagcaaatttttttcaacaggccttaaaacgcggcgacaggctgctggaacaggaaatggatctcctcacgcagggacttccgggtccgaaccgcctgctctcgatcagcgttcacccgcttgtcgagaagcggcatataacaggttccctcgtatatatagaagatattaccgagaagcggggcagggaggttcggctccgtcgtgccgagaatcttgccagccttaccacgcttgcggcgggagtcgcccatgagataaagaaccccctaggggctatttcgatacatctccagcttatgcggaaagccctcgacaaaaaagaaaaaaggcatgatacggaaacagacgcgttagtcgataaatatttttccgtgttaacgaagaagtag

SEQ ID NO: 58978 - protein, 213 aa, Unknown
  Obtained from environmental sample
  DOMAIN (32)...(140): PAS fold
  misc_feature (1)..(213): Xaa is any amino acid
MSGFYRRALSKLNRLNLEQCRELLVSASHEIFRLDTVLDSLPSGILVCDEKHRLLMANKAALRFLPISHAEGEVLWELIPDEHIANFFQQALKRGDRLLEQEMDLLTQGLPGPNRLLSISVHPLVEKRHITGSLVYIEDITEKRGREVRLRRAENLASLTTLAAGVAHEIKNPLGAISIHLQLMRKALDKKEKRHDTETDALVDKYFSVLTKK

SEQ ID NO: 58979 - DNA, 1947 bp, Unknown
  Obtained from environmental sample
  misc_feature (1)..(1947): n is a, c, g, or t
atgcgccttttgggcattgcgggtatcgatgtagttaccataaatgtttttagctgggctttattacagtcctccgaagaaatttataatttctccgtccttgacgagataatagaaacggtaagcgcggcaggtatgaagatttgtcttgctaccggaacagcaacacatccggcgtggatggcccgcaagtaccctgaagtgctgcgcgttaatagtgacggttccaagcgcaaatttggcgatcggcagaattcatgccctaacagccgcatataccgcctattttccgaaaagcttgcccgaaaattggcggaacgttacggcaaattggaaaacttaattgcctggcatgtgtctaacgagtacggcggctattgttactgcgcgaattgcgaggaggctttcagaaaatggctgatacgcaagtataaaaccattgaagcgttgaacaaagcgtggaatacctctttttggggtcacacatactacgaatgggaagatattgtcgttccgagctacttaggcggcgaatggccgcctaaccggacttcctgccagatacagtcaattgattaccggcgtttttattccgacagtatgatggactgcttccttgccgaagccggtgcattaaaagaagtgactccatctataccaataaccaccaatatgatgggaactttcatggatttggactatttcaaatggggaaaacacacggactttatctcatgggacaattatccgtcacccagttccccttatacccgtaccgctatgagccacgcccttatgcgcggctgcggcggaggaaagccgtttgcccttatggaacaaaccccaagtgtaacaaactggcaaccgtacaattcccttaaacgccccggtatcatgcgcttgtggagttatcaggcgcttgctcatggctccgatacggttatgttttttcagatgcgccgttcccgcggctgctgtgagaaatttcacggggcgattatcgatcactgcggacatgaaaacacccgcgtattccgggaagccgccgccctgggagaagaattgaaaaaactgggagacgcatttacgggcagccgcctttccggtgaagcggcggttttatatgactgggacaactggtgggcatcatacttgtccgcgggaccgactgtaaacatgaattacatcgaagaagtgttccgtttttacaacgtcattgcccggcaaaatatttccgtggatgtagccggcgttgataccccgctggacgcttacaggatcctcttcgccccgatactttacatgattaagccgggctttgcggacaagctgaaagcgtttgtcgagaggggcggcatactggtaacaacttatttttccggtatgactgatgagaacgatctggtaacaacggcgggctaccccggcgaactgagagacctctgcggtctgtgggtggaagaaacagacgccctgcaggcgggtcagtccaacaggctcatttgttcggacggcccgctggccggaacatggaaagcggatttactctgcgacattattcaccctgaaggggtcaaaatcatcgcccgttacgcggatgatttttacgccggaacacccgccgtctgttgcaacagttacggcaaagggcaggtctggtacttcggctcacggcccgaaacgcagtttctgaaccgttttatcgcgttaatcagcggcgaatgcggcatagagccggtatttcccccacaggaaggaatcgaagccacccgccggataaagggggaaagggaatttatctttgtattgaatcacaaccaaagcgcggcggaaattgtcattccctttgcctgccgggatttgctgtctaataacaattttaccgcgggcggacgctattcccttcccgccgccggagtgatgattttggaaaagccgcgtaaataa

SEQ ID NO: 58980 - protein, 648 aa, Unknown
  Obtained from environmental sample
  DOMAIN (586)...(645): Beta-galactosidase C-terminal domain
  misc_feature (1)..(648): Xaa is any amino acid
MRLLGIAGIDVVTINVFSWALLQSSEEIYNFSVLDEIIETVSAAGMKICLATGTATHPAWMARKYPEVLRVNSDGSKRKFGDRQNSCPNSRIYRLFSEKLARKLAERYGKLENLIAWHVSNEYGGYCYCANCEEAFRKWLIRKYKTIEALNKAWNTSFWGHTYYEWEDIVVPSYLGGEWPPNRTSCQIQSIDYRRFYSDSMMDCFLAEAGALKEVTPSIPITTNMMGTFMDLDYFKWGKHTDFISWDNYPSPSSPYTRTAMSHALMRGCGGGKPFALMEQTPSVTNWQPYNSLKRPGIMRLWSYQALAHGSDTVMFFQMRRSRGCCEKFHGAIIDHCGHENTRVFREAAALGEELKKLGDAFTGSRLSGEAAVLYDWDNWWASYLSAGPTVNMNYIEEVFRFYNVIARQNISVDVAGVDTPLDAYRILFAPILYMIKPGFADKLKAFVERGGILVTTYFSGMTDENDLVTTAGYPGELRDLCGLWVEETDALQAGQSNRLICSDGPLAGTWKADLLCDIIHPEGVKIIARYADDFYAGTPAVCCNSYGKGQVWYFGSRPETQFLNRFIALISGECGIEPVFPPQEGIEATRRIKGEREFIFVLNHNQSAAEIVIPFACRDLLSNNNFTAGGRYSLPAAGVMILEKPRK

SEQ ID NO: 58981 - DNA, 903 bp, Unknown
  Obtained from environmental sample
  misc_feature (1)..(903): n is a, c, g, or t
ttgttttttgccgattatcttgttcaggtaacagacaaggcgggagagaaacgtcttgtaatttcgccgtcttcctcgccggaaaacagttttttgtataatggggaaacatgcagtctttgcgccggctgtgaaatggacaatcaaattctaaggaaattgtttgaagtaacaatccacgccttagaaattttaaaaatagcggataacgatattgagttattccattcgatttataaacgcatacctgaacctgttattcactccaacggaactatccgcgagtggaatgaagaatacgaagaggcggagccaggtcatcgtcatttttcaaatctctttgccctttggcccggcggaacaatcacgccggatgaaacgccggaactggctgttgccgcccgaaaaacgctggaacgccgtcttgcgcactcaggcgggcatacaggatggagcagggcatggctggtgaattttatggcgcgtttacgggacgggaaaaccgctcttgaaaatttagacgccatgttcaaagaatttaccctgcccaatctttttaacaacggccctccctttcagatagacggcaactttggcgcattgtcgggaattacgcaaatgctggtccaaagccgcctccgttaccgtaacacagacaccgccgttcttgtactggacatacttcccgccctgcntgagaactggccttcaggccgtttgaaaggggcgcgggtcaagggaaatctggaacttgatcttgagtggcgaaacgggattctttcctcgcttgttatacgcaacaacggaaaagcggctgtttctgtcttgctgcgcagcggaaatgaaagccgcgaacttgcgctggagccgggagaaacggtgttcccttcgacctgtcgctga

SEQ ID NO: 58982 - protein, 300 aa, Unknown
  Obtained from environmental sample
  misc_feature (1)..(300): Xaa is any amino acid
MFFADYLVQVTDKAGEKRLVISPSSSPENSFLYNGETCSLCAGCEMDNQILRKLFEVTIHALEILKIADNDIELFHSIYKRIPEPVIHSNGTIREWNEEYEEAEPGHRHFSNLFALWPGGTITPDETPELAVAARKTLERRLAHSGGHTGWSRAWLVNFMARLRDGKTALENLDAMFKEFTLPNLFNNGPPFQIDGNFGALSGITQMLVQSRLRYRNTDTAVLVLDILPALXENWPSGRLKGARVKGNLELDLEWRNGILSSLVIRNNGKAAVSVLLRSGNESRELALEPGETVFPSTCR

SEQ ID NO: 58983 - DNA, 780 bp, Unknown
  Obtained from environmental sample
  misc_feature (1)..(780): n is a, c, g, or t
atgacgatcggaggacgctacaggatttggggcagctttgactataaacgcggtgaaatacaatccagcgcttttgaatttgaagaagcttccaaagctgagaattttaacacaatgctgcctgtttatcccctgtgcgccgggcttaaacaggctgtgcttcgccgttttacagctaacgctattgaacagtacgccgcccggctggaaaacgagattcccgatgaaattatagccagggacaagctgctttcaaaagccgccgctgtcagagcttttcattatccggcttcacccgaagaactggagcaggcaaagaaaacgcttgtttacgaagaattgttttatcttgaactcatagtcggcaagcgtgcgttggaaagaaggggatatagaatacaacaatcccccgaaccccgaaccccgaaccccgagcccttttctcctttgcagaaacgtttgcttgaacgcttaccattttcgcttacaaaaggccaacaaaaggctatcgttgaaattaattctgatatgacttgcaatgattcacactattccatggcgcggctcttgcagggagatgtcggttccggcaaaacgcttgtttcgtttatggcagctttacgggcagctgacaatggcgggcagacagcgctattggctccgacggaactgcttgcccgccagcacgcggaaaacgccgccagcctgcttgagcccctgggtctgcggatagcgttcctgacaggaaacataaaagcggcgggcagaaaagattattaa

SEQ ID NO: 58984 - protein, 259 aa, Unknown
  Obtained from environmental sample
  misc_feature (1)..(259): Xaa is any amino acid
MTIGGRYRIWGSFDYKRGEIQSSAFEFEEASKAENFNTMLPVYPLCAGLKQAVLRRFTANAIEQYAARLENEIPDEIIARDKLLSKAAAVRAFHYPASPEELEQAKKTLVYEELFYLELIVGKRALERRGYRIQQSPEPRTPNPEPFSPLQKRLLERLPFSLTKGQQKAIVEINSDMTCNDSHYSMARLLQGDVGSGKTLVSFMAALRAADNGGQTALLAPTELLARQHAENAASLLEPLGLRIAFLTGNIKAAGRKDY

SEQ ID NO: 58985 - DNA, 792 bp, Unknown
  Obtained from environmental sample
  misc_feature (1)..(792): n is a, c, g, or t
ttgccgtgggaacccacngcgcttttctcaaaagacgttaattataaaaatttgcagttggtaattattgatgaacagcaccgttttggtgtaacgcaaagagccctcatcatggcaaaaggccttaatggcgctgcgaccggcgggcctcatttgttgatgatgagcgccacgccgattccacgtacccttgccatgacggttttcggcgacatggatgtttctgtaataagcgatatgccgccgggaagaaagccggtaataacccaccttgcaaaggaatccaacgagcaaaaggtgtatgaatttgtgcgcgataaactgaaatccggttcccaggcttactttgtatatccgttaatcgaaagcgacgatgaaaaagaaacaggtttgaaagacgccgtctttcttaaagacgccgtatcaatggaggaacggctggcgacagaagtctttccgggtttcaaagtcgcccttatccattcaaaacttgacgaggatgaaaagcgtcagactatggaatgtttccgtaaaggcgaaataaaggtgttagtcgccaccagcgtcgttgaggtgggcgttgacgtgcctaacgcaaactgcatggtgatagaacacgccgagcgattcggtctttccgccctgcaccagcttaggggcagggtaggccgcgggcaggatcaggcgtattgttttctggtttactcggacaatcttaccgatgacggcaaggcaaggttaaacgtaatgtttgaaaacaccgacggctttgtcattgccgaagagatctaa

SEQ ID NO: 58986 - protein, 263 aa, Unknown
  Obtained from environmental sample
  DOMAIN (149)...(226): Helicase conserved C-terminal domain
  misc_feature (1)..(263): Xaa is any amino acid
MPWEPTALFSKDVNYKNLQLVIIDEQHRFGVTQRALIMAKGLNGAATGGPHLLMMSATPIPRTLAMTVFGDMDVSVISDMPPGRKPVITHLAKESNEQKVYEFVRDKLKSGSQAYFVYPLIESDDEKETGLKDAVFLKDAVSMEERLATEVFPGFKVALIHSKLDEDEKRQTMECFRKGEIKVLVATSVVEVGVDVPNANCMVIEHAERFGLSALHQLRGRVGRGQDQAYCFLVYSDNLTDDGKARLNVMFENTDGFVIAEEI

SEQ ID NO: 58987 - DNA, 777 bp, Unknown
  Obtained from environmental sample
  misc_feature (1)..(777): n is a, c, g, or t
atgtcgatgatcaaaacagtcgggctatacaaaacctttcacggctcgcagggcagggggccgcttgaggtcttgaaggatgtgtccctcaccgtagagcagaaggaagtcgtctgtataatcgggccctcgggcgcgggcaagtcgacatacctgcgcaccctcaaccggctggaaacgattgacgaagggcagatatttatagaagacaaactcctctttgactgtcacaagggaacaaaccatgtaaaaatgcacaatgacgagcgcaacaggacattgcttgaagtgggcatggtgttccagcggtttaatcttttcccccacaggacggcccttgaaaacgtaatgcttgcccctgtccatgtccgcaaactttccgtaaatgaagcgagggaaagggccaaaagtatccttgaacgcgtcggccttgccgataaattcgacgtattcccctcgcagctttccggcggccagcagcagcgggtagccattgcccgcgccctcgcgatggagccgaggatcatgctatttgacgagcctaccagcgcgcttgaccctgagcttgtcggcgaggtgttagctgtaatgaaacagcttgcccttgccggcatgaccatgctggtggtatcgcatgagatgggctttgcccgcgaggttgccgacagggtagtattcatgttcgagggaaaaatcctggagtgggccccgcccaaagtcatattcaacaacccgtcaaacgagcgcacccgccagttcctgcaaagcgttttgtaa

SEQ ID NO: 58988 - protein, 258 aa, Unknown
  Obtained from environmental sample
  DOMAIN (3)...(234): RecF/RecN/SMC N terminal domain
  misc_feature (1)..(258): Xaa is any amino acid
MSMIKTVGLYKTFHGSQGRGPLEVLKDVSLTVEQKEVVCIIGPSGAGKSTYLRTLNRLETIDEGQIFIEDKLLFDCHKGTNHVKMHNDERNRTLLEVGMVFQRFNLFPHRTALENVMLAPVHVRKLSVNEARERAKSILERVGLADKFDVFPSQLSGGQQQRVAIARALAMEPRIMLFDEPTSALDPELVGEVLAVMKQLALAGMTMLVVSHEMGFAREVADRVVFMFEGKILEWAPPKVIFNNPSNERTRQFLQSVL

SEQ ID NO: 58989 - DNA, 522 bp, Unknown
  Obtained from environmental sample
  misc_feature (1)..(522): n is a, c, g, or t
gtgcgctcgtttgacgggttgttgaatatgactttgggcggggcccactccaggatttttccctcgaacatgaatactaccctgtcggcaacctcgcgggcaaagcccatctcatgcgataccaccagcatggtcatgccggcaagggcaagctgtttcattacagctaacacctcgccgacaagctcagggtcaagcgcgctggtaggctcgtcaaatagcatgatcctcggctccatcgcgagggcgcgggcaatggctacccgctgctgctggccgccggaaagctgcgaggggaatacgtcgaatttatcggcaaggccgacgcgttcaaggatacttttggccctttccctcgcttcatttacggaaagtttgcggacatggacaggggcaagcattacgttttcaagggccgtcctgtgggggaaaagattaaaccgctggaacaccatgcccacttcaagcaatgtcctgttgcgctcgtcattgtgcatttttacatggtttgttcccttgtga

SEQ ID NO: 58990 - protein, 173 aa, Unknown
  Obtained from environmental sample
  DOMAIN (70)...(108): Protein of unknown function (DUF1602)
  misc_feature (1)..(173): Xaa is any amino acid
MRSFDGLLNMTLGGAHSRIFPSNMNTTLSATSRAKPISCDTTSMVMPARASCFITANTSPTSSGSSALVGSSNSMILGSIARARAMATRCCWPPESCEGNTSNLSARPTRSRILLALSLASFTESLRTWTGASITFSRAVLWGKRLNRWNTMPTSSNVLLRSSLCIFTWFVPL

SEQ ID NO: 58991 - DNA, 1092 bp, Unknown
  Obtained from environmental sample
  misc_feature (1)..(1092): n is a, c, g, or t
atgaaaatagaaatccccgaattatgtcttatcgcaatggtaggagcgtcaggcagcggtaaatccagtttcgcaaaaaaacatttcaaagccactgaggttctcagttctgactattttcgcggtcttgtatccgatgacgaaagtgatcaaagcgcaaccgacgcggcgtttgacagcctttactacatcgcgagtaaacggctggatcggggcagactcacggtcattgacgctacaagcgtccaacaatttgcccgaaaaaaaataatcgatatagcccgatcccatgacgtacttccggttgccattgtttttgatatgccggaaaatttatgtattgaacgaaaccgtataagagccgatcgcaatgtcgttcctaatgttgttagaaaacacatccgcgatttatcgagaagtttacacaatttgcaaaaagaaggtttccgttatgtgtatattttacacgatcaggaagaagtggactccgcagaaattgtcagaaccaaactctggaatgacaaacgtgacgagaccggtccatttgacataatcggcgacattcacgggtgttacgatgaacttacagagttgctggaaaaactcggattttcagttgatagggaatcccataccgccaagccgccgtcagacagacgggctatttttcttggcgatttatgcgacagaggacccgccaatgccgccgtgctacatctggtaatgaacatggtcgaatctggcgcggctctctgcgtgccgggaaatcacgatgtaaaattactccgtaaactgcggggaaacgatgtcaaactgactcatggtttggatctcacagtcaaagagttgaacaagaacctcaatggtttattgataagacaatacaattccttgacggactggtcagtcattatgtgctggatcagggtaaacttgtggtatcccatgccgggctttgtgaaaaatatcaaggccgcagctcaggcagagtccgcggattctgcctgtatggtgacactacgggcgaaactgatgaattcggtcttccggtcaggctcaactgggcggaagaataccgaggcaaggcgttag

SEQ ID NO: 58992 - protein, 363 aa, Unknown
  Obtained from environmental sample
  DOMAIN (180)...(337): Calcineurin-like phosphoesterase
  misc_feature (1)..(363): Xaa is any amino acid
MKIEIPELCLIAMVGASGSGKSSFAKKHFKATEVLSSDYFRGLVSDDESDQSATDAAFDSLYYIASKRLDRGRLTVIDATSVQQFARKKIIDIARSHDVLPVAIVFDMPENLCIERNRIRADRNVVPNVVRKHIRDLSRSLHNLQKEGFRYVYILHDQEEVDSAEIVRTKLWNDKRDETGPFDIIGDIHGCYDELTELLEKLGFSVDRESHTAKPPSDRRAIFLGDLCDRGPANAAVLHLVMNMVESGAALCVPGNHDVKLLRKLRGNDVKLTHGLDLTVKELNKNLNGLLIRQYNSLTDWSVIMCWIRVNLWYPMPGFVKNIKAAAQAESADSACMVTLRAKLMNSVFRSGSTGRKNTEARR

SEQ ID NO: 58993 - DNA, 1128 bp, Unknown
  Obtained from environmental sample
  misc_feature (1)..(1128): n is a, c, g, or t
ttgaaaggcagtgatgttgtcatcaaggatataagcaagttctttggtgattttagggctcttaataatgtgagtctggaaataaaaaaaggagaatttttctccttgcttggaccatcagggtgcggaaaaaccacccttttgcggataattgccggttttgaaagtcccgacaaaggggaactaaccctggacggtaacgacgtgctttcggctcctcctaaccggcgtcacacaaatacggtatttcagaactattctctttttcctcatcttacggtttttgaaaacgtcgctttttcgcttaggcttaaaagggcgtcttccgccgaagttaagaacaaggtcaacgagtaccttcaccttgtacagcttgtggaccactcgcacaaaaaaccaaaccagctttccggcgggcagaaacagcgggtagccatcgcgcgcgctcttattaatgaaccgcgcgtgcttcttttggacgaacctctttcagcgttagacgcaaaactgcgccagcacatgttaatcgagcttgacaccattcatgataaaatcggcataacgtttatttatgttacccacgaccagcaggaagccctttccgtatcggacagacttgccgttatgaatcagggagacattctgcaaataggcacgcctcaggaaatttacgaaagtccggcttctgattttgtcgcgcgctttataggcgagacaaatttgtttgacgcgtccgttatcagcgtggaaaaattgaacaaagagtgggatgaatttatggtggagcttgatattcccgaacttgggcgcattaaagttaccacagtagacactgttaaagcggggcaaaaggtaagctttacaatacgcccggaaaaaatagtaataaatacggacaagcctactacaaaacgcgaagacattaacctttttacgggaaccgtagacgaacctatttattcgggtttccagacaaaattttatgttaagactactcaggataaaacgcttaaggttatcaaacagcacgcgaattattcagacgacggtcctgccatacgctggaaggacaccgtttacctttcatggagcgccgacgacggctacattgtcgaggtaaaaagttga

SEQ ID NO: 58994 - protein, 375 aa, Unknown
  Obtained from environmental sample
  DOMAIN (287)...(371): TOBE domain
  misc_feature (1)..(375): Xaa is any amino acid
MKGSDVVIKDISKFFGDFRALNNVSLEIKKGEFFSLLGPSGCGKTTLLRIIAGFESPDKGELTLDGNDVLSAPPNRRHTNTVFQNYSLFPHLTVFENVAFSLRLKRASSAEVKNKVNEYLHLVQLVDHSHKKPNQLSGGQKQRVAIARALINEPRVLLLDEPLSALDAKLRQHMLIELDTIHDKIGITFIYVTHDQQEALSVSDRLAVMNQGDILQIGTPQEIYESPASDFVARFIGETNLFDASVISVEKLNKEWDEFMVELDIPELGRIKVTTVDTVKAGQKVSFTIRPEKIVINTDKPTTKREDINLFTGTVDEPIYSGFQTKFYVKTTQDKTLKVIKQHANYSDDGPAIRWKDTVYLSWSADDGYIVEVKS

SEQ ID NO: 58995 - DNA, 819 bp, Unknown
  Obtained from environmental sample
  misc_feature (1)..(819): n is a, c, g, or t
ttgaacacgcaagaaaactctatgacaccatcaatcaaaaacttacagaaaatgccccctgacggaagaaacatcaaacttataatcgcttacgacggcacagacttttcaggctggcaaaggcaggactcacaaaggaccgtacagggcgaaatagaaaaagcccttgaaaaaatacatgaacatgccgtgcctcttacaggttcgggcaggacggacgcgggcgttcacgcggcggggcaagccgcaaatttttacacaagcataaacagcattccggccaaaaaatttgttcccgctcctaatacgattcttccaaaggatgtccgtattcttgaatctctcgaaacagacccggaatttcacgcccgtttcagcgcggtatcgcgctcttaccgctaccactttatctgccgctcttgtcttccccacgaaagccgctacaatcttcagctttggcgcttcccgagtatagaaactcttaacgcctacggcaggctgctgcttggggaaacagactgttccatctttgccggagccggagacagcgcgcttgaagagggaaaatcaacaaacaggtatatctactccgcctgcttttttattgaagccggacgccttgtttttgaaatacgcgccaatgcctttatgcggaaaatggtgcgctcaatagccggcactttccttcattacgaagaaaaaggcacgccgcctgaaaagcttagtgaaataattatttcgaaagagcgatctcttgccggccctactctgccgcccaaaggtctcttcctgtggaaagtggaattttctaaatcttag

SEQ ID NO: 58996 - protein, 272 aa, Unknown
  Obtained from environmental sample
  DOMAIN (164)...(270): tRNA pseudouridine synthase
  misc_feature (1)..(272): Xaa is any amino acid
MNTQENSMTPSIKNLQKMPPDGRNIKLIIAYDGTDFSGWQRQDSQRTVQGEIEKALEKIHEHAVPLTGSGRTDAGVHAAGQAANFYTSINSIPAKKFVPAPNTILPKDVRILESLETDPEFHARFSAVSRSYRYHFICRSCLPHESRYNLQLWRFPSIETLNAYGRLLLGETDCSIFAGAGDSALEEGKSTNRYIYSACFFIEAGRLVFEIRANAFMRKMVRSIAGTFLHYEEKGTPPEKLSEIIISKERSLAGPTLPPKGLFLWKVEFSKS

SEQ ID NO: 58997 - DNA, 885 bp, Unknown
  Obtained from environmental sample
  misc_feature (1)..(885): n is a, c, g, or t
atgggtttaagacttgcgaaaaaaaaggtcgaagaagaccgcgacttaaaaactacctttcaatccaaaaaagactacgagtgtcccgtatgcggcaaggtattcaaaaaagaagaactgctgtcaggcggcggcaggctgattgccgggaagcttacggacgaactgcacaggctttacgagccgtccgccaaatacggagagatatttccgcttgtttaccagtctatagtctgcccggaatgctggttttcatcaatggagagcgatttttcgcttatcccgaaagaaaatatacaaaaagcgagaaatgacatgacacagcggataaacgaaacccgccttgtttttccttttattgactttaatgaaaaccgcactttaatggaaggagccgcgtcccagtatcttacattacgctgttatgattattacaacaaacaaacctctcccacaatcaagcaggggcttgcctctatacgctgcgcgtggctgttagacgaaatgaacaaaaagttccccggacagcattatgactggcttgcccttcttttcagaaaaaaagccatgtatctttacaacgaagcgcttgcccgcgaacaaaccgggaaagaaaccctttccggcatgaaggtcttcggccccgatacagacaaaaattacgcgtacgagggaatgttatacatgtgcgcctatctccgttacaatttcggttccgcccatgacgaaacggaacggaaggcgtcgcttgaagacgcgcgcaggaccatagccaaacttttcggcatgggcaaagcgtccaaagacaagcccggcgccttccttgaacacgcaagaaaactctatgacaccatcaatcaaaaacttacagaaaatgccccctga

SEQ ID NO: 58998 - protein, 294 aa, Unknown
  Obtained from environmental sample
  misc_feature (1)..(294): Xaa is any amino acid
MGLRLAKKKVEEDRDLKTTFQSKKDYECPVCGKVFKKEELLSGGGRLIAGKLTDELHRLYEPSAKYGEIFPLVYQSIVCPECWFSSMESDFSLIPKENIQKARNDMTQRINETRLVFPFIDFNENRTLMEGAASQYLTLRCYDYYNKQTSPTIKQGLASIRCAWLLDEMNKKFPGQHYDWLALLFRKKAMYLYNEALAREQTGKETLSGMKVFGPDTDKNYAYEGMLYMCAYLRYNFGSAHDETERKASLEDARRTIAKLFGMGKASKDKPGAFLEHARKLYDTINQKLTENAP

SEQ ID NO: 58999 - DNA, 375 bp, Unknown
  Obtained from environmental sample
  misc_feature (1)..(375): n is a, c, g, or t
atgataaccggcattggaattgacgcggtttatataaaacgcatggaaaaatggcttacaaaccgcaagtttttggaaaaattttttcatcaggacgaagtagcctttgttacttcccgcggaaaaagcgccgccgagtcccttgctgcaaggtttgcggcaaaagaagcgttcggtaaagcgcttggaacagggcttgccaacattacattaaaagatattatggttattaataacggtaacggaaggcctgaaataaaacttataaattcggcgcaggacgcgtttgaaaaaacaggcgccaacagggctcatatttcccttactcacgagagagacagcgcgatagctatggttattttggagaaaatataa

SEQ ID NO: 59000 - protein, 124 aa, Unknown
  Obtained from environmental sample
  DOMAIN (5)...(71): 4'-phosphopantetheinyl transferase superfamily
  misc_feature (1)..(124): Xaa is any amino acid
MITGIGIDAVYIKRMEKWLTNRKFLEKFFHQDEVAFVTSRGKSAAESLAARFAAKEAFGKALGTGLANITLKDIMVINNGNGRPEIKLINSAQDAFEKTGANRAHISLTHERDSAIAMVILEKI

SEQ ID NO: 59001 - DNA, 363 bp, Unknown
  Obtained from environmental sample
  misc_feature (1)..(363): n is a, c, g, or t
atggcggaaagtgccggcggtcccgtattgttacggattatccgaaagaataaaagctttttcatgaagttaaacgacgacggtaagacagtgcgggcgatggacgttcttgtccctaggttaggtgaaattatcggcggctcacagcgtgaagacagttacgataaacttgttaatcgcatgaatgaactcggcttaaaaaaagaagattatcattggtatcttgatcttcgccgttacgggtcagtgcctcattcggggttcggtcttgggtttgaaagacttattcagtatgtttcaggtatggcgaatatccgtgatgttattccctatccgagagcggtggggcaggctgagttctaa

SEQ ID NO: 59002 - protein, 120 aa, Unknown
  Obtained from environmental sample
  DOMAIN (1)...(116): tRNA synthetases class II (D, K and N)
  misc_feature (1)..(120): Xaa is any amino acid
MAESAGGPVLLRIIRKNKSFFMKLNDDGKTVRAMDVLVPRLGEIIGGSQREDSYDKLVNRMNELGLKKEDYHWYLDLRRYGSVPHSGFGLGFERLIQYVSGMANIRDVIPYPRAVGQAEF

SEQ ID NO: 59003 - DNA, 1227 bp, Unknown
  Obtained from environmental sample
  misc_feature (1)..(1227): n is a, c, g, or t
atgaaaaaaatattattctgttttttgtttgctttctgtttccctctgtttgcgcaggcgcagatttatgaggcgcagtttgcgcttattccgattattgagactgcgcctgagattacttcgagggcggcggtattgattgacgctgatacggggacgatactttattcaaaaaaccctgatgacgaaattcctcccgcttcgcttacaaaattaatgacaatgcatcttgttatgaaagagattgaggagggcagggcgtcttatgacgagatagttcccgtaacggcggaaagttgggcgcaaaatcagccttatcgctccagtttgatgtttcttgaacccgggcaaactgttacaatacgggaaatattactcggtcttgcggttgtttcgggtaacgatgccgctgtcgctcttgccctgcgtcttgcgccgaccatgaatcaatttgccgatatgatgacaaccgaagcgaggcgcatggggttacaagttacccgatttgttgaatcgtctggtatctccgaagacaatatgacaaccgccgccgagttcgcttctttttgccgtcagtatttggcaatgcatccgcaaagtcttgcggaatttcactccgttcctgatttttcgtatccaatggcggataacgttcgggaaaaaaataaaggtaatcctcgtacaatcatgcaagaaaaccgaaacacgctgttaaaagcgtttacgggagttgacggctttaagacgggatttattaacgaatcgggttacaatatagctcttacggcgcagaggaacaatacccgttttatccttgtccttctcggcgctcccaactcaaaagacggagcggttattcgtgataaagacggaataagtcttctttcttgggcgttcgataattttaagactgtccgcctgacggtcaaaagaatagaaaccgcaaaattgtggaagggcagagaaaacacggtagaacttgcgcttgcaagacctgtagattttacgtctccaattaaccgtgcgaatacacttcaatttaagacggtaatagaaaaaaaattagccgctccgcttcccgcaggctctcacgcagggtacattataatttcagatgaacaaggagaattaagcagaacagagttgataacagccgttgacgcaaaaaaaggaaacatctttaagagaatgtggcactctattgtgcttttgtttgttaaaacctaa

SEQ ID NO: 59004 - protein, 408 aa, Unknown
  Obtained from environmental sample
  SIGNAL (1)...(20)
  DOMAIN (302)...(390): Penicillin-binding protein 5, C-terminal domain
  misc_feature (1)..(408): Xaa is any amino acid
MKKILFCFLFAFCFPLFAQAQIYEAQFALIPIIETAPEITSRAAVLIDADTGTILYSKNPDDEIPPASLTKLMTMHLVMKEIEEGRASYDEIVPVTAESWAQNQPYRSSLMFLEPGQTVTIREILLGLAVVSGNDAAVALALRLAPTMNQFADMMTTEARRMGLQVTRFVESSGISEDNMTTAAEFASFCRQYLAMHPQSLAEFHSVPDFSYPMADNVREKNKGNPRTIMQENRNTLLKAFTGVDGFKTGFINESGYNIALTAQRNNTRFILVLLGAPNSKDGAVIRDKDGISLLSWAFDNFKTVRLTVKRIETAKLWKGRENTVELALARPVDFTSPINRANTLQFKTVIEKKLAAPLPAGSHAGYIIISDEQGELSRTELITAVDAKKGNIFKRMWHSIVLLFVKT

SEQ ID NO: 59005 - DNA, 1077 bp, Unknown
  Obtained from environmental sample
  misc_feature (1)..(1077): n is a, c, g, or t
atggcgattctctgtctttccgaaagcattgacgacttaaaaacaaaattagggcacataattatcggatacacttacgggaaacaagctgatgaaaaaccggttaccgccgaacagcttaaagcgcacggcgcaatggcggttttgcttaaggacgctcttaaaccgaatcttgtgcaaacattggaaggaactcccgttcttattcacggcggacctttcgcgaatatagcgcacggatgcaattcaatcatggctacccgacttgcgcaaaaatgcgccgattatgtggttacggaggcgggcttcggcgcagacttaggcgcggaaaagttccttgatattaaatgccgtatcgccggattaaagccatcagcggtagttattgtcgcaactgtccgcgctcttaaattgcacggcggagcaaaaaagaacgaacttgacaatgaagaccttaccgcccttgaaaacggactgccaaatcttttacagcacgttgataacataaaaaatgtttataaacttcccgcagtggtagcaattaatgttttcccaaaagatacaaaagcggaattggaattgatagaaaaaaaatgcgagaagttaggcgtaaacgccgttatttcgcaagtttgggaaaagggaagcgaaggcggcattaaacttgccgtggaagtggcgaacctttgcgaacagccgaacaactttgaattttcctacgatgttaatctttctataaacgaaaaaattgaagctatagcgaaaaaaatataccgcgccgacggcgttacatttttgagtaacgctcaaaaacagataaaccaaattgaaaaaatggggttggataaagttccgatatgcatagcaaaaacccagtacagtttttccgacgacgcaacgcttttaggcgctcccaaagggtggcgtttaacagtgagggatgtaaaaatatcggcgggcgcaggtttcatagtagctctgacaggcgagataatgacaatgccgggactgccgcctgttccttctgcggaaaagattgatattgacagcacggggaagatttcaggactgttttag

SEQ ID NO: 59006 - protein, 358 aa, Unknown
  Obtained from environmental sample
  DOMAIN (1)...(358): Formate--tetrahydrofolate ligase
  misc_feature (1)..(358): Xaa is any amino acid
MAILCLSESIDDLKTKLGHIIIGYTYGKQADEKPVTAEQLKAHGAMAVLLKDALKPNLVQTLEGTPVLIHGGPFANIAHGCNSIMATRLAQKCADYVVTEAGFGADLGAEKFLDIKCRIAGLKPSAVVIVATVRALKLHGGAKKNELDNEDLTALENGLPNLLQHVDNIKNVYKLPAVVAINVFPKDTKAELELIEKKCEKLGVNAVISQVWEKGSEGGIKLAVEVANLCEQPNNFEFSYDVNLSINEKIEAIAKKIYRADGVTFLSNAQKQINQIEKMGLDKVPICIAKTQYSFSDDATLLGAPKGWRLTVRDVKISAGAGFIVALTGEIMTMPGLPPVPSAEKIDIDSTGKISGLF

SEQ ID NO: 59007 - DNA, 957 bp, Unknown
  Obtained from environmental sample
  misc_feature (1)..(957): n is a, c, g, or t
atgagccttgaagaacgggaaattgcggaaaaggaaataacgcgcctaagaaacaagacgggaatcccttttgaaacccttttgggatattcaggcattccgcagcggacatggcgcgaatggggccagcggcggggcattgagacaaagcacaacaacaacatccccaaggcatattacttgacgccggaagaaatcaaggcgatagtcgcttattgcaccagcaatcccctgaaaggctacaggatgcagtgttgggagatggtagaccaaaatgtggcgtttgtgtcctgtagcagcgtctataacgtcataaaacgccataatttggacaaaaaatgggcggaattggctgaagaggcgaagaaaggttttgaccagcctgtggcggttcacgagcaatggcacatagatttttcatacatcaagatacaaaactcgttttattattttatcggcatccttgacggctacagccggaagatgcttaactggaggctttgtaaaaacatggagggcattaacgctgaaatactgattgccgaaaccaaagagatgtacccacaggcggtctgcccgcggctgataagcgacaacggaagccagttcatatcaaaagattttgaagagcttcttgcgcttctggaattctcccacacttttacatccgcaaaccatccgcagagcaacggcaaactggagcggttccaccgcaccttgaaaactgaacacgtaaggagggcatcgtatctggaataccaagacgcctgcataaggatggcggaatggatcgcgtattacaacagcgggaggcttcacagcgcgatctggtatttaacgccgaacgacgttttttacggcagggcggctatacggcttgcagaacgcaaagaaaagttgcatgctgcatttatcaagagacaggaatattggcagacacaaaagtctgcatcctga

SEQ ID NO: 59008 - protein, 318 aa, Unknown
  Obtained from environmental sample
  DOMAIN (127)...(286): Integrase core domain
  misc_feature (1)..(318): Xaa is any amino acid
MSLEEREIAEKEITRLRNKTGIPFETLLGYSGIPQRTWREWGQRRGIETKHNNNIPKAYYLTPEEIKAIVAYCTSNPLKGYRMQCWEMVDQNVAFVSCSSVYNVIKRHNLDKKWAELAEEAKKGFDQPVAVHEQWHIDFSYIKIQNSFYYFIGILDGYSRKMLNWRLCKNMEGINAEILIAETKEMYPQAVCPRLISDNGSQFISKDFEELLALLEFSHTFTSANHPQSNGKLERFHRTLKTEHVRRASYLEYQDACIRMAEWIAYYNSGRLHSAIWYLTPNDVFYGRAAIRLAERKEKLHAAFIKRQEYWQTQKSAS

SEQ ID NO: 59009 - DNA, 312 bp, Unknown
  Obtained from environmental sample
  misc_feature (1)..(312): n is a, c, g, or t
atgggcaaaagaaaaaggtatactgccgaagagaaagtaaaaattctcagagaggtaattgaggacgggaagcaagtaagccaagtagcagaacaatacggccttcaccctaacaatatcttcaactggcggaagcagctttttgagggaggggtccagaccttccagataaagaggtcggacatctcaggcaaggccgaggagcggaaaatcaccgcccttgaggagaagattaagcagaaggacgaagtgatagcggaacttgccgaagagctcttgggattaaaaaaaaagaactctggccgtccgtag

SEQ ID NO: 59010 - protein, 103 aa, Unknown
  Obtained from environmental sample
  DOMAIN (4)...(95): Transposase
  misc_feature (1)..(103): Xaa is any amino acid
MGKRKRYTAEEKVKILREVIEDGKQVSQVAEQYGLHPNNIFNWRKQLFEGGVQTFQIKRSDISGKAEERKITALEEKIKQKDEVIAELAEELLGLKKKNSGRP

SEQ ID NO: 59011 - DNA, 918 bp, Unknown
  Obtained from environmental sample
  misc_feature (1)..(918): n is a, c, g, or t
atgcaggacacgcagaggttctgggataccatgcacacgaaacaacaacggatagcgcaagcggctgagaaacactcaggagaaagcttgtcgagcgtggcgcatcatatagatgcggaatggatgcactgtgcgtatgaatggacgaggagagacggagcggctggaattgatggggtaacggcagccgagtacgaagcagggctatgggagaagcttgaaagactggtgggactgctgaaaagcggggactaccgggcgccgccggtgaaacgggtatacataccgaaagccggaagcaaaaccgagaagcggcctatagggataccgacgtatgaggacaagatactccagagggcgatagtcatgatattggaaccaatactggaaaaggagttctacgatttttcgtatggtttcaggccgaggaaatcagcccaccaagcccttgaacggatatggaaagagagcatgggcatgaacggcgggtacgtcatagacatggacatcagcaagtatttcgacacgatagaccacaagcttttgagagggatgctcagtcggcgggttagcgatggagtgataacgcggataatcgggaaatggctaaatgcgggagtgatggacggcgggatgcgcgaataccccggaaagggaacgccgcagggtggagtaatatcgcccttgctaagcaaccttttcctgcatgaggtattggatgactggtttgtaaaagttgtaaagccccggatgaggggcaaagcaagcatggtgcgctatgcggatgacgcggtaatagtgtgcgagctgaaagaagatgctgaacggatatacaaagtattagggctgcgttttgaaaagtacgggttgaagatacaccctgaaaatgttgtgcctacgctgaacttgccgttttag

SEQ ID NO: 59012 - protein, 305 aa, Unknown
  Obtained from environmental sample
  DOMAIN (86)...(305): Reverse transcriptase (RNA-dependent DNA polymerase)
  misc_feature (1)..(305): Xaa is any amino acid
MQDTQRFWDTMHTKQQRIAQAAEKHSGESLSSVAHHIDAEWMHCAYEWTRRDGAAGIDGVTAAEYEAGLWEKLERLVGLLKSGDYRAPPVKRVYIPKAGSKTEKRPIGIPTYEDKILQRAIVMILEPILEKEFYDFSYGFRPRKSAHQALERIWKESMGMNGGYVIDMDISKYFDTIDHKLLRGMLSRRVSDGVITRIIGKWLNAGVMDGGMREYPGKGTPQGGVISPLLSNLFLHEVLDDWFVKVVKPRMRGKASMVRYADDAVIVCELKEDAERIYKVLGLRFEKYGLKIHPENVVPTLNLPF

SEQ ID NO: 59013 - DNA, 1236 bp, Unknown
  Obtained from environmental sample
  misc_feature (1)..(1236): n is a, c, g, or t
atgaattatgctgaagaatccttaaaaaaacattaccaatggcgcggtaaacttgaaaccgtacccaagatgcccgtagcgacaagggaagacctttcgcttgcctatactccgggtgtcgcccaaccctgccttgaaatacagaaaaaccccgaaaaaagctgggagcttacagggcgctggaatacggtcgccgttgtaaccgacggcactgccgttctggggctcggcgatattggtcctgaggcgggtatgcccgtaatggaagggaaatgcgtactgtttaaagctttcggcggagttgacgccgttcccatttgcatacgctcaaaagaagttgatgttatcgtagacacggtagctctgcttgcgggaagtttcggcggcattaatctggaagatatttccgcccctcgctgttttgaaatagaacgaaaattaaaagcgagatgcgatattcccattttccatgatgatcagcacggaacagcgatagtaacatttgcggcgttgattaacgctctgaaatttacggggaaaaaactggaaaatatcagcgtggttacattaggcgcaggagcggccgggatagccgtaataaagctgctgcagaccgccggtttaaacgatgtggtactgtgcgaccgccaaggggcgatttataagggcagagccgggcttaacagcgaaaaggcggaaatggcggaaatatcgaacaagcaaatgaaaaagggaagcatcgccgacgttctgaggggagcggatgtttttatcggcgtctcggcgcccggcatggtaacgccggaaatggtaaaatcaatggcggctaatgcgattttgtttccaatgtctaacccgacgcctgaaatcatgccggatgaagctcttgccgcgggagctgcggtagtgggaacaggcagaagcgattttgccaaccaaattaacaatgtccttgccttccccggcattttccgaggagcgctggacgtgcgggcaagcgacattaacaatgaaatgaaaattgcggcggcgtatgcgcttgccgatcttgtcagtgaaaaagaattacgcgccgattacattattcccgctgcttttgatccaagaataaaagacgcagtggcaaacgccgcggcgcaggcagctaaaaaaaggcggcgtggcaagagtataaaaataccggattattttttcttaaggttatccagattttgcttcgcggcagtatacccttga

SEQ ID NO: 59014 - protein, 411 aa, Unknown
  Obtained from environmental sample
  DOMAIN (16)...(158): Malic enzyme, N-terminal domain
  misc_feature (1)..(411): Xaa is any amino acid
MNYAEESLKKHYQWRGKLETVPKMPVATREDLSLAYTPGVAQPCLEIQKNPEKSWELTGRWNTVAVVTDGTAVLGLGDIGPEAGMPVMEGKCVLFKAFGGVDAVPICIRSKEVDVIVDTVALLAGSFGGINLEDISAPRCFEIERKLKARCDIPIFHDDQHGTAIVTFAALINALKFTGKKLENISVVTLGAGAAGIAVIKLLQTAGLNDVVLCDRQGAIYKGRAGLNSEKAEMAEISNKQMKKGSIADVLRGADVFIGVSAPGMVTPEMVKSMAANAILFPMSNPTPEIMPDEALAAGAAVVGTGRSDFANQINNVLAFPGIFRGALDVRASDINNEMKIAAAYALADLVSEKELRADYIIPAAFDPRIKDAVANAAAQAAKKRRRGKSIKIPDYFFLRLSRFCFAAVYP

SEQ ID NO: 59015 - DNA, 351 bp, Unknown
  Obtained from environmental sample
  misc_feature (1)..(351): n is a, c, g, or t
ttgttaatgtcgcttgcccgcacgtccagcgctcctcggaaaatgccggggaaggcaaggacattgttaatttggttggcaaaatcgcttctgcctgttcccactaccgcagctcccgcggcaagagcttcatccggcatgatttcaggcgtcgggttagacattggaaacaaaatcgcattagccgccattgattttaccatttccggcgttaccatgccgggcgccgagacgccgataaaaacatccgctcccctcagaacgtcggcgatgcttccctttttcatttgcttgttcgatatttccgccatttccgccttttcgctgttaagcccggctctgcccttataa

SEQ ID NO: 59016 - protein, 116 aa, Unknown
  Obtained from environmental sample
  misc_feature (1)..(116): Xaa is any amino acid
MLMSLARTSSAPRKMPGKARTLLIWLAKSLLPVPTTAAPAARASSGMISGVGLDIGNKIALAAIDFTISGVTMPGAETPIKTSAPLRTSAMLPFFICLFDISAISAFSLLSPALPL

SEQ ID NO: 59017 - DNA, 360 bp, Unknown
  Obtained from environmental sample
  misc_feature (1)..(360): n is a, c, g, or t
atgggaatatcgcatctcgcttttaattttcgttctatttcaaaacagcgaggggcggaaatatcttccagattaatgccgccgaaacttcccgcaagcagagctaccgtgtctacgataacatcaacttcttttgagcgtatgcaaatgggaacggcgtcaactccgccgaaagctttaaacagtacgcatttcccttccattacgggcatacccgcctcaggaccaatatcgccgagccccagaacggcagtgccgtcggttacaacggcgaccgtattccagcgccctgtaagctcccagcttttttcggggtttttctgtatttcaaggcagggttgggcgacacccggagtatag

SEQ ID NO: 59018 - protein, 119 aa, Unknown
  Obtained from environmental sample
  misc_feature (1)..(119): Xaa is any amino acid
MGISHLAFNFRSISKQRGAEISSRLMPPKLPASRATVSTITSTSFERMQMGTASTPPKALNSTHFPSITGIPASGPISPSPRTAVPSVTTATVFQRPVSSQLFSGFFCISRQGWATPGV

SEQ ID NO: 59019 - DNA, 315 bp, Unknown
  Obtained from environmental sample
  misc_feature (1)..(315): n is a, c, g, or t
gtgcgggcccccgtcaattcctttgagtttcacccttgcgggcatactccccaggcggcacacttaacgcgttcgcttcggcaccggggcgctcgccccgacgcctggtgtgcatcgtttacggtgcggactaccagggtatctaatcctgtttgctccccgcactttcgcgcctcagcgtcagtcgtcggctggaagcctgccttcgccatcggtgttcttcctgatatctacagatttcacccctacaccaggaattccggcttcccctccgcgactcaagcctgccagtttccagcgcagccccggggttga

SEQ ID NO: 59020 - protein, 104 aa, Unknown
  Obtained from environmental sample
  misc_feature (1)..(104): Xaa is any amino acid
MRAPVNSFEFHPCGHTPQAAHLTRSLRHRGARPDAWCASFTVRTTRVSNPVCSPHFRASASVVGWKPAFAIGVLPDIYRFHPYTRNSGFPSATQACQFPAQPRG

SEQ ID NO: 59021 - DNA, 447 bp, Unknown
  Obtained from environmental sample
  misc_feature (1)..(447): n is a, c, g, or t
gtgtgccgcctggggagtatgcccgcaagggtgaaactcaaaggaattgacgggggcccgcacaagcggtggagcatgtggtttaattcgatggtacgcgaggaaccttacctgggtttgacatgggggcggatgcgccagagatggcgcagcgtagcaatacgcgcccctgcaggtgctgcatggctgtcgtcagctcgtgccgtgaggtgttgggttaagtcccgcaacgagcgcaacccctaccgccagttaccagcaggtaaagctggggactctggcggaactgccggcgacaagccggaggaaggcggggatgacgtcaagtcatcatggcccttatgtccagggctacacacgtgctacaatggccggcacaaagcgatgcaagcccgagagggcagagcgaaccgccgaaagccggccgtagtccggattgaagtctga

SEQ ID NO: 59022 - protein, 148 aa, Unknown
  Obtained from environmental sample
  misc_feature (1)..(148): Xaa is any amino acid
MCRLGSMPARVKLKGIDGGPHKRWSMWFNSMVREEPYLGLTWGRMRQRWRSVAIRAPAGAAWLSSARAVRCWVKSRNERNPYRQLPAGKAGDSGGTAGDKPEEGGDDVKSSWPLCPGLHTCYNGRHKAMQAREGRANRRKPAVVRIEV

SEQ ID NO: 59023 - DNA, 663 bp, Unknown
  Obtained from environmental sample
  misc_feature (1)..(663): n is a, c, g, or t
atgctcgccctgttcagactcggtttccctccggctccggcgcttcggcgccttaacctcgctatatatcataactcgcaggctcattctacaaaaggcacgccatcaccgcgttaccgcggctctgacctgttgtgggtttacggtttcaggttctctttcactcccctcaccggggttcttttcgcctttccctcacggtacttctgcgctatcggtcgtatgccgtatttagccttggatcgtggtcgacccggattcccgcggggtttctcgtgccccgccgtacttaggataccgctcccaaacgtccacaatttcagatacggggctttcaccctctctggccggctttcccaaaaccgttctcttatcatgaacatccagttgtcgcggtcctgcaaccccactcctcagagtggtttaggctcttccggtttcgctcgccgctacttccggaatctcatgttgatttctcttcccggggtactgagatgtttcagttcccccagtatggcttccgcgccctatatattcagatgcggatgccgggatcgctcccggcgggttaccccattcggctaccggcggatcacggggtgtgtgcccctccccgccgcttttcgcagcttgccgcggccttcttcgccagggtgcgcctag

SEQ ID NO: 59024 - protein, 220 aa, Unknown
  Obtained from environmental sample
  misc_feature (1)..(220): Xaa is any amino acid
MLALFRLGFPPAPALRRLNLAIYHNSQAHSTKGTPSPRYRGSDLLWVYGFRFSFTPLTGVLFAFPSRYFCAIGRMPYLALDRGRPGFPRGFSCPAVLRIPLPNVHNFRYGAFTLSGRLSQNRSLIMNIQLSRSCNPTPQSGLGSSGFARRYFRNLMLISLPGVLRCFSSPSMASAPYIFRCGCRDRSRRVTPFGYRRITGCVPLPAAFRSLPRPSSPGCA

SEQ ID NO: 59025 - DNA, 399 bp, Unknown
  Obtained from environmental sample
  misc_feature (1)..(399): n is a, c, g, or t
atgaaccagtttcccatcggctacggctttcgccctcgccttaggggccgacttaccctgggaagattgcctttacccaggaaacctcgggcttccggcggagggggatcccacccctcttttcgtctacttatacctgcattctctcttccgccacctccagcataccttacggtacgccttcgtcggccagcggaatgctcccctaccatcctacccttgcgggcagaatccgtggcttcggttgcatgcttagccccgttacattgtctgcgcgccgtgactcgaccagtgagctgttacgcactctttcaaggaatggctgcttctaagccaacctcctggctgtcctcgccagggcacatcatttcacactcagcatgctatccgggaccttag

SEQ ID NO: 59026 - protein, 132 aa, Unknown
  Obtained from environmental sample
  misc_feature (1)..(132): Xaa is any amino acid
MNQFPIGYGFRPRLRGRLTLGRLPLPRKPRASGGGGSHPSFRLLIPAFSLPPPPAYLTVRLRRPAECSPTILPLRAESVASVACLAPLHCLRAVTRPVSCYALFQGMAASKPTSWLSSPGHIISHSACYPGP

SEQ ID NO: 59027 - DNA, 720 bp, Unknown
  Obtained from environmental sample
  misc_feature (1)..(720): n is a, c, g, or t
atggaagagactcaaatacttccgggtgtcactccgctgggtgtgaatactcaagaagaacctgaattagttgccgccattatttcggcaatatacacaaacgaaaacaagcttgaacttttcggttcaaaacaaaaactctccgaaggtccggaaatccatacgcttggcgtatcaagtctgaggaaaaaattcggccgcaaagaagttgtgcgcggcgtaaacttttctatgcagaacggcatagtggcggggcttcttggtcccaacggcgcgggaaagaccaccatcttctatatgattgtcggtttctaccagcctactcagggaattgttacaatggacgatgtggacattaccggtaaaccaatgtaccgcagagcgaggcttggcattgcctaccttccgcaggaagcctcgattttccgcaagctcaccgtcgaacaaaatatcatggcagttttggaaagccgcagggatataaatttaaaccaaaaaaaggaaaggctggaaagtctgctggacgatttcaatataggccgcataaggaaacagtacggttacaccctttccggcggagagcgccggcgtaccgaaattgcgagggcgcttgccaccgaacccaagttcttgctccttgacgaaccctttgccggcattgaccccatcgccgtttatgaaatcaagcagattataagaaagctcgcggaaaaggcatag

SEQ ID NO: 59028 - protein, 239 aa, Unknown
  Obtained from environmental sample
  DOMAIN (81)...(238): ABC transporter
  misc_feature (1)..(239): Xaa is any amino acid
MEETQILPGVTPLGVNTQEEPELVAAIISAIYTNENKLELFGSKQKLSEGPEIHTLGVSSLRKKFGRKEVVRGVNFSMQNGIVAGLLGPNGAGKTTIFYMIVGFYQPTQGIVTMDDVDITGKPMYRRARLGIAYLPQEASIFRKLTVEQNIMAVLESRRDINLNQKKERLESLLDDFNIGRIRKQYGYTLSGGERRRTEIARALATEPKFLLLDEPFAGIDPIAVYEIKQIIRKLAEKA

SEQ ID NO: 59029 - DNA, 1530 bp, Unknown
  Obtained from environmental sample
  misc_feature (1)..(1530): n is a, c, g, or t
atgaggattacactttggattgtcctccctcttgccgggttaaccttaggctggataattagatggctatatgccagatttcaacttacagcatcggagcaatttgcagagcgtataaaacatgatgcaataaaagaggctgaagcaaagaagaaggagattcttcttgaggcgaaagaacaggtaatccgtgaaaggaaccagcaggagagggaaactcgggaacgcagggctgagttacagcggtatgaacgccgcgttgtacagaaagaagaagcaatagataagaagaccgctcaacttgagcggactgaacagacttttgttgaaaaagaaaaagcatttcaacagcgggaagacgcgctttccaaagaggaacagcgctaccgggcggagcttgagcgcatttcggggctaacctccgaagaagccaaagctttaatcattcaggatcttgagaacgaagccaaacacgacgctcaatctctgatcaacaagatcgagcaggaagccaatgttacggccgaaaaaaaggcgcgcgacattctggtcacgacgatacaccgtctgtccacggaagttacgagcgacacaaccgtaacaaccgttaccctgcccaacgacgaaatgaagggccggataatcggcagggaaggccgcaacatccgtacactggaaactctcacgggcgcggacatcatcatagacgacactcccgaagccgtcgtcatctcgtgttttgatcccgtgcgccgcgagatcgccaagatcgctcttgagaagcttattctggacgggcgtattcatcccgccagaatcgaggaaatcgtcgttaaagtcagcaaggaaatttcccaaaagatttttgaagagggcgagaaggttctctttgacatgggtattcacaatatcaaacaggatgccgtcaaggcgttgggccgcctgtacttccgcaccagctacggtcagaacgtgcttcaacattcaaaggaagtggctgtcatcgccggcatgcttgccgccgaagtaggcgccaaccgcgacctcgcaaagcgcgccgcccttcttcacgacataggcaaaggaaacgaatcggactccgatctgaaccacgccgagataggcatggatatggcgcgcaaaatgggagaagacccgcgcataatcaacgcgataggcagccaccacaacgacatagagcctacatgcattgaagcggtcatagtgcagatagccgacgcaatttccgcagcacgccccggagcgcgaaaagaaaccctggacaactacataaagcgccttgaaaatcttgaaaacatcaccaccggttttgccggcgtagacaaagccttcgccatccaggccggccgcgagttacgcatcatggtaaacaacgaagccgtaaacgacgaccagacaagggaactggcgaaggaaatcgccaagaagatcgagaccgatcttcgctaccccggccgtatcaagattacaatgataagggaaacgcgaattacggagtacgcgcggtag

SEQ ID NO: 59030 - protein, 509 aa, Unknown
  Obtained from environmental sample
  DOMAIN (200)...(259): KH domain
  misc_feature (1)..(509): Xaa is any amino acid
MRITLWIVLPLAGLTLGWIIRWLYARFQLTASEQFAERIKHDAIKEAEAKKKEILLEAKEQVIRERNQQERETRERRAELQRYERRVVQKEEAIDKKTAQLERTEQTFVEKEKAFQQREDALSKEEQRYRAELERISGLTSEEAKALIIQDLENEAKHDAQSLINKIEQEANVTAEKKARDILVTTIHRLSTEVTSDTTVTTVTLPNDEMKGRIIGREGRNIRTLETLTGADIIIDDTPEAVVISCFDPVRREIAKIALEKLILDGRIHPARIEEIVVKVSKEISQKIFEEGEKVLFDMGIHNIKQDAVKALGRLYFRTSYGQNVLQHSKEVAVIAGMLAAEVGANRDLAKRAALLHDIGKGNESDSDLNHAEIGMDMARKMGEDPRIINAIGSHHNDIEPTCIEAVIVQIADAISAARPGARKETLDNYIKRLENLENITTGFAGVDKAFAIQAGRELRIMVNNEAVNDDQTRELAKEIAKKIETDLRYPGRIKITMIRETRITEYAR

SEQ ID NO: 59031 - DNA, 684 bp, Unknown
  Obtained from environmental sample
  misc_feature (1)..(684): n is a, c, g, or t
ttggaaggcgggacgctgcttatcagccgtactactgttattttctcatggtttaaaaacttctttgaagattgcgggtttaagggtgtaatttcaatagagtacgaaaaagacgatcttgatgccctgctgaatgaactaaaaccaaaatatgtttttatacacagcgaattttactcgtgcgtaacgccttacatgataggcaaacttattaagagatttccaaagttaaaaataaacattgttaatttttgtattttacctgtcaacattgcagcgcagttcatctttcatggtgctaattcctatcttgattttaatgacagtattgaggaaattaaaaggggtctggagataattcaatccggtaaagaatattattcacagaagattaaacgagagattgacttaactaatgaaaatatggattttacagaagatgtaactaatcgtgaaaagcaggttttacgtcttgtctgcaacggttataatgataatcaaattgccgcaaattttaataaaagcaggcggacggtagatactcatattaataatttgtataaaaaacttgatgttaaaaatagggtaaatttattaagaaaggctttatttcttggactggttaagttaaaagatttaagttttcatggtacttatataaaaatacagcaacaccctttataa

SEQ ID NO: 59032 - protein, 227 aa, Unknown
  Obtained from environmental sample
  DOMAIN (145)...(202): Bacterial regulatory proteins, luxR family
  misc_feature (1)..(227): Xaa is any amino acid
MEGGTLLISRTTVIFSWFKNFFEDCGFKGVISIEYEKDDLDALLNELKPKYVFIHSEFYSCVTPYMIGKLIKRFPKLKINIVNFCILPVNIAAQFIFHGANSYLDFNDSIEEIKRGLEIIQSGKEYYSQKIKREIDLTNENMDFTEDVTNREKQVLRLVCNGYNDNQIAANFNKSRRTVDTHINNLYKKLDVKNRVNLLRKALFLGLVKLKDLSFHGTYIKIQQHPL

SEQ ID NO: 59033 - DNA, 462 bp, Unknown
  Obtained from environmental sample
  misc_feature (1)..(462): n is a, c, g, or t
gtggagacgttaggttccgaatgcgcgaatacggcaatggccgcaatgcaggcggcaaattcagggaggacggacgcggctgtcatttcatcgcgtgattgcgcggagttgtacgggttacaggcgctatcgttcaatatccagaacaccgacaacaattacacccgctttatttgcatttccaaaaagccggaaatttatccgggggcgcataaaaccagtcttatgttagcgttgaaacacaagcccggttccctctaccatgtccttgcgaaattttacgcgcatggaatcaacatgaacaaactggaaagccgccccatttccgggcaagcctttgagtttcttttttattttgacattgacacgcccatcatttcagacgaactgaagcaggtgttggcggagcttgagcaggagacggatatgtttaattatttggggacttatcaggagatatag

SEQ ID NO: 59034 - protein, 153 aa, Unknown
  Obtained from environmental sample
  DOMAIN (73)...(146): ACT domain
  misc_feature (1)..(153): Xaa is any amino acid
METLGSECANTAMAAMQAANSGRTDAAVISSRDCAELYGLQALSFNIQNTDNNYTRFICISKKPEIYPGAHKTSLMLALKHKPGSLYHVLAKFYAHGINMNKLESRPISGQAFEFLFYFDIDTPIISDELKQVLAELEQETDMFNYLGTYQEI

SEQ ID NO: 59035 - DNA, 1425 bp, Unknown
  Obtained from environmental sample
  misc_feature (1)..(1425): n is a, c, g, or t
atgcgagaactttgcgcaaaagacccatgtcttgcggaacatataaccaatgatattcttgatttcataaataagaccaaaaggcatatacagaagatagaagacccatttgaaaacgaacaaaagcttttggataattttagtcaaaccgatagagattcctatgaaaaatcatggaaaataacagcaccttttattcaagaaacctatgagccgcaaatacttgatactgaattttattatgaggaatttcaaaagagcttatctcctagcataaaggataaaaacagcataagctttcaaagtgtaaaagagtattttaccgacaagtggagcggtttgctttttcaaaaaaaactgaaatgggaacttgatattattgaagaacagcgtaaagaattctgcaaaaagctttatgaacaaatagaacagcttaaaaaacttcaggaattgcttgagccttttatgggtgaactggggcgactgtgggatatgagcaagggtcgctggcagaaagttaactttgatattttaaaaaaatatgcggaacttttacaaaaagatatatctttacaggaacttaccgaaatgctggggtggatgcggcaagtggagcgtgaatacgaggaagaaatttttgccgaaatggtcgttaagccagcatggaaagccgaacacgccgctaagtcggaacttgttggtatccacgaaagcgatgacatcagtagtatgcttccagccgaagccgccttgcttgccgatgaaacaacagaactgctgttctataaaaaatttgcagagaaaaagctgcaaacttttgagtatcaggcaaaagttctttctagagaggtagacgaggttaagaacaagcgacaaaaggaaagggaagaaaaaaaagggccctttattatctgtgttgataccagtggctccatgcatggaacgcctgaaacagtcgcaaaaaccctctgttttgctcttctcaagatggcggtaagagataaccggaaatgttatttgatttcgttttcaactgccatcgaaacgctcaatctgacggatttaaagaacagccttgataaacttgttgaatttctttccatgagctttaacggcgggacagacgcaatccctgccatgcgggaagccctcaaaatgttggaaacagaagattacaaaaaagccgatgttataatggtttccgattttgtaatgtcgggttttgacgaacagactaaaaatcaaattaacgccgccaaagaaaaagaaacaaagtttcatagccttgtgataggcgatagcgggaataaaaatacaatcgaagaatttgacagtaattgggcgtataatacaaatagtggggacgtattacagttggttaaagatattaatgggatttattataaaaacctggaaaaatcctaa

SEQ ID NO: 59036 - protein, 474 aa, Unknown
  Obtained from environmental sample
  misc_feature (1)..(474): Xaa is any amino acid
MRELCAKDPCLAEHITNDILDFINKTKRHIQKIEDPFENEQKLLDNFSQTDRDSYEKSWKITAPFIQETYEPQILDTEFYYEEFQKSLSPSIKDKNSISFQSVKEYFTDKWSGLLFQKKLKWELDIIEEQRKEFCKKLYEQIEQLKKLQELLEPFMGELGRLWDMSKGRWQKVNFDILKKYAELLQKDISLQELTEMLGWMRQVEREYEEEIFAEMVVKPAWKAEHAAKSELVGIHESDDISSMLPAEAALLADETTELLFYKKFAEKKLQTFEYQAKVLSREVDEVKNKRQKEREEKKGPFIICVDTSGSMHGTPETVAKTLCFALLKMAVRDNRKCYLISFSTAIETLNLTDLKNSLDKLVEFLSMSFNGGTDAIPAMREALKMLETEDYKKADVIMVSDFVMSGFDEQTKNQINAAKEKETKFHSLVIGDSGNKNTIEEFDSNWAYNTNSGDVLQLVKDINGIYYKNLEKS

SEQ ID NO: 59037 - DNA, 1017 bp, Unknown
  Obtained from environmental sample
  misc_feature (1)..(1017): n is a, c, g, or t
ttgatggccgagagttgtttttttgagattatgcttgtagttttcgtcttttcggcggccttgaccggctgcaaggagatgacagccctgatgaataaggggctgcagaaagcccgcgaggctggtttaattgacagaaaaacgcaaaaagctatcagcgataccggcaaagcaatggcgagcgccgcagggactaccggcaaagcggttgccaatgccgccgagaccacaggcaaagcggtggttaacgccgctgagactaccggcaaagcggtggccaatgccgctgaggatataccccccgatcaggagtactatataggcagggcggttgcggctaacatctttaagacatattctttatggaggggtaatcccgcccttacggcttatctcaaccggatttgcggcgtcatagtgatcaattcctccaaaccggatatctacaacggctaccatgttgcgattctggattcaagagagattaacgcttttgccacatcaggcggccatatccttataacacgcggtcttatagcggccgcaaaaacagaagacgcccttgccggggttattgcccacgaggtcgcccatatacagttgcagcacagcaccaaagccattaaagcaagccgtataacccaggtactcatggagtcaggagccgccgccgcaggggccgtctcaggttatagcgtgaaagagataacctctatcttcaatgaaagcgtcggggatattgtcggcacgctcgtgaacaacggctattcccaggtgcaggagtttgacgccgatgccaaagctctgtcccttcttgccgacgcgggttacaatcctaacggattaattgagatgctaatggagcttgagaagacgcagaaaggcagtcccggcggttttaacaagacccatcccagcccggaaatacggcgcgccgcagctgaaaaagtcatggccatacagcccaaagtcacggataccagctcctaccgaaaagcgagattcaagaacaagtag

SEQ ID NO: 59038 - protein, 338 aa, Unknown
  Obtained from environmental sample
  DOMAIN (139)...(319): Peptidase family M48
  misc_feature (1)..(338): Xaa is any amino acid
MMAESCFFEIMLVVFVFSAALTGCKEMTALMNKGLQKAREAGLIDRKTQKAISDTGKAMASAAGTTGKAVANAAETTGKAVVNAAETTGKAVANAAEDIPPDQEYYIGRAVAANIFKTYSLWRGNPALTAYLNRICGVIVINSSKPDIYNGYHVAILDSREINAFATSGGHILITRGLIAAAKTEDALAGVIAHEVAHIQLQHSTKAIKASRITQVLMESGAAAAGAVSGYSVKEITSIFNESVGDIVGTLVNNGYSQVQEFDADAKALSLLADAGYNPNGLIEMLMELEKTQKGSPGGFNKTHPSPEIRRAAAEKVMAIQPKVTDTSSYRKARFKNK

SEQ ID NO: 59039 - DNA, 501 bp, Unknown
  Obtained from environmental sample
  misc_feature (1)..(501): n is a, c, g, or t
ttgacgttatcaccnggtttaatcaaagccaacattcccacccgcattgcctttatggttgccagcaaaatggacagccgaatcattatcgacatggtaggcgcggaaaaactgctgggtaaaggcgatatgctttatgcgggcgtagttgatcccttcccgattcgtatgcagggggcttttgtctccgaagaagaagttgaagccgtagtggaacatgtaaaaacgctcggcgaacccgactacattgacgaagaaattttctacgacgacgaggaagaagaagttaccacttccctcttttccgacggcgacgatcccttatacgacaaggcccttgaaattgtgctgcagcaaggaaaggccagcgccagttttattcagcgccgcctgaaaatcggctacaaccgcgccgcccgtttagtcgaagaaatggaacataaaggagttgtggggccggcccaagggtcaaagccaagagagttattacgcggcgtataa

SEQ ID NO: 59040 - protein, 166 aa, Unknown
  Obtained from environmental sample
  misc_feature (1)..(166): Xaa is any amino acid
MTLSPGLIKANIPTRIAFMVASKMDSRIIIDMVGAEKLLGKGDMLYAGVVDPFPIRMQGAFVSEEEVEAVVEHVKTLGEPDYIDEEIFYDDEEEEVTTSLFSDGDDPLYDKALEIVLQQGKASASFIQRRLKIGYNRAARLVEEMEHKGVVGPAQGSKPRELLRGV

SEQ ID NO: 59041 - DNA, 507 bp, Unknown
  Obtained from environmental sample
  misc_feature (1)..(507): n is a, c, g, or t
ttggacgctctggaattttccaacgggataaagaatatttccgaaagtaccattgtaaaggtagaagtggacggaaagtcctatgacgcctttgttaaggatacgcagagaaacattgttgacggaaacatccttcatgttgatttttatgaagtagaaagcggcattgccctgagggccaaagtttccatcacccttaaaggaaacgccatcggcgtcagggagggaggcgttctggaatttccccttcatgaaatcgaagtggagtgcctgcccaaagatcttcccgaaaggattgaaattgacatctcgactcttggcgccaaccagtccatccacgtacgggatatacccttggccgatacgatcaggctaatttcagcctcggatcaggttgtcgctctggtgaagtacgccaaggagcaggccgcagcggcgccgacggaaggagaagccgcagcagcagccggtacggcagcggcagccccggaagcagccaagacttaa

SEQ ID NO: 59042 - protein, 168 aa, Unknown
  Obtained from environmental sample
  misc_feature (1)..(168): Xaa is any amino acid
MDALEFSNGIKNISESTIVKVEVDGKSYDAFVKDTQRNIVDGNILHVDFYEVESGIALRAKVSITLKGNAIGVREGGVLEFPLHEIEVECLPKDLPERIEIDISTLGANQSIHVRDIPLADTIRLISASDQVVALVKYAKEQAAAAPTEGEAAAAAGTAAAAPEAAKT

SEQ ID NO: 59043 - DNA, 453 bp, Unknown
  Obtained from environmental sample
  misc_feature (1)..(453): n is a, c, g, or t
gtgcccatgatactaaagattgagcaaaatccgacgtatggggatattgaagtactaattacttgtccggtaaaaaacaaaacggtagaacgtattgtctcattgataaaatccgttgacacacaaatagaatgctattcagatgacagtataaaactggtaaccgtctctgatatttactacattgaaagtatagacggtaaaactgttgtctgctgtgaaaaagaaaattattttgttaaaagccgcttgtaccagatatatgaaaaattaagagacaacggttttatacaaattagtaaatattgcatcttaaatattaataagttggacaaattcaggccattggacaataatcgcctggaagcggtactatctaacggggtttacttgtgtattaccagaaaatatatttcagggataaaacaaatattaaaggatatgaataaatga

SEQ ID NO: 59044 - protein, 150 aa, Unknown
  Obtained from environmental sample
  DOMAIN (49)...(146): LytTr DNA-binding domain
  misc_feature (1)..(150): Xaa is any amino acid
MPMILKIEQNPTYGDIEVLITCPVKNKTVERIVSLIKSVDTQIECYSDDSIKLVTVSDIYYIESIDGKTVVCCEKENYFVKSRLYQIYEKLRDNGFIQISKYCILNINKLDKFRPLDNNRLEAVLSNGVYLCITRKYISGIKQILKDMNK

SEQ ID NO: 59045 - DNA, 420 bp, Unknown
  Obtained from environmental sample
  misc_feature (1)..(420): n is a, c, g, or t
atgaaaactataaaaacaattattaattatattatgtttgttaccggttccgctttggtaatactggcgttattttcattattgttcaatgttgaaattagttttgttcccactatttttgaaatattcgccgcaaatatcgttattattctggggctttttttacgcatgaaatttgaaatccgcaacataattctggaatatctgattgatattagttatattatcgccgttcttgttgtattcggtcttgtatttgattggtattccgcaataccggtgttgctgctggtggtaatggcggtggtaatctacatattcgctacgataatcactgttactaaaatcaaaaaagacgcggaagaattaaacaaattacttaaaaaacaccaggaaaaacaggcggataatgcatcttaa

SEQ ID NO: 59046 - protein, 139 aa, Unknown
  Obtained from environmental sample
  SIGNAL (1)...(26)
  misc_feature (1)..(139): Xaa is any amino acid
MKTIKTIINYIMFVTGSALVILALFSLLFNVEISFVPTIFEIFAANIVIILGLFLRMKFEIRNIILEYLIDISYIIAVLVVFGLVFDWYSAIPVLLLVVMAVVIYIFATIITVTKIKKDAEELNKLLKKHQEKQADNAS

SEQ ID NO: 59047 - DNA, 1740 bp, Unknown
  Obtained from environmental sample
  misc_feature (1)..(1740): n is a, c, g, or t
atgatttttacctttatctacattgtaatttccctccttgcgctttttctgggcatatttcaaattgttgggaaaaaccagcgcggcaccttaaactggtactttttcgccatttgtaccgtagtagcgatttccacttttaacacaggcgtttcgttttatatagccttttcggaaaatgtgcgtttaggcgaatcaagttatatattcagcactacaaatattattttaacaacaataaaagttttggccgttccttttctttacgcttttatccttaatctttcaaaaatcaattcaaagaaattcaaaatattacaatttgtcttactctccgccaatacgcttgctgtcgcctcaattttaattattttagctgtatccgctgacgcggttaatattctttcttctcctttttttaatatatttactctnttaattgtaattttctctttcttttgcctgattcttctgttatacaaatggataagaaccgcgtccctgaaacgcgaccgtttgcaggcaaaaacaatatcaatagcttcaattgtgtcgtttctttcccttgtctgcctgttattttcccttagttcatattttatagaacttttcccttttgccggaatgctggcgcttctctttatctgcaaccattacgccaaccagtataacagttttagttttaacattaccaaccttgccgcttatgtttatacggcggttaaactgccagtgcttattcttgacgagacaggcagtattgtgctgtgcaatacggcttcggaaagtttttttaagaataacattgatcagcttaaaagattgaaattgtctgacttgttttattttgggaatacctcgctgtcattacagcgtcaaaaaaaagacgcgtctgttttcaactgcgacgccgtttgcctggtagaaaaacaaaaatgccaaatctcgctgaattatgtttatgataaattcgacgaaatgatctgtaccgtcgtgattgtcaccgacatcaccgaaaaagaggatttaatacgtcagcttaacgaatctcacgcgagaattaaacagtttaacaaggaattgcagtccgaggttgacaggcagactgaaagcatacgcaacctgcaaaaggcgattgtatattcaatgagcgatttgatagaaaaaaaagacggctacaccggcgtacacacaaggcgcgtaagcgaatatgtttccatcttgctgcgtgaattggcgcggcgcggctatcaatttaccgaatccgacattcaaagaatagcggaatcttcgcttttgcatgacatgggaaagatcgccatacccgacagtatccttcttaaaaacggaaaattggacgatgaagagctaggcgtaatgaaaagccacagcgcgaaaggagcggactctttggaaaaatcaatgcagttcgcgaaggataacgactttttgaagaacgcgtttgtaatggcaaagcatcatcatgaaaaatggaacggcggcggttatccagacggcaaaaaaggagacgagatacctcttcttgcgcgcgtaatcgccattgccgatgtttatgacgctctgcgttcacaacgctcgtataaaacgccgttcagccgcgagaaggcaaaagcgattatattggaagaaaacgggcggcaatttgatcctgaactggttgatgtttttttggcggtggagccggagtttgaggagttttgtaaaagtactcaggagtga

SEQ ID NO: 59048 - protein, 579 aa, Unknown
  Obtained from environmental sample
  SIGNAL (1)...(24)
  DOMAIN (394)...(528): HD domain
  misc_feature (1)..(579): Xaa is any amino acid
MIFTFIYIVISLLALFLGIFQIVGKNQRGTLNWYFFAICTVVAISTFNTGVSFYIAFSENVRLGESSYIFSTTNIILTTIKVLAVPFLYAFILNLSKINSKKFKILQFVLLSANTLAVASILIILAVSADAVNILSSPFFNIFTLLIVIFSFFCLILLLYKWIRTASLKRDRLQAKTISIASIVSFLSLVCLLFSLSSYFIELFPFAGMLALLFICNHYANQYNSFSFNITNLAAYVYTAVKLPVLILDETGSIVLCNTASESFFKNNIDQLKRLKLSDLFYFGNTSLSLQRQKKDASVFNCDAVCLVEKQKCQISLNYVYDKFDEMICTVVIVTDITEKEDLIRQLNESHARIKQFNKELQSEVDRQTESIRNLQKAIVYSMSDLIEKKDGYTGVHTRRVSEYVSILLRELARRGYQFTESDIQRIAESSLLHDMGKIAIPDSILLKNGKLDDEELGVMKSHSAKGADSLEKSMQFAKDNDFLKNAFVMAKHHHEKWNGGGYPDGKKGDEIPLLARVIAIADVYDALRSQRSYKTPFSREKAKAIILEENGRQFDPELVDVFLAVEPEFEEFCKSTQE

SEQ ID NO: 59049 - DNA, 345 bp, Unknown
  Obtained from environmental sample
  misc_feature (1)..(345): n is a, c, g, or t
atgaaagaaacaataaaatcccgatttaccggtattcttatcatgctggccgccgccgccgttttcggcgcggctgtaatgctgctgtggaacgctcttttgccgcaaattttcgctcttccgcaaattaattacccgcaggcggttggattgctcgttttgacgcggctgttattcggcggcataggcggccgactgcacggacacaggggaaggggagaaggacatctgtttcaacacgggaataagcttcgcgagaaatggatgaacatgagcgaggaagagcgcaaagaatttatcgaaaaggaaaaagactttttcaaaagnccgcgcttctcattttaa

SEQ ID NO: 59050 - protein, 114 aa, Unknown
  Obtained from environmental sample
  SIGNAL (1)...(23)
  misc_feature (1)..(114): Xaa is any amino acid
MKETIKSRFTGILIMLAAAAVFGAAVMLLWNALLPQIFALPQINYPQAVGLLVLTRLLFGGIGGRLHGHRGRGEGHLFQHGNKLREKWMNMSEEERKEFIEKEKDFFKXPRFSF

SEQ ID NO: 59051 - DNA, 1824 bp, Unknown
  Obtained from environmental sample
  misc_feature (1)..(1824): n is a, c, g, or t
ttgcccaacacaaaaataatgatgcttttacgcggtcagaaccttttgggatacaggcattatgccgatgacgttgtagaaaaatttgttgaatacgcggcaaaagacggcgttgatgttttccgtatttttgacgcggtaaacgatccgcgcaaccttaaagccgctacggaagccgccaaaaaaacaggcaagcatatacaggcgacaatttcttacgcggtaacccccttccacacaatagaaaaatacgctgaattcgctaaacagcttgccgataccggcgcggattcaatttgtattaaagatatgtctggacttcttaaaccttatgaaggctatgaacttgtaaaagcaatcaagaaagtgacggatctgccgattgaaattcacacccacgcgactactggtatgtccgtggcgactcttaccaagtgcgccgaagcgggagcggaaattttagacactacaatttcatcaatgtctatgggaacaagccacagccccacggaaacaatggtagaaattttcaagggcacggagtacgacacgggactggataccgcactgttactcgaaatcgcggcatatttccgtgatgtccgcaagaactacaaaaaatttgaatcaagcttccttggcgcggatacccgcatcttagcgagccaggttccaggcggaatgttaagcaaccttgaaagccagcttaaagaacagggcgcttccgataaaattgacgaagtacttaaagaaatcgccgttattcanaaagattcaggttatccgccgctcgttacgccaacaagtcaaattgtcggaacacaggcagtgttcaatgtgctttttggcaggtacaacaaactctcaggcgaattccaggatcttgttacaggaaaatacggcgcatgtccggcttcaaaaaatcccgacgttgtaaagaaagcccttgaagcccttaagatggaaaaggaaatcacccaccgcccggcggatgacatcccaccggaatattccaagcttgaagaagaagcaaaaaaacttttaggcacaagtacggttacaaccgaagatgttttaacttatgcaatgttcccgaaagtcgcgccggacttctttaaaaaacgcgctaacggacctgtggtatttaaacccgaagccgaaggagcagcagctccagtggccggacaggcagcacgttactcagtaaatgtaaacggcgcaaattacgatgtagttgtcgctcccgccggaacggtagccgtagctcccgcaggcggcgcttctgcagttgccacacctgtcgcatcaagcggcggagttgggagcgtaaatgttatagctcccgtagcgggaatcgtgctacgctacgccgtacaagaaggcgcggatgtggaagccggtcaaacaataataattttagagtccatgaaaatggaattggaaataaaagctaacgcgtccggtaaagtgcattttatcgctcccacaggcacgagtgttgtaggcaaacagcctgtcgccgaaatcagcggcgcggatattgccgttcccgcttcctcagccgctccggctcccgccgcacaagctgctcccgcacctgcggcaagcggcggcggcacgatagtcggtgctcctgtcgcaggcattgttttacgttactcagtaaacgaaggtgatacggtatccaacggtcaaacaatcgccattatcgagtccatgaaaatggaactggaaataaaggcaaacgcttcaggcagggtgcatttcatcgccgcgttaaacacatcgcttgtgtcaaaacagccgatagcgcagataagttag

SEQ ID NO: 59052 - protein, 607 aa, Unknown
  Obtained from environmental sample
  DOMAIN (2)...(204): HMGL-like
  misc_feature (1)..(607): Xaa is any amino acid
MPNTKIMMLLRGQNLLGYRHYADDVVEKFVEYAAKDGVDVFRIFDAVNDPRNLKAATEAAKKTGKHIQATISYAVTPFHTIEKYAEFAKQLADTGADSICIKDMSGLLKPYEGYELVKAIKKVTDLPIEIHTHATTGMSVATLTKCAEAGAEILDTTISSMSMGTSHSPTETMVEIFKGTEYDTGLDTALLLEIAAYFRDVRKNYKKFESSFLGADTRILASQVPGGMLSNLESQLKEQGASDKIDEVLKEIAVIXKDSGYPPLVTPTSQIVGTQAVFNVLFGRYNKLSGEFQDLVTGKYGACPASKNPDVVKKALEALKMEKEITHRPADDIPPEYSKLEEEAKKLLGTSTVTTEDVLTYAMFPKVAPDFFKKRANGPVVFKPEAEGAAAPVAGQAARYSVNVNGANYDVVVAPAGTVAVAPAGGASAVATPVASSGGVGSVNVIAPVAGIVLRYAVQEGADVEAGQTIIILESMKMELEIKANASGKVHFIAPTGTSVVGKQPVAEISGADIAVPASSAAPAPAAQAAPAPAASGGGTIVGAPVAGIVLRYSVNEGDTVSNGQTIAIIESMKMELEIKANASGRVHFIAALNTSLVSKQPIAQIS

SEQ ID NO: 59053 - DNA, 561 bp, Unknown
  Obtained from environmental sample
  misc_feature (1)..(561): n is a, c, g, or t
ttgccattgatcagatcggccgagtacggagataaacggcttttcttccatcatgtgcttaaagtagatgatgtaattaagttgcctaagaaaaattcgtcttttgggacgcaaggtatcgcgcctgcggcaaataccgcggtaattaaaccgtctacgtcaaataagacggcaaccccagcggggatttatgctttacgttggcctgtaacgcctaaggatatttcctacatgactggacagatgggcgttgttgtagaaggtgaaaaacttgaatcagtgcggagtttgactcaggggaatgtagtatcagccggcccttggcgcaagtttggtagggttgtaattgtagaaacggccggcggttattattacatgtacggcggctgtgagactataaccgtaaatgtcggcgacaggataacgccgggaatggaattgggaaaattgggtataaacgcggtttcggttaagccacaactcttttttatggttttccgaaacgataatcctatggatccggcattagctcccagagccggaaataatcaaagaacgtaa

SEQ ID NO: 59054 - protein, 186 aa, Unknown
  Obtained from environmental sample
  DOMAIN (79)...(174): Peptidase family M23
  misc_feature (1)..(186): Xaa is any amino acid
MPLIRSAEYGDKRLFFHHVLKVDDVIKLPKKNSSFGTQGIAPAANTAVIKPSTSNKTATPAGIYALRWPVTPKDISYMTGQMGVVVEGEKLESVRSLTQGNVVSAGPWRKFGRVVIVETAGGYYYMYGGCETITVNVGDRITPGMELGKLGINAVSVKPQLFFMVFRNDNPMDPALAPRAGNNQRT

SEQ ID NO: 59055 - DNA, 990 bp, Unknown
  Obtained from environmental sample
  misc_feature (1)..(990): n is a, c, g, or t
atggaagtcagattagagaagacgggaaaacgtcctaaaaaattaatagataagtctcaaaaacgaatgaaggcgcaaaaggaatccgatccgttggcgttatacttccgtcaaatttccagattcccgcttttaactttgcatgaagaacaaaatatcggcgaaaaaattattaaccttcgcgccaagcttaaagaacttgaatcggataaaaagaaaaataaagacattgactacagtaaagaaaaagccgctcttgacaacgcccttcttcactataaaaacgccatgataaacgccaatctgcgccttgtcgtgtccattgccaagaattatcaacatcgcggcctttcgcttttggatttaattgacgaaggaaatataggtcttattgaagcggttgaacgttttgattacacaagaggctgccgtttttccacttacggaacttggtggattaggcaggctattatcaagagcattggggataaggggcgcgttatccgcataccgattcacatgctcaacacaattaaaaaatgctattatgtggcgaaacagcttacacaggatttaggacgcgaccccaacgaagatgaactgtccgagtatttggacgttcctgtttctaaagttaaagaaatagtgaagttgtcccaggagacgacaagtttggacaccattgttgacgacgggaatcttacgcgccttgccgatttaattaaagacgacgcgagagccgagccgtttgagatggttttttccatgacattgcaggaaacaatcggcgggattctttcccagttatccgaaagagagatgaaaataatccaactgcgttttggcctgaccggggaaaacccgcttaccctggaagaaaccggaaaatatcttggcatcactcgcgagcgcgtccgtcaaattcaggaaaaagccgtctggaaactccgcacattacatgaattgcgcgagttaagagaaaattcttaa

SEQ ID NO: 59056 - protein, 329 aa, Unknown
  Obtained from environmental sample
  DOMAIN (29)...(65): Sigma-70 factor, region 1.2
  misc_feature (1)..(329): Xaa is any amino acid
MEVRLEKTGKRPKKLIDKSQKRMKAQKESDPLALYFRQISRFPLLTLHEEQNIGEKIINLRAKLKELESDKKKNKDIDYSKEKAALDNALLHYKNAMINANLRLVVSIAKNYQHRGLSLLDLIDEGNIGLIEAVERFDYTRGCRFSTYGTWWIRQAIIKSIGDKGRVIRIPIHMLNTIKKCYYVAKQLTQDLGRDPNEDELSEYLDVPVSKVKEIVKLSQETTSLDTIVDDGNLTRLADLIKDDARAEPFEMVFSMTLQETIGGILSQLSEREMKIIQLRFGLTGENPLTLEETGKYLGITRERVRQIQEKAVWKLRTLHELRELRENS

SEQ ID NO: 59057 - DNA, 1659 bp, Unknown
  Obtained from environmental sample
  misc_feature (1)..(1659): n is a, c, g, or t
gtggacgaaaggaaaaaccagggcatcgaagggacgggactggggcttgccattacaaaacgcctctgtgttgcgatgggcggggacattacggtggaaagcgaatacggtaaaggcagtacttttacggcgactatcccccaggattttgaatccgaaacaccctttgccatagtggaggaagcagaaaaaaagaaggtgctggtctatgaaggcagggctgtctatgccaaatcgatatgctggactctggaaaaccttaatgttccatatactttggtaacgagccatgatgactttgccgctgctctgtatcttgaagaatggttctatgtgttttccggttacggtctatataataagatcaagccgataatggaacacggatttttctataatgacaagaaaccgccccttgcactcatggttgaatggggaaccgagccttacatcaacggtgtgcggtttgtgtctattccggtgcagtccctgtcaattgccaacacccttaacggcaaggctgacagcaaaggctattatgataatgacggaaacgccagcgcaattcgtttcatattccccagtgcgcggctgctggtggtagatgatatcgccacaaaccttaaagtggccgaaggccttctttccccctacaaggtttcggtggacacatgccttaacggtatgctggctgtagaactggtaaaacgcgcagctctggaggagcgcgattacgacattgtacttatggatcacctgatgcctgaaatggacggtattgaaacaactgcggccatccgtgcctgggaaaaaggacagctggaaaataacgttacgcgcaaacagattcctattgtcgcattaaccgccaatgccgttgtgggaatgcgggaaatgtttatcaaaaacgacttcaatgattttctttccaaacccatagatgtttccaaactggatgaaatccttaatcgctggataccggaggagaaaagggatgtccagaaaagcgctgtatctcttgacgagaatggacagcacggcgggagcccggggatgatggttattcccggcgttgatgtacaaaaaggcatcgccatgaccggagggactgttgccgcttaccggcaggtattgtccctgttctgtaaagatgcggaagacaggctgccgctgttacaaaaaacgccggaggcggatgccctgtccgtatttgtcactcaggttcacgccctgaaaagcgcgtctgcttctatcggcgcacaggaagtatcggtccaggccgcggaacttgaagccgcgggcaaagccggggatatggcctttatccgtgagaatatatccggctttgcgaaacagcttgcggaattgataagtgaaataggcgccgctctggaaacggacaaaaacagcggcggcatgataaataacaatactgtcggaacagcggacgataccgcggcgctggtttccctgttaagcgatcttgaagcggcgctgaaagcccagaaatcggctgacattgatcggattctggaagaactaaatcaaaaaccgctggatgcgcaaaccagggaagtgctggaaaaaatatccgatgatgtgctgatgaccgaatttgaaagcgccctgaaaaccattgatgaggtgctgcgaatatga

SEQ ID NO: 59058 - protein, 552 aa, Unknown
  Obtained from environmental sample
  DOMAIN (376)...(463): Hpt domain
  misc_feature (1)..(552): Xaa is any amino acid
MDERKNQGIEGTGLGLAITKRLCVAMGGDITVESEYGKGSTFTATIPQDFESETPFAIVEEAEKKKVLVYEGRAVYAKSICWTLENLNVPYTLVTSHDDFAAALYLEEWFYVFSGYGLYNKIKPIMEHGFFYNDKKPPLALMVEWGTEPYINGVRFVSIPVQSLSIANTLNGKADSKGYYDNDGNASAIRFIFPSARLLVVDDIATNLKVAEGLLSPYKVSVDTCLNGMLAVELVKRAALEERDYDIVLMDHLMPEMDGIETTAAIRAWEKGQLENNVTRKQIPIVALTANAVVGMREMFIKNDFNDFLSKPIDVSKLDEILNRWIPEEKRDVQKSAVSLDENGQHGGSPGMMVIPGVDVQKGIAMTGGTVAAYRQVLSLFCKDAEDRLPLLQKTPEADALSVFVTQVHALKSASASIGAQEVSVQAAELEAAGKAGDMAFIRENISGFAKQLAELISEIGAALETDKNSGGMINNNTVGTADDTAALVSLLSDLEAALKAQKSADIDRILEELNQKPLDAQTREVLEKISDDVLMTEFESALKTIDEVLRI

SEQ ID NO: 59059 - DNA, 525 bp, Unknown
  Obtained from environmental sample
  misc_feature (1)..(525): n is a, c, g, or t
ttgaacggcagccccgagaattattatctttttttcggtcagcttacagggtataaacgcgccgatcttgccattgaggcatgtatctcttccgggcggcgtattgtagccgcgggcgctggcaagagaaataaaaagtggcgcaagtatgagaagaccggtcttgtcacatttaagggcagagtttcagatgaagacgcgctgaaactttattcgtctgcgcgggcgctgctcttccccggtattgaagatttcggtataattcccgtagaagcccaagccgcgggctgtcctgtaattgcataccgcggcggcggcgcgcttgatacggtaaaagaaggcgtaacgggcattttcttcgacgaacaaaacaaagaatcgctgattaaggcaatggatcattttgagtccattcaagggcaatttaaaaatcgcggactttttaacgcgcatgtacagaaattttcgcgcgccgcgtttaaagaaaaaatacagcgtatcattacggaaagaaagagagtataa

SEQ ID NO: 59060 - protein, 174 aa, Unknown
  Obtained from environmental sample
  DOMAIN (1)...(152): Glycosyl transferases group 1
  misc_feature (1)..(174): Xaa is any amino acid
MNGSPENYYLFFGQLTGYKRADLAIEACISSGRRIVAAGAGKRNKKWRKYEKTGLVTFKGRVSDEDALKLYSSARALLFPGIEDFGIIPVEAQAAGCPVIAYRGGGALDTVKEGVTGIFFDEQNKESLIKAMDHFESIQGQFKNRGLFNAHVQKFSRAAFKEKIQRIITERKRV

SEQ ID NO: 59061 - DNA, 1131 bp, Unknown
  Obtained from environmental sample
  misc_feature (1)..(1131): n is a, c, g, or t
atggataaagtcatcaggatcacggagtattttgcggatgttgagaccaccaaagaacacaacggctatttttgcagcgtgggggaggcgctgaccgtcgtgatactcggttctttgtgcggcctaagaaacgtcagccaaatcagccaatgggcagccaacgagcgaatcaaaggctttttagccgggcactttcgcatagaaagaataccgtgttactattggatgctgtgcctgctcgccctaattaagccaacgtctttaaaccaatgcctgaccagacgggtgcaatcgcttttgcctgaggggatgaaggcgatgaccgtttcatttgacggcaaaacggcatgttccaccggaaagatggatgcgtacgacagccctctgcacattataagcgcgcaccttgcggaactggggataacccttgcaggccttaagacggacggaaagagcaacgagatacccgccgtgcgggaactgataggcatgcttgaggttgccggctgcgttatcgttgccgatgcgatgcattgccagaaggaaacggcggcgcttgttgtgggaaaacaggcggattaccttttaaacgtcaaagacaaccagcctgcgctgaaaaacgacatagaagagtacgtgcaggacggcggtttgagaaagaccatggacactttcacgacatgcgagaaaaacggcgggaggattgagatacgcagtgggtttgtcacgcacgatattgactggctttacggcaaggacgaatggaaaaaccttgcgtgcattggggcgatacaccgacaattcacctacaaggacaaaacaaccgatgaatggcactactacatttccagccgggaacttaaggcggaaagcctgttaaagcacgcccgtttagaatggtcggtagaatcgatgcattggctgttggatgtgcattttggagaggaccgctgccgtgtcgaagacgaaagcgtgcagcaggtcttaaatgcggtacgcaaaatcgctataaacagcgttaagacctataaagcaaagaccggctcaaagctccctttgtcgaaaatcatgtttggctgtctgctggattgccagaagctggttcctgtcttgttgtcatgtgaaaattga

SEQ ID NO: 59062 - protein, 376 aa, Unknown
  Obtained from environmental sample
  DOMAIN (108)...(339): Transposase DDE domain
  misc_feature (1)..(376): Xaa is any amino acid
MDKVIRITEYFADVETTKEHNGYFCSVGEALTVVILGSLCGLRNVSQISQWAANERIKGFLAGHFRIERIPCYYWMLCLLALIKPTSLNQCLTRRVQSLLPEGMKAMTVSFDGKTACSTGKMDAYDSPLHIISAHLAELGITLAGLKTDGKSNEIPAVRELIGMLEVAGCVIVADAMHCQKETAALVVGKQADYLLNVKDNQPALKNDIEEYVQDGGLRKTMDTFTTCEKNGGRIEIRSGFVTHDIDWLYGKDEWKNLACIGAIHRQFTYKDKTTDEWHYYISSRELKAESLLKHARLEWSVESMHWLLDVHFGEDRCRVEDESVQQVLNAVRKIAINSVKTYKAKTGSKLPLSKIMFGCLLDCQKLVPVLLSCEN

SEQ ID NO: 59063 - DNA, 855 bp, Unknown
  Obtained from environmental sample
  misc_feature (1)..(855): n is a, c, g, or t
atggaaataatgaattacaatgcggaccttatacattttattcaaaatgcggcggggtgggctattagcggagatacgtctgaacaatgtatgtttattctttttggaaccggagctaacggaaaatctacctttctcaatactattatgaatttaatgggcgattatgccattgcaacgcctaccgaaacttttatgaaaaaaaccggagaccaaatttcaaatgatattgcacgactgcggggtactcggtttgttacaactacggaagcggaacatgggcaacggttgtctgaaccgttaataaaacagattaccggcaatgaccgaatgacggcacgatttctttatggggaatactttaattttgttccgacattcaagatatggatggcgaccaaccacaaaccgactattaaaggtactgaccacgggatatggcgcagaataaaattgataccttttacgacccgcattgaagaagaaaaacaggacaaacatcttgaacaaaaacttatggaagaaagggcgggtattctgaattggcttattgaaggagctatgcgctggcgaaaagaaggtttgaggacacccacgattattattagcgcaacggcggaatatcgggcggaaatggatattattggcaactttattagggaacggtgtgtccaggggacagaaggctcaatcagggcaagagaattatttaaaaattatcaagactggtgtatagataataacgaacacgctgtaagtgaacggtttttggggctgcggcttaaagaattgggatttgaacaaaaacggagtaatgacggacgatattggcagggtgtacagttgaaagggtag

SEQ ID NO: 59064 - protein, 284 aa, Unknown
  Obtained from environmental sample
  DOMAIN (1)...(267): Poxvirus D5 protein-like
  misc_feature (1)..(284): Xaa is any amino acid
MEIMNYNADLIHFIQNAAGWAISGDTSEQCMFILFGTGANGKSTFLNTIMNLMGDYAIATPTETFMKKTGDQISNDIARLRGTRFVTTTEAEHGQRLSEPLIKQITGNDRMTARFLYGEYFNFVPTFKIWMATNHKPTIKGTDHGIWRRIKLIPFTTRIEEEKQDKHLEQKLMEERAGILNWLIEGAMRWRKEGLRTPTIIISATAEYRAEMDIIGNFIRERCVQGTEGSIRARELFKNYQDWCIDNNEHAVSERFLGLRLKELGFEQKRSNDGRYWQGVQLKG

SEQ ID NO: 59065 - DNA, 741 bp, Unknown
  Obtained from environmental sample
  misc_feature (1)..(741): n is a, c, g, or t
ttgatacaatttggcattgacaataactgtatatgttcatggatcgaggaagaaggctcgccttctggcgaaggcggcaaagaaaaaaagataaatgtctgggaagacgctttcgaaagccatacaaataatttttcctggctgcatacatttttcaaaaaattaacgctaatgataaacgccatgcgttacgcggattctttttccgcagtcaggaaacattattttgcgtttcgcgcgtttttttttgacatggaaaaatgcctagccgaaaccgatcttgtgctttcccgttgtattgccgaattgggctatctggttgagatagaagattcatacccagatatgcgcattcccgatccatacacattttttacagattaccttgaagagataagctaccttgcccagcagacaagctccggtgttgcgatcctcccgtacaggacggccgcccccgtctttttcgactgccatatagtccttggggcaaaccaggattcgctttcgaccgtattttcatttctgtcctttctgcccaggaacaagcgtgaaaaattcggcataagcgacaatgacgcgtcacaggcttttatcacactgcaccgctataactcgcgtctgcctgccgcttttttctgctccgaacagacattttccaattatgccatccctcatagcgcgttgaaagcgaaattaaaacccaggcagcgctaccgcgatgacctgagcttggcgtaa

SEQ ID NO: 59066 - protein, 246 aa, Unknown
  Obtained from environmental sample
  misc_feature (1)..(246): Xaa is any amino acid
MIQFGIDNNCICSWIEEEGSPSGEGGKEKKINVWEDAFESHTNNFSWLHTFFKKLTLMINAMRYADSFSAVRKHYFAFRAFFFDMEKCLAETDLVLSRCIAELGYLVEIEDSYPDMRIPDPYTFFTDYLEEISYLAQQTSSGVAILPYRTAAPVFFDCHIVLGANQDSLSTVFSFLSFLPRNKREKFGISDNDASQAFITLHRYNSRLPAAFFCSEQTFSNYAIPHSALKAKLKPRQRYRDDLSLA

SEQ ID NO: 59067 - DNA, 963 bp, Unknown
  Obtained from environmental sample
  misc_feature (1)..(963): n is a, c, g, or t
ttgtattttaagtgtccgcttcaatttattttttcacgggtgctaaagctaaaaaatgtcgagatagaaacaagccttatggcaaacgaaacaaccggaatagtctatcacaaaataataagtttgtttttagatgaattgaaggaaaaaggagaagaaattgctccgccgcttgttaaaaatgacacatctccccgccgcatactgccgaaatcatacagggatatattaataaaaaaaacagaaatagtttttaaatctttcccatgtttattcgaagatgaagacgataaaccggcaatgagcatgttgaccgcgcgcctcctgcgggcggaaaaagaactgttttttacccaacttgaaaattttcttgttaaatttatttcgttctttgcgggcttttcggttgtcgccagcgaaggcagatatatgtttaacaaaaatttttattatcttaacgggtatatagattgtattcttgaggatagacataaatgttcggaaagtcagggttcattggttattgtggatttcaaaacaaaatatatgcccgatctttcagactgcattggccttgcagggcttgcggattttcagcttcccatgtacatccggcttgcagaaaacgaatttaaaaaacccatcgccgcagcattgttcttcagcatcctggatgcggttccccaggtattgttcggtgtaattcaggacgcgctaagcgatgaaattattcccggaaaagaaaaaaatcgcataatgcgcggaagcggtgaatatgagcgtatcatgggcgaatttgataaaaaggcggagcaattcgcaacggaaatttcaaacggcacttttgctttctctccatctcattgggaactgtgccaacaatgcggttataacagggtatgccgcacgctttacaaagtctttcaaggggaaaagcaatggaaccaaaaaaaattaatttaa

SEQ ID NO: 59068 - protein, 320 aa, Unknown
  Obtained from environmental sample
  misc_feature (1)..(320): Xaa is any amino acid
MYFKCPLQFIFSRVLKLKNVEIETSLMANETTGIVYHKIISLFLDELKEKGEEIAPPLVKNDTSPRRILPKSYRDILIKKTEIVFKSFPCLFEDEDDKPAMSMLTARLLRAEKELFFTQLENFLVKFISFFAGFSVVASEGRYMFNKNFYYLNGYIDCILEDRHKCSESQGSLVIVDFKTKYMPDLSDCIGLAGLADFQLPMYIRLAENEFKKPIAAALFFSILDAVPQVLFGVIQDALSDEIIPGKEKNRIMRGSGEYERIMGEFDKKAEQFATEISNGTFAFSPSHWELCQQCGYNRVCRTLYKVFQGEKQWNQKKLI

SEQ ID NO: 59069 - DNA, 522 bp, Unknown
  Obtained from environmental sample
  misc_feature (1)..(522): n is a, c, g, or t
atgccgcacgctttacaaagtctttcaaggggaaaagcaatggaaccaaaaaaaattaatttaaatgatgaacaacaggccgccgcatattgcaatgaaaacgcggtggttgcggcaggcgcgggatcgggaaaaaccatggtgctcgccagtcgtttcgcctggctggtaaccgagcgaaaatgccgcgtaagggagatccttacccttacctttaccaggaaggccgccgcgcagatgtaccggcggatttacctgatgttagccgaaattgcagacggggattccggtacaaagagcaaactggcgagggaagcccttgaggaatttgcccaggcgagaatacaaaccctggattcatacagcgccgctattgtcaaacaggcggcaaaccgttatggtattagccctgatttttcaatagatgaagaacgctgcctccggctcgcccatgatgaggcaatgtctttttttatcgccaaacgcgggcatcccggcgatacaaggctttacccgaaataa

SEQ ID NO: 59070 - protein, 173 aa, Unknown
  Obtained from environmental sample
  misc_feature (1)..(173): Xaa is any amino acid
MPHALQSLSRGKAMEPKKINLNDEQQAAAYCNENAVVAAGAGSGKTMVLASRFAWLVTERKCRVREILTLTFTRKAAAQMYRRIYLMLAEIADGDSGTKSKLAREALEEFAQARIQTLDSYSAAIVKQAANRYGISPDFSIDEERCLRLAHDEAMSFFIAKRGHPGDTRLYPK

SEQ ID NO: 59071 - DNA, 840 bp, Unknown
  Obtained from environmental sample
  misc_feature (1)..(840): n is a, c, g, or t
gtggtcaacccgtgggcggcgcggcgcggcgtgctcttcctcttctttccggggacgcactcccgtgccatgaattacaagatgctatgcgagaccgccgccgaccgcggcttccacgctataagcttgcagtacgtgaacgacgtatccgtctacaacaagtgcgccaagagccgcaatttggagtgctacgagaatatgcgccgcgaagtgctcttcggagcggatttctcgccccatgtgcaaattagccgcccgaacagcgcggagaaccgtcttgtcaagttgttgcgctatcttgccgaccaatatccgtttgacgggtgggagcagtacctgacggcgggggacgttccgcgttggtcgaggatcctcgtcgccggccactcgcagggcggcgggcacgcggctttgctcggcaagtactacagcacggcgggcgttatcatgttcgcttccatggattacagctatatgtacgacagggccggcccctgggtcgacaagcgcagcaatacgcgcatagaaaaattcttcgccgtggcgcatacaatggacgaggttatgccaatcacggcgatgcgcaagtattggaacgccttcggtttcagaaatgtcgctccggtgataaacatagacgatataggttttccatacgcgaattcgaatacgctgataacgtctataaagtcaacgaagccggtaaagacgggcaaaaggaactatccggtccaccacaatatactttgcttggacgcagacacgccgctattgaaagacgggaagccggcgctgtacgatttatgggtttatctgttgaacgggccgtttgaaaaataa

SEQ ID NO: 59072 - protein, 279 aa, Unknown
  Obtained from environmental sample
  misc_feature (1)..(279): Xaa is any amino acid
MVNPWAARRGVLFLFFPGTHSRAMNYKMLCETAADRGFHAISLQYVNDVSVYNKCAKSRNLECYENMRREVLFGADFSPHVQISRPNSAENRLVKLLRYLADQYPFDGWEQYLTAGDVPRWSRILVAGHSQGGGHAALLGKYYSTAGVIMFASMDYSYMYDRAGPWVDKRSNTRIEKFFAVAHTMDEVMPITAMRKYWNAFGFRNVAPVINIDDIGFPYANSNTLITSIKSTKPVKTGKRNYPVHHNILCLDADTPLLKDGKPALYDLWVYLLNGPFEK

SEQ ID NO: 59073 - DNA, 561 bp, Unknown
  Obtained from environmental sample
  misc_feature (1)..(561): n is a, c, g, or t
atgctgctgttaattgataactacgacagtttctcctacaacctgtatcaggtaatcggcgccattgagagcgacatacaagttgtacgcaacgatgaaataagtgttgacgaaataaaacgcctcgcgccgagccgcctggtaatctcgcccggccccggaaaaccttccgatgccggaatatgtattgaggccataaagcggctttattcatcaataccgatcctgggcatctgtcttggtcatcaggcaatatacgaggcctttggtggtactgtgtcctacgcaagcaggttgatgcacgggaaatcatcgcaggtaaaacttgatgcggagaatgttctttttaaggggcttccgcctgtcataagcgcggcgcgctatcattctttggccggcattgagtcaactctgcctgacgcgctgcgcgtaatagctcaaacggcggacggggatgtaatggcggtctgccacaaagaccaccctacctacggcgtacaattccacccggaatctatactcacgcctttggggagaaaaatcattgagaactttatgtaa

SEQ ID NO: 59074 - protein, 186 aa, Unknown
  Obtained from environmental sample
  DOMAIN (17)...(171): Peptidase C26
  misc_feature (1)..(186): Xaa is any amino acid
MLLLIDNYDSFSYNLYQVIGAIESDIQVVRNDEISVDEIKRLAPSRLVISPGPGKPSDAGICIEAIKRLYSSIPILGICLGHQAIYEAFGGTVSYASRLMHGKSSQVKLDAENVLFKGLPPVISAARYHSLAGIESTLPDALRVIAQTADGDVMAVCHKDHPTYGVQFHPESILTPLGRKIIENFM

SEQ ID NO: 59075 - DNA, 822 bp, Unknown
  Obtained from environmental sample
  misc_feature (1)..(822): n is a, c, g, or t
ttgtttacaaaagaagaatattgccagatggtaaacaaggcaaaacattacatcaaggaaggcgatatttttcaggttgtgctgtccaaccgttttggagccgattttgaaggcagcatttttgatacctatcgcgtattgcggacaataaacccttcgccgtatatgttttatttcagtgggagcaacctggaaatcgccggagcgtcgcctgaaacgcttgtcaaattacaggacggcaagctgtttacctttccacttgcgggaacccgcccaagaggcgcaagcgacgaggaagacttagcgctggaaaaggagctgctcaaagacgaaaaagaactagcggaacacaatatgctggttgatcttggccgcaacgatcttggaaagatcagcaaattcggaacagtatccgtcgccaaacacaagtccatcctgcgcttttcccatgttatgcacatcggctccacagtaagtggcgaaatcctcgaaagaaaaacggggcttgacgccatcaacgcagtgcttcccgccggtacattgtcgggcgctccccaaatccgttcaatgcaaatcatcaacgagctggaacaaaacaaacgcggcatttacggcggcgcatcggggtatcttgattttacaggcaatatggatacctgcatcgccattagaattgtgtaccgcagaaacaacaaagtgtttatccgttcaggtgcgggaattgtcgcggacagcatgcctgaatcagaatatcaggaatgtgtgaacaagtccaaagcggtaatggatgcgcttaaaaactcctccggagggcttgaataa

SEQ ID NO: 59076 - protein, 273 aa, Unknown
  Obtained from environmental sample
  DOMAIN (3)...(265): chorismate binding enzyme
  misc_feature (1)..(273): Xaa is any amino acid
MFTKEEYCQMVNKAKHYIKEGDIFQVVLSNRFGADFEGSIFDTYRVLRTINPSPYMFYFSGSNLEIAGASPETLVKLQDGKLFTFPLAGTRPRGASDEEDLALEKELLKDEKELAEHNMLVDLGRNDLGKISKFGTVSVAKHKSILRFSHVMHIGSTVSGEILERKTGLDAINAVLPAGTLSGAPQIRSMQIINELEQNKRGIYGGASGYLDFTGNMDTCIAIRIVYRRNNKVFIRSGAGIVADSMPESEYQECVNKSKAVMDALKNSSGGLE

SEQ ID NO: 59077 - DNA, 438 bp, Unknown
  Obtained from environmental sample
  misc_feature (1)..(438): n is a, c, g, or t
atgccgcgtttgttttgttccagctcgttgatgatttgcattgaacggatttggggagcgcccgacaatgtaccggcgggaagcactgcgttgatggcgtcaagccccgtttttctttcgaggatttcgccacttactgtggagccgatgtgcataacatgggaaaagcgcaggatggacttgtgtttggcgacggatactgttccgaatttgctgatctttccaagatcgttgcggccaagatcaaccagcatattgtgttccgctagttctttttcgtctttgagcagctccttttccagcgctaagtcttcctcgtcgcttgcgcctcttgggcgggttcccgcaagtggaaaggtaaacagcttgccgtcctgtaatttgacaagcgtttcaggcgacgctccggcgatttccaggttgctcccactgaaataa

SEQ ID NO: 59078 - protein, 145 aa, Unknown
  Obtained from environmental sample
  misc_feature (1)..(145): Xaa is any amino acid
MPRLFCSSSLMICIERIWGAPDNVPAGSTALMASSPVFLSRISPLTVEPMCITWEKRRMDLCLATDTVPNLLIFPRSLRPRSTSILCSASSFSSLSSSFSSAKSSSSLAPLGRVPASGKVNSLPSCNLTSVSGDAPAISRLLPLK

SEQ ID NO: 59079 - DNA, 327 bp, Unknown
  Obtained from environmental sample
  misc_feature (1)..(327): n is a, c, g, or t
atgctgttagtaagagcgattatccgccccgaaaagtcggggattgttatgcgtgaactggctgccgccggttttcccgccgtgaccaagctcgacgtctacggacgcggcaagcagaagggcatcaccgtaggcgatgtgcactacgacgagattcccaaggacatgcttgtgatcgtctgtaacgacgaagacaaggacgatcttgtgaagatcatcatccgcacggccaagaccgaagcgaagggcgctttcggcgacgggcgcatattcgtgtcgcctgtggaatcggcatacaccatcagttccggcgcggccggcctgtaa

SEQ ID NO: 59080 - protein, 108 aa, Unknown
  Obtained from environmental sample
  DOMAIN (4)...(104): Nitrogen regulatory protein P-II
  misc_feature (1)..(108): Xaa is any amino acid
MLLVRAIIRPEKSGIVMRELAAAGFPAVTKLDVYGRGKQKGITVGDVHYDEIPKDMLVIVCNDEDKDDLVKIIIRTAKTEAKGAFGDGRIFVSPVESAYTISSGAAGL

SEQ ID NO: 59081 - DNA, 396 bp, Unknown
  Obtained from environmental sample
  misc_feature (1)..(396): n is a, c, g, or t
atgcgggaaataatgtgttttatcaggatgaacaaggtcaacgacaccaagagggcgctggctgagcacggcttccccgcgttcacctgccgcaagtgtctggggcgcggaaagaagagcatcgaccccgaattgctcaacgccgttatagcgaccggcgagatgcccatgtcgccggtcggcgaaaacctgacggagtcggcgcggctcatcgccaagcgcttcttcaccctcgttgttgacgacaaggacgtgaagaaagcggtcgacgtgattatcgccgcgaatcagacgggcaatccgggcgacgggaaaattttcgtcctgcctattacggagacgttctccgtaaggacgggcgagggcggcactgaaatattgaagggaggcgtatga

SEQ ID NO: 59082 - protein, 131 aa, Unknown
  Obtained from environmental sample
  DOMAIN (4)...(120): Nitrogen regulatory protein P-II
  misc_feature (1)..(131): Xaa is any amino acid
MREIMCFIRMNKVNDTKRALAEHGFPAFTCRKCLGRGKKSIDPELLNAVIATGEMPMSPVGENLTESARLIAKRFFTLVVDDKDVKKAVDVIIAANQTGNPGDGKIFVLPITETFSVRTGEGGTEILKGGV

SEQ ID NO: 59083 - DNA, 1305 bp, Unknown
  Obtained from environmental sample
  misc_feature (1)..(1305): n is a, c, g, or t
ttgagaattatctccgcaaacaaaccagtactgcaactgcgtagcgaaggtgcaaattacaggggagctactgcttttgtttggcgggttctttcaagtttctttttgacttctacttactttactatattccattcaatgcaatactccccaaaaatccgcgaagaagaacttaaaaacaaagtggcggtggattttttcgcaaaatacgattgtacagacataatcaaagacatagactttgcggtgaaactgaaacgccctgcaaataccattaacttcaatgatgaatatttgctgtgggcagaggctaaatccgctcctagtgatattctgattatgctaacccaactagtgctaaccataggcaaagctcgcacatttcaacaagttctgccaccaaagtttttaggctgctttgactgcgaaaagatagccttcattccttatgctgatatacaagacgttttccaccaaaacgatttcaattggaatgtggctccctccaaccacaatagccgcgagttcaaacagatttactcccagatagacaaaataataaacagcggcaagccacatggaacctattgcttcaaattcagcgatgaaaacagccttaaattgtttatcctcaaaaattttcttatcggaaaaaacgatgtttcaaaaatcaagatagacaaaaacaatttcataagcgtttatagcaaatggctggaggctgtgaaacctacgatatcggttaattgggatgccgcgaagaaaaaggggattctcagcgggcatttttacattgctgatttgataagcgataaaaacacttcgctaaaagaaaatttgatggtcgttctgcgcgcaacccgctatgagatgaaccgtcataaagatgaattcggagctttcaattccagcgaagttcatttcaacgacaagcaacgtgctcacaatgctttttgggcaatctatgagcgcccacccaaagaggattattgggattatatcattgaacgccaagacctgcttgttccccaagacgtgcgtgagcgaaaaggcagttttttcacgccacagatttgggttgagctttcgcagaaatacatagcggaagttttgggcgaggattggcaggatgagtattatgtgtgggattgtgcggcaggcacaggcaatctcttggcgggattgacaaacaaatacaatatttgggcatccacgctagacaaggcggatgttgatgttatgcacgaccgtatagagaatggagcaaatttactaaaagaacattgcttccagtttgatttttga

SEQ ID NO: 59084 - protein, 434 aa, Unknown
  Obtained from environmental sample
  misc_feature (1)..(434): Xaa is any amino acid
MRIISANKPVLQLRSEGANYRGATAFVWRVLSSFFLTSTYFTIFHSMQYSPKIREEELKNKVAVDFFAKYDCTDIIKDIDFAVKLKRPANTINFNDEYLLWAEAKSAPSDILIMLTQLVLTIGKARTFQQVLPPKFLGCFDCEKIAFIPYADIQDVFHQNDFNWNVAPSNHNSREFKQIYSQIDKIINSGKPHGTYCFKFSDENSLKLFILKNFLIGKNDVSKIKIDKNNFISVYSKWLEAVKPTISVNWDAAKKKGILSGHFYIADLISDKNTSLKENLMVVLRATRYEMNRHKDEFGAFNSSEVHFNDKQRAHNAFWAIYERPPKEDYWDYIIERQDLLVPQDVRERKGSFFTPQIWVELSQKYIAEVLGEDWQDEYYVWDCAAGTGNLLAGLTNKYNIWASTLDKADVDVMHDRIENGANLLKEHCFQFDF

SEQ ID NO: 59085 - DNA, 381 bp, Unknown
  Obtained from environmental sample
  misc_feature (1)..(381): n is a, c, g, or t
atggaaactgccgccacgcttaataattccgccgtcgctctaaccgaggcaaataagccttttgaggctatacctctgttccgcgaggctttaattttagagcctgaaaatcccttattatggctcaatttaggcatagcccagcagaaaacaggcgaatactcgcaggctatcgaaagttttatgcattcaataactattgacaacgatatttccgatgcgtggaattccatgggtttaatttactatgaactgaacgaatttgcccttgcggaaaactgttaccacgcggctttactatgcaatgacagcgacccaaaaatatggaataaccttggcgttttatattttaacacaaataattatgaagaagccgcgtaa

SEQ ID NO: 59086 - protein, 126 aa, Unknown
  Obtained from environmental sample
  DOMAIN (4)...(37): Tetratricopeptide repeat
  misc_feature (1)..(126): Xaa is any amino acid
METAATLNNSAVALTEANKPFEAIPLFREALILEPENPLLWLNLGIAQQKTGEYSQAIESFMHSITIDNDISDAWNSMGLIYYELNEFALAENCYHAALLCNDSDPKIWNNLGVLYFNTNNYEEAA

SEQ ID NO: 59087 - DNA, 705 bp, Unknown
  Obtained from environmental sample
  misc_feature (1)..(705): n is a, c, g, or t
atgatccgccgattatcgtctttttgcctgtttttctccctattttcctctctttacgcgcagggaacagagaacggacagtatgacaatgttattcgcggttcagtatctgtggagcttgaaaacatatacgcggggtttgtagacgaggaatacccgctaagcgccgacacagcgagaaagcgcgcccttgaagaggcgtctttgtttttttccgcaatggtttacggctggtcattcagctatgaaatcggcgaaagagccagaaaaatcgaagaaaaaatggagttgactccgctgggaaacgtccaattcggagaccctgctcttgtcgttaccgaagctgaagtaaaagatatgcagttaataatatgggctgattatcatttgagcgaagcactgcaaaaacgtatgcaaacatggcggacgggaatgctaagaaacgcgcaggcaataggctatgccccgtcttcttttgaaacatatcccggctggatagcggtaaaacaactcgcccttgaagattccgccagagccgcattacgcgcggcattgcgagggagcgaaagaaaccgtcccaaacatgtaaacggatttataagccttgccgccttcccgcgttattttatcgacgcgggacgctgggctgccgcagcgcggttcagagtgcagataactgaaattattccttttgccgcctactga

SEQ ID NO: 59088 - protein, 234 aa, Unknown
  Obtained from environmental sample
  SIGNAL (1)...(20)
  misc_feature (1)..(234): Xaa is any amino acid
MIRRLSSFCLFFSLFSSLYAQGTENGQYDNVIRGSVSVELENIYAGFVDEEYPLSADTARKRALEEASLFFSAMVYGWSFSYEIGERARKIEEKMELTPLGNVQFGDPALVVTEAEVKDMQLIIWADYHLSEALQKRMQTWRTGMLRNAQAIGYAPSSFETYPGWIAVKQLALEDSARAALRAALRGSERNRPKHVNGFISLAAFPRYFIDAGRWAAAARFRVQITEIIPFAAY

SEQ ID NO: 59089 - DNA, 900 bp, Unknown
  Obtained from environmental sample
  misc_feature (1)..(900): n is a, c, g, or t
ttgaatacgggcgatatgcagcttatctgcgagacctatgatctaatgaaaaatgtcgtgggtctttcttctgctgaaatgggtgatgtttttgatgaatggaacaaaggcagtctgggcagttaccttatcgaaataaccagagacatactccgttacaaggacgctgacggccagccccttgtcgaaaaaattcttgatactgccgggcaaaaaggtacgggtaaatggaccggtattgccgcgctggatctgggagtgccgctgacccttatcggcgaggcggtttttggccgctgtctttccgccgccaaagcggagagggtgcaggcggcgcagattttttcaggtccaaaggccgcgccctcggcggataaggctggttttatcaaagatttggaaaaagcgctgtatgccgccaaagtggtttcctatgcgcagggttatctgttaatgcgggaagcagcgcaggagtataaatggaatctgaactacggcggcatcgcgctgatgtggcgcggcggctgtatcattcgttcggtgtttctgggcaaaataaaagaagcgtttgataaaaagccggatttggaaaatctgctgcttgatcctttctttacgggaataattgaagacgcgcaggcttcgtggcggcgggttgtctcggcggcggtgcagaatggcattgcggttccggcattgtccagcgcccttgcttattttgacggctaccgcagcgagcggctgccggcaaatctcttgcaggcacaacgggattatttcggcgcgcatacctacgaacgcatcgatcaaccccgaggtaaatttttccataccaactggaccggacatggcggtactaccagcgcgtcaacatacacggttaaatctcggccaatctga

SEQ ID NO: 59090 - protein, 299 aa, Unknown
  Obtained from environmental sample
  DOMAIN (4)...(281): 6-phosphogluconate dehydrogenase, C-terminal domain
  misc_feature (1)..(299): Xaa is any amino acid
MNTGDMQLICETYDLMKNVVGLSSAEMGDVFDEWNKGSLGSYLIEITRDILRYKDADGQPLVEKILDTAGQKGTGKWTGIAALDLGVPLTLIGEAVFGRCLSAAKAERVQAAQIFSGPKAAPSADKAGFIKDLEKALYAAKVVSYAQGYLLMREAAQEYKWNLNYGGIALMWRGGCIIRSVFLGKIKEAFDKKPDLENLLLDPFFTGIIEDAQASWRRVVSAAVQNGIAVPALSSALAYFDGYRSERLPANLLQAQRDYFGAHTYERIDQPRGKFFHTNWTGHGGTTSASTYTVKSRPI

SEQ ID NO: 59091 - DNA, 621 bp, Unknown
  Obtained from environmental sample
  misc_feature (1)..(621): n is a, c, g, or t
atgaagaatgcggacatcggcttaattgggttagcggtaatgggagaaaacttggtcctcaacatggaaagcaaaggctttcatgtcgcggtttacaaccggacgacatccaaagtggatgattttataaaaggccgaggtgcgggaaaaaatattaccggctgttataatatggcggaacttgccgccgctttaagcaagccccgcaaagtaatgatcatggtaaaggctggccaggctgtggacgacacgattgaacagcttcttggcgttttagaaaaaggggacatcatcatcgacggcggcaattccaattatcaggacacaatccgccgtaccgcgtttgtagaatccaaggggctcttttacatcggaactggagtttcaggcggtgaggaaggtgcgctaatcggcccatctatcatgcccggcggttctcccacggcatggctggatgtaaagccaatccttcaggcgatttccgccaaggtgaaacaggaaggctttggggaagtaccctgttgcgactgggttggcgaaaacggagcgggccactttgtaaagatggttcacaacggcattgaatacgggcgatatgcagcttatctgcgagacctatga

SEQ ID NO: 59092 - protein, 206 aa, Unknown
  Obtained from environmental sample
  DOMAIN (3)...(180): NAD binding domain of 6-phosphogluconate dehydrogenase
  misc_feature (1)..(206): Xaa is any amino acid
MKNADIGLIGLAVMGENLVLNMESKGFHVAVYNRTTSKVDDFIKGRGAGKNITGCYNMAELAAALSKPRKVMIMVKAGQAVDDTIEQLLGVLEKGDIIIDGGNSNYQDTIRRTAFVESKGLFYIGTGVSGGEEGALIGPSIMPGGSPTAWLDVKPILQAISAKVKQEGFGEVPCCDWVGENGAGHFVKMVHNGIEYGRYAAYLRDL

SEQ ID NO: 59093 - DNA, 999 bp, Unknown
  Obtained from environmental sample
  misc_feature (1)..(999): n is a, c, g, or t
atgctttgcgctatctgtagtatactacaatttataatggaaaaaacatacgtcgccaaaggcggcccagcgctggatctttccgacggggaactggacgaacttttttcgggagctttgtcaaaggccattgcggatcagaataagtcagggccggtaattattttgccgcctgatataacccgcttctattcctgcgctggctacctgaccggcatcgccgcccgcgaactttccagcaggcttggagcggtacttccggctttgggaacccatatggccatgactgctgcggaaattgaccgtatgttccccggagttcccagggataaatttcttgtccacgactggcggaatgacgtagttactctgggccgcattgaggaagcctggctcgaaaaggcaacagatggaagaatcaaatacgactggcctgtacaagtaaacaaacttcttataaatggcggattctcaatggcaatttcgcttgggcaagtagttccgcacgaagtaatcggcatggcaaaccatacaaaaaatatttttgtgggaaccggcggcaaagaagccatcgacaaaagccactttatgggggcttcttacggcatggagcgtatgatgggcaggatcgacacgccggtgcgggcgcttttcgatgagggattcaagcgctttggaaaccagcttccgcctatcctgtttgcccttaccgttgtaagcccaaggagcgacagcgaagccgccaaaaccggcaagccaaggggctcccttgctgtacgcggtatctatatcgggttaggtcgggaatgtttcacggaggccgcaactcttgcccagcaggtaaatgtggacatcctggacgaacctataaaaaaagctgttgtataccttgaaccggaagagtttcgcaccacatggcttgggaataaagccgtttaccgcacaaggatggctatggcagacggaggagaactcctgattctcgctccgggcctttga

SEQ ID NO: 59094 - protein, 332 aa, Unknown
  Obtained from environmental sample
  misc_feature (1)..(332): Xaa is any amino acid
MLCAICSILQFIMEKTYVAKGGPALDLSDGELDELFSGALSKAIADQNKSGPVIILPPDITRFYSCAGYLTGIAARELSSRLGAVLPALGTHMAMTAAEIDRMFPGVPRDKFLVHDWRNDVVTLGRIEEAWLEKATDGRIKYDWPVQVNKLLINGGFSMAISLGQVVPHEVIGMANHTKNIFVGTGGKEAIDKSHFMGASYGMERMMGRIDTPVRALFDEGFKRFGNQLPPILFALTVVSPRSDSEAAKTGKPRGSLAVRGIYIGLGRECFTEAATLAQQVNVDILDEPIKKAVVYLEPEEFRTTWLGNKAVYRTRMAMADGGELLILAPGL

SEQ ID NO: 59095 - DNA, 456 bp, Unknown
  Obtained from environmental sample
  misc_feature (1)..(456): n is a, c, g, or t
atgggaagcgccgctgttgaaatcaaactgcaggagatagacaaacttgcgcgcaaactcaacgagtttgttttgtcaggcggcgataaagcgcggcttcttaatagcctgggcgaattaatcgaagagcagcagatcaaagaacggatagaaacaacaaagcaagacccggacaacgtgaaatgggatccgtggaaagaatcaactgaaaaatatttgcaaaaacattttccaaaatccagtttacttttccgcgagggcttcttgcttaattcaattgaacatcagatgaagggaaatgacacgatactcgtcggttccaccagagagtatgcggaatatcttcaggaaggtacgaaaaacatggatgcgcgtaaatttttaggtttcggcgctgacgatattaccgcactgcaggacgcggttgacgaatttatgagggagcaggttgcatga

SEQ ID NO: 59096 - protein, 151 aa, Unknown
  Obtained from environmental sample
  DOMAIN (11)...(147): Phage virion morphogenesis family
  misc_feature (1)..(151): Xaa is any amino acid
MGSAAVEIKLQEIDKLARKLNEFVLSGGDKARLLNSLGELIEEQQIKERIETTKQDPDNVKWDPWKESTEKYLQKHFPKSSLLFREGFLLNSIEHQMKGNDTILVGSTREYAEYLQEGTKNMDARKFLGFGADDITALQDAVDEFMREQVA

SEQ ID NO: 59097 - DNA, 309 bp, Unknown
  Obtained from environmental sample
  misc_feature (1)..(309): n is a, c, g, or t
gtgttcatgcaggataaatatctgtacggcatccgctaccgcggcagtttcggatatggtctgtggcagcaggcggtcggttcaaaactcgcgttaagtgaagccaattatcaagcagcccgcggaaagatccaatcgcttaagcgtgacggcggcgatccgttaggcatcgttccgacccatttggtagtcggtccttcaaacgaagcggcggcgcgtaaaattgtggaagcgcaattcttagccaatggcgcttcaaacatctattacaggacggcggaactggtagtcattccgcatctggcgtaa

SEQ ID NO: 59098 - protein, 102 aa, Unknown
  Obtained from environmental sample
  misc_feature (1)..(102): Xaa is any amino acid
MFMQDKYLYGIRYRGSFGYGLWQQAVGSKLALSEANYQAARGKIQSLKRDGGDPLGIVPTHLVVGPSNEAAARKIVEAQFLANGASNIYYRTAELVVIPHLA

SEQ ID NO: 59099 - DNA, 540 bp, Unknown
  Obtained from environmental sample
  misc_feature (1)..(540): n is a, c, g, or t
atgattatcacttctcccatactaaacggtttacggactgcgttacgtgacgagttccgcaaaagaatgtccgaaatttccgcaaattctatctggaagcttttggcgacgattatcacgtccaataccaaaagcaacacatacggctggttaagcgcgttcccgcagcttcgggaatgggtaggcgaccgcgttataaaagacattgcggaatccgcataccagatcgtcaataaaaagtacgaatctacgcttggcgttgaacgtaccgacattgaggatgataacctcggacagtaccgggtactggcggcggcgatggcagacgaagttgaggctttcttcaacagaaacatcgctattttgttaagagaaggctttaacaatatttgctatgacggccaaagttttttgatagcgagcatcctgtgtatgaaaagactgacgggaccggcaatgttacgccgtttccaatattgtcggctcttgcgaagaaaacggatccgccttggttcctgttgtccctttcgggcagcctga

SEQ ID NO: 59100 - protein, 179 aa, Unknown
  Obtained from environmental sample
  misc_feature (1)..(179): Xaa is any amino acid
MIITSPILNGLRTALRDEFRKRMSEISANSIWKLLATIITSNTKSNTYGWLSAFPQLREWVGDRVIKDIAESAYQIVNKKYESTLGVERTDIEDDNLGQYRVLAAAMADEVEAFFNRNIAILLREGFNNICYDGQSFLIASILCMKRLTGPAMLRRFQYCRLLRRKRIRLGSCCPFRAA

SEQ ID NO: 59101 - DNA, 984 bp, Unknown
  Obtained from environmental sample
  misc_feature (1)..(984): n is a, c, g, or t
atggaaacaacaggcagtctttttttatcgctgaattttgaggaagaaattcccaaacagattatgcttgtcccttccggcgcgtcggtgaaagggcgcgataaccgtgagtggaaaaaccctaacccaaaacaggttgcgctcaattccaatatgcgccttcccgcgctgccggtcgatgaaaatcattcaacagatttatccgctccccaaggcggcccatctcccgcgttcggctggatgaaaaatctctgcgctgaccagtcaggcgcgatacttgctgatgtcgagtggaccgaacgcgggcgcgaggcgcttgccaaaaaagagtaccgctttatttccccggtatttctgcacaacgaaaaaggtgaaatcaactgcatcctgcgcgccgcgctcaccaattcgccaaacctgaatcttcctgccctgaattcggagcagttagaaaatatgaatacggaggtttcaatgaataaggcattattagcggctttgggcttgcccgaaaccgcgaccgaagcggaagcgcttgcggcgattaagtcgctgaacgcggcgaagaccgcggccgcgccgcagaccgacaagacggcggttgatcttgccgcgtacgcgccccgcgcagatttgaacgcgatggaagaacgcgcggttgccgcggaaaaacagcttgccgatctgaacgcggcacagcttaaaaaggacgcggaagcggcggttgacgaggcggttaaaaaccgcaaaattgcgcccgcgagcagggagcagtatcttgcactgtgcgcgacaagggcggagcttgagaaaatcaaaaatattttatcaaccagccccgcgataattgcggaaccgcaggcgccggcggccgcggctccccagtcgggaagcgtatcgcttaacgcggaacaaacacagcttgccaaatctttgggctatatgcctgatgaattcgcaaaaatcatggaggaatcaaaatga

SEQ ID NO: 59102 - protein, 327 aa, Unknown
  Obtained from environmental sample
  misc_feature (1)..(327): Xaa is any amino acid
METTGSLFLSLNFEEEIPKQIMLVPSGASVKGRDNREWKNPNPKQVALNSNMRLPALPVDENHSTDLSAPQGGPSPAFGWMKNLCADQSGAILADVEWTERGREALAKKEYRFISPVFLHNEKGEINCILRAALTNSPNLNLPALNSEQLENMNTEVSMNKALLAALGLPETATEAEALAAIKSLNAAKTAAAPQTDKTAVDLAAYAPRADLNAMEERAVAAEKQLADLNAAQLKKDAEAAVDEAVKNRKIAPASREQYLALCATRAELEKIKNILSTSPAIIAEPQAPAAAAPQSGSVSLNAEQTQLAKSLGYMPDEFAKIMEESK

SEQ ID NO: 59103 - DNA, 300 bp, Unknown
  Obtained from environmental sample
  misc_feature (1)..(300): n is a, c, g, or t
atgaatccggatggagccggtctatataactcgcgcgcttggacgtacgcgcactacatgaaaaggaactatgaccgcgctattgaggatgccgacagagcgatcgaacttgccccgaattccggagaatattatgacactcgcggttgggcgtatttgggcaaaggcgactatgacagcgcggagcgtgacttttccaaggcgttgcaacttaacccgaatttgaaggaatccaaagagggcttagagaaggttcaggaagcgcgggcggtgaaaaaaccggtaaagccgaggaaataa

SEQ ID NO: 59104 - protein, 99 aa, Unknown
  Obtained from environmental sample
  DOMAIN (42)...(75): Tetratricopeptide repeat
  misc_feature (1)..(99): Xaa is any amino acid
MNPDGAGLYNSRAWTYAHYMKRNYDRAIEDADRAIELAPNSGEYYDTRGWAYLGKGDYDSAERDFSKALQLNPNLKESKEGLEKVQEARAVKKPVKPRK

SEQ ID NO: 59105 - DNA, 708 bp, Unknown
  Obtained from environmental sample
  misc_feature (1)..(708): n is a, c, g, or t
ttgcggcgtttggtgcagatcgtcttccaagacccgtacagttctctgaacccgcgaatgacggtgcgttcgatactctccgagccgttcgccatccacaatctatacggcaagaaagagcgtgaggcgcggatcgccgagttactcgatcaggttgggctttcgaccgcctacttagaccgctaccctcacgagttctccggcggccagcggcaacgcgtcggcatagcccgcgctttggccacgtcgccggagttcatagtggccgacgaaccggtgagcgctctcgacgtgtcgatacaggcgcaaattataaacctattgcaagacctgcagcggcgctacagccaaactatgctcttcatatcgcacgacttggccgttgtgcggcacatcgccaatagaatagcggtcatgtaccgcgggaagatcatggagatgggagacaacgaggtgattttttcatcacacgcccatccatacacggagttgctgctaaatagcgttcccactgtgggaacgggggttaccgcaacaattacgccaaaagtatctgtcagcgacgacaaagacgcgttaacgacaagcggcggcgacggttgcgccttctatccgcgttgtccgaggcgttgcgacaggtgcgttaacgaaacgccggaactcaaagaccgaggaaacggacacttcgcggcgtgcttttgcgcctga

SEQ ID NO: 59106 - protein, 235 aa, Unknown
  Obtained from environmental sample
  DOMAIN (145)...(214): Oligopeptide/dipeptide transporter, C-terminal region
  misc_feature (1)..(235): Xaa is any amino acid
MRRLVQIVFQDPYSSLNPRMTVRSILSEPFAIHNLYGKKEREARIAELLDQVGLSTAYLDRYPHEFSGGQRQRVGIARALATSPEFIVADEPVSALDVSIQAQIINLLQDLQRRYSQTMLFISHDLAVVRHIANRIAVMYRGKIMEMGDNEVIFSSHAHPYTELLLNSVPTVGTGVTATITPKVSVSDDKDALTTSGGDGCAFYPRCPRRCDRCVNETPELKDRGNGHFAACFCA

SEQ ID NO: 59107 - DNA, 672 bp, Unknown
  Obtained from environmental sample
  misc_feature (1)..(672): n is a, c, g, or t
atggaaaatcagttaggcgatgaaagcgtctatcttcggattatggaactggagaacggtctgctccaacataccgatacaactaacgcctatagaatgttggtagaacacggcaaggatattagatacaatgacgcttggaaaaaatggattgtctggaacggcaaatattgggaaatggacggcgggtatttaatccacgataaaggcttacagataattagggggatatacagagagttactgaaaaccgccgattatagagagcgtatcgatattgaaaaacacgctatgcagagtgaaagcgcaaggcggcgaaaggcgcttgtggaagttgctagctggatacctgaactgaatgtaaaaactgatgaccttgacaaagacccctggctttttaatgtgcggaatgggactattgatttacggacaggcgaaataagggaacataaccagggcgatttaattacccggattgcgaatgtcgattatgaccctgacgcttcctgcccgatatggaaaaagtttattatggaaattatgaacttcaatgcggagttaattcacttttatacaaaacgccgccggttgggcgattaccggggatacctcggaacaaacaatgtttattttatttggaacgggggcgaatggaaaaagcacatttcttaa

SEQ ID NO: 59108 - protein, 223 aa, Unknown
  Obtained from environmental sample
  misc_feature (1)..(223): Xaa is any amino acid
MENQLGDESVYLRIMELENGLLQHTDTTNAYRMLVEHGKDIRYNDAWKKWIVWNGKYWEMDGGYLIHDKGLQIIRGIYRELLKTADYRERIDIEKHAMQSESARRRKALVEVASWIPELNVKTDDLDKDPWLFNVRNGTIDLRTGEIREHNQGDLITRIANVDYDPDASCPIWKKFIMEIMNFNAELIHFYTKRRRLGDYRGYLGTNNVYFIWNGGEWKKHIS

SEQ ID NO: 59109 - DNA, 825 bp, Unknown
  Obtained from environmental sample
  misc_feature (1)..(825): n is a, c, g, or t
atgattgctcaatcgaatggagcctatgtttatcagggcaattctctaattgtgcctgaggatactccagatgcccttatatataaagaaattgcccttgaatcgatagagaaagcctttgcgaatactaaaaatattgatagtttcactgttccttcactggacgggcaggccggtatttgctcattcgtcattccggaaggagaactaccggacgaatggaaatcaattcccctcaggcaggcgcttggtattatgaccggcgggacattggctcgcggccagggccatgtgggaaggattctgcgctcataccacataagccaatggcgaaaagaatcactcttctgcggaagctgcggcgcgccaaacagggatgccgattcaggcattgtagccaggcaatgcggcgcatgcggcaggcttgaatttccccgaattgcacccgctgtaattaccatcattaccaacgacaaaggtgaagccgtgctggcgcacaataaaaactttacatccggtttttatagccttatagcgggctttaacgaagcgggggaaaatcttgaagaaactgtcgcaagggaaataaaagaagaaataaatattgacgttaaggacactcgctacattttatcccaaccttggccttttcccggttctttgatgctgggcttttccgcaagttataacggcggggaattaaaacctgacggcattgaaattgatgacgcccggtggttttcaagggaagctctgcccagcctgccgcccagcgcctcggtttcaaggttccttattgacttatgggccacgggcaagctgtag

SEQ ID NO: 59110 - protein, 274 aa, Unknown
  Obtained from environmental sample
  DOMAIN (147)...(271): NUDIX domain
  misc_feature (1)..(274): Xaa is any amino acid
MIAQSNGAYVYQGNSLIVPEDTPDALIYKEIALESIEKAFANTKNIDSFTVPSLDGQAGICSFVIPEGELPDEWKSIPLRQALGIMTGGTLARGQGHVGRILRSYHISQWRKESLFCGSCGAPNRDADSGIVARQCGACGRLEFPRIAPAVITIITNDKGEAVLAHNKNFTSGFYSLIAGFNEAGENLEETVAREIKEEINIDVKDTRYILSQPWPFPGSLMLGFSASYNGGELKPDGIEIDDARWFSREALPSLPPSASVSRFLIDLWATGKL

SEQ ID NO: 59111 - DNA, 594 bp, Unknown
  Obtained from environmental sample
  misc_feature (1)..(594): n is a, c, g, or t
ttggaagcctccataccccttgccattcttgggaatgctcaaagaggttttgggttttattttggcttgcactcagatttttcttttggcaaagagagcaaaagagatgttcgcaaaacaagctccattatatgggatgtaaacgaggttagcaacggagaatacaaaaaattctgcgaagaaacgggtcgcgaaattcccgctagagcaaaaataaaggaattggaggattatcctgttctaaatatcagcttgaaaaatgccattgcttatgccaaatgggcaaaaaagcgattgcccacagaagatgaatggaaaacgcttgccgctacttattcaaactttgatgatttttgcgaaattcgaaaattaaaaaaagtttatgaaggacatattataaatggcgttagaaatttcgcaggcaatgccgctatttggcttttgccggaaaatgaaaacgccagcgttgcaagttttgctggcagttcttatggagattcatttgagacctgcaaaaagaaagctgtgcttacggatatatcctcgccagagggcaatgaggttatagggataaggctggtgagggattattaa

SEQ ID NO: 59112 - protein, 197 aa, Unknown
  Obtained from environmental sample
  DOMAIN (15)...(195): Domain of unknown function (DUF323)
  misc_feature (1)..(197): Xaa is any amino acid
MEASIPLAILGNAQRGFGFYFGLHSDFSFGKESKRDVRKTSSIIWDVNEVSNGEYKKFCEETGREIPARAKIKELEDYPVLNISLKNAIAYAKWAKKRLPTEDEWKTLAATYSNFDDFCEIRKLKKVYEGHIINGVRNFAGNAAIWLLPENENASVASFAGSSYGDSFETCKKKAVLTDISSPEGNEVIGIRLVRDY

SEQ ID NO: 59113 - DNA, 1242 bp, Unknown
  Obtained from environmental sample
  misc_feature (1)..(1242): n is a, c, g, or t
ttgccgagctggattggcggaagattcgaccgctacggcgaagttgcggtcatagaccttgacgcggcaatggggaaaggttccaaccttgaaatgataaagcctcttcttagaaaagccgagtgcagggtaggcggcggcattaaaacaccgcaacaggcgcgggaactggtcagtctaggggcgcggaaaataattgtcggttccggcgcttttcgcaatccggcaaaaaaaggagcgggtgtcgcaggtggagagtttgcggtaaatatcccttttcttgaaactatgtcgaaaaaaataggacggcaacggctaatcgtagcggttgacgcgcgctcaggagaaattgtcgtggacggctggaaaacccccacaggtctcgaccttattgaagctgcaaaactggttgaacccttcgctggagaactgctttttacctgcgtagaacgcgaggggacaatgacaggcatagacctcacccccgtacgtaaattacgtgaggcggtttcctgccagattaccgtcgccggcggtgtttcgatattagccgaagttgaagaaatcgccgccatcggctgtgacgttcaacttggaatggctctatataccggaaaaataaatcttgcggacgcttttatcacatctcttaattggaaaaaaggagagacacgagcaactccccaagacggcaataccgactccttattacccgttatcgttcaagcttccgacggacaggtattaatgacaggttttaccgataaagaagcgttagctgaaacatttaagcgaggtaatgtctgttttcacagccgtacaagaaacaaactttggatgaaaggcgagaattcaggtaatgtgttaaaactaatcagactgcggacggactgcgaccatgacgctattcttgcaattgccgaacctgcaggtcctgtctgccacacgggagcgtggtcgtgttttgcaaataacaaagattatactttgcaatttttgcaagaaataataaaggagcgttttcgtaatcccgctccaggttcatatactgctactcttgacgacgatcttgtccgtgaaaaagttatggaagaagctaaggaactgtgtgaggcaaaaactcatgatgaaatcatctgggaagcggcggatttgttctatttttcaaccgtgcttatgacaagggcgggagttaccattcaggaaattcttgacgaacttgatcggagacacaaaaaataa

SEQ ID NO: 59114 - protein, 413 aa, Unknown
  Obtained from environmental sample
  DOMAIN (1)...(208): Histidine biosynthesis protein
  misc_feature (1)..(413): Xaa is any amino acid
MPSWIGGRFDRYGEVAVIDLDAAMGKGSNLEMIKPLLRKAECRVGGGIKTPQQARELVSLGARKIIVGSGAFRNPAKKGAGVAGGEFAVNIPFLETMSKKIGRQRLIVAVDARSGEIVVDGWKTPTGLDLIEAAKLVEPFAGELLFTCVEREGTMTGIDLTPVRKLREAVSCQITVAGGVSILAEVEEIAAIGCDVQLGMALYTGKINLADAFITSLNWKKGETRATPQDGNTDSLLPVIVQASDGQVLMTGFTDKEALAETFKRGNVCFHSRTRNKLWMKGENSGNVLKLIRLRTDCDHDAILAIAEPAGPVCHTGAWSCFANNKDYTLQFLQEIIKERFRNPAPGSYTATLDDDLVREKVMEEAKELCEAKTHDEIIWEAADLFYFSTVLMTRAGVTIQEILDELDRRHKK

SEQ ID NO: 59115 - DNA, 573 bp, Unknown
  Obtained from environmental sample
  misc_feature (1)..(573): n is a, c, g, or t
atgagcgaattttggaacagccgtgttaataaactttctccgtatatccctggcgaacagcctaaggacaggggaataattaaactaaacacaaacgaaaacccctatccgccttctccaaaagttatagaagcaattaaaaacgccgcaggggagcgtcttcggctgtatcccgatcctgaatgtgcggcgtttcgtgaagccgcctccgcccgttacgatgtaaagtcgcaggaagtttttgcaggtaacggttctgacgaaattttagcgtttgcttttggcgctttttttgaaagcggtgaaaaagccgcaaatatactattccctgacataacctacagtttttatcctgtttacgcaaatctttgggaaataccttaccgcgccattgcgcttacgcaggatttttcaattaacataaacgattataaaataccttcaggcggcgtaatatttcccaatccgaacgctccaacagcggtcgctctgccgttagacgatattctggcacttgcggaatatcttgaaaaaacaggggaaagtcctttattgttgacgaagcttatatag

SEQ ID NO: 59116 - protein, 190 aa, Unknown
  Obtained from environmental sample
  misc_feature (1)..(190): Xaa is any amino acid
MSEFWNSRVNKLSPYIPGEQPKDRGIIKLNTNENPYPPSPKVIEAIKNAAGERLRLYPDPECAAFREAASARYDVKSQEVFAGNGSDEILAFAFGAFFESGEKAANILFPDITYSFYPVYANLWEIPYRAIALTQDFSININDYKIPSGGVIFPNPNAPTAVALPLDDILALAEYLEKTGESPLLLTKLI

SEQ ID NO: 59117 - DNA, 1572 bp, Unknown
  Obtained from environmental sample
  misc_feature (1)..(1572): n is a, c, g, or t
atgggactgaaggattttttatttggcaaaaaacaatcggaaggcgacgatacggatgagcaggcagcggccgtccccaataccaaccgccacccctggggcgattttacgcttttgcaaagcattaccccggagcgcatggcacaaattctcaacgatgtaaagcgcggggagtgccccgctgaatatctggaacttgcccaggacattgagttaaaagatctgcattaccgttctgttatttccacacgcaaggacacgataaccgggcttgatgtcaaagttattccggcgagcgacgacaagcgggacatggagcttgccgaggccgtggagcgcgacatcgtgaaaaatattaacgcgaaactgtacacattaatacgggatatgctggacgctcttgccaaggggttttctgtttccgaaattatctgggacaccgatatggctcactggaaaccgaagcagtacaagttccgcgatccacgctggtttcagtatgacaaggaaaccgggaagacgcttatgttacgctctcccctgggaaatgagctggagcctctcaagccgtttcattttgtagtgcatgagccgcaccttatcagcggaaaccaaatcaccgcggggctggcgcttccggctttatattactggatgctcaaaagctacaacgtaacgagctgggctgcgttcattgaccgctacggctatccgatccgcatcggcaagtacgggaaaaaattcaccgaagaggacaggataacgctcaagcgtgcggtcgcctctatcggccaggatttcggcgcaatcattcccgaaagcgcccagcttgaaattgtcgaatccaaaagcaccggcgaaaaggcgaacgtctacgaaaagctggccgactggatcgacaagcaggtcagcaagctcgtcctgggccagaccatgacaaccgatgacggctccagcaagtcgcaaagcgagacccacgacaaagtgcgtaacgacattgccgacagcgatattcttcaagtgatcgaaacgctaaacgccgcgcttaccatcccttatataaacctgaatttcggcgagcaggaaaactatcccaaaattgatttattcaagcctgacgagaaaaacatcgagcagattattgatgcagtagagaagctggggccgctggggctgacggtcaagtcagacgagcttcgctcaataatcggcatgtccaatccagacgaaggcgacgaggttataggcggcagagctccgcaagaaccttcggctgctcttgatggaatgaacactgaacggaatgttgccctaaacgccgccggcgcggatcctgctgacagcgttgacgctctggatgccgaaagcggaagcggctatgtcgccatttcggacgagattgcgggcgtgattgaaaaggcggctgacgcggctactgactttgcgagcttccacaaggaactggaaaaactggttaccggctgggcgccggataagatcgccgagtgtattgcagtggcgatgtttaaggcaagggcgctgggcgatgcggagtttgacaagggcaaatga

SEQ ID NO: 59118 - protein, 523 aa, Unknown
  Obtained from environmental sample
  DOMAIN (1)...(517): Protein of unknown function (DUF935)
  misc_feature (1)..(523): Xaa is any amino acid
MGLKDFLFGKKQSEGDDTDEQAAAVPNTNRHPWGDFTLLQSITPERMAQILNDVKRGECPAEYLELAQDIELKDLHYRSVISTRKDTITGLDVKVIPASDDKRDMELAEAVERDIVKNINAKLYTLIRDMLDALAKGFSVSEIIWDTDMAHWKPKQYKFRDPRWFQYDKETGKTLMLRSPLGNELEPLKPFHFVVHEPHLISGNQITAGLALPALYYWMLKSYNVTSWAAFIDRYGYPIRIGKYGKKFTEEDRITLKRAVASIGQDFGAIIPESAQLEIVESKSTGEKANVYEKLADWIDKQVSKLVLGQTMTTDDGSSKSQSETHDKVRNDIADSDILQVIETLNAALTIPYINLNFGEQENYPKIDLFKPDEKNIEQIIDAVEKLGPLGLTVKSDELRSIIGMSNPDEGDEVIGGRAPQEPSAALDGMNTERNVALNAAGADPADSVDALDAESGSGYVAISDEIAGVIEKAADAATDFASFHKELEKLVTGWAPDKIAECIAVAMFKARALGDAEFDKGK

SEQ ID NO: 59119 - DNA, 1062 bp, Unknown
  Obtained from environmental sample
  misc_feature (1)..(1062): n is a, c, g, or t
atgaaagatatatcggttacccttcaagggagtaagacagaaaaaaatcttactgaaatagaagaagcggtaattcctcttgaagcgcttggcgtaagcgaagcgcgtaataaaacaaaggaaattgcgtcggcaagagaattacttggtaagctggaaaaagaagcgtccgccgacgctgactattcgggcagacttatagcatggtcgggcaggttggctattctggaaggcaaatacagcgatgctatgcggctttacaagcaatctgtttctgtttcgccgggaacaatccccgctgttgttttatccgtccgtcttgaaggcgatcccgcaaaaaaactggaaataatcgaaaaagaattagcattgctaaaccaaaaatctttaggcgttggagaacttaacatcgaaagaggtcgcgcccttatcgaattaaaccgtttttccgaagcggtaggcgcttttgataccgcgttttcagcgggaattaacaaagtttataaagacagttacggacatgaaagagaccgcgcgtgggaacttcgcaacgcgagcggaataaacgcgggttctctgagtctgcttggacgcgagaccataacatggaacgattgtatcgctctggcaaaaaacgaaactcagcttttacgatttatcacaggcggcagaaatatgacagacgcggacttatttaaccgcctagttgaccgcgcggtaattccgtttattcaggatgtaactgaaagccaatggcctctggcaagaccgaaaccggacgaatccgtaacgcgcgcgggagccgcttattttatctggcatttgtacgccgcggcgcgcgcggacagcggaatgttatcgcgttattccgcgcgttatgcgacaggcgcaaatccccgcagtccaatctcggatatacccgcgctttcgcctttctttgattcgatcttgggctgtgtggagacggaactattgtcgctcccagacggacggaattttcgccccacccaatttataagaggcgcggaactgcttacgatacttaaaaagattgacaattaa

SEQ ID NO: 59120 - protein, 353 aa, Unknown
  Obtained from environmental sample
  misc_feature (1)..(353): Xaa is any amino acid
MKDISVTLQGSKTEKNLTEIEEAVIPLEALGVSEARNKTKEIASARELLGKLEKEASADADYSGRLIAWSGRLAILEGKYSDAMRLYKQSVSVSPGTIPAVVLSVRLEGDPAKKLEIIEKELALLNQKSLGVGELNIERGRALIELNRFSEAVGAFDTAFSAGINKVYKDSYGHERDRAWELRNASGINAGSLSLLGRETITWNDCIALAKNETQLLRFITGGRNMTDADLFNRLVDRAVIPFIQDVTESQWPLARPKPDESVTRAGAAYFIWHLYAAARADSGMLSRYSARYATGANPRSPISDIPALSPFFDSILGCVETELLSLPDGRNFRPTQFIRGAELLTILKKIDN

SEQ ID NO: 59121 - DNA, 936 bp, Unknown
  Obtained from environmental sample
  misc_feature (1)..(936): n is a, c, g, or t
atgcgttttggggatttaggcattgccgccggcgcaaaatggctttattcgccctttaccgagtacaattattacggcaacagggtgtccgggggctattattcggaaggcgtggcggttttaaacgcttcttataactttttctccggctattatttttccgggctttccttgggagtcagtctgaagggcgctttccgctccatgcccgattataccgacagccttgacaatataatcaaaggttccggagcgtcccaatctacgggaatggttatggcggatgtcggaatgcttacaaaatttaattttttaaagggttatcattcaagggaaaagaattcagccgtcgcccttgttatccgtaaccttggaccgccggcgatgggcgaacctctgccaaccgtagctaatgcggcattttcatataaacccattcgtccgctgaccattgacgttgatattttacttccgattaatatggttgatttttccctttccgagtcgccttacggagcgttgggttttgccgtcaatattacaaactttttatctatgcgcgcgggcgtaatggtaaaaccgggaagcagccgaattaccgtaggcagcgccgtaagcatgaataaaatcgcttttgacataaactatactttggacttacttacgcagttacagcctcttaacaggataagtcttgcggtgcgttttgatttaggcgacggaggcagaaaacaaatatcggacaaggttgatgaattgtatcttttaggtcttgaagcgtactcaaaaggaaaaatggacgaggcaagagtatgctgggaagaggcgcttaaacttaatcctaaatatgatcccgcccgtgaaagtcttaatatgcttgaaaaacgcgatgaactaaaacaaaaaatagaagaccttaataaattgaatttctag

SEQ ID NO: 59122 - protein, 311 aa, Unknown
  Obtained from environmental sample
  DOMAIN (250)...(283): Tetratricopeptide repeat
  misc_feature (1)..(311): Xaa is any amino acid
MRFGDLGIAAGAKWLYSPFTEYNYYGNRVSGGYYSEGVAVLNASYNFFSGYYFSGLSLGVSLKGAFRSMPDYTDSLDNIIKGSGASQSTGMVMADVGMLTKFNFLKGYHSREKNSAVALVIRNLGPPAMGEPLPTVANAAFSYKPIRPLTIDVDILLPINMVDFSLSESPYGALGFAVNITNFLSMRAGVMVKPGSSRITVGSAVSMNKIAFDINYTLDLLTQLQPLNRISLAVRFDLGDGGRKQISDKVDELYLLGLEAYSKGKMDEARVCWEEALKLNPKYDPARESLNMLEKRDELKQKIEDLNKLNF

SEQ ID NO: 59123 - DNA, 354 bp, Unknown
  Obtained from environmental sample
  misc_feature (1)..(354): n is a, c, g, or t
atgtggcttgatgtttccaatgattggatttacccccatcttacgcgttccatggaaagaatgacggagctggcggaacgttttcccgacgataccggattaaaagaaagagcgttaaatcaagcggcgcgtgaaatactgcttgcccaatcttccgactggccttcgcttttattcagacaagactcaaccgagtatgccgcagatcgtgtgcagaacgctcttcgcaattttacaacgatatatgaagcgctaggaagcaattatatcagcacagaatggcttaccactctggaacgaaagcacaatattttcccgaatataaactatagagttttcagacgcaaaaaatag

SEQ ID NO: 59124 - protein, 117 aa, Unknown
  Obtained from environmental sample
  misc_feature (1)..(117): Xaa is any amino acid
MWLDVSNDWIYPHLTRSMERMTELAERFPDDTGLKERALNQAAREILLAQSSDWPSLLFRQDSTEYAADRVQNALRNFTTIYEALGSNYISTEWLTTLERKHNIFPNINYRVFRRKK

SEQ ID NO: 59125 - DNA, 1086 bp, Unknown
  Obtained from environmental sample
  misc_feature (1)..(1086): n is a, c, g, or t
atggaattccgttatgcgatctcacttgttttagaagctcatctgccttttgtaagagaataccaaaaagacgacaatttatcccaagccggcgaagaaagccgcttttttgagtatgtcagcgaaacattgcttcctcttcttgaagttcttcaccggctggaggcggatcatattcagtttcgtcttgcattggcaatttctcccattcttattcatcagttaaccgacgatcttttacaaagaaaatatctgtcttacattgacaagcaaattgaattcggaaggcaggaaattgagagaaccgctaataacgatgaattaaacaaactggctcaacattattacaatacaatcgtagacagaagaatagcgtacactgaacgctatgaaaaaaatcttttaaaagcgtttgattcctacaggcgcaaaggcaagcttgaaattttagcttcctgcgcgactcacgcttttttgccgtttatcagccacaacggagaatctttacaggcgcagatggaaatccctactcccgcttaccgccgccattttgcgggcgttccgcagggcttttggctgccggaactcggctggtcttccgcgctggaaccgtatttaagagactataatttttcttacaccatcgtagacagccacggtcttttgttcggcagcccgcagccggaaaagggaactttttatcccgttaaaacacctaacggcacttatatcctcgcaagagacctgtacgccgttcgtgaaattgaaaaatcggcggtagatgaaatataccgtaacaatgacagagacgtaggttatgaactgccgcctgaaacggtaaaaccgtttttaagcgccgaaggagaaaggcacagaacaggatacaagtattggcagcgatctaacaaaaattataatccgcaagccgccgttggcagggcggctgaatacgcgaaaactttcatggataacacaatcgcccgtcttgaagaagcggcaaaacacatgaaagaagctccgctaagcctttacgcgaataatctgggtttttcggcaaccagtggcatgaaggtttccaatttatag

SEQ ID NO: 59126 - protein, 361 aa, Unknown
  Obtained from environmental sample
  DOMAIN (8)...(361): Glycosyl hydrolase family 57
  misc_feature (1)..(361): Xaa is any amino acid
MEFRYAISLVLEAHLPFVREYQKDDNLSQAGEESRFFEYVSETLLPLLEVLHRLEADHIQFRLALAISPILIHQLTDDLLQRKYLSYIDKQIEFGRQEIERTANNDELNKLAQHYYNTIVDRRIAYTERYEKNLLKAFDSYRRKGKLEILASCATHAFLPFISHNGESLQAQMEIPTPAYRRHFAGVPQGFWLPELGWSSALEPYLRDYNFSYTIVDSHGLLFGSPQPEKGTFYPVKTPNGTYILARDLYAVREIEKSAVDEIYRNNDRDVGYELPPETVKPFLSAEGERHRTGYKYWQRSNKNYNPQAAVGRAAEYAKTFMDNTIARLEEAAKHMKEAPLSLYANNLGFSATSGMKVSNL

SEQ ID NO: 59127 - DNA, 381 bp, Unknown
  Obtained from environmental sample
  misc_feature (1)..(381): n is a, c, g, or t
ttgccgccctttaagaaaacaaaatccccattattaccggaaaaatctttgatgacgtttcccgtttccgcttcgcggataatagagccgggcggcagaggcacaataacatcctctccgttggaaccggcgcaattagcgttccccccatcccgtccgttctgcgccttaaatttatgtttgaaccgcaaatgggcaagcgtacgaaggttgcgcctcacggtgaagataacgtcccctcctctgccgccgtccccgcctgaaggcccgcccttaggaacatatttctccctgcggaaagccacgcacccattcccgccgttccccgaggaaacctcaattaccgcctcatcagcaaatttttccatagctatactttaa

SEQ ID NO: 59128 - protein, 126 aa, Unknown
  Obtained from environmental sample
  misc_feature (1)..(126): Xaa is any amino acid
MPPFKKTKSPLLPEKSLMTFPVSASRIIEPGGRGTITSSPLEPAQLAFPPSRPFCALNLCLNRKWASVRRLRLTVKITSPPLPPSPPEGPPLGTYFSLRKATHPFPPFPEETSITASSANFSIAIL

SEQ ID NO: 59129 - DNA, 1041 bp, Unknown
  Obtained from environmental sample
  misc_feature (1)..(1041): n is a, c, g, or t
atggaaaaatttgctgatgaggcggtaattgaggtttcctcggggaacggcgggaatgggtgcgtggctttccgcagggagaaatatgttcctaagggcgggccttcaggcggggacggcggcagaggaggggacgttatcttcaccgtgaggcgcaaccttcgtacgcttgcccatttgcggttcaaacataaatttaaggcgcagaacggacgggatggggggaacgctaattgcgccggttccaacggagaggatgttattgtgcctctgccgcccggctctattatccgcgaagcggaaacgggaaacgtcatcaaagatttttccggtaataatggggattttgttttcttaaagggcggcaacggcggctgggggaatgttcattttaagtcctccgtgaatcaggcgccgcgtaaagctttgccggggaagccggggcagacagtaaaattaaaagttgaattgcaaataatggcggacatcgggctggtggggtttcccaatgcgggcaagtccagtttgcttgaccgttttaccaacgcccgcccaaaaatagccgcctatccgtttactacaaaaattcccaatctgggagtgttgaccgtggggaattcggctgatgagggcggcagggacattattcttgcggatattcccggccttatcgaaggcgcttcacagggggcggggctgggtatacgtttcctcaaacatatttcccgaacagcggcgctggtctttttgatcgatctttccgatgataattaccttaccgcctttgacgtgctgcagcgggaactggccgccttctctcccgaactggtgcaaaaaaaacggctgcttgtgggaacaaaaaccgatttgcccgaaactgaaggccgcctcgcgcagcttgccgctaaataccccgatgaaaaattattcggcatttcggttttttcaggcgagggtataaaggagctcgccctggagtttctccgccttgctgacggccttgccgatggagaagccgcacaggaggcgtttcaggcatga

SEQ ID NO: 59130 - protein, 346 aa, Unknown
  Obtained from environmental sample
  DOMAIN (161)...(289): GTPase of unknown function
  misc_feature (1)..(346): Xaa is any amino acid
MEKFADEAVIEVSSGNGGNGCVAFRREKYVPKGGPSGGDGGRGGDVIFTVRRNLRTLAHLRFKHKFKAQNGRDGGNANCAGSNGEDVIVPLPPGSIIREAETGNVIKDFSGNNGDFVFLKGGNGGWGNVHFKSSVNQAPRKALPGKPGQTVKLKVELQIMADIGLVGFPNAGKSSLLDRFTNARPKIAAYPFTTKIPNLGVLTVGNSADEGGRDIILADIPGLIEGASQGAGLGIRFLKHISRTAALVFLIDLSDDNYLTAFDVLQRELAAFSPELVQKKRLLVGTKTDLPETEGRLAQLAAKYPDEKLFGISVFSGEGIKELALEFLRLADGLADGEAAQEAFQA

SEQ ID NO: 59131 - DNA, 1938 bp, Unknown
  Obtained from environmental sample
  misc_feature (1)..(1938): n is a, c, g, or t
atgcaaaaacagcttgaaagcatagaagaaaatatccgttcttttgaggaaaatatacagcttgccgcctcccgaatcagcgagaatgaaaaagaagtgcacagggcggaagaagagattcacaatatcgaaaaagagcaggcggaatttgagaaagagcttgccgtaataaccgacgacatagtcgcggaattggacgcgggcttaaaaaaagccggctattcggcggccgagcgcaaaacagcggaagaggcgttacacgaaaccttaggccgcctgaacgccttcctcggaggcagggaagctctcctccgcgacttgaccgccgcggcggaagcgtcgtcttcgacaggcggcgtggatcctgcggaacttgggcgcattgccggcgcattggcgtcggggcttgccgaggccgcgggagacgcgcaaaaggcgcttgaactttttaaaagttaccgcgaacacacgcctgtttttatcgacgagttccttgctcctcagggaattattacaaggaagcgcgaattggattcgcggatcaggagcgcgaaggaaagcatagaggagcgccgccagcgcgttaaaaatctgcgcagcgacaacatcaacctgctggcgaagatagacgaataccgcgctactctggaaaatttaaaggttaaccgcgcccagatgaaaacgcgcgcccagtccgccgaagagcaggcgaggcttatcaggcgggaactttcggggcaggaaggacagttaaaaaacatacgcgacgatctttcgcttacgcgcaaaagactggaagaaattgacgggcgcattaccgccattcacgctgaaattaccactatcgaggaaaagacaaccgcgttctccgccgaacttgaaaaacttgaaaaagacatacgcaaaagaaacgacaatgtcgcaagcaaaaaagaaattatcaacaagcgcacggcggaactttccaaagtgcaggaagcccttgaaaaaattcacatagagcttgttcagtccgagacggaaattaaaaacattcaggacaatttccgtgagaaccactcaagggatttaatggaatttgaggagcggatttttacaattaccgccgcccccgccgacttgcgcgacaagcttgcgaatgcccggactaaaatgaaagaactgggctccgtaaaccttatggcccccgaagaatttgccgaaacaaaggaacgctttgaattcttaagcagccagatggccgaccttgaaaaagcgagaaaagatttggaagaccttaccgccgaaatccgtcaggaatcttcggcattgtttctggaaacttacaatcgaatcaagaaaaattttcacaacatgttccgcaggcttttcggcggcggacgcgcggagcttaggctttcagaccccaaccacattctggaatcgggcatagagattttcgcccagccgcccggaaaaaagctggaacatttaagcctgctctccggcggcgaatgttcaatgacggctgtcgccctgcttttcgcgacatacatggtaaagcccagccccttctgtcttttggacgaaattgacgccgcgttagacgaacagaacgtagggcgctttgtccaccttctgcgcgagttcagcgacacaagccagtttattattattacgcataacaaaaaaaccgttacgggcgcgggaacgcttttaggcgtaaccatgcaggaatcgggagtgacaaaacttatcacagtgcgcattgaacacggggaacttgcggtggaagactcggagcctttccagagcgaattgtgggacgcggacggcaagtttgaggaagaggaagtcgcgcccgaagcgggcagggagcttcccgtcggcatgaatgatccgaaaaaagtaacgcaggcgcagttaaggccgattaggtcgggcgtgccgaagagttga

SEQ ID NO: 59132 - protein, 645 aa, Unknown
  Obtained from environmental sample
  DOMAIN (1)...(577): RecF/RecN/SMC N terminal domain
  misc_feature (1)..(645): Xaa is any amino acid
MQKQLESIEENIRSFEENIQLAASRISENEKEVHRAEEEIHNIEKEQAEFEKELAVITDDIVAELDAGLKKAGYSAAERKTAEEALHETLGRLNAFLGGREALLRDLTAAAEASSSTGGVDPAELGRIAGALASGLAEAAGDAQKALELFKSYREHTPVFIDEFLAPQGIITRKRELDSRIRSAKESIEERRQRVKNLRSDNINLLAKIDEYRATLENLKVNRAQMKTRAQSAEEQARLIRRELSGQEGQLKNIRDDLSLTRKRLEEIDGRITAIHAEITTIEEKTTAFSAELEKLEKDIRKRNDNVASKKEIINKRTAELSKVQEALEKIHIELVQSETEIKNIQDNFRENHSRDLMEFEERIFTITAAPADLRDKLANARTKMKELGSVNLMAPEEFAETKERFEFLSSQMADLEKARKDLEDLTAEIRQESSALFLETYNRIKKNFHNMFRRLFGGGRAELRLSDPNHILESGIEIFAQPPGKKLEHLSLLSGGECSMTAVALLFATYMVKPSPFCLLDEIDAALDEQNVGRFVHLLREFSDTSQFIIITHNKKTVTGAGTLLGVTMQESGVTKLITVRIEHGELAVEDSEPFQSELWDADGKFEEEEVAPEAGRELPVGMNDPKKVTQAQLRPIRSGVPKS

SEQ ID NO: 59133 - DNA, 1203 bp, Unknown
  Obtained from environmental sample
  misc_feature (1)..(1203): n is a, c, g, or t
atgaaaccaggctcctcatggaataagatacaaatagaaagggaaacaatgttgaaagtggcaatctgcgtattgcttgccatttacctttttacgcccattgccatggttcagtttttatgcgtcttctttttgctcatattgatttgctcaaggctctacgttgaataccttatcaggaatatccgggtaatcagacaggatgccgaattaagggtgttcaggtatgaatgggtacaagtggaattaaagctggaaaaccgcggtctgcttcccgtctttatgctggttatgggagatacgtccggaaaattggctgttttaagattacgcaaaatcatctgcactatgggacggcgttcatggactattatgaactggcagggttactgcgccgaccgggggatctttaccctcggccccgcaatggtacgcggagctgatcctttgggtctttttccgtttcaattaacggctgttgaaacctcagtgctttatgtatatcccgttttatgttccatcagcatcaagcatcccgcgggcgttcctctgggaaatatgataagtcccaatcccctgtttgaagatactacccgctgcagatcgctatgtccgtataatccgggggatgaaccgcgccgcatcaactggaaaatgagcgctcatatggaatccatcatgatcaatgaatacgacgccaccgcttcatatcccctcatgatttttctaaatctggatcggaatgaatacccgttaagaaaacggggcgcctttattgagcgcgccattgaagccgccgccgctctttgcctgaaggccgcgcaggaacggcaggaatttgggatcattttctattcatcttcagaaaaagacggaatctccgttatcgcgccgtccgcctttacccttgttcccattcttgaacggttggcaaccctgaactggtcaacgctgaatgatccggtaaaagggcgcgccagcgcattggccatgcttgagcagggtaaatacctgtcctatggaacccgctttctatatgcgggtcccgatttaggcgatgaggcgtatatcatccttaactcattaaaaagatatcatctttcactggaatacctcgtcattgacgagcactctatgccttcccttgttcccgggaattcccgccgttataaaatgaaggagagcggccgtgaaattgtttaa

SEQ ID NO: 59134 - protein, 400 aa, Unknown
  Obtained from environmental sample
  DOMAIN (132)...(234): Protein of unknown function DUF58
  misc_feature (1)..(400): Xaa is any amino acid
MKPGSSWNKIQIERETMLKVAICVLLAIYLFTPIAMVQFLCVFFLLILICSRLYVEYLIRNIRVIRQDAELRVFRYEWVQVELKLENRGLLPVFMLVMGDTSGKLAVLRLRKIICTMGRRSWTIMNWQGYCADRGIFTLGPAMVRGADPLGLFPFQLTAVETSVLYVYPVLCSISIKHPAGVPLGNMISPNPLFEDTTRCRSLCPYNPGDEPRRINWKMSAHMESIMINEYDATASYPLMIFLNLDRNEYPLRKRGAFIERAIEAAAALCLKAAQERQEFGIIFYSSSEKDGISVIAPSAFTLVPILERLATLNWSTLNDPVKGRASALAMLEQGKYLSYGTRFLYAGPDLGDEAYIILNSLKRYHLSLEYLVIDEHSMPSLVPGNSRRYKMKESGREIV

SEQ ID NO: 59135 - DNA, 2331 bp, Unknown
  Obtained from environmental sample
  misc_feature (1)..(2331): n is a, c, g, or t
gtgaaaggaccgccggaattctttacagtaaccggacaagttaccggaacctttatggttaaacggcttagcgtatcaataggaggagccgccgaggttgaacagggacaatctgccacggttttacaaacggttgacggcgttacaacacccttggggggaaatttctttattgagaatttttctctaacgccagccggtaaaaaaacatttaattattcattcaatgtaatcactaaaaaaagcggcggcgagcttgcttatggttcgcgtactattacaattaacgccgtaggctcttcggataactctgatgtaaagacgctgtcatttatttatgacaataaggggccgacagttaatgtaagcgtaccgagcagcaaggaatatttgaacaaagacgagaaagacagtcttaattatgtattagataacggaaaaccttatcttaccggacaggaagaaatctacaaaaagttagacgccatggttatatcggacgcgtcggccaaactcagcggaacatttaacgacgattattccgatgtagccgttaccggcagtaacactttctggtgggacattgacaatagcggaatatggaaaacaggaatccttggcgttaataacaagtccgtaagctgggaagttgatattgccgggcttggggtaggcgtacatatcttaagtcttcgcgtaaaagactctctggggaacggatacgataaaaactccggacttacaggcaaaggcgggggagccggttttgaaacagacattgcctttttaatcgataataatccgcctgtaattgaagatatagtagtaccggaagccgctattaatagccaattccccgttaccggaagagtaaccgatacttacggcgttaaaaaactgagcgttaaactcggcaacgatgaaattgcttatgctgaaaagaacagtcttggaaattatgtcttaacaagaaaaccgggtgttaactatgtggaaagtattgttattgatcgtacgaacggcgtaggtaaatcctttgactttacagttactatagacccgcgcgccggcagtatggaagacggacctaaatcgctgacatttaccgccattggttcatccaaccaggcggcaataggggtggacagttttacatatgacaccacaggaccaaaggtaactattggagcgccaataaacggcagcatatatgtggtaggcaatgaatggacggatcttgaaaaagcggttagaacggatgtatttacaaataccggtatacctaccggtaatggatcaacttatgacaaattattccaggcaagaataaaggacaatacagcttcctttacggtaacctttgccgataactattctaacgtttttgaatcagataaaaatacatctttctggtacaggttcgacgacggagcgtggcaagaaggattggcacctattggagaatataataaaaattcggcaagcgtaaaagttcagctgccggacggcggaacatggacagacggattacaccgcctgagcgtccgcgtaaaagattctcttaagaatggttacgacaaaaaaaccttggatggtgttatttcaacgcttaccggcgataaaaagaataacgattacggacatgaaacctaccgaacctttatgatcgacagcgggaaacctacaattgcttttacaaatgataaaacggaattaggagttttcagcaaaactgaatcgcccggtatcagcggaaccattaccggaacatataaggttcaggagttgaacgcaaagattggttcctctaccaaaaatattgatctgaagagtttccttattgatattcccggcagcatgaaaacttataactttaatgttgacattaatccatctgatatttacgaagctacaaaattcgcggaaggttcctacacgatcagtttaaccgcgaaaggttcttccgatcagtcggatatgaaggtaagcacatttatccttgatactcagggaccggctatttcgattaacgctccaatcaataaagtttacctgacatccggcccaaccggccagataagtacctttgaagatgctttgttaaataacaatacaggtttgatagcttctcttgataggcctatatactacaggttacttaacaacagtgttaaagacatatcagcagggctttcaggcagtttctccgatacatactcggatattggaacaaaatactggtacagatttaacggcggcgcatggagagaagaagacaccaatgtcagcaccgcagataataagaagacggtaggctggaaaataaattaa

SEQ ID NO: 59136 - protein, 776 aa, Unknown
  Obtained from environmental sample
  misc_feature (1)..(776): Xaa is any amino acid
MKGPPEFFTVTGQVTGTFMVKRLSVSIGGAAEVEQGQSATVLQTVDGVTTPLGGNFFIENFSLTPAGKKTFNYSFNVITKKSGGELAYGSRTITINAVGSSDNSDVKTLSFIYDNKGPTVNVSVPSSKEYLNKDEKDSLNYVLDNGKPYLTGQEEIYKKLDAMVISDASAKLSGTFNDDYSDVAVTGSNTFWWDIDNSGIWKTGILGVNNKSVSWEVDIAGLGVGVHILSLRVKDSLGNGYDKNSGLTGKGGGAGFETDIAFLIDNNPPVIEDIVVPEAAINSQFPVTGRVTDTYGVKKLSVKLGNDEIAYAEKNSLGNYVLTRKPGVNYVESIVIDRTNGVGKSFDFTVTIDPRAGSMEDGPKSLTFTAIGSSNQAAIGVDSFTYDTTGPKVTIGAPINGSIYVVGNEWTDLEKAVRTDVFTNTGIPTGNGSTYDKLFQARIKDNTASFTVTFADNYSNVFESDKNTSFWYRFDDGAWQEGLAPIGEYNKNSASVKVQLPDGGTWTDGLHRLSVRVKDSLKNGYDKKTLDGVISTLTGDKKNNDYGHETYRTFMIDSGKPTIAFTNDKTELGVFSKTESPGISGTITGTYKVQELNAKIGSSTKNIDLKSFLIDIPGSMKTYNFNVDINPSDIYEATKFAEGSYTISLTAKGSSDQSDMKVSTFILDTQGPAISINAPINKVYLTSGPTGQISTFEDALLNNNTGLIASLDRPIYYRLLNNSVKDISAGLSGSFSDTYSDIGTKYWYRFNGGAWREEDTNVSTADNKKTVGWKIN

SEQ ID NO: 59137 - DNA, 615 bp, Unknown
  Obtained from environmental sample
  misc_feature (1)..(615): n is a, c, g, or t
atgtctgctgaggaatcttatctgcaggaatcaatagaaataatgattatcagagaaactgcaagagcgtacacaagagaacaaaaattaatcgcgctggaatatatcggcgaagccattgaccgcggaagcacaaacgacgaaatacgccagacattggaatacctttccagagagggaagaatgaatatggctagggaaaacggtcggcttatgaacaatttcccggaagtcaggcggcaatcggcaaagtatcttggaaagatgggtacggaagaagccagaaaatctctccttgatatttgcacatacgaaaatgaaccgatggttttgcaggaagcgattaaatccctcggcgacatcggaacaaacgaaaacaatgaaactgtaacgcatatcgcatggatcatgagccgttttaattatacaaaccccgataaccttatggcgcttgccactattgacgcgtttgaaaaaatcgccagaaaaaataacggcataaacgctccggaagttgccagaacattaaaccttattgtcgaaggacaatatgttacgccggttaaagaaagagctagacagttattagccgaattacgcacttatggtaaataa

SEQ ID NO: 59138 - protein, 204 aa, Unknown
  Obtained from environmental sample
  misc_feature (1)..(204): Xaa is any amino acid
MSAEESYLQESIEIMIIRETARAYTREQKLIALEYIGEAIDRGSTNDEIRQTLEYLSREGRMNMARENGRLMNNFPEVRRQSAKYLGKMGTEEARKSLLDICTYENEPMVLQEAIKSLGDIGTNENNETVTHIAWIMSRFNYTNPDNLMALATIDAFEKIARKNNGINAPEVARTLNLIVEGQYVTPVKERARQLLAELRTYGK

SEQ ID NO: 59139 - DNA, 882 bp, Unknown
  Obtained from environmental sample
  misc_feature (1)..(882): n is a, c, g, or t
atgatttttgattttctgtttatattaaaacggaaaaaagtcttcgctctaatcggagacagcggtaccggcaaaagttttcgagcaaaacttgtcgcgcaaaaatacagaatagattatattattgacgacggtctcttgataaaagataaccgtatattagccggtcattcggcaaaaaaagaacatacattccttgcggcggttaaagtcgctctttttgacgagaaatcccacagagatgaagtcgcgcggaaactgcaaagcgaaaaatttaaacgtattctgcttcttggaacttccgaaaaaatgatttataaaatcgctgcgcgccttcagcttccccctccgcaaaaaattataaaaatagaagatatagctactcaggacgaaatagacagggcgctgagaacaaggcgcatagaagggaagcatgttattcccgtactgtccatcgaagtaaaaagaacttatccgaatattttttatgaagctataaaaatttttaaacggcgcgtcgttccggaaggaaacacaagagacttgcccgcgggactgggacccgtccctaccctgcttgaaaaatccgtagtgcgccctgaatattcaaaacgcgggaaaataattatttcacaatccgcgttaagtcaaatggttatacactgcgttgatgaatacaacccaaatataaaaataaaaaaaatacttgtaaaagacgccgaaatgggataccagcttgttataactattgacgttccatacggtatacagcttggcggcaatatccatgacttacagcgttatataatcgataatatcgaacgttacacgggaatattaatagaagaagtaaatataattatagataaaattacggagtag

SEQ ID NO: 59140 - protein, 293 aa, Unknown
  Obtained from environmental sample
  misc_feature (1)..(293): Xaa is any amino acid
MIFDFLFILKRKKVFALIGDSGTGKSFRAKLVAQKYRIDYIIDDGLLIKDNRILAGHSAKKEHTFLAAVKVALFDEKSHRDEVARKLQSEKFKRILLLGTSEKMIYKIAARLQLPPPQKIIKIEDIATQDEIDRALRTRRIEGKHVIPVLSIEVKRTYPNIFYEAIKIFKRRVVPEGNTRDLPAGLGPVPTLLEKSVVRPEYSKRGKIIISQSALSQMVIHCVDEYNPNIKIKKILVKDAEMGYQLVITIDVPYGIQLGGNIHDLQRYIIDNIERYTGILIEEVNIIIDKITE

SEQ ID NO: 59141 - DNA, 723 bp, Unknown
  Obtained from environmental sample
  misc_feature (1)..(723): n is a, c, g, or t
atgaacgcccttttttacgatcccgaacagcaaattgtggtggactatgtaaacggcatgaaggacataaaaaacaaacaggtaaagaacataataaatctttctgttattttcacggatgatcccgtaaggatgatccgcgccgtaaaatacgccgctatgacaggtttttccattccattaaatttaaaaatgaaaattgtaaatcagtcaaatctacttacgtcaatttccccttcgcgtcttacggaagaaatttttaaaattattaactcggataaagcgggcgccattgtagacttactggacaagatggggctttattcctatctgcagccgcaggcggctgaactaatgcgaaaaaatgcgaatttcagaaaaagttatctgcaaacaatgacggacttaaaaggcgcggaaaatcaacgcgggcaggcgctttcatctcttttttacgattatcttgaaagcacaagcgactggaaacccggtccaattgaaaattttaaagaaatatgcaaaaccgtccgtacttttgtcatgcccatgaatccgccgcgttttgaacttgaatacgccgttaaaaaatttctttccgcaaaaggaataacaataaaaaggactccgtttaaacaggcgggggaaggggaaccatccgccaaaagaagacgccgcagaagaaaaccaaagtcggaaccaacgaatacggagactactccgtaa

SEQ ID NO: 59142 - protein, 240 aa, Unknown
  Obtained from environmental sample
  DOMAIN (1)...(121): Poly A polymerase family
  misc_feature (1)..(240): Xaa is any amino acid
MNALFYDPEQQIVVDYVNGMKDIKNKQVKNIINLSVIFTDDPVRMIRAVKYAAMTGFSIPLNLKMKIVNQSNLLTSISPSRLTEEIFKIINSDKAGAIVDLLDKMGLYSYLQPQAAELMRKNANFRKSYLQTMTDLKGAENQRGQALSSLFYDYLESTSDWKPGPIENFKEICKTVRTFVMPMNPPRFELEYAVKKFLSAKGITIKRTPFKQAGEGEPSAKRRRRRRKPKSEPTNTETTP

SEQ ID NO: 59143 - DNA, 1269 bp, Unknown
  Obtained from environmental sample
  misc_feature (1)..(1269): n is a, c, g, or t
ttgactttaaagattttaaaagaaacagaaaaggatttttggggtatgaataaaaaagtaaccaatctgcggctgaaaatcaccctaatcctatgcggcatagggatagtatgttccaccgtcttcggaatgatggtctacatccggtaccacgattgcgccgtcgcgtcgttgcaaggcactctaaaaaacaccggttgtttaattgaatcacaaatgcctgttttaggcgacgtagactttatccgccgagaggggatcgcggagtccgaggcgtatatggatatacttcgggaattgcaaaaatacaacgacgccttcggcttcattttcatttacctcatagaaaacggcacggacggttttacttttctgctggacaccgacaaagtgggtaaaaataccgacagcacatttcttaaagccgcctccgacgaggtgctgacgtatttgcgcgacgcggtcgagaatcggcgggcggaactatccgatatatacacgagcaaatacggaacgtttatgtccgtctttgttccggtggtcaggcaaggcaaggtggtaagcgttatcggcctcgactacgacgcgtcgtttgtccgctctctggagcggcgggtattgttgcacgttgttatctgctttgccgcgacgatagcgtttgtgcttataatagcgatagtattctcaagggcggtcgtcgcgcttgtaaaggagacggacgagttaaacaaactgctgctatccaagaacgagcgtttggcggtcttatctaccacggacgatctgaccaagctaaataacaaacgctcctttatggagtacatggacatagtatggaagcaaaaccaccgccttaaacttcccataaccgtgttgatgatagacgtggattatttcaaaaaatacaacgacgcgttgggccatttggagggggacaaagcgcttttcgccgtggcgcagtgcataaagggccacgccaagcgggaaacggattttgtcgcgcggttcggcggcgaggagtttgtgtgcgtactcccgttcatagagaggaatgaagcgattaaattcgcgaacgcgcttgtggctaaagttgaaaacatgaagatacctcaccccgaaagcgaacactcaaagtacctaaccgtcagcataggcatggccgacgtggtgcccgacgacacttattcgtgtacgcggctattaagcgaggcggacaaggcgctgtacatggccaagaggtcggggaggaatatgcttgtggtcggttaa

SEQ ID NO: 59144 - protein, 422 aa, Unknown
  Obtained from environmental sample
  DOMAIN (253)...(418): GGDEF domain
  misc_feature (1)..(422): Xaa is any amino acid
MTLKILKETEKDFWGMNKKVTNLRLKITLILCGIGIVCSTVFGMMVYIRYHDCAVASLQGTLKNTGCLIESQMPVLGDVDFIRREGIAESEAYMDILRELQKYNDAFGFIFIYLIENGTDGFTFLLDTDKVGKNTDSTFLKAASDEVLTYLRDAVENRRAELSDIYTSKYGTFMSVFVPVVRQGKVVSVIGLDYDASFVRSLERRVLLHVVICFAATIAFVLIIAIVFSRAVVALVKETDELNKLLLSKNERLAVLSTTDDLTKLNNKRSFMEYMDIVWKQNHRLKLPITVLMIDVDYFKKYNDALGHLEGDKALFAVAQCIKGHAKRETDFVARFGGEEFVCVLPFIERNEAIKFANALVAKVENMKIPHPESEHSKYLTVSIGMADVVPDDTYSCTRLLSEADKALYMAKRSGRNMLVVG

SEQ ID NO: 59145 - DNA, 1134 bp, Unknown
  Obtained from environmental sample
  misc_feature (1)..(1134): n is a, c, g, or t
atgacgacacgccgaaagtctggaaagccctgcacgatcaaaatcttcataccgtggtgcagatcgccccggcggttcgcgtcgccctcgcggaggaattcgggtttgatcccggcacgattgtcaccaaaaagatatacgccgcgctcaggcggcttggtttcaagacgggtgtttgacacgaacttttcagccgaccttacgatcatggaagaaggctccgagcttgtaaaacgtttaaccgagaaaggcagtactattccgttgattacttcctgctgtcccgcgtgggtagattacatggaaaagtattacaacgatatgattcccaacttttcgacggcaaaatcgcctcagcagatgatgggcgcgatgattaaagcttactgggcagaaaaagccggagtaaatcccgacaagatatattcagtgtctgttatgccatgtaccgcgaagaaatgggaaacaaaacgtaatgacgacatgaaaagcgcgggacatggttacgacgttgacattgtaattaccacaagggaactttcccgaatgatcaaacaggcgggaattgacattcttaaacttgccgatgaagagccggacagtccgcttggaccgtacaccggagccgcgacaattttcggcgcgacgggcggtgtaatggaagccgcggttcgcagcgcatactaccttgttacaaagaaagaactccccgatgtagaatttaaacccgcccgcggtcttgacggcgtaaaggaaggggaagtcgatttcggcaacggaacaaagatacgtattgcggtagctcatcagatgggtaatattgctgcggttttggataagattcgcgaggcgaaaaaagccggcaaagagacgccgtatcactttattgaagtaatggcgtgccgcggcggatgtgtcgcgggcggcggacagccctacggttgtaaggacgatattcgtgaaaggcgcgcaagcggtctttacacggacgatcaaaaatcgcagtaccgctgttcgcatcagaatccttttatcgatcaggtttacaaggaatttcttggagagccgggcggtcacaaggcgcatcaacttctgcacaccaaatatgtggaacgaccgttatatgtgaagtaa

SEQ ID NO: 59146 - protein, 377 aa, Unknown
  Obtained from environmental sample
  DOMAIN (314)...(373): Iron hydrogenase small subunit
  misc_feature (1)..(377): Xaa is any amino acid
MTTRRKSGKPCTIKIFIPWCRSPRRFASPSRRNSGLIPARLSPKRYTPRSGGLVSRRVFDTNFSADLTIMEEGSELVKRLTEKGSTIPLITSCCPAWVDYMEKYYNDMIPNFSTAKSPQQMMGAMIKAYWAEKAGVNPDKIYSVSVMPCTAKKWETKRNDDMKSAGHGYDVDIVITTRELSRMIKQAGIDILKLADEEPDSPLGPYTGAATIFGATGGVMEAAVRSAYYLVTKKELPDVEFKPARGLDGVKEGEVDFGNGTKIRIAVAHQMGNIAAVLDKIREAKKAGKETPYHFIEVMACRGGCVAGGGQPYGCKDDIRERRASGLYTDDQKSQYRCSHQNPFIDQVYKEFLGEPGGHKAHQLLHTKYVERPLYVK

SEQ ID NO: 59147 - DNA, 813 bp, Unknown
  Obtained from environmental sample
  misc_feature (1)..(813): n is a, c, g, or t
ttgacttatgataaactgaaaataaacggcattccggtccaggttgaggaaggaacctcaattctcgaagccgcaaagaaggcgaatattattattccctcgctntgctacaatcccgatcttccggcgtgggcctcctgcggcatctgcgtagtccgcgtggcgggcagtcccaagctgatccgcgcctgcacgaccccggttgacggcgggctggaaggcaaggatatcatcacccatgacggtgagatcatcgccacgcggcgcattgtgctggaattgatcctttccaaccatccaaacgattgtctgcaatgtccgcgcaacggaaactgcgaactgcagaaactggccgccgaattcggcatacgcgagtccccctataaaaaggtatcgaacggagttcccgttgacgattccaacccggcaatagtccttaaccccgaaaaatgcatacgctgcggcagatgcgtcaaggtttgccaggatgtgcagaacgtctgggcgcttgaattcctgggacgcggcattaagggaaaaatcgccagcgccgccgacgttccgttaggcgacagcccctgcatcaagtgcggccagtgttcggcccactgtccggtcggggcgatttacgagcatgacgacacgccgaaagtctggaaagccctgcacgatcaaaatcttcataccgtggtgcagatcgccccggcggttcgcgtcgccctcgcggaggaattcgggtttgatcccggcacgattgtcaccaaaaagatatacgccgcgctcaggcggcttggtttcaagacgggtgtttga

SEQ ID NO: 59148 - protein, 270 aa, Unknown
  Obtained from environmental sample
  DOMAIN (144)...(167): 4Fe-4S binding domain
  misc_feature (1)..(270): Xaa is any amino acid
MTYDKLKINGIPVQVEEGTSILEAAKKANIIIPSLCYNPDLPAWASCGICVVRVAGSPKLIRACTTPVDGGLEGKDIITHDGEIIATRRIVLELILSNHPNDCLQCPRNGNCELQKLAAEFGIRESPYKKVSNGVPVDDSNPAIVLNPEKCIRCGRCVKVCQDVQNVWALEFLGRGIKGKIASAADVPLGDSPCIKCGQCSAHCPVGAIYEHDDTPKVWKALHDQNLHTVVQIAPAVRVALAEEFGFDPGTIVTKKIYAALRRLGFKTGV

SEQ ID NO: 59149 - DNA, 483 bp, Unknown
  Obtained from environmental sample
  misc_feature (1)..(483): n is a, c, g, or t
atgaaagccgcggctgataagatcgccgcttttaatcagagcgaaatccagagccttttggaaggggcgatcctttccatagagttggctgacggcgctcaggcggaaagacgccgggtggatataaccgccgacaagcttgacatcaggcggcttgaaaaaccaaacctgaaagtgcttaacgaaggaaccctgacagtagccctcaataccgaaattagcgaagagctttcaaaagaaggggatgtgcgcgaccttgttcgcggcgttcagaatttacgtaaggaatcgggcctggaggttacggaccgcatcaagcttaccctgaccggatccggcaggcttaaatcggcatgggaggcgttctccgattacgtgtcttcggaaatcctttcttccaaaatggtctgggctgaagccgacaacatggttgaaatagaggccggtgaagaaaagtggcgtgtcaaaattgaaaaagcttag

SEQ ID NO: 59150 - protein, 160 aa, Unknown
  Obtained from environmental sample
  misc_feature (1)..(160): Xaa is any amino acid
MKAAADKIAAFNQSEIQSLLEGAILSIELADGAQAERRRVDITADKLDIRRLEKPNLKVLNEGTLTVALNTEISEELSKEGDVRDLVRGVQNLRKESGLEVTDRIKLTLTGSGRLKSAWEAFSDYVSSEILSSKMVWAEADNMVEIEAGEEKWRVKIEKA

SEQ ID NO: 59151 - DNA, 942 bp, Unknown
  Obtained from environmental sample
  misc_feature (1)..(942): n is a, c, g, or t
atgaactgtatgttaagcggctgggtactcgcgtccgacggcaaaaaaatgagcaagtcgctcaaaaattatactgatcccatggatgtaattaatacttacggggccgacgcggtaagactctttttggtacattcggccctgctcaaagccgacgacctcaattataatgacgaaggggtaaaggacgtattaaaaagcattatccttccgctctggaacgcttacagtttctttgttacctatgccaacatcgacaaaatcactccggcaggcgcgcccgaaaatccttccaacccgcttgacaggtggatactttcggtagcggaaagccttgtggaaaaatgcggcacggcgatggatgtttacgatctttcaaaggcgattgatccgatagtggaattcattgaccttcttaacaactggtacatccgccgctcccgccgccgcttctggaagaacgccggccccgatgttacctctgataccgacaaggttgaagcttacggtacgctttacacggtgctgaagaaattagttcaggtggcttctccgtttatgccttttactaccgacgccatctggcaaaatatccgctcctcatcggatccagagtcggtccatctttcggattttccggctgtcagaaaagatcgccgcgaccctgatttggaattcagaatggcggcggtgcagcacgcggtttctatgggaagggcgcttcgttcacagtacaacatcaaagttaggcagcctcttaagtccgtggagatggttactaaaaatcaggcagaaaagaaggttctccgcgagatggaagaaataatccgtgaggagctaaacgtcaaagaacttgtcttcagggaaaacgaagaagagcttgttgaatacgaagccaaggccaatttccgtgttttgggcaaggaattggaaaggacatga

SEQ ID NO: 59152 - protein, 313 aa, Unknown
  Obtained from environmental sample
  DOMAIN (102)...(258): Anticodon-binding domain
  misc_feature (1)..(313): Xaa is any amino acid
MNCMLSGWVLASDGKKMSKSLKNYTDPMDVINTYGADAVRLFLVHSALLKADDLNYNDEGVKDVLKSIILPLWNAYSFFVTYANIDKITPAGAPENPSNPLDRWILSVAESLVEKCGTAMDVYDLSKAIDPIVEFIDLLNNWYIRRSRRRFWKNAGPDVTSDTDKVEAYGTLYTVLKKLVQVASPFMPFTTDAIWQNIRSSSDPESVHLSDFPAVRKDRRDPDLEFRMAAVQHAVSMGRALRSQYNIKVRQPLKSVEMVTKNQAEKKVLREMEEIIREELNVKELVFRENEEELVEYEAKANFRVLGKELERT

SEQ ID NO: 59153 - DNA, 738 bp, Unknown
  Obtained from environmental sample
  misc_feature (1)..(738): n is a, c, g, or t
ttgtcaacaagcacctgcctgtcgaagcggccggggcgcagaagcgcgggatcaagcacatcggggcggtttgtcgccgcaaggacgataagcccgccggcgttgtcaaaaccgtccatttcaactaacaactggttaagagtctgttcgcgctcgtcgttgccgccggaaatgctgtttatcctgctcttgcctattgcgtccaactcatctataaaaacaatacagggcgcttttgttcttgcctgtttgaataaatcccttacgcgggcggcgcctactcctacaaacatttcaacaaagtccgctccgctcatgcgaaagaaagaaactcccgcttcccccgctaccgcccgagccagcaaggtttttcccgttcccggcggcccgacaaggagtacgcccttaggaatttttccgcctatatctttgtacttctgcggatttttcaagaaatcgacaacttcaaaaagttcctcttttgcctcgtcaacgcccgcaacatcgctgaagcgcgtaacaatatccccttccgcgacaatcacggcgcggttctgcccgacagaaagaacattgccgcctatattgcctatacgttttaaaacaaagcgccaaagaaaaataaaaatagcaataggtaaaacccaactgagaatggaactgattatcgcgcctccctcgcgcggaacagcgccgtatgcgacatttttttcatccattaatttaataaaatcctga

SEQ ID NO: 59154 - protein, 245 aa, Unknown
  Obtained from environmental sample
  misc_feature (1)..(245): Xaa is any amino acid
MSTSTCLSKRPGRRSAGSSTSGRFVAARTISPPALSKPSISTNNWLRVCSRSSLPPEMLFILLLPIASNSSIKTIQGAFVLACLNKSLTRAAPTPTNISTKSAPLMRKKETPASPATARASKVFPVPGGPTRSTPLGIFPPISLYFCGFFKKSTTSKSSSFASSTPATSLKRVTISPSATITARFCPTERTLPPILPIRFKTKRQRKIKIAIGKTQLRMELIIAPPSRGTAPYATFFSSINLIKS

SEQ ID NO: 59155 - DNA, 1725 bp, Unknown
  Obtained from environmental sample
  misc_feature (1)..(1725): n is a, c, g, or t
atgcgttatgcgaaagtcaaggaaagcgattcaaataaatgggaagaaataaaaaagagggcggattatgaactggatacgataatcagcatgggttatacaggatacttccttattgtctgggattttataaaatacgcgaaggagaacaacattcccgtaggccccggacgcggttcgggagcgggttccattgtcgcatattccctgcgcattaccgatattgatcccttaaaatacggccttatatttgagcgctttttaaaccccgaacgcatttccatgcccgattttgacattgattttgccaacgaggggcgcgaggaagtaataaattatgttacgcggaaatacggcaaggaaagggtggcgcagataatcacattcggaacattgggcgcgaaagcggttatcaaggacgtggcaagagtattgggaatatcaattccggaatcggaaatgataacaaaacttatttcgtttgatcctgaaattacccttgataaggcaaaagaagatgagccgcgcctgcgggaactggaaagcgacccccgttttacggaattattcgccatcgcgcataaactggaggggcttaaccgtcattcaagcatacacgccgcgggtatcgtaatcgggaaaaaaccgctgatcgaactggtgccgctctttcaggaaagggaggaaaagggcggcaatatcgccacgcagtacagcatgaacttccttgaagaatgcggccttgttaaaatggattttctcggccttaaaaaccttgacatccttaaacattcgcaggaattaatccgccggcgcggaggcaagtacgcgaattttaatatggaagatattcccgaagatgacaaaaaaactttcaagatgttaggcgagggaaaaagccacgctgtttttcagttcgcatccgacggcatgcaggatattttaaggcagacaaaacctacctctatagaagatttaacggccttaaacgcgatgtacaggccgggacccatgcagtttattccccgttttgtagattgtaaaaacggcaaaacgccgataacgtatcccgatccaagccttgaggggattctaaaagaaacctacggcgttattgtatatcaggaacaggttatggaggtggcgaaaataatagcgggttatagcatgggaaaggccgatctcctgcgccgcgccatgggaaaaaagaaaaaagaaattcttgacggtgaaaagattccgtttctggaaggcgcggcgaaacagggatactcggcgcagagggcgggagcgattttcgacatgcttgttccgttcgcgggttacggttttaataaaagccacgcggccgcttattcggtcttagcgtaccaaaccgcgtaccttaaagcgaattttccggcggaatatatggcggctacgctgatagtcgaaataaaaagcaccgacaggcttttatacagcattgtcgaaacccgtaaaatgggaataaacgtcgatccgcccgatattaattattcaaataaactttttacggtagtggacggcagaattgtttatggtttcctgggtataaaaggcgtaggcgacgcgcctgctgacgaaattgtacgcggcaggaaagacggtccgtataagagttttatggattttcttgaaaaggtagatataaaggttatcggaaaaaaagtaatagagctgcttatacaaacccggcgcttttga

SEQ ID NO: 59156 - protein, 574 aa, Unknown
  Obtained from environmental sample
  DOMAIN (1)...(423): Bacterial DNA polymerase III alpha subunit
  misc_feature (1)..(574): Xaa is any amino acid
MRYAKVKESDSNKWEEIKKRADYELDTIISMGYTGYFLIVWDFIKYAKENNIPVGPGRGSGAGSIVAYSLRITDIDPLKYGLIFERFLNPERISMPDFDIDFANEGREEVINYVTRKYGKERVAQIITFGTLGAKAVIKDVARVLGISIPESEMITKLISFDPEITLDKAKEDEPRLRELESDPRFTELFAIAHKLEGLNRHSSIHAAGIVIGKKPLIELVPLFQEREEKGGNIATQYSMNFLEECGLVKMDFLGLKNLDILKHSQELIRRRGGKYANFNMEDIPEDDKKTFKMLGEGKSHAVFQFASDGMQDILRQTKPTSIEDLTALNAMYRPGPMQFIPRFVDCKNGKTPITYPDPSLEGILKETYGVIVYQEQVMEVAKIIAGYSMGKADLLRRAMGKKKKEILDGEKIPFLEGAAKQGYSAQRAGAIFDMLVPFAGYGFNKSHAAAYSVLAYQTAYLKANFPAEYMAATLIVEIKSTDRLLYSIVETRKMGINVDPPDINYSNKLFTVVDGRIVYGFLGIKGVGDAPADEIVRGRKDGPYKSFMDFLEKVDIKVIGKKVIELLIQTRRF

SEQ ID NO: 59157 - DNA, 879 bp, Unknown
  Obtained from environmental sample
  misc_feature (1)..(879): n is a, c, g, or t
atgaagggaaaacttgaacaggaacagcgtaacgccctgattgaggaagggaagaaactcaaggacgagataaccctgacggaatcggaactgggcatcgcggaaaaagagcttgatgaggaagcgcgcaagatccccaatatggcgcatcccgaggcgcctgtcggcaaggaagacaaggataacctggaaataaagagggttggggagccggtcaaattcaattttgaaccgctggaccatgtaaagctggggcaggagttggatattatcgactttgattctgcgacaaaggtgtcaggcaccaaattttactacctgaagaacgaaggggtgtttctggagctcggccttgtgcgttacgcgctggatattctgcaaaaaaaaggttttaccccctttattacgccggatgtggcccgcacggaaattctggaaggcataggctttaacccccgcggcgaggaatccaacgtatacgcgctggaagacgaggacgcctgtctggtggggactgccgaaatcacccttgggggttattattcaaacacgattatcgcgaaggacaaactgccgctgcgcatggcgggcctttcccactgtttccgccgcgaggccggagccgccgggcagttctcaaaaggcctgtaccgcgtgcaccagtttaccaagctggaaatgtttgtatactgcctgcccgaagattcggagaagtttcatgccgaattacgctccatagaggaggaaattttcgcgggccttaatatcccgttccgggtggtggatacctgcaccggcgacctcggcgcgcccgcctaccgcaaatgggaccttgaggcgtggatgccgggccgcacaacggcgaatggggcgaagtga

SEQ ID NO: 59158 - protein, 292 aa, Unknown
  Obtained from environmental sample
  DOMAIN (114)...(285): tRNA synthetase class II core domain (G, H, P, S and T)
  misc_feature (1)..(292): Xaa is any amino acid
MKGKLEQEQRNALIEEGKKLKDEITLTESELGIAEKELDEEARKIPNMAHPEAPVGKEDKDNLEIKRVGEPVKFNFEPLDHVKLGQELDIIDFDSATKVSGTKFYYLKNEGVFLELGLVRYALDILQKKGFTPFITPDVARTEILEGIGFNPRGEESNVYALEDEDACLVGTAEITLGGYYSNTIIAKDKLPLRMAGLSHCFRREAGAAGQFSKGLYRVHQFTKLEMFVYCLPEDSEKFHAELRSIEEEIFAGLNIPFRVVDTCTGDLGAPAYRKWDLEAWMPGRTTANGAK

SEQ ID NO: 59159 - DNA, 549 bp, Unknown
  Obtained from environmental sample
  misc_feature (1)..(549): n is a, c, g, or t
atgacaacattaatcgaaccaaaaatattaaagggctttcgggactttttgccccaggcggaaatggttcgccgtaatttgactgaaagaatcgaggcaacattccggtctttcgggtttgtgccgatcgatacccccgcgcttgagtacgcggatatccttctgggcaagggcggcggcgaaaccgagaagcagatctaccgctttacggataacggcgacagggatgtcgcgcttcgttttgatcttaccgttccctttgcccgctttaccgcccttcaccagcaggaacttgcctttccctttaagcgttaccatataggcaaggtgtggcgcggggaaaacacccagcgggggcgttaccgggaaatcacccagtgcgattttgatattatcggcagcgacagcccggcggccgatttcgagattattctgatgatccgaaatacgcttatgaatctgggactcgggcgtggatataaaaatcanccacaggggtcttttcaaccgcttcctctcgcatataggtcagaaggaaaattccgctga

SEQ ID NO: 59160 - protein, 182 aa, Unknown
  Obtained from environmental sample
  DOMAIN (23)...(178): tRNA synthetase class II core domain (G, H, P, S and T)
  misc_feature (1)..(182): Xaa is any amino acid
MTTLIEPKILKGFRDFLPQAEMVRRNLTERIEATFRSFGFVPIDTPALEYADILLGKGGGETEKQIYRFTDNGDRDVALRFDLTVPFARFTALHQQELAFPFKRYHIGKVWRGENTQRGRYREITQCDFDIIGSDSPAADFEIILMIRNTLMNLGLGRGYKNXPQGSFQPLPLAYRSEGKFR

SEQ ID NO: 59161 - DNA, 876 bp, Unknown
  Obtained from environmental sample
  misc_feature (1)..(876): n is a, c, g, or t
gtggatataaaaatcanccacaggggtcttttcaaccgcttcctctcgcatataggtcagaaggaaaattccgctgaaatactccgtacggtagacaagatttccaaagtcggcatggatgaaaccatgaatacacttgccgctattgccggggaggagaacgggcaaaagatacttgagtatacaggggcggggacggagaaagaagccgctgttgattttgaacagaccctggatcgcataacgaggctttcaggcgggccttcccccgaatccgaacgcttaagccttctccgccgctttatgcgggatttaggggatgatatatcagagacattttcccttgacccctcaatcacgcgcggccttgattactatacaggcgtcgtatttgaaacatttttgacggagcttcctgaaataggctcaatatgctcaggcgggcgctacgacaatcttgccggcctttatacaaaaaacgcgatcagcggggtgggttcttccataggccttgaccgcatgatcgccgcccttgaaagcctgaacaagcttccccctgcaagcgggtttgccgccgccgcaatagcctgcgtaaagcgggaagactcagggctttaccaggctcttgcggaacaattcaggcgcgccggcatcccctgcgaggtttttacggacgaggcggcaggcgacagcaaaaaccttgttaaacaatttatgttagctgaaaagaaaggccatcgctggatgataatccccggcgaggaccctctgcatgctcacctgaccctgcgtaaccttgtaacaaggcagaataaagaaggtttatcggtcgatgagattgtgaagcttattgccattcctccatcgccttcttaa

SEQ ID NO: 59162 - protein, 291 aa, Unknown
  Obtained from environmental sample
  misc_feature (1)..(291): Xaa is any amino acid
MDIKIXHRGLFNRFLSHIGQKENSAEILRTVDKISKVGMDETMNTLAAIAGEENGQKILEYTGAGTEKEAAVDFEQTLDRITRLSGGPSPESERLSLLRRFMRDLGDDISETFSLDPSITRGLDYYTGVVFETFLTELPEIGSICSGGRYDNLAGLYTKNAISGVGSSIGLDRMIAALESLNKLPPASGFAAAAIACVKREDSGLYQALAEQFRRAGIPCEVFTDEAAGDSKNLVKQFMLAEKKGHRWMIIPGEDPLHAHLTLRNLVTRQNKEGLSVDEIVKLIAIPPSPS

SEQ ID NO: 59163 - DNA, 861 bp, Unknown
  Obtained from environmental sample
  misc_feature (1)..(861): n is a, c, g, or t
atgaaaaagcaggcgggaatttgcataatattggcatgctgtcttttggcggcatgtatagcgacaaaacggcaagaggagcaaaaagtggatataagcgcccaaaacacaaaattgaccggtggggtaacttttatggctaacagccggggaaatcaaccgctggaaggttcgccatacggctacgaaatgtggacccagggcgggattattaacaagcttatatggttcgggccggatcagaggggcggggcggctttcagggccgaatggaacgaacctgacgattttttgggccgcgtgggtttttggtggggaaacggcggacaatttaacgaatacaggaatatgtacgcggatttcgattacacaaggtcgggacgcggaaccggcggcgattattcttatataggcatttacggctgggcaagaaacccgaaagcggcgaacgaggaagacagattgatagaatattatattgtggatgactggttcgggaatcgatggcagtccgatgataccccaattaccaccagaacgaccgggggctccgtattgggcagctttacaatggacggggcggtttacaacgttgtcagaaatgtgagaacccaaaagccttcgatagacgggactaaaacattcgcccaatacttcagcatacgccaaacgccgcgccggagcgggacaatttccatcaccgaacatttcaaacaatgggaaagcatgggcttaaagctcggcgatatgtacgaggcgaaattccttgtagaagccggcggcggcacagggtggctggagtttacgcaccttaaattaacgcaggaagaaaaaccaagaacaaataacaatgagcaatga

SEQ ID NO: 59164 - protein, 286 aa, Unknown
  Obtained from environmental sample
  SIGNAL (1)...(23)
  DOMAIN (57)...(270): Glycosyl hydrolases family 11
  misc_feature (1)..(286): Xaa is any amino acid
MKKQAGICIILACCLLAACIATKRQEEQKVDISAQNTKLTGGVTFMANSRGNQPLEGSPYGYEMWTQGGIINKLIWFGPDQRGGAAFRAEWNEPDDFLGRVGFWWGNGGQFNEYRNMYADFDYTRSGRGTGGDYSYIGIYGWARNPKAANEEDRLIEYYIVDDWFGNRWQSDDTPITTRTTGGSVLGSFTMDGAVYNVVRNVRTQKPSIDGTKTFAQYFSIRQTPRRSGTISITEHFKQWESMGLKLGDMYEAKFLVEAGGGTGWLEFTHLKLTQEEKPRTNNNEQ

SEQ ID NO: 59165 - DNA, 492 bp, Unknown
  Obtained from environmental sample
  misc_feature (1)..(492): n is a, c, g, or t
gtggtatattataattataaggagaatagtatggcacgtatttcgaaaatatacagaatattaatttccgccttattggccttattgggattttcctgtggaaatcgtgagcgtgaatttgtcgccgaatacggtacgccgagcgcaacctataaagccaaaggcgttgtggtatcagaagcggacggttcccccattgagggaatacgtattgaatttaaaggtaacagatttgatccaaataacgccgcctacacggacagcgaaggctcttttaccctgaaaagccttttatttccctatcaaaaacaatatttggaattaactgatgttgacggggaagaaaatggcggcttatttgctgaaatggaaaaagaagcggattatacaaacgcgaaatttaccggaggcagcgggaattggtatcaaggtgaaactgaaatagatttgggaacaatagagatgaaacctgaaaacaaagatgaatcttaa

SEQ ID NO: 59166 - protein, 163 aa, Unknown
  Obtained from environmental sample
  misc_feature (1)..(163): Xaa is any amino acid
MVYYNYKENSMARISKIYRILISALLALLGFSCGNREREFVAEYGTPSATYKAKGVVVSEADGSPIEGIRIEFKGNRFDPNNAAYTDSEGSFTLKSLLFPYQKQYLELTDVDGEENGGLFAEMEKEADYTNAKFTGGSGNWYQGETEIDLGTIEMKPENKDES

SEQ ID NO: 59167 - DNA, 543 bp, Unknown
  Obtained from environmental sample
  misc_feature (1)..(543): n is a, c, g, or t
atggacagcaaaaaaatgctggttatttccgacacacacggcagcctaattgctttaaaaacaataatgaactgggcaaaagaccgtatgccgcctaacgacacaatctgcgataccgtttttctcggtgacggcgcgtctgatctgcgccccgctgcggacgcggcaggtttttacagtaactggaaaattgtgcgcggcaacaatgattacgatccttcaatacaggacagcgccgttttcgatttctgcgattacagattttatatttgccatggtcatcgccatagtttgtacggaggacaccacacgcttatttccgcagggcgcagcaatgacgccaatgttgttatgttcggccacacccatgtccctttattcaaaaaagacggcggattgctgcttgttaacccgggcagcgttggaagaccgcgcagtaaaataggcgctacattcgccgttattgaatgtataagcgaacaactgaaagtaaaattttacggaattagcaacggaattaaggaaattgataacctgccgtaa

SEQ ID NO: 59168 - protein, 180 aa, Unknown
  Obtained from environmental sample
  DOMAIN (4)...(125): Calcineurin-like phosphoesterase
  misc_feature (1)..(180): Xaa is any amino acid
MDSKKMLVISDTHGSLIALKTIMNWAKDRMPPNDTICDTVFLGDGASDLRPAADAAGFYSNWKIVRGNNDYDPSIQDSAVFDFCDYRFYICHGHRHSLYGGHHTLISAGRSNDANVVMFGHTHVPLFKKDGGLLLVNPGSVGRPRSKIGATFAVIECISEQLKVKFYGISNGIKEIDNLP

SEQ ID NO: 59169 - DNA, 1374 bp, Unknown
  Obtained from environmental sample
  misc_feature (1)..(1374): n is a, c, g, or t
atgataaantcagaaagcagggctcttcttataccgggcagaacgttgtttatcgtatcgctgctgtatctggttttgggagccgccgcattctactttgaaactattttcctgatttggattctggcgggagcggggcttgttccgtttataataattgatttatccctgctgctgcttctcggggatcgcctgtacgcggaaagggaaatcctctcttccgttacactgggtgaatatgtaaaagttaaactgtttatccgccgcgccggaaaaccgcttctgccttccaatatcaggctttttgatctttatcctgaaacaatgagtacaaaaatatttcccgcaaagctgaaaattaaaaatcttgaaaaaaatgacacttttatttttgaatacagtctgctgccgaacgaacgcggaatatggtttttctcaggtcttgaattccttcttggctctcccgtacagttctggcaattgcgcataacacacaatgttatgagcagcggacgtacatatcccaattttaaactgatggcgcagggtaaggagattaagggaaagcctgaaaaaggagaaatccgtcaaattcgcaaacggggacagggactggaatttgaaagcctgcgcgattatcaggaaggagattcaatccgtctgatagactggcgcgccacaagccgcaactaccgcatgggcaggctgaaacttattgtcagaaattatcaggaagaacaggatcaacagattttattgattattgattcaggttaccgcctgcctgatcattactttgacagcgcattggaagcaatgctgctactttcttatacagctttaaaacacggagacgctgtcgctgcggcaagttacggagcgcatgatctttggataccgccgcgcaagggcatgagcgcatatacaggacttatgaacaaactttacgatcttcacagcgagcctgttccgtcttcgccgtttctggctcttgaaagcgcgcttggccgcctgcaccgccgcagttttattgtcttgatcagtaatttccgcgaagaagatgacaagtccctttcatggattcttccccgaatcgaaaaaaaccatttgcttttactggtcagtttccgcgaaaacgaagcggaagatatggcttttcccaaagcctatacttccgccgatgccgcctcaaaattaaaaaccgatgatgaaatactggaaactgcttcggcatttgcgtacattgcaaaccgccgccgcctgtaccgtaaatgggaacattcaggtcttcttgttcttgatacttcgcctcagtacatatctacagcgcttatcaataaatatttaagcgtaaaaaaatccgggaaactttag

SEQ ID NO: 59170 - protein, 457 aa, Unknown
  Obtained from environmental sample
  DOMAIN (138)...(246): Protein of unknown function DUF58
  misc_feature (1)..(457): Xaa is any amino acid
MIXSESRALLIPGRTLFIVSLLYLVLGAAAFYFETIFLIWILAGAGLVPFIIIDLSLLLLLGDRLYAEREILSSVTLGEYVKVKLFIRRAGKPLLPSNIRLFDLYPETMSTKIFPAKLKIKNLEKNDTFIFEYSLLPNERGIWFFSGLEFLLGSPVQFWQLRITHNVMSSGRTYPNFKLMAQGKEIKGKPEKGEIRQIRKRGQGLEFESLRDYQEGDSIRLIDWRATSRNYRMGRLKLIVRNYQEEQDQQILLIIDSGYRLPDHYFDSALEAMLLLSYTALKHGDAVAAASYGAHDLWIPPRKGMSAYTGLMNKLYDLHSEPVPSSPFLALESALGRLHRRSFIVLISNFREEDDKSLSWILPRIEKNHLLLLVSFRENEAEDMAFPKAYTSADAASKLKTDDEILETASAFAYIANRRRLYRKWEHSGLLVLDTSPQYISTALINKYLSVKKSGKL

SEQ ID NO: 59171 - DNA, 1005 bp, Unknown
  Obtained from environmental sample
  misc_feature (1)..(1005): n is a, c, g, or t
ttgccgagggccaagtaccttgtaacatgctctgatcctcttgtatgcggaggtcatcttcttgtagaaggagttcccggacttggaaaaaccctgcttgtccgcgctttggcaaaggcaataggaggcgattcaaagcgaatccagtttacgccggatttaatgccaagcgacataacaggcaacataatgcttgatcccgcaactggcaaatttgttacgcgcaaagggcctgttttctcaaatctgcttatagccgatgaaataaaccgcgctcctgcaaaaacacaagccgctctttttgaagcaatgcaggagtttcaggtaagtcttgacggtgaaggccatcctctgccgtctcccttcatggttctggcaactcagaatccgtttgaacatgagggaacttatcccctgcccgatgcccagaaggatcgttttttaatgaagataatcgcggcttatccgtcaattgacgaagaaaaaacaatggtcgccaaagtattagacggagatacaggcgctgaactgacagtcgccgcagttaatacagtccttgataccggcgcatttacggctttaaaaaatcttgcagcttctttgcacgtagacccgcttgtaattgattacgcagtccgcatgagtacagcgaccagggaaacgcccgctgttgaaaacggagccggcccaaggggaagtcttgcgcttatcaggtgtgcccgtgcgcgcgctcttcttttgggcagagactttgttcttcccgatgatgtaaaagctgtagcctgcgaagttcttgcgcaccgactcacactttctgcggaaagcgagcttgaaggggtaagcgcaaaacatattatcgaaagtctgcttaaaaaagtgaaagctccgaagggaataacagctaatgataaantcagaaagcagggctcttcttataccgggcagaacgttgtttatcgtatcgctgctgtatctggttttgggagccgccgcattctactttga

SEQ ID NO: 59172 - protein, 334 aa, Unknown
  Obtained from environmental sample
  DOMAIN (21)...(270): MCM2/3/5 family
  misc_feature (1)..(334): Xaa is any amino acid
MPRAKYLVTCSDPLVCGGHLLVEGVPGLGKTLLVRALAKAIGGDSKRIQFTPDLMPSDITGNIMLDPATGKFVTRKGPVFSNLLIADEINRAPAKTQAALFEAMQEFQVSLDGEGHPLPSPFMVLATQNPFEHEGTYPLPDAQKDRFLMKIIAAYPSIDEEKTMVAKVLDGDTGAELTVAAVNTVLDTGAFTALKNLAASLHVDPLVIDYAVRMSTATRETPAVENGAGPRGSLALIRCARARALLLGRDFVLPDDVKAVACEVLAHRLTLSAESELEGVSAKHIIESLLKKVKAPKGITANDKXRKQGSSYTGQNVVYRIAAVSGFGSRRILL

SEQ ID NO: 59173 - DNA, 894 bp, Unknown
  Obtained from environmental sample
  misc_feature (1)..(894): n is a, c, g, or t
atgacgattgtcgttcctcgtgactaccatggcatcagcgccttggagagcangcaggtgcagtgcgtcaccagcgacgacgcgttgcgggaggacatacgcgccctgcgcatcgggatttttgacatcatgcccaaggcgcagacctatgaattcagcctcctgcagccgctcgggcgctcggtcatgcagattgagcctatctggatacgcctccgcacgcacgcctacaattcgagcgaccagacgcacctagacaagctctacgtgccgttcgaggaggcggtgtcgcgttcgcggctggacgggctcatcgtcaccggagcgccggtcgaggagatacctttcgacgaagtcagctactgggaggagatcaagcgcatccttaagtacgcccgaaagaacgtcacgtcgacgctgggcatctgctgggggggcttggccctggctaagtacttgggcatagacaaggtcgcctacgacaaaaagattttcggcgtctacaaaacggtgaacttgaaccgcgaccaccacataaccggcgagatggacgactggttctggtgcccccaaagccgccactccggcatagaggacgccgtgctggaacgcgagcgcgacaacggcaacataaacctgctggcccacgccgacggcgccggatacgtcatcttcgaaagtaccgacacccgcttcctgatacacttaggccatccggagtacgaacccgcccgtttggtagaagagtacggccgcgacgccgaanagggcagatccgacgtggaaccgcccaaaaacgtagattttgcgaatccggtgaacctatggcgttcgcacagaaccgagttctttacgcagtggatcaagtatctgcatgattcggcgtcgtattag

SEQ ID NO: 59174 - protein, 297 aa, Unknown
  Obtained from environmental sample
  DOMAIN (2)...(297): Homoserine O-succinyltransferase
  misc_feature (1)..(297): Xaa is any amino acid
MTIVVPRDYHGISALESXQVQCVTSDDALREDIRALRIGIFDIMPKAQTYEFSLLQPLGRSVMQIEPIWIRLRTHAYNSSDQTHLDKLYVPFEEAVSRSRLDGLIVTGAPVEEIPFDEVSYWEEIKRILKYARKNVTSTLGICWGGLALAKYLGIDKVAYDKKIFGVYKTVNLNRDHHITGEMDDWFWCPQSRHSGIEDAVLERERDNGNINLLAHADGAGYVIFESTDTRFLIHLGHPEYEPARLVEEYGRDAEXGRSDVEPPKNVDFANPVNLWRSHRTEFFTQWIKYLHDSASY

SEQ ID NO: 59175 - DNA, 915 bp, Unknown
  Obtained from environmental sample
  misc_feature (1)..(915): n is a, c, g, or t
atgaacgtatacgaaaacgcaactacgaaagactggataaactcccgcgttccgcaaatcgccggacggcttgaggagggcgcccctgtcggaggcgggcttgacatacaggggcgcggcgagatatacgagatattcgacgacataatggccgtattgttcccgggttaccacagccataggttcgaatccgacgagaggacggttggcgctcttaccgccgaactgttctccatatcgtcccggttgggcgagcacctgcacaaggccttcaactaccactgcggcgtggacggctgcctctgcgacggatgcgactgcgaggagagggcggcgcatgcgctcatcgagatgatcgagtcgctgcccgggatcagggcgatgatggtggacgacatctccgccgccctcgacggcgaccccgccgcgaaattcttcgacgaggtcgtcctgagctacccctgcgttgaggcgatagccacgcaccgcgtagcccaccgcctgtactcgatgggcgtgccgataatcccgcgcatactctccgagcgcgcccactcccgcacaggcatagacatccaccccggcgcccgtataggcccgcgattcttcatagaccacggaaccggcgtggttataggcgagacgtgcagaataggtagcaacgtaaagatataccaaggcgtaacgctcggcgcaacctcgcccttcgacaaggacggccgccctaagaaagggcaaaagcgccatccggacattgaggacgacgtgataatctacgccaacgctacgatactcggcggcgacacggtgatagggaagggcgcggtcataggcgggaatacgtggataacgaagtcagtggggccgggggttcacgtatacaatttggctaaagggggggagcattatccgtga

SEQ ID NO: 59176 - protein, 304 aa, Unknown
  Obtained from environmental sample
  misc_feature (1)..(304): Xaa is any amino acid
MNVYENATTKDWINSRVPQIAGRLEEGAPVGGGLDIQGRGEIYEIFDDIMAVLFPGYHSHRFESDERTVGALTAELFSISSRLGEHLHKAFNYHCGVDGCLCDGCDCEERAAHALIEMIESLPGIRAMMVDDISAALDGDPAAKFFDEVVLSYPCVEAIATHRVAHRLYSMGVPIIPRILSERAHSRTGIDIHPGARIGPRFFIDHGTGVVIGETCRIGSNVKIYQGVTLGATSPFDKDGRPKKGQKRHPDIEDDVIIYANATILGGDTVIGKGAVIGGNTWITKSVGPGVHVYNLAKGGEHYP

SEQ ID NO: 59177 - DNA, 906 bp, Unknown
  Obtained from environmental sample
  misc_feature (1)..(906): n is a, c, g, or t
atggcgcagtttatcaacgcggtctttaacggtttcagtttaacgtcaatcattttacttacctcgttgggtcttgcgattacattcggtcttatgcgcgtcattaacatggcgcacggcgaattcatcatgattggcgcatatatgacctacctgacacagcaattttttgtatcatttctgcctggaagtattttcagcctttattattttgcggcgctcattatggcttttgccgtcgctttcatactgggaagcataatggaaaggtttatcgtgtcgcggctttacgggcgggaaattgacagcctgcttgcgacgggcggcattagccttgtgcttcagcaggcggcgcgcagcattttcggcgcgcagggtgtgaacgtaaccgctccttcgtttttaacgggcggcgttaccgtcggcggcagtactttttcatataacagattgtttattatctttttaacagggttcgctatttttattgtttggttgattctgtaccgcatgaacttcggcagacaaatgcgcgcggtcatgcaaaaccgttcgatggctcagtgtttgggcattaattcccgcagaatagacaatgtcactttcagtatcggttcggggcttgccgggttggcgggttgttccgtcgcgctgttgggttctatagacgcgacagtgggacagaactacatcgtaaactcttttatggcggttgtactgggcggcgttggaaaattaatcggcactgttttaggttctctcataatcggttttgcgggtattagcatcgaaagatttacatcgtcttcaatagcgaaggcggcggtgcttttaattattattctgtttttacaaaagaaaccgcagggtctctttacaatacgaacaagaagtttggacgaatag

SEQ ID NO: 59178 - protein, 301 aa, Unknown
  Obtained from environmental sample
  SIGNAL (1)...(26)
  DOMAIN (7)...(284): Branched-chain amino acid transport system / permease component
  misc_feature (1)..(301): Xaa is any amino acid
MAQFINAVFNGFSLTSIILLTSLGLAITFGLMRVINMAHGEFIMIGAYMTYLTQQFFVSFLPGSIFSLYYFAALIMAFAVAFILGSIMERFIVSRLYGREIDSLLATGGISLVLQQAARSIFGAQGVNVTAPSFLTGGVTVGGSTFSYNRLFIIFLTGFAIFIVWLILYRMNFGRQMRAVMQNRSMAQCLGINSRRIDNVTFSIGSGLAGLAGCSVALLGSIDATVGQNYIVNSFMAVVLGGVGKLIGTVLGSLIIGFAGISIERFTSSSIAKAAVLLIIILFLQKKPQGLFTIRTRSLDE

SEQ ID NO: 59179 - DNA, 1074 bp, Unknown
  Obtained from environmental sample
  misc_feature (1)..(1074): n is a, c, g, or t
atgagctttttaaaaaaacaaggacgcagcgtttgtttcgccgtaattgtgattgcccttgcgctcatgccggttttctcggacggtccgataattatctttttgggaaaatgtatagcgttcgcgattgtcgcgatggggctcgatttaatttggggctacaccggcatactcagccttgggcacggtctttatttcgcgcttggcggctactcaatggcgatgtatttaaaaatgcaggcgacaggcggcaagctgacggaattcatgcgaaccggcggacttaccgatcttccccttatttggaaaccttttctttcggctccgcttgcttttattctggtaattgcggttccggcggctttatcatacacaatcggatattttattttcaagaacagggttaaaggcgtttatttttcgattatttcgcaggcgcttacatgggcggcgtattcaatgtttatagcgatgtcgccgtacaccaacggaaatatcggtatatccgaaataagatccattcttggaagtattcgcggcggcgcaaatcagggaactttgctcactcttttttacgccgcgattgtcattttaatacttgcctacgcgctgtgcgtttttttaaccggagcgaaattcgggaaacttcttatcgcaatccgggacggggaaaatcgaacttatttttcgggctaccgcgtcagtttgtataaaacatttgtttatgttatgtccgcctgtcttgccggaattgcgggagcggtctttgttaatttcaacggcagtatttccccgtcccaaatgaccatcgcgttttccattaacatgattatctgggtggcgataggcggcaggggtacgattatcggggcggttatcggcgcgctccttgtgaatctgtgcgaatataattttagctccggaagtatagttgaaatctggcaatatattatcgggtcgatattctgcattacgatactttttttcaagggcggaattattgggctgttcacgcatcaaatcccggagttgattgaaaaactaaaaggaaggatacgcaatgccgcaagttga

SEQ ID NO: 59180 - protein, 357 aa, Unknown
  Obtained from environmental sample
  SIGNAL (1)...(27)
  DOMAIN (32)...(326): Branched-chain amino acid transport system / permease component
  misc_feature (1)..(357): Xaa is any amino acid
MSFLKKQGRSVCFAVIVIALALMPVFSDGPIIIFLGKCIAFAIVAMGLDLIWGYTGILSLGHGLYFALGGYSMAMYLKMQATGGKLTEFMRTGGLTDLPLIWKPFLSAPLAFILVIAVPAALSYTIGYFIFKNRVKGVYFSIISQALTWAAYSMFIAMSPYTNGNIGISEIRSILGSIRGGANQGTLLTLFYAAIVILILAYALCVFLTGAKFGKLLIAIRDGENRTYFSGYRVSLYKTFVYVMSACLAGIAGAVFVNFNGSISPSQMTIAFSINMIIWVAIGGRGTIIGAVIGALLVNLCEYNFSSGSIVEIWQYIIGSIFCITILFFKGGIIGLFTHQIPELIEKLKGRIRNAAS

SEQ ID NO: 59181 - DNA, 783 bp, Unknown
  Obtained from environmental sample
  misc_feature (1)..(783): n is a, c, g, or t
atgccgcaagttgacgaaaacacaattcttaccatcaacagcgtatcggtttgctttgacggtttttacgcccttaccgaggtagacgtttccgtaaaacgcaacaccgttcacttttttatcggtccgaacggagcgggcaaaacaacgctgttggatattatctgcgcgaaaacccgccctactctcggcaacgttgtattttttcccaaagaaaaagagaagatacgcctcacaggaatgaaagaatacgagatagtgcgcagcggagtgggcaggaaatttcaagtgccgtctgtgtttgtaaatcttacggttttagataatatgattctttcattaaagaggcataaaagtattttagattcgatattcctaaatccctccaccgaagaattcgcgcaaatagacgagattcttgaaaaggtgggattgtcggaacgaagggatgtaaaagccggctctcttgcgcacggcgaaaagcagtggctggaaatcgccatgcagattgcggcaaagcctgaactcatcatgctggacgagcctgtcgccggaatgggcagagcggaaacggacaagacggcggaaatacttgccgagataaaaaaagaatgtactgtaatcgttgtggaacacgacatggaatttgtaaagatggcggcggacattgtaacggttctgcatgagggcaaggttctgaccgagggcgttttttccgacgtgctggcggacaaaacagtacaggccgtgtatttgggcaggggcggtgaacgtaatgcttga

SEQ ID NO: 59182 - protein, 260 aa, Unknown
  Obtained from environmental sample
  DOMAIN (35)...(230): ABC transporter
  misc_feature (1)..(260): Xaa is any amino acid
MPQVDENTILTINSVSVCFDGFYALTEVDVSVKRNTVHFFIGPNGAGKTTLLDIICAKTRPTLGNVVFFPKEKEKIRLTGMKEYEIVRSGVGRKFQVPSVFVNLTVLDNMILSLKRHKSILDSIFLNPSTEEFAQIDEILEKVGLSERRDVKAGSLAHGEKQWLEIAMQIAAKPELIMLDEPVAGMGRAETDKTAEILAEIKKECTVIVVEHDMEFVKMAADIVTVLHEGKVLTEGVFSDVLADKTVQAVYLGRGGERNA

SEQ ID NO: 59183 - DNA, 711 bp, Unknown
  Obtained from environmental sample
  misc_feature (1)..(711): n is a, c, g, or t
gtgaacgtaatgcttgaaataaccggtcttgatacttactacggggaaagccggatcatcagcgggcttaacctgacgataaaaacaggaagcattacctgtttaataggaagaaacggcgtcggcaaaaccacgacgctcaaaagcattatgggcctggtaaaaaccccggcgggcaaaattatttttgacgggcaggacataatcaaacttccggcatatgaccgcgtaaggctcggcatcggttatgtgccgcaggggcgggacatttttccgcagatgaccgtgcgtgaaaatcttgaactggggctgcaggccctcgccggaaaacagcggaagaccgatattcccacttatatatttgaactgttccccgccctgcccaatttcgcgaaacggaagggcggcgatttatccggcggccagcagcagcagcttgccatcgcccgcgcgcttgcggctgaaccgaagattcttattttggacgaaccgaccgaggggattcagccctcgattattcaggacataggcagggcaataagaaggatcaattccgagaaagggataaccgttcttcttgtggaacagtacctggagtttgtgctggagatttcggaccatttgttcatcatggaaaagggaaatgtcgtggtaagcggagcgaccgccgaacaggacgcggaacatattcaaaaattattgacgatatag

SEQ ID NO: 59184 - protein, 236 aa, Unknown
  Obtained from environmental sample
  DOMAIN (30)...(214): ABC transporter
  misc_feature (1)..(236): Xaa is any amino acid
MNVMLEITGLDTYYGESRIISGLNLTIKTGSITCLIGRNGVGKTTTLKSIMGLVKTPAGKIIFDGQDIIKLPAYDRVRLGIGYVPQGRDIFPQMTVRENLELGLQALAGKQRKTDIPTYIFELFPALPNFAKRKGGDLSGGQQQQLAIARALAAEPKILILDEPTEGIQPSIIQDIGRAIRRINSEKGITVLLVEQYLEFVLEISDHLFIMEKGNVVVSGATAEQDAEHIQKLLTI

SEQ ID NO: 59185 - DNA, 729 bp, Unknown
  Obtained from environmental sample
  misc_feature (1)..(729): n is a, c, g, or t
atgggcgcatgggacgcttatatcggcggttccgccaccggcgacgcggattttatgaaccagaaattaccccgtgaaaaagatcctttctccaaccgcggaaacggaaccggcccgtatgccgttttctacattctgtatgaatccgtagcgcgcggcctcgttgaaaaagatccatcaacaaccgactgggaaagctgcaaaggcaggattaaccgtggcgaaatcgcgaccatggttcttggttcatgggcgattgtacaaatgcaggaagccgggcccaacccgcagaatatcggttatatgcccttccccatcaccgtaaacgggaaacagtatgcgtcagccggcgctgattattgctacggcattaacaagaattcttcaagggatgtaaaactggcatcattactttatatcaagtatttgattgacaaatcgaattttgattatgatcagggcggtatccccaccgtaaaagccaatccccctcccgctacactgtcggcatttaacggtattgaccttgtagccgacaatccgtcgttaaaaggcgaagaggatttatttgtcaatatcaatgttgaatccgaacttggtcttaacatggataaccgccatgtaataagcattgttgaagcggcgttgagaaaatccccgtcattggacactatagtggccggatggaatgcaaactggaccaaggcgcagcaaaaatacatcagataa

SEQ ID NO: 59186 - protein, 242 aa, Unknown
  Obtained from environmental sample
  misc_feature (1)..(242): Xaa is any amino acid
MGAWDAYIGGSATGDADFMNQKLPREKDPFSNRGNGTGPYAVFYILYESVARGLVEKDPSTTDWESCKGRINRGEIATMVLGSWAIVQMQEAGPNPQNIGYMPFPITVNGKQYASAGADYCYGINKNSSRDVKLASLLYIKYLIDKSNFDYDQGGIPTVKANPPPATLSAFNGIDLVADNPSLKGEEDLFVNINVESELGLNMDNRHVISIVEAALRKSPSLDTIVAGWNANWTKAQQKYIR

SEQ ID NO: 59187 - DNA, 1053 bp, Unknown
  Obtained from environmental sample
  misc_feature (1)..(1053): n is a, c, g, or t
ttgggcagagaaccgtttattaaacggttctctgctttaactataaggggatgtattatgaaagctgcggcagcgtctttacccgggcggcataaacacagatcgatatttgagactgtaaaaggtcaacaagtagtggttgcggtaacatttatgctagtaccgctttttttattggttttatttacctacctgcctttttttaaaatggtgcaattcagtttttataatatgaaatatatcggaacccgtacgtttatcggactggaaaattataaggatgtatttacaaggccggaaatattgggttccctgcgtttgagttttttttatttgggagcttctgtcgtacagcttagtttagcgctcttttttgcgagcatcctcagcatgaaaacgaaatataaggatttctttaaaggcgttatttttttcccgtatctgatttccggtatagcaataggatatatgtttaagttttttttcacgcgcgggtttgtactggacacggttcttttaaggcttggatttttacaggaagatctgcctttttggctgagagatgaaggagtaaataatgccatgctggcggctacctccgtatggcgttatcttgggcagaacatggtattgtttatcggcgctatttcagcaatagacccgcagttgtacgaagccgcggatatggacggcgctacaacatgggataaattcctccatattatgctgcccggtatcagttccattgttgttttaaatatgattttggccgtttccggttccataagcgcgtttgaaccgccgtatgttataacaaacggcacgttcggcacctccacattttttgttactatgcacagtatggctcacgaaaaacaaaaggtcggtcttgcttcggcaatggctattgttttgtttttaattattattttagttaccctgttacagcggtttataagcagaactttctttgaagaagacaaaaacggatatttattcagcgagcggcgggccatgcaaaaacgggcgaaaaataataaaaggaatcaataa

SEQ ID NO: 59188 - protein, 350 aa, Unknown
  Obtained from environmental sample
  SIGNAL (1)...(24)
  DOMAIN (101)...(325): Binding-protein-dependent transport system inner membrane component
  misc_feature (1)..(350): Xaa is any amino acid
MGREPFIKRFSALTIRGCIMKAAAASLPGRHKHRSIFETVKGQQVVVAVTFMLVPLFLLVLFTYLPFFKMVQFSFYNMKYIGTRTFIGLENYKDVFTRPEILGSLRLSFFYLGASVVQLSLALFFASILSMKTKYKDFFKGVIFFPYLISGIAIGYMFKFFFTRGFVLDTVLLRLGFLQEDLPFWLRDEGVNNAMLAATSVWRYLGQNMVLFIGAISAIDPQLYEAADMDGATTWDKFLHIMLPGISSIVVLNMILAVSGSISAFEPPYVITNGTFGTSTFFVTMHSMAHEKQKVGLASAMAIVLFLIIILVTLLQRFISRTFFEEDKNGYLFSERRAMQKRAKNNKRNQ

SEQ ID NO: 59189 - DNA, 1305 bp, Unknown
  Obtained from environmental sample
  misc_feature (1)..(1305): n is a, c, g, or t
atggacgaattgttaaaagctatcaaaacaaagatagcggaaatgaaaaaaatcgagttgaccggatttaccaacacggaaacggcaacggcgtattttcaggaaaaagaagcaattcttgaagggattgttaaaacgctggagactataaccgttcaggagacttccgaagtggaagcgttgaaaagcacggttaaatccctgcgggaagaaatcaaggggcaggcgaaaagccccagggaactttcccgccgtgaactgctttacaatctcggcaaggggattgcggcggcgtggtcgggcaatcacaaggttttggcggatttggcgttttcgcctaacctgaaaagcgataactggacaaaccctaaagacgtttcatggggtgaaaggggctggacagtcagcaaggcggcgttgggtgagccgatgggaaatatgtcgcctaacaacgaacagtttttgattaacccgatttatgaaacggagataatgtccgatgtcgccaaaaaatcggtgatgatgagccttgtccgccatcggcctatgctcggtccttctatcttccttcctactagagaccggggcggcgttcagcttaactggctgaccgcctacgggcagaaaatcgagggcagcaagccgaagggggcggagcgtgtagaacttaaagcctacactttggctggcttcattccgtggtttgacgaattcgaggaagatgtgtttgtcgatttgggggctatgttcattgacgaatttatcgagacttacggacaggaatttgaccgccaatgtttgctggctgacgatgatccttttaccggggctatggcttgcgccgatgttacggaggtaactatcaagggagacactattgacgatcttacgtggaaggacttccgggacgccgtttacaaagtacccgccgaagaaaggaaagattgttcatggtttcttaatgagactgttttgaaccatatcgccaatatcgaggacactacaggccgcccgatttggcggcggcctacggaggctatgccggggcggttggacttgtacccctatcacgaggtttctatccttccgcaaattgcggacattggggaaaatcaggcgtttgcggtttttatgaacccaaaacgcatacaacacggcaacaggcggggcattgaacttaaaaagtttgatggaactactgaaagccttgaatacggcgaattgtttttaaggttcaggaagcgggacggttttttggtcacgaggccgaaagggaatatgctcgttttgaagacgaaagcataa

SEQ ID NO: 59190 - protein, 434 aa, Unknown
  Obtained from environmental sample
  DOMAIN (152)...(430): Phage capsid family
  misc_feature (1)..(434): Xaa is any amino acid
MDELLKAIKTKIAEMKKIELTGFTNTETATAYFQEKEAILEGIVKTLETITVQETSEVEALKSTVKSLREEIKGQAKSPRELSRRELLYNLGKGIAAAWSGNHKVLADLAFSPNLKSDNWTNPKDVSWGERGWTVSKAALGEPMGNMSPNNEQFLINPIYETEIMSDVAKKSVMMSLVRHRPMLGPSIFLPTRDRGGVQLNWLTAYGQKIEGSKPKGAERVELKAYTLAGFIPWFDEFEEDVFVDLGAMFIDEFIETYGQEFDRQCLLADDDPFTGAMACADVTEVTIKGDTIDDLTWKDFRDAVYKVPAEERKDCSWFLNETVLNHIANIEDTTGRPIWRRPTEAMPGRLDLYPYHEVSILPQIADIGENQAFAVFMNPKRIQHGNRRGIELKKFDGTTESLEYGELFLRFRKRDGFLVTRPKGNMLVLKTKA

SEQ ID NO: 59191 - DNA, 543 bp, Unknown
  Obtained from environmental sample
  misc_feature (1)..(543): n is a, c, g, or t
ttgtgcggacagcggtctccctactggttggcgaatgccaagctgtttcccgaaaaaaatatggctgtaatatccttgcgagattatcctatgaggcttgcgccgtggtttatttggcatggggcaaattcttatgttgatttgtgggaaggctacgatgagtttcaccgtgggctgcggatagtgcgcgatggaggaaaatacgtctctccgaaagtgaagaaaattattgatagcgtggaagaatggccggatacagacaaggctgttacaaaacggatgcaggaaagcttaattttgctgtgttgcggttataagtcagacgaaataggggaagaactgcatatcgcaaggaaaactgtgaataggcatctcgaccgcttatatgacatttttcatgcagagaaccgtgaagaaatggtcagcattgcgtgggaattggaacttgtaacaaaagaggacattaggtttcaccgcgaacgaccttataactttaagcttcctgaatgggcggtaataagtaaaagagcagtgaacaattaa

SEQ ID NO: 59192 - protein, 180 aa, Unknown
  Obtained from environmental sample
  DOMAIN (87)...(144): Bacterial regulatory proteins, luxR family
  misc_feature (1)..(180): Xaa is any amino acid
MCGQRSPYWLANAKLFPEKNMAVISLRDYPMRLAPWFIWHGANSYVDLWEGYDEFHRGLRIVRDGGKYVSPKVKKIIDSVEEWPDTDKAVTKRMQESLILLCCGYKSDEIGEELHIARKTVNRHLDRLYDIFHAENREEMVSIAWELELVTKEDIRFHRERPYNFKLPEWAVISKRAVNN

SEQ ID NO: 59193 - DNA, 1485 bp, Unknown
  Obtained from environmental sample
  misc_feature (1)..(1485): n is a, c, g, or t
atgagctattatgatcaaaaaataccgccggtgcgcgaccagcgcctgcagcttgcggacagtttttcggggcacgcctgtgatttgctggattgcgcgagggagggatgcttacttcagaagaaacgctctttctggcaggctggcgcgtgtcagatgtcattaacgctgatgatggctacgactgtaaggaattcggttgtcattgtacactcacccggcggatgctcttcgatgatgatgtcgattaacatgcagtcccataaaggacggattcaacgggggtatccttcctcgcttgggaactggatttccaccgatttaaacgaggcggacgtaattggcggcggcgagcgtaaactgaaagaagcgattgaatacgccgacagggagttccgcccggaaatcatctttgtggtatccacctgcgcgcccaacataatcggggacgatgtcgccgaagtcatcgcgcaggccagggggacagtttccgcgaaggttgcgggtcttcactgcccgggtttcaagtcccgtgttgttgccagcgcgtatgacgccttctaccacggcctgctcaaagacattccccttgagcctgaaccctggaaggactatgtgccgttagacccttcctgcccggaatacgatatgcagcaggcaaaagaacgctatcaggattcgcgtacggtaaatctgtggaacgcgacatctatcggttatcaggatgaacaagagatagaacgtctgttgaaagcgctggggttgaacgtaagggtattcgcggagttttcaagcctcgacgactttcgcaaaatttcccgcgcggcgctcaatgtcagtatgtgcgacgtccatgatgactatatgctgaaattccttaaagaaaaattcggtacgccgtattatatcgcgggaatgcctattggttttaagaaaacccgtgtttggctgcgcggtatcgcgaaacacttcggccttgaggaacaggcggaaaagcttgccgattacgaagagaatctcgcgtcggaagcgattaagccgtttttaccggaacttaagggtaagcgcgtattggtctgcggcggggtaatcagggcggggacggaagcgatggcgcttgccgatcttggcgtggatattatcggtataaaaatgtatcactacgatgataacgccgaacaggttttcaatgacgtcgccggtaaactgcccgatgtccatgtggcggtgagtaaccagctgttcgaactggcccatcagcttaaaaacctgaaacctgatttggttatcacacacgggggaacgcacgggcaggtaagcaagatgggataccccagtattcagcttttcacggttgacggggtatttttcggttatacgggcttttatcaaatcatgcgcagaatacatttcgcgcttgagaatacaaattatcaaaaacggctgtcaaatcacatcaggctgccgtacaactcggccatctga

SEQ ID NO: 59194 - protein, 494 aa, Unknown
  Obtained from environmental sample
  DOMAIN (43)...(475): Nitrogenase component 1 type Oxidoreductase
  misc_feature (1)..(494): Xaa is any amino acid
MSYYDQKIPPVRDQRLQLADSFSGHACDLLDCAREGCLLQKKRSFWQAGACQMSLTLMMATTVRNSVVIVHSPGGCSSMMMSINMQSHKGRIQRGYPSSLGNWISTDLNEADVIGGGERKLKEAIEYADREFRPEIIFVVSTCAPNIIGDDVAEVIAQARGTVSAKVAGLHCPGFKSRVVASAYDAFYHGLLKDIPLEPEPWKDYVPLDPSCPEYDMQQAKERYQDSRTVNLWNATSIGYQDEQEIERLLKALGLNVRVFAEFSSLDDFRKISRAALNVSMCDVHDDYMLKFLKEKFGTPYYIAGMPIGFKKTRVWLRGIAKHFGLEEQAEKLADYEENLASEAIKPFLPELKGKRVLVCGGVIRAGTEAMALADLGVDIIGIKMYHYDDNAEQVFNDVAGKLPDVHVAVSNQLFELAHQLKNLKPDLVITHGGTHGQVSKMGYPSIQLFTVDGVFFGYTGFYQIMRRIHFALENTNYQKRLSNHIRLPYNSAI

SEQ ID NO: 59195 - DNA, 1326 bp, Unknown
  Obtained from environmental sample
  misc_feature (1)..(1326): n is a, c, g, or t
atgagcgaatttattgacaggccccgcagttcctgcgcccttggcggcgcgcttgccgcgatcagcgcgatgccggatgtgatccccataatccacacctcggtgggctgcggcggcaatctgatgaattcggtgtcgttcggcgccggctacttcggtcccggttactgttccaacaattcggcgcccagttccggcgttaccgaaacggaagttgtgtttggcggcgccgagcggcttcgcgagcaaattacatccacattgaaactgatagacggcagactgtatgtcgtcgccacgggctgtatgaccgagatgataggcgatgacgcggcgggcgtggtaagcgaatttgccgaagaaggcgaacctgttatcgcgatcagcacccccagcttcaaaggcgataattattacggctatgaaattttacttgaggggattttcaaccgctggcttcgcccgtcaggtgaaaaagataaaaatttaattaacatattcggcgttgttcccggttacgatcctttctttcgcggcgatttggaagaaattgagcgaatcggcgcgaaacttggtttaaaggtaaatacatttttcacgcccactcaaaattttgagaatatcacttccgccccaaaggccgcgctgaacgttatcctttcaagaacgcgctgcctcggctttgcgcagcggtttgaggaaaaacacggaacgccgtattgggtgacggatttaccggtaggtccgcaggcaagcgatgattttatccgcgaacttgcgaaaaagctgaaccttcaggcggccgaacaggttatcacagccgaaaacgactggtattaccgctactttgaacgcacggtagacagctatatggacggagaacagaggcattattccgttacggtaacaaattccaactatgcaattccggtcgctaagtatatgcacaatgaacttggctgggttttaattgactcctttgtaaccgatacgcttaacgatgatcaaaaatcctctctgtccgaaggtttttcagaattgcctgtaaaaccggtgtttgagggtagcgcgatcaaaatcgcaagagcgattacgcagaaccagagcgaatacaggggcgagcggtattttgacgctaaaacgcctttatacattgccggaagtacttatgaaaaacagacggcgcttaaaaggggcgcaaggtatctgcctgttagcttccctgtttttgacagggttatcacgaccgcgggatacgcggggtaccgcggcggtttgcggttatatgaggatttaatcggagccaatatggcgatgaaaggatag

SEQ ID NO: 59196 - protein, 441 aa, Unknown
  Obtained from environmental sample
  SIGNAL (1)...(22)
  DOMAIN (8)...(438): Nitrogenase component 1 type Oxidoreductase
  misc_feature (1)..(441): Xaa is any amino acid
MSEFIDRPRSSCALGGALAAISAMPDVIPIIHTSVGCGGNLMNSVSFGAGYFGPGYCSNNSAPSSGVTETEVVFGGAERLREQITSTLKLIDGRLYVVATGCMTEMIGDDAAGVVSEFAEEGEPVIAISTPSFKGDNYYGYEILLEGIFNRWLRPSGEKDKNLINIFGVVPGYDPFFRGDLEEIERIGAKLGLKVNTFFTPTQNFENITSAPKAALNVILSRTRCLGFAQRFEEKHGTPYWVTDLPVGPQASDDFIRELAKKLNLQAAEQVITAENDWYYRYFERTVDSYMDGEQRHYSVTVTNSNYAIPVAKYMHNELGWVLIDSFVTDTLNDDQKSSLSEGFSELPVKPVFEGSAIKIARAITQNQSEYRGERYFDAKTPLYIAGSTYEKQTALKRGARYLPVSFPVFDRVITTAGYAGYRGGLRLYEDLIGANMAMKG

SEQ ID NO: 59197 - DNA, 819 bp, Unknown
  Obtained from environmental sample
  misc_feature (1)..(819): n is a, c, g, or t
atgaaaatacagaacgctcggcagtgggaacttgcgcttgcggcatacaacagcggactgggcgcggtcagtaaaattgtaaaaagaacgggaaggaatgattactgggaacttgttaaaaaaggcgatttaaaacaggaaactcagcattatgtacccaaattaatcgcggcaaactacattatttcccagccgcggaaatacggcattaatatctggcatgaaaaaattgattggacggcaattccgctgaaacgccagatttccatcgatattcttgccgaggaaacgggcgtttccaaagatttactgcaccgtcttaacgcggaactgcttcacgggataagcccagccgattcaaactaccggctaaaaatcccggcgcaggacattgaaaagattacaaacgcccttgaaagcgacgatttaaaactactccgttaccattaccatgtggttaagaccggcgacacattatggtcgatgtcaaggaattacgggatagccgtaaatatcatagaacagcacaatccggggatttccggcagatatttaaaaataggggaaacgattatcattccggcattcggcgacgcgcccgcgcccaaaaacccgccgcaaaatattctgcaaaacagaccggtaaccgcgccgcctaactttacggatacctatattgtgcaaaaaggcgaaactttttggtctttgggcaggaaatacggggtcgatccccaagttctggcggaggcaaacgggatgaaaataaccgatattctgcatgaaggaagaacgattagagtgccgataatattagaataa

SEQ ID NO: 59198 - protein, 272 aa, Unknown
  Obtained from environmental sample
  DOMAIN (151)...(194): LysM domain
  misc_feature (1)..(272): Xaa is any amino acid
MKIQNARQWELALAAYNSGLGAVSKIVKRTGRNDYWELVKKGDLKQETQHYVPKLIAANYIISQPRKYGINIWHEKIDWTAIPLKRQISIDILAEETGVSKDLLHRLNAELLHGISPADSNYRLKIPAQDIEKITNALESDDLKLLRYHYHVVKTGDTLWSMSRNYGIAVNIIEQHNPGISGRYLKIGETIIIPAFGDAPAPKNPPQNILQNRPVTAPPNFTDTYIVQKGETFWSLGRKYGVDPQVLAEANGMKITDILHEGRTIRVPIILE

SEQ ID NO: 59199 - DNA, 612 bp, Unknown
  Obtained from environmental sample
  misc_feature (1)..(612): n is a, c, g, or t
atggtatctgtacttcagaaaaatttattttccgcaggacccggaaattcacggaagatgggaatgggcgggaatttactacggagaaaaattttgagtatatcccgggtatttcacttacaggcgcaaaaacgcagtgggggaaaattccttattctgttattttgttcaataaatttaacattggctcatgcggaagaaaggcctatgcgtaccatgcttcccgatccgacactgcccctgcccgcctccggctcctcatttgtttctacgcccgcctcaaattcgctaattacagaaacggctcttgaacagccattgacacagcgttacattgaacagtactcaagtccgcacggtatcaacactctcaacacggttttaagcagggggagtctttacctgccttttatcaaagagcaggtcgcccggcgtaatatgccgccggaactggcttacctccccgtcattgaatccggttttataataacggcaagaagtaaatcgggcgccatgggtctttggcaatttatgcttaacagtatttcaccgtataaaataagggttaccgactttttggacgagcggcgcgattttgaaaaatcacaatag

SEQ ID NO: 59200 - protein, 203 aa, Unknown
  Obtained from environmental sample
  misc_feature (1)..(203): Xaa is any amino acid
MVSVLQKNLFSAGPGNSRKMGMGGNLLRRKILSISRVFHLQAQKRSGGKFLILLFCSINLTLAHAEERPMRTMLPDPTLPLPASGSSFVSTPASNSLITETALEQPLTQRYIEQYSSPHGINTLNTVLSRGSLYLPFIKEQVARRNMPPELAYLPVIESGFIITARSKSGAMGLWQFMLNSISPYKIRVTDFLDERRDFEKSQ

SEQ ID NO: 59201 - DNA, 1089 bp, Unknown
  Obtained from environmental sample
  misc_feature (1)..(1089): n is a, c, g, or t
atgatagtatcattaacaatggatattaggaaaaaaatagattttttaacatgtttcacattattattatcggtttttatattggtatcatgcaatttaaagcctgacgacattgaccagtattacattacaggctcaaaagaagacaggaaaaacattactgaactgtttaatttattaaaaactgaaatacccggcagcgacggcgaatttgcggttacaagggaaattgctacaagttttgcaaggctaaaagattatgaaagacttatccattttttaagcgcgaaaaccatcaataatccggctgacccttacaacggctactattttctcatgattgcctatgcgaatatccagcgggaatcggagccgattgccgccctttatttcgatttgatcctgaaaaattatcctgaccttatcattaatgacgagtcgattcaccttatatgcctgcggcatcttatcaatgagaccgataacccgaaacacaagatctggtactacaatgaacttatttccagattcgccgataaaatcgatccgggaaacacatattttatgctggggcaggcatgcgagcgcgccggggactggaacggcgcgattgcggcatatacaaattacctgccgtacacgggaacaataatccccgggtttccccaggccgatcaatacgcaaaaaaccaggtggatctaagcaggtcccagaaagactggacatttgaaagcctaagcgcgttaaaaagagcggttgaagacgccctggaatcagggagcgccagtacgctaatgagataccagacaaaggtgaacttttttgcgcgttcatgggagcaggtagaaaccgatgatatcgggttaaacagatttaaccttgcccaatttatgtccggcaaccatatcaaatacagctccactctggacgcgtcctcaaattcaaccgaagctttcttaagaacaagcggctggtcattttcgctcaatacatggtatctgtacttcagaaaaatttattttccgcaggacccggaaattcacggaagatgggaatgggcgggaatttactacggagaaaaattttga

SEQ ID NO: 59202 - protein, 362 aa, Unknown
  Obtained from environmental sample
  misc_feature (1)..(362): Xaa is any amino acid
MIVSLTMDIRKKIDFLTCFTLLLSVFILVSCNLKPDDIDQYYITGSKEDRKNITELFNLLKTEIPGSDGEFAVTREIATSFARLKDYERLIHFLSAKTINNPADPYNGYYFLMIAYANIQRESEPIAALYFDLILKNYPDLIINDESIHLICLRHLINETDNPKHKIWYYNELISRFADKIDPGNTYFMLGQACERAGDWNGAIAAYTNYLPYTGTIIPGFPQADQYAKNQVDLSRSQKDWTFESLSALKRAVEDALESGSASTLMRYQTKVNFFARSWEQVETDDIGLNRFNLAQFMSGNHIKYSSTLDASSNSTEAFLRTSGWSFSLNTWYLYFRKIYFPQDPEIHGRWEWAGIYYGEKF

SEQ ID NO: 59203 - DNA, 843 bp, Unknown
  Obtained from environmental sample
  misc_feature (1)..(843): n is a, c, g, or t
ttgatcagatcggccgaggaaccgcgagaagataaaacagacaaacgagatgccctcgtaatagcatggatgctccgcagggaagagggggcgggtatcgcggtaccggccagggaagacgaggcggcgcgggatttagtgcggtgccggggtgacataaaggacgatttgaagcgggcaaaacagcgccttcttaagtctttgcttcggcaggggcatatctatgagaatacccgatactggacagggaaacatcggaagcgggtgaaaacacttccatttgatatgccggtggacaaagcggtatttgaacagtatctatacacgagagaacgcattgagggacggatagcccgtagtgaactgcagataaaagaaagagcggaaagcccccgatatgcggaacttgtgagaacgttacgggctttcaaaggggcagattaccttattgcattgtcgctggtatgtgaaataggagattttaaacggtttcccacggcgggggcatttatgtcgtacattgggcttgtgccgagcgaatactcaagcgggaataaacggaaacagggaggaatcacgaaaactggcaacgggcatatacggaaactactgaccgaagcggcatggcattatacccgtcctgtaaaggcaagcatacggctggccgaacgaagagtcggaacgtcagaaacggttatttcgtatgcggacagagccctgaaccggctacatggcaaatatgtaaaactgctgtttaacgggaaatcgaaacaggcggctgtaacggcagtagccagggaactgtcaggttttctttggggcgtgatgaccgcagtagcgtaa

SEQ ID NO: 59204 - protein, 280 aa, Unknown
  Obtained from environmental sample
  DOMAIN (110)...(225): Transposase IS116/IS110/IS902 family
  misc_feature (1)..(280): Xaa is any amino acid
MIRSAEEPREDKTDKRDALVIAWMLRREEGAGIAVPAREDEAARDLVRCRGDIKDDLKRAKQRLLKSLLRQGHIYENTRYWTGKHRKRVKTLPFDMPVDKAVFEQYLYTRERIEGRIARSELQIKERAESPRYAELVRTLRAFKGADYLIALSLVCEIGDFKRFPTAGAFMSYIGLVPSEYSSGNKRKQGGITKTGNGHIRKLLTEAAWHYTRPVKASIRLAERRVGTSETVISYADRALNRLHGKYVKLLFNGKSKQAAVTAVARELSGFLWGVMTAVA

SEQ ID NO: 59205 - DNA, 432 bp, Unknown
  Obtained from environmental sample
  misc_feature (1)..(432): n is a, c, g, or t
gtggtgaatatggacgagaagccgtatcaattactgggtgacacccgcgaaccgctgcccgtgaaaccagggtcggcacagctggaagactatgaataccagcggaacgggacatgcagcatttttatattcgccgagtctctttcaggctggcgctatgcacaagcctttccacagcggacaaaaaaagattgggcgcataggataaagtggctgcttgacgagcaatacagcaaagcggaaaaagttgtacttgtgatggataatttaaacacgcattcgatttcctcactgtatgaggcatttccgcctgaagaagcgttccgccttgcaaggcggcttgagattcattttacgcccaagcacgggagctggcttaacatagctgaaattgaattgtccgcaatgactgggcaagaggcggatccctga

SEQ ID NO: 59206 - protein, 143 aa, Unknown
  Obtained from environmental sample
  misc_feature (1)..(143): Xaa is any amino acid
MVNMDEKPYQLLGDTREPLPVKPGSAQLEDYEYQRNGTCSIFIFAESLSGWRYAQAFPQRTKKDWAHRIKWLLDEQYSKAEKVVLVMDNLNTHSISSLYEAFPPEEAFRLARRLEIHFTPKHGSWLNIAEIELSAMTGQEADP

SEQ ID NO: 59207 - DNA, 1647 bp, Unknown
  Obtained from environmental sample
  misc_feature (1)..(1647): n is a, c, g, or t
atgacaaagccgccctttctaccccgcatacattctcccgacgacataaaaaaaatgacgctccgcgaattaaacgctctggcgcaggaaataagggaatatattgtttctacagtttcaagtaacggcgggcatttatcttccaaccttggaatagtggaactgaccatcgcccttcaccgcgtatttaactcccctgtcgataaaattgtctgggatgttgggcatcaatgttacgcgcataaactgataacagggcgctatgattcgttctcgtctctccgcaaaaaagggggaatagcgggctttcccaagcgcagtgaaaacccgcatgacgcttttaacacaggacacgcctctacgtcaatttccgccgcgctcggacttttagcggctgacagaatacagggcggtaattcccgctcgatagcagttatcggagacggcgcgctcacgggaggaatggcgtacgaagcgctgtcccactgcggacacctaggtcttccgctaatcgtaattttaaacgacaataaaatgtccattagccgaaatgtcggagggctttcaaaatatttaagccgtctttccatgaagaaaaaatatcaaactttccgcaggctttttgacgagaccgcgaaaaaaatcccgtttataggcaacgcgttttttaacatgatagtcaggcttaaaagggctgttaaagcggttttttatatcgacaacttttttgtagacttagggttcgagtatgtaggaccgataagcggacacaacattcacgccctcatcagcgtattggaagacgtgcgaaaaataaaccgccctgttgtaattcacataactacccgcaagggcaagggctacggttacgcggaagacgacccccacagttatcacggcgtaggctctttttcagttgacgacggaatagaacagggaaataaaagtataaaaagttttacggaaagtttttcgctccgtctccttgaagcggcggagaaagataaacgcgttaccgcggtcactgccgcaatgaaaaccggtacgggactctcaacattcgccggaacctttccaaaacgtttttacgatgtgggtatcgcggaagaacatgcggtaacctttgccgccgctctcgcggctcgcggccttcgcccaatagtcgcggtatattcaacatttatccaacgcgccgtagatcaaacgctccatgacgcggcttttcaaaaactaccggtaattttcgctctggacagatcgggctttgtaaccgctgacggcgaaacccaccaggggttgtttgatattacgctctttcgcggcgcgcccaatatgaccctcctatgtccggcaagcgacatcgaaatgaagcttatgctggattacggaataaatcttgaaacaggaccgatcatgattcgctacccaaaagcgttatgccctcatgaaaccgaagctttttcaaaaccgcttgaaaaagggcgcggggtttgggtctcaaggggtgcaagcggtcaagtctgcctcgctttcaccgggagcctttacagggaagccgttaaagcggcaagtttattaaaagaacagggaattgaagcggatttatataacctgcggtttttaaaacctatgctcggccgattctga

SEQ ID NO: 59208 - protein, 548 aa, Unknown
  Obtained from environmental sample
  DOMAIN (23)...(342): Transketolase, thiamine diphosphate binding domain
  misc_feature (1)..(548): Xaa is any amino acid
MTKPPFLPRIHSPDDIKKMTLRELNALAQEIREYIVSTVSSNGGHLSSNLGIVELTIALHRVFNSPVDKIVWDVGHQCYAHKLITGRYDSFSSLRKKGGIAGFPKRSENPHDAFNTGHASTSISAALGLLAADRIQGGNSRSIAVIGDGALTGGMAYEALSHCGHLGLPLIVILNDNKMSISRNVGGLSKYLSRLSMKKKYQTFRRLFDETAKKIPFIGNAFFNMIVRLKRAVKAVFYIDNFFVDLGFEYVGPISGHNIHALISVLEDVRKINRPVVIHITTRKGKGYGYAEDDPHSYHGVGSFSVDDGIEQGNKSIKSFTESFSLRLLEAAEKDKRVTAVTAAMKTGTGLSTFAGTFPKRFYDVGIAEEHAVTFAAALAARGLRPIVAVYSTFIQRAVDQTLHDAAFQKLPVIFALDRSGFVTADGETHQGLFDITLFRGAPNMTLLCPASDIEMKLMLDYGINLETGPIMIRYPKALCPHETEAFSKPLEKGRGVWVSRGASGQVCLAFTGSLYREAVKAASLLKEQGIEADLYNLRFLKPMLGRF

SEQ ID NO: 59209 - DNA, 555 bp, Unknown
  Obtained from environmental sample
  misc_feature (1)..(555): n is a, c, g, or t
atgacaacagaacaaatgtggcaaatcagcggtatgcacctcgcgccgtatattcaagtcgctacgcatttaatcggaaaatcgcgcgaaggcggcggtaatatgttccgtcatcagcttgacactctgggaattcttatcgattacggttatgttaattcgatattacttaaagcttcgcttgtccatgacattcttgaggacatcccggattttaaccataatattttactatcaatcgacaccgaaagcccggcggtttatgaccttgttcttgaagttacgcgaagacacggcgaaacaaaaccggattttcttacgcgtatatacgaaaatgcttcttttgacgcaaaaactttaaaagtcgcggatcgtatttccaacatgatttctcttggatttgtaaacaaccttgcctttgtagagcgttatataaatgaaactgaaagatatctccttcctcttgcctcgcaagttaacacttatatgctgatagaacttacagaccttgtaaaaacaaaacgtaaatatctggaagacctgaaacaacaatga

SEQ ID NO: 59210 - protein, 184 aa, Unknown
  Obtained from environmental sample
  misc_feature (1)..(184): Xaa is any amino acid
MTTEQMWQISGMHLAPYIQVATHLIGKSREGGGNMFRHQLDTLGILIDYGYVNSILLKASLVHDILEDIPDFNHNILLSIDTESPAVYDLVLEVTRRHGETKPDFLTRIYENASFDAKTLKVADRISNMISLGFVNNLAFVERYINETERYLLPLASQVNTYMLIELTDLVKTKRKYLEDLKQQ

SEQ ID NO: 59211 - DNA, 462 bp, Unknown
  Obtained from environmental sample
  misc_feature (1)..(462): n is a, c, g, or t
gtgtgcgggcggtggaggcgcgacctagaaggaagcggtataacgccggaaaagaaattgcgtctgttaatccgttcaggcgcggaattggaaacggtattcagggagaacgaagggcttataaaacttttagcgggagcgggcgaattgcagattgaagcctcagacggcgcgttaggcgatgcctttggcgaaaggccgacaggttccatcggactcgcgggaaccggctttgaaatttttgtgtttgtagccgaggccgtagataccgccgctttaaagaaaaaattatcaggtgaccttgaacgcgatcgtaaatatatagaaagcgttcgcgccaaactcgccaacgaacaatttatcaaaaacgcgcctggagaacttgtggaagaacagagaaacaaactggaagagtccgttaggcgcgttgaaaaacttgccggatatttaaaggatttataa

SEQ ID NO: 59212 - protein, 153 aa, Unknown
  Obtained from environmental sample
  misc_feature (1)..(153): Xaa is any amino acid
MCGRWRRDLEGSGITPEKKLRLLIRSGAELETVFRENEGLIKLLAGAGELQIEASDGALGDAFGERPTGSIGLAGTGFEIFVFVAEAVDTAALKKKLSGDLERDRKYIESVRAKLANEQFIKNAPGELVEEQRNKLEESVRRVEKLAGYLKDL

SEQ ID NO: 59213 - DNA, 627 bp, Unknown
  Obtained from environmental sample
  misc_feature (1)..(627): n is a, c, g, or t
atgcccaataattttactaaatatgtcgccggaaattttcgaaaaccaaatggcattggaggaaaaatagccactataataatgaatattataaacaaaaatcagtacaataccgttttgaaaaatatcaacataaagcctaccgatattgtcttagacattggttttggcaatggatatttaataaaaaaattatttgaagaaaacattaacgcgaaaatatatggcatagaaatatctaaggatatgttaaacaaagttacagctaaaagcaaacaaaaaataagtaacgggagtttaaaattatttttggaaaatataaataaaacctcatttgaggacagtttatttgataaaatttacacagtaaataccatttatttttggaatgaattggataaatgcttctcagagatcaggagaacattaaaaccaaatggaatatttataaatgtattttatgacagaaagcatttagaaaaaatcattttttcaaaatacggtttcaataaatatacaatagaagaaataaaaattataacagaaaagaatggattaaggatcattgaaacaatagagatagccaaaaataagtcatattgcataatatcggaaaacataaagtaa

SEQ ID NO: 59214 - protein, 208 aa, Unknown
  Obtained from environmental sample
  DOMAIN (32)...(196): Putative methyltransferase
  misc_feature (1)..(208): Xaa is any amino acid
MPNNFTKYVAGNFRKPNGIGGKIATIIMNIINKNQYNTVLKNINIKPTDIVLDIGFGNGYLIKKLFEENINAKIYGIEISKDMLNKVTAKSKQKISNGSLKLFLENINKTSFEDSLFDKIYTVNTIYFWNELDKCFSEIRRTLKPNGIFINVFYDRKHLEKIIFSKYGFNKYTIEEIKIITEKNGLRIIETIEIAKNKSYCIISENIK

SEQ ID NO: 59215 - DNA, 729 bp, Unknown
  Obtained from environmental sample
  misc_feature (1)..(729): n is a, c, g, or t
ttgggagccaggaattacaaaatatctcaaacaaaaaaaactattatttccccgaccgaatccgcggttctgggaggatttgtaccggccctcgcaacggcggcaatcagcctgaattttagtaagattggaatcagcatgatctttatgctgggtatttcctggctcttcctgtcccaaattttttcttctccggagaaacagaatttatttatcggccgaattgccgcagggttttccgtaattctttacccagggctttttctatcctggatcattcccatggccctgctgccaaagcctgacatgagtatcgtcctttatttcctcattgtttttctaaacgattcagcggcgtgggccgcggggatgctttttgggaaaggaaaccggggaataattccggcaagtcctaataaaagtattgtgggctttgtgacaggaattcttgcttctgtcgcgacaggggtgttgggagttcacttttttccaggcgcttttaattcccctttgttttctccgctggccgcgggggctctccttggcttttgtacggggtttgccgctactgtgggggatttgggggaatcggtactgaaaagaagcgcggaggttaaagactcaggggtgattatacctggccggggaggaattctggattccattgattctcttgccctggcggccccggttttttacctggccttcaggtttttgtttgtctcttag

SEQ ID NO: 59216 - protein, 242 aa, Unknown
  Obtained from environmental sample
  DOMAIN (20)...(239): Cytidylyltransferase family
  misc_feature (1)..(242): Xaa is any amino acid
MGARNYKISQTKKTIISPTESAVLGGFVPALATAAISLNFSKIGISMIFMLGISWLFLSQIFSSPEKQNLFIGRIAAGFSVILYPGLFLSWIIPMALLPKPDMSIVLYFLIVFLNDSAAWAAGMLFGKGNRGIIPASPNKSIVGFVTGILASVATGVLGVHFFPGAFNSPLFSPLAAGALLGFCTGFAATVGDLGESVLKRSAEVKDSGVIIPGRGGILDSIDSLALAAPVFYLAFRFLFVS

SEQ ID NO: 59217 - DNA, 378 bp, Unknown
  Obtained from environmental sample
  misc_feature (1)..(378): n is a, c, g, or t
atgattgaaagttataaaagcgttatacgcgcgcgcatagaaagggcgcggctattgttaaaaccgttcgatttacgggacttggaataccgtttccgcgccattttacagccgcgcctgatccgccttgacgacgcgaaagaagcgcttataaacgcggtttccgacaggaaagagaatctgcgcacaaggataacgcttgccgccgcggtaatagaggctgcaaatccttttgcggcaatggaacgcggattttctgttgtgacggactcaagcggcaaattagtgcgcgattcaaaaaaagtaaaaaaaggggagcggcttattatccggccgcttaaaggaaaaataaacgcaatagtggaaagttgcgagtaa

SEQ ID NO: 59218 - protein, 125 aa, Unknown
  Obtained from environmental sample
  misc_feature (1)..(125): Xaa is any amino acid
MIESYKSVIRARIERARLLLKPFDLRDLEYRFRAILQPRLIRLDDAKEALINAVSDRKENLRTRITLAAAVIEAANPFAAMERGFSVVTDSSGKLVRDSKKVKKGERLIIRPLKGKINAIVESCE

SEQ ID NO: 59219 - DNA, 1692 bp, Unknown
  Obtained from environmental sample
  misc_feature (1)..(1692): n is a, c, g, or t
ttgaggaaggcggctgtaaaaaagttggaagttttcgacgatggagacggaatgatccgcgaagatttggaactctgcacgctgacgcacgcgacaagcaaaattcgccggttagacgatcttgacatcgccgttacgctcgggttcagaggggaagcgcttgccgccgccgccgctgtaagcaaagtggaaattataagcagtacagacggaagggaagcatggctgtttgaaacaggaccgggagaaagccgaccgccaaaaatagaacaaactcgccgaacaaaaggcacgactgtaagggctttaaatattttcgaaagtattcccgcacgaaaacgttttttaaaaatggaaggaagcgaggccgctctgtgccgtcaggtttttatcgacaaagcgcttgcattcccttcgattaatttccgttttgttcaggacggcaagttaaaagatttcttccccgccgtttcttcaaaaaaggagcgctttgccgccgcattattgcaagcgcaggaaattaatttccttcacgaaataaatgttacaggtacgggatttaccgtagcggttgtaatcggcggcgcagagctttataggaacgacaggcggcagttgtatgtttttgcaaacggcagaagagtgcaggatttttcgctgattcaggctatggaatacggagcgcaaggctggtttccaaacggcgttcatcctgtaggcgcggtctatgtagacattgacccgtccctcgcggattttaacattcatcccgcaaagcgcgaagtacgtttccgcgatcctggcgctattcatcacgctatttcaggcggagtaaaaaattttttccacagctatttcctaagaacctcgcgcaaggaaacacaggctgaagaaggttcagcgcaaagagaaggtgaattcaatttctctaataaaaactttgaaacaaaacataaccaagatggacacgacaattttacaaacaataactcgcgaaccggaggttcgacacctcacgaaccagaggttcgacacctccgcgagagttcttttgaaaacaataattcgccttcgcgcattaccgataattttattactgaatccatgcgccgccgcgaaaattcttttacaagtgaatcttctgttgtgtacggcaacatgcggtacgccggcagggttttcggtctttttatcctgatcgaatggggagataaactctacattatcgatcaacacgccgcgcacgagcgtatcctttacaaccgttttcttgaagagccggttccaaaacaggaactgcttgcgcccattccatttaccacacaaagcgccgaagaagatgcctttcttgaaacaaagaagaaagaactgtcccgccttggcgtagacatcgtaaaagacggcgacggctggaacattgaagccctgcccgcgggctggaagatgggcgacgcggagactgtaaaagaaatccttgaattatccgaagccggagaggacatggcggaacaatgggcggcgactgtctgctgccgcgccgccatcaaagacggcgactatcccgatgatgaaaccgccttttcactgggcagggaggcgctgaaactccccgaaccccgctgccctcacggccgcccgatttggacagaaatcagcaaaaaggcgttatttagggctgttcgccgggaatag

SEQ ID NO: 59220 - protein, 563 aa, Unknown
  Obtained from environmental sample
  DOMAIN (169)...(283): DNA mismatch repair protein, C-terminal domain
  misc_feature (1)..(563): Xaa is any amino acid
MRKAAVKKLEVFDDGDGMIREDLELCTLTHATSKIRRLDDLDIAVTLGFRGEALAAAAAVSKVEIISSTDGREAWLFETGPGESRPPKIEQTRRTKGTTVRALNIFESIPARKRFLKMEGSEAALCRQVFIDKALAFPSINFRFVQDGKLKDFFPAVSSKKERFAAALLQAQEINFLHEINVTGTGFTVAVVIGGAELYRNDRRQLYVFANGRRVQDFSLIQAMEYGAQGWFPNGVHPVGAVYVDIDPSLADFNIHPAKREVRFRDPGAIHHAISGGVKNFFHSYFLRTSRKETQAEEGSAQREGEFNFSNKNFETKHNQDGHDNFTNNNSRTGGSTPHEPEVRHLRESSFENNNSPSRITDNFITESMRRRENSFTSESSVVYGNMRYAGRVFGLFILIEWGDKLYIIDQHAAHERILYNRFLEEPVPKQELLAPIPFTTQSAEEDAFLETKKKELSRLGVDIVKDGDGWNIEALPAGWKMGDAETVKEILELSEAGEDMAEQWAATVCCRAAIKDGDYPDDETAFSLGREALKLPEPRCPHGRPIWTEISKKALFRAVRRE

SEQ ID NO: 59221 - DNA, 537 bp, Unknown
  Obtained from environmental sample
  misc_feature (1)..(537): n is a, c, g, or t
atgaaaatactgttagacgcaatccgaaagaaaggcgtttatagggaaaaaacaaaagactgggacatagacttgataatccaatccagccagttacacgacataggaaaaatctctattgaagacaagatattaaaaaaacccggcaggcttgatgaagatgaatttaacgaaatgaaaaagcacgctatattcggagagcaaataataataaaaattgaatccatgacaaaagaaagcgaatttttggaatacgcaagaattctagccgtaagccaccatgaaaaatgggacggcacaggttacccgcacgggttaaaggaagatgaaatcccattattgggacgcatcatggcgatagccgacgtatacgacgcgcttgtttccgcaagatcatacaaaaagccgtttacgcacgaagaagccgtaaaaataatgacagacagcaaaggaaaacaatttgacccctgccttattgatatgtttctggaagtttctgataattttaaaaaaactattcccggcgaacagccctaa

SEQ ID NO: 59222 - protein, 178 aa, Unknown
  Obtained from environmental sample
  DOMAIN (13)...(127): HD domain
  misc_feature (1)..(178): Xaa is any amino acid
MKILLDAIRKKGVYREKTKDWDIDLIIQSSQLHDIGKISIEDKILKKPGRLDEDEFNEMKKHAIFGEQIIIKIESMTKESEFLEYARILAVSHHEKWDGTGYPHGLKEDEIPLLGRIMAIADVYDALVSARSYKKPFTHEEAVKIMTDSKGKQFDPCLIDMFLEVSDNFKKTIPGEQP

SEQ ID NO: 59223 - DNA, 2418 bp, Unknown
  Obtained from environmental sample
  misc_feature (1)..(2418): n is a, c, g, or t
atgccgttagatagaagagtaagcaccggaatgcccggtcttgatcaggcaattgaccttcttaggttaggcgataatgtggtttggcaggtacagtccatagaagattatcttcatgttttgcgtccgtatatacgccaggcaaaacaggacaagcgcaggcttgtttatttccgtttcggaaaccatgcgcaattaatggcggatgacgaaccttccgttatgtataaattggacacttccgaaggttttgagttattcgcccttaaagtccatgatattatcgaccgcgagggactaaaggctttttatgtgtttgactgcctgagcgacctgcttgaaagctggagctccgacatgatggttggcaattttttccgtattacatgcccgttcctgttcatccttgacacgctggcatatttcgccatcatcagaggctcccttacccatgacacgattgcccgcatacgtgaaactacgcagttattaatggacgtgtacaatgttgacaataaattttatattcatcctctccaggtttgggaaagatattctcccacgatgttttttccacatctgattaaaggcgacgaggctgttaccattacatcaagcgcagacgcggcgactttattttcacgtgtcagcaggggcggacagcccagggattattggcagattaagcttgatcacgcgcgttcatccnttagcaggggcgaaggctcccaggaagagatgaagaagatgcttacaggctggattatcggcaaggaattgcgcataacaagccttattgacaagtatttttcgctcagggatattcttgacattgcggagagggaaataggaacgggatttatcggcggaaaaagcgtcgggatgcttcttgccagaaaaattctggagaaagaagccggggacgttatgcgaaatcattgggagccgcacgactcgttttatctgggagcggatattttctacacttacattgtacataacgggctgtgggatttgcggattaagcaaaaaacagccgagggatattttacggtcgcaaaggaactgcaggaaaaaatgcgcaagggtaaatttcccgatattatcagggaacagtttatacagatgcttgaacatttcgggcaatcacccattatagtccgctccagttcactgcgcgaggataatttcggcaatgcgtttgccggcaaatacgaaagcgtcttctgcgccaatcagggcacgcctgaggaacgttatgccgcatttgaacaggcggttcgcaccgtctacgccagcaccatgaacgacgacgccctctcttaccgtcagcgccgcggccttaccaatcaggatgagcagatggctattcttgttcagcgcgtctcaggcaaccattacgacgaattgtttttcccgcacattgccggcgtcgggaattccatcaatctgtatgtatgggacaaatcaatgaatccggaagccggtatgctgcgcattgtattcggtctggggacgcgggctgtagaccgcgtttcaggcgattacgcgaaaataattcctttagattgcccgaacaagggcccccccgtcagttacggcgatgaaaaaaaattttcgcagcacaaggccgatgtccttgatctgcacaataacaaattgtcggaagcgcctctggataaactggccgacggtgatttgaaaaccgacaaaagcatttttttcagcgtggataccgcggcaataaaccgtctgcgggaacgcgggataaagtatgattcacccccccgaatccctgatttcaaaaaactgctcaacgaaacggggttccccgaatttatacaaacagtgctttcaacattgagcacggcctataactatccggttgatattgaatttaccgtcaattttgaccccaacggcgagttccggtttaacctgctgcaatgccgccccctgcaaacaaaggggcttggcagggttatggaagccccgcatccgaaacaggagcagatctttttctcctccgccggggactttatgggcggcaacatcaggctgcatttcgattacgttgtttttgttaaagcgacggaataccttgcgctgaccgatcaggataaatatcaggcggcgcgcgcaatcggcgttatcaatcaaaagctgaaagacaaaacagttttattgatggggccgggccggtgggggacgactacgccgtccctgggggttccggttcacttcagcgaattgtgcaacatggccgccctgtgcgaagtatcgtatccaaaagcaggcatagtgccggaactgtcttttggcagccacttttttcaggacatcgtggaatccgatattttttacgccgctgttttgacgggaacccggcatcgtttcgtcccatcaatgctgcgataa

SEQ ID NO: 59224 - protein, 805 aa, Unknown
  Obtained from environmental sample
  misc_feature (1)..(805): Xaa is any amino acid
MPLDRRVSTGMPGLDQAIDLLRLGDNVVWQVQSIEDYLHVLRPYIRQAKQDKRRLVYFRFGNHAQLMADDEPSVMYKLDTSEGFELFALKVHDIIDREGLKAFYVFDCLSDLLESWSSDMMVGNFFRITCPFLFILDTLAYFAIIRGSLTHDTIARIRETTQLLMDVYNVDNKFYIHPLQVWERYSPTMFFPHLIKGDEAVTITSSADAATLFSRVSRGGQPRDYWQIKLDHARSSXSRGEGSQEEMKKMLTGWIIGKELRITSLIDKYFSLRDILDIAEREIGTGFIGGKSVGMLLARKILEKEAGDVMRNHWEPHDSFYLGADIFYTYIVHNGLWDLRIKQKTAEGYFTVAKELQEKMRKGKFPDIIREQFIQMLEHFGQSPIIVRSSSLREDNFGNAFAGKYESVFCANQGTPEERYAAFEQAVRTVYASTMNDDALSYRQRRGLTNQDEQMAILVQRVSGNHYDELFFPHIAGVGNSINLYVWDKSMNPEAGMLRIVFGLGTRAVDRVSGDYAKIIPLDCPNKGPPVSYGDEKKFSQHKADVLDLHNNKLSEAPLDKLADGDLKTDKSIFFSVDTAAINRLRERGIKYDSPPRIPDFKKLLNETGFPEFIQTVLSTLSTAYNYPVDIEFTVNFDPNGEFRFNLLQCRPLQTKGLGRVMEAPHPKQEQIFFSSAGDFMGGNIRLHFDYVVFVKATEYLALTDQDKYQAARAIGVINQKLKDKTVLLMGPGRWGTTTPSLGVPVHFSELCNMAALCEVSYPKAGIVPELSFGSHFFQDIVESDIFYAAVLTGTRHRFVPSMLR

SEQ ID NO: 59225 - DNA, 495 bp, Unknown
  Obtained from environmental sample
  misc_feature (1)..(495): n is a, c, g, or t
atggggaagtactataaatatgatactgaacaacatacgcaactgtatcttgcggcatctttgcacgatctgggtaaattggcggttcccattgagattctggaaaaacccggtaaacttactgatgaagaatttaaaatcatcaaagaacatgttcgcctaacgtgggaacttcttaatgaagtcgaaggattcgagactatttgcaaatggtcatccgagcatcatgaaaaacttgacggcagcggttacccctttggaaaaaaagcttctgaactggattttaattcccgtttgatgatgtgtctggacttatatcaggcgataagcgaggaaagaccctaccaccccagacgcaatcacgcggacacgatgcagatactccatgaaatggttgatacgggaaaaatagacggcgatattgtcaaagacattgatgttgctcttgcaccttatgacggtaatgatttaccgtcgccgggtagtgataaatag

SEQ ID NO: 59226 - protein, 164 aa, Unknown
  Obtained from environmental sample
  DOMAIN (9)...(109): HD domain
  misc_feature (1)..(164): Xaa is any amino acid
MGKYYKYDTEQHTQLYLAASLHDLGKLAVPIEILEKPGKLTDEEFKIIKEHVRLTWELLNEVEGFETICKWSSEHHEKLDGSGYPFGKKASELDFNSRLMMCLDLYQAISEERPYHPRRNHADTMQILHEMVDTGKIDGDIVKDIDVALAPYDGNDLPSPGSDK

SEQ ID NO: 59227 - DNA, 1506 bp, Unknown
  Obtained from environmental sample
  misc_feature (1)..(1506): n is a, c, g, or t
atggaaacaacggaaaaacaaaatttgcaaaaacgctcattccacattgacgggatgttttgcgtgaattgtcagaacattattgaaaaagaactgaaaaatacggagggtgtcaaaaaggcggcggtaaattaccacaccggacatgcggttattacttatgatgaggcaataatcggctttgataaaatttcggcggtaattgaaagtctgggttacaagacattggaagacagcgggaagaatcaaactttgcaaaataaaacaatcccgcaaatagccggcgctcttataattatcctcgcgctgtttatgctgatgcgtacgttcacaacaagcaatcttgccgcagccttcccgcttgcccgtgaaggcatgagttacgcaatgttaattattatcggtcttcttacaagcgtccactgcgtcgccatgtgcggggggataaatctttcgcaaacgctaatcaaaagaaaagagggtaataaacaaataacaattaccagtgaacagataacaaatagagaaaaaagtatttattctttgcttcttccgggggttctctacaatggggggcggcttgtttcttatacggcggttgggattcttgtcggcgctttggggtcggcggttactttatcggggcggtttcagggaattgtacaactgattgccggggtcttcatggtgattatggggattaatatgctgggactgtttcctttcttgcggcgtttcattcccgatatacctcaaatcttttcaaaaaaaattgacgaacaaaaaattgggcgtggccctttggttgtcggtttcctgaacggctttatgccctgcggccccttacaggcgatgcaggtttacgccctctctaccggaagccccgtaaagggcggcatttccatgttcctgttttgcgtcggcacaattccgctgatgttcgctctgggagctgtaagcggattgttaagcggcgcaaaggggcgcgtattctcacgccgcgttatgcaaacgggagctgttcttgtaaccgcgcttggacttgtaatgttctcctacggctggaatctttcgggattaaccaattcgcctgacaagacggcttccgcaaaacccgccggcgctcctgaaaaaagcgttcaagacagacagcaaaaacaggtcgctgaaaaaacgcccaatcccggttcgcgggacgcgggcaagtttgagcctgtaattgaaaacggcgtacagattgttaattcaacattgcggtcaaaccgctatccggcgataacggtacagcagggcattccggtacgatggacaatcaacgccccgcccggcagtataacaggctgtaattacagcgtaatcctttacgaatacggcattcaatatgattttaagccgggtgaaaatgtaattgagtttactcccgaaaaaaccggcaagttcttatattcctgctggatgggcatgattagaagcgtcattaccgtagtcgccgaaaaagaaggataa

SEQ ID NO: 59228 - protein, 501 aa, Unknown
  Obtained from environmental sample
  DOMAIN (165)...(351): Cytochrome C biogenesis protein transmembrane region
  misc_feature (1)..(501): Xaa is any amino acid
METTEKQNLQKRSFHIDGMFCVNCQNIIEKELKNTEGVKKAAVNYHTGHAVITYDEAIIGFDKISAVIESLGYKTLEDSGKNQTLQNKTIPQIAGALIIILALFMLMRTFTTSNLAAAFPLAREGMSYAMLIIIGLLTSVHCVAMCGGINLSQTLIKRKEGNKQITITSEQITNREKSIYSLLLPGVLYNGGRLVSYTAVGILVGALGSAVTLSGRFQGIVQLIAGVFMVIMGINMLGLFPFLRRFIPDIPQIFSKKIDEQKIGRGPLVVGFLNGFMPCGPLQAMQVYALSTGSPVKGGISMFLFCVGTIPLMFALGAVSGLLSGAKGRVFSRRVMQTGAVLVTALGLVMFSYGWNLSGLTNSPDKTASAKPAGAPEKSVQDRQQKQVAEKTPNPGSRDAGKFEPVIENGVQIVNSTLRSNRYPAITVQQGIPVRWTINAPPGSITGCNYSVILYEYGIQYDFKPGENVIEFTPEKTGKFLYSCWMGMIRSVITVVAEKEG

SEQ ID NO: 59229 - DNA, 468 bp, Unknown
  Obtained from environmental sample
  misc_feature (1)..(468): n is a, c, g, or t
atgaataaagaaaccataaccgtaggcggaatgcactgcgccgcatgttccgcccgcgttgaaaaggcgctccgtaaattggaaggcgttcaaagcgcagtcgtaaaccttgctacggaaaaagcgacagtggtttacgactctaaagcattgcgcatttcggtaataaaagaagcgatcatcaacgccggttacgaagtcatagaaacttcgataaacgcgctagacgaagataagcttcgcaaagaaaaagaaataaagctcttatggacaaaatttataatcgcggcttcattggcccttcccctgctctatatcgctatggcccccatgattaaatggggtttctctgcccttccccaaatttcttgcccccatgcactttcccctgccttacgccattgtccagctcgcgcttgtcatcccaatcataatcgcaggcaacaggttttataccgtcggttttaa

SEQ ID NO: 59230 - protein, 155 aa, Unknown
  Obtained from environmental sample
  DOMAIN (5)...(69): Heavy-metal-associated domain
  misc_feature (1)..(155): Xaa is any amino acid
MNKETITVGGMHCAACSARVEKALRKLEGVQSAVVNLATEKATVVYDSKALRISVIKEAIINAGYEVIETSINALDEDKLRKEKEIKLLWTKFIIAASLALPLLYIAMAPMIKWGFSALPQISCPHALSPALRHCPARACHPNHNRRQQVLYRRF

SEQ ID NO: 59231 - DNA, 558 bp, Unknown
  Obtained from environmental sample
  misc_feature (1)..(558): n is a, c, g, or t
gtgggtttacggtttcaggttctatttcactcccctcgccggggttcttttcgcctttccctcacggtacttctgcgctatcggtcgtatccagtatttagccttggatcgtggtcgacccggattccggcagggtttctcgtgccccgccgtactcaggattccgctacctcacagtcatcatttcaaatacggggctttcaccctctttggcaggctttcccaaaacctttctcctatcatgactacaaagatatcgcggtccttcaaccccgctctttcgagcggtttaggctcctccgatttcgctcgccgctactttcggaatctcgcatcttgcgatgcttatttgatttctcttccccggggtacttagatggttcagttcccccagtttcgcttccgcaacctatttattcaattacggataccaagctcacgcttggtgggttaccccattcggcaatcaacggatcaatggatatgtgctcctccccgtcgcttttcgcagcttgtcacggccttcctcgccttgatacgccaaggcatccgccataa

SEQ ID NO: 59232 - protein, 185 aa, Unknown
  Obtained from environmental sample
  misc_feature (1)..(185): Xaa is any amino acid
MGLRFQVLFHSPRRGSFRLSLTVLLRYRSYPVFSLGSWSTRIPAGFLVPRRTQDSATSQSSFQIRGFHPLWQAFPKPFSYHDYKDIAVLQPRSFERFRLLRFRSPLLSESRILRCLFDFSSPGYLDGSVPPVSLPQPIYSITDTKLTLGGLPHSAINGSMDMCSSPSLFAACHGLPRLDTPRHPP

SEQ ID NO: 59233 - DNA, 378 bp, Unknown
  Obtained from environmental sample
  misc_feature (1)..(378): n is a, c, g, or t
ttgtgggtttacggtttcaggttctatttcactcccctcgccggggttcttttcgcctttccctcacggtacttctgcgctatcggtcgtatccagtatttagccttggatcgtggtcgacccggattccggcagggtttctcgtgccccgccgtactcaggattccgctacctcacagtcatcatttcaaatacggggctttcaccctctttggcaggctttcccaaaacctttctcctatcatgactacaaagatatcgcggtccttcaaccccgctctttcgagcggtttaggctcctccgatttcgctcgccgctactttcggaatctcgcatcttgcgatgcttatttgatttctcttccccggggtacttag

SEQ ID NO: 59234 - protein, 125 aa, Unknown
  Obtained from environmental sample
  misc_feature (1)..(125): Xaa is any amino acid
MWVYGFRFYFTPLAGVLFAFPSRYFCAIGRIQYLALDRGRPGFRQGFSCPAVLRIPLPHSHHFKYGAFTLFGRLSQNLSPIMTTKISRSFNPALSSGLGSSDFARRYFRNLASCDAYLISLPRGT

SEQ ID NO: 59235 - DNA, 321 bp, Unknown
  Obtained from environmental sample
  misc_feature (1)..(321): n is a, c, g, or t
gtgacggcgcttccacccgctaccgccagatcactaagacctactttcgtacctgctcggcctgtcggcctcgcagtcaagcccccttgtgcctttacactcgcgcgccgatttccaaccggcgcgaggggaccttcgcgcacctccgttactctttgggaggcgaccgccccagtcaaactgcctgcctaccgctgtccggagcccagcttcatgggccccgttagaaacctaatcagacaagggtggtatttcaccagcggctccgcacaggctaacgcccatgcctcgcagcctcccacctatcctacacatgcctga

SEQ ID NO: 59236 - protein, 106 aa, Unknown
  Obtained from environmental sample
  misc_feature (1)..(106): Xaa is any amino acid
MTALPPATARSLRPTFVPARPVGLAVKPPCAFTLARRFPTGARGPSRTSVTLWEATAPVKLPAYRCPEPSFMGPVRNLIRQGWYFTSGSAQANAHASQPPTYPTHA

SEQ ID NO: 59237 - DNA, 303 bp, Unknown
  Obtained from environmental sample
  misc_feature (1)..(303): n is a, c, g, or t
gtgccaaaccttcccgtcgatgtgaactcttggggaagatcagcctgttatccccggagtaccttttatccgttaagtgacggcgcttccacccgctaccgccagatcactaagacctactttcgtacctgctcggcctgtcggcctcgcagtcaagcccccttgtgcctttacactcgcgcgccgatttccaaccggcgcgaggggaccttcgcgcacctccgttactctttgggaggcgaccgccccagtcaaactgcctgcctaccgctgtccggagcccagcttcatgggccccgttag

SEQ ID NO: 59238 - protein, 100 aa, Unknown
  Obtained from environmental sample
  misc_feature (1)..(100): Xaa is any amino acid
MPNLPVDVNSWGRSACYPRSTFYPLSDGASTRYRQITKTYFRTCSACRPRSQAPLCLYTRAPISNRREGTFAHLRYSLGGDRPSQTACLPLSGAQLHGPR

SEQ ID NO: 59239 - DNA, 369 bp, Unknown
  Obtained from environmental sample
  misc_feature (1)..(369): n is a, c, g, or t
atggtttatcttgaggtgggcttcccacttagatgccttcagcggttatcccttcccggcgtagctacccagcgcgtgcccttggcaggacaactggcacaccagcggccggtccatttcggtcctctcgtactaaaaacagctcctctcaaccatccttcgcccatggcagatagggaccgaactgtctcgcgacgttctgaacccagctcacgtaccgctttaattggcgaacagccaaacccttgggacctgcttcagccccaggatgcgatgagccgacatcgaggtgccaaaccttcccgtcgatgtgaactcttggggaagatcagcctgttatccccggagtaccttttatccgttaagtga

SEQ ID NO: 59240 - protein, 122 aa, Unknown
  Obtained from environmental sample
  misc_feature (1)..(122): Xaa is any amino acid
MVYLEVGFPLRCLQRLSLPGVATQRVPLAGQLAHQRPVHFGPLVLKTAPLNHPSPMADRDRTVSRRSEPSSRTALIGEQPNPWDLLQPQDAMSRHRGAKPSRRCELLGKISLLSPEYLLSVK

SEQ ID NO: 59241 - DNA, 1782 bp, Unknown
  Obtained from environmental sample
  misc_feature (1)..(1782): n is a, c, g, or t
atgacaatatttaaaagaagcctgcttactctgggagcggcggcgcttgttttttcagcggttcttgtagtcacttccctgatttttatgaattctttatattacgaaataaatatgcttggtcttaagaaaactgcaaagacccttatgaccgcaatcgggcaggagcgcataacagaattttttttaaatgacgaaactaatattgattttccagtgaacgagtcgggcgattaccgtcttactcttattgatccttccggttctgtgttatgggattcccatgtaaaatacggccttgttaaccatattgatcgtaaagaaatagcggcggctctggaagggaaagaagaaagcgcacggcgtgattcaattagtaccagcataaagcggatttattttgcgctgccggtattttacgacaataaagtaatcggtgtattcaggctttccgttactgttcctgaattcggaatgcgtatttcttccattgtttttccttttattaccttttcgtttattatggcagtggctgttttttgggctgtatacgcaatatccagttctctttcaacttcaatcggcagactggtagatattacgcaggcgggcgcgttgttattgtcaggtcccgaagcgggagaaccggtctcgccggaattcatgagtttggaaaaagcaataagggcaatgacatttgagcttcatttacgtcttgaacaggcaaaggcagaaggcgcgcggctggaagcgatacttaacggaatgtcagaggcggtttttgcgatggattcttcacttaaacttcatctggtaaatccgcgcgctatggagctttttaatattagaggcagaaatataaataaattgtccttgcttgaagcaactcattctgcggaactggaagacgccgcaaaaaaagcgctttcgactaacagtactttggaaatggaacttaccctgcgcagtggcgcggaacaacagtttcaggtttatgtttcccctctttctggcgtaaaaaccggcgtaatcatcgttttgcaagaagttacgcgccttgtaaaattggaaaggatacgcaaggattttgtcgctaatgtgtctcatgaacttcgcaccccgattcaaattatcaaagggttttcagaaaccttgcttgatacggtttccgactccgacagcaaaaatgaaaagaaacagataattcactttatggagattattcaaaaaaacgctaacacaatggaaaaccttaccaacgatctgttaattctcgccgatttggaaaacggatcatctaacgtccgcgagcctgaagaactgacaattatgtcccttattgacgaagcggtttcttccgttgaatcgcaggcaaaaagaaaacaaattgagataaatgttgattgtcccgaagatttaagggcgaagcttttcggatcttttattatacaggcgttgattaatcttatagacaacgcgataaaatattcccgggagaaatctgaaatttgggttaaagcgtacaatgaaaacggagaaatgttattggaagtgcgggataagggaataggaattccgcatgagtatcaggaacgcgtctttgaaagattttaccgtgttgaccgcgcgagaagccgcgaagccggaggcactgggcttgggctttccattgtccggcatatcgccctgcttcacaaggggaaagccgaagtggaaagccatgcgggggaagggtctgttttcaggattaggataccggatcaaataacaagtaacaggtaa

SEQ ID NO: 59242 - protein, 593 aa, Unknown
  Obtained from environmental sample
  SIGNAL (1)...(23)
  DOMAIN (247)...(350): PAS fold
  misc_feature (1)..(593): Xaa is any amino acid
MTIFKRSLLTLGAAALVFSAVLVVTSLIFMNSLYYEINMLGLKKTAKTLMTAIGQERITEFFLNDETNIDFPVNESGDYRLTLIDPSGSVLWDSHVKYGLVNHIDRKEIAAALEGKEESARRDSISTSIKRIYFALPVFYDNKVIGVFRLSVTVPEFGMRISSIVFPFITFSFIMAVAVFWAVYAISSSLSTSIGRLVDITQAGALLLSGPEAGEPVSPEFMSLEKAIRAMTFELHLRLEQAKAEGARLEAILNGMSEAVFAMDSSLKLHLVNPRAMELFNIRGRNINKLSLLEATHSAELEDAAKKALSTNSTLEMELTLRSGAEQQFQVYVSPLSGVKTGVIIVLQEVTRLVKLERIRKDFVANVSHELRTPIQIIKGFSETLLDTVSDSDSKNEKKQIIHFMEIIQKNANTMENLTNDLLILADLENGSSNVREPEELTIMSLIDEAVSSVESQAKRKQIEINVDCPEDLRAKLFGSFIIQALINLIDNAIKYSREKSEIWVKAYNENGEMLLEVRDKGIGIPHEYQERVFERFYRVDRARSREAGGTGLGLSIVRHIALLHKGKAEVESHAGEGSVFRIRIPDQITSNR

SEQ ID NO: 59243 - DNA, 696 bp, Unknown
  Obtained from environmental sample
  misc_feature (1)..(696): n is a, c, g, or t
atgactaaagctgtaattcttataatagaagacgatactgaaattcaggaattattgtttcattccttttccaaagaaggctggaaactcatacaggtaaaaaccggagaagaaggtttaaaaatactaaaaacaaaaaaagtaaattgcatccttttggatattatgctgccgggaacagacggtttgaatatactgaaaaagataaaagacattgaacaatgccgcaatattccggttatcatgactaccgcaaagggtgaagaagccgatattgtcgccggccttgaattgggggcggatgactatgttgtaaagccttacagccccaaggtgttaattgcaagaatacgggcgggtcttcgtcggcaggaagaaagcggcgttaaaaaaacagacactatatggcagcagggagaaattaaacttgacgcagcccgccatattgtcttttgcggcgacaaacagcttgaccttttcgccaccgagtttgccctgcttaaacattttttgtcaaatccggaaattgttttttcgcgtaaccagattatcgaggcaatcagggggccggattaccctgttaccgaccgttctgttgatgtgcagatacttggtttgcggaaaaaacttggaaaagccggtgacatgatcgagaccatccgcggcgttggttaccgcctaaggatacaggagtaa

SEQ ID NO: 59244 - protein, 231 aa, Unknown
  Obtained from environmental sample
  DOMAIN (154)...(227): Transcriptional regulatory protein, C terminal
  misc_feature (1)..(231): Xaa is any amino acid
MTKAVILIIEDDTEIQELLFHSFSKEGWKLIQVKTGEEGLKILKTKKVNCILLDIMLPGTDGLNILKKIKDIEQCRNIPVIMTTAKGEEADIVAGLELGADDYVVKPYSPKVLIARIRAGLRRQEESGVKKTDTIWQQGEIKLDAARHIVFCGDKQLDLFATEFALLKHFLSNPEIVFSRNQIIEAIRGPDYPVTDRSVDVQILGLRKKLGKAGDMIETIRGVGYRLRIQE

SEQ ID NO: 59245 - DNA, 603 bp, Unknown
  Obtained from environmental sample
  misc_feature (1)..(603): n is a, c, g, or t
atggcggcaagggtggaaggaaatcttggcaaggcgctttccgcgctaagaacgcgtaacgcggagcttgcgaacgaggtacgcgcggacgattccgccgtggacgcccttcaattacagattgaggacgatgccgcgattgttatcgctacacagcagcctgtggcaagcgacttgcgcgagcttgtttcggtgtttaagcttacaagcaatatcgagagggtaggggatcacgccgtgcatctcgcgcgcgccgcgaaaaaactctcgaagacgggagattccttccacgcacaggaacatcttgagaaaatggcggagactgggcagataatgcttcgcgccgctatttccgcttttatgtcaaaagacgcgcaggcgtccagggaagcggcggcaatggacaatattatcaacgcggagcataaaatcattacagaggatatattaaaagtgatgaaaaagaaccctgaacttgttaaagaggcgcttcagatacttcatacttccaatcagcttgaacggcttggtgatcatattacaaatatatgcgaagctgttatttatatgatagaaggaaaacatgaggaattaaatgactaa

SEQ ID NO: 59246 - protein, 200 aa, Unknown
  Obtained from environmental sample
  DOMAIN (102)...(187): PhoU family
  misc_feature (1)..(200): Xaa is any amino acid
MAARVEGNLGKALSALRTRNAELANEVRADDSAVDALQLQIEDDAAIVIATQQPVASDLRELVSVFKLTSNIERVGDHAVHLARAAKKLSKTGDSFHAQEHLEKMAETGQIMLRAAISAFMSKDAQASREAAAMDNIINAEHKIITEDILKVMKKNPELVKEALQILHTSNQLERLGDHITNICEAVIYMIEGKHEELND

SEQ ID NO: 59247 - DNA, 1236 bp, Unknown
  Obtained from environmental sample
  misc_feature (1)..(1236): n is a, c, g, or t
gtgaaatcaacaggtattctcttcctggcggcggcattattcattttctcgtgtaataccaagccgccgccgtcatcgccgcagtcggttgagaatactcctgtttccgcgcccaaaccaaagcctgtccgtcctccggctgaatcatcacctaacaaaaaacgcctgttaaattatctgtctgatatgtacgggaaatatattatttccggtcagatggacgcatcatggactaccaacgaagatatagacatgatatcccgcgtttattctgacacgggaaaatatcccgccattaaaggttttgattttatcatgcttcccgtaacttttatgccgtacatgaacggaagggaacagattaacgaagccgttgaatggtgggaaggaaagaataacgataagatattattgccgaacaaaccgtcaattcacggcattgtcacattctgctggcactggcggaccggcgataaagatgaattttattccaataaaaccaatttccgtattccgtggaaaaacaatcaactggatacggaaagcgacgctttcaaggaaatactaaaagaccttgacagggtggctttgcgttttcaaactcttaaagaaaaagatattcccgtattatggcggcccttgcatgaagcttcgggcggctggttctggtggggagcaagcggctcaaaaccgtacatcgctctgtgggaatttatgtgggattatttaacctacgaaaaaggattggataatcttatttgggtttggaacggggacagtgaaagctggtttcccgatccgaaaaccgttgatattataggcagggatatttacgcggaaagttattcttcgttaaaagatcagtttgaaaggacaaagaagatgggcgataaagaatatattgtcgccctcagtgaaaacggaaaaatccccgatcctgataactgtgtaaaagacggagccatgtggtcatggtttatgacatggaatgatagccgcagaacagtcggcgaatcgcataaggataatttctttacgggggaatttcacaataaaaacgcgcacaagaagaaggtatacagccacccgtcggtaatcactttggataaactgccggatttaccaataccgtttggattacgacaaggagtgtatatgaaaaaaatattactatttttctttttcctgtttgggagtgagggattttacattaagaattcacacaaagaacactaa

SEQ ID NO: 59248 - protein, 411 aa, Unknown
  Obtained from environmental sample
  SIGNAL (1)...(20)
  DOMAIN (43)...(370): Glycosyl hydrolase family 26
  misc_feature (1)..(411): Xaa is any amino acid
MKSTGILFLAAALFIFSCNTKPPPSSPQSVENTPVSAPKPKPVRPPAESSPNKKRLLNYLSDMYGKYIISGQMDASWTTNEDIDMISRVYSDTGKYPAIKGFDFIMLPVTFMPYMNGREQINEAVEWWEGKNNDKILLPNKPSIHGIVTFCWHWRTGDKDEFYSNKTNFRIPWKNNQLDTESDAFKEILKDLDRVALRFQTLKEKDIPVLWRPLHEASGGWFWWGASGSKPYIALWEFMWDYLTYEKGLDNLIWVWNGDSESWFPDPKTVDIIGRDIYAESYSSLKDQFERTKKMGDKEYIVALSENGKIPDPDNCVKDGAMWSWFMTWNDSRRTVGESHKDNFFTGEFHNKNAHKKKVYSHPSVITLDKLPDLPIPFGLRQGVYMKKILLFFFFLFGSEGFYIKNSHKEH

SEQ ID NO: 59249 - DNA, 540 bp, Unknown
  Obtained from environmental sample
  misc_feature (1)..(540): n is a, c, g, or t
gtgggactacaggccgcagaccttgaaaaacgcccttctgaattttccggcggccagcgccagcgcatttccatcgcccgcgcccttttaatggagccggagcttttaatctgcgacgaggtagtctccgccctggacgtttctgttcaggggcagattcttaatttgttatacgatatccgcgaaaagaggaatatgtcctttttgttcatagcgcacgatttaaaggttgcctgctatttctgcgaccgcataggcgtaatgtaccgaggagaattgatggaagaagcgcctgccgctaatttgtacaaagagggactgcatccttatacggagcttttattttcgtcggcgtcaaaaattgatgagggggatattcccgcagcggtaacgaaagacccggtaatggcgaagaatgttacagcgggctgtccctttgcgcctaggtgcataagcgcgagcgagcggtgttttagggagcatcctgagttgacgcaggttggcgaagggcacttgattcggtgttttaattttaaataa

SEQ ID NO: 59250 - protein, 179 aa, Unknown
  Obtained from environmental sample
  DOMAIN (1)...(91): ABC transporter
  misc_feature (1)..(179): Xaa is any amino acid
MGLQAADLEKRPSEFSGGQRQRISIARALLMEPELLICDEVVSALDVSVQGQILNLLYDIREKRNMSFLFIAHDLKVACYFCDRIGVMYRGELMEEAPAANLYKEGLHPYTELLFSSASKIDEGDIPAAVTKDPVMAKNVTAGCPFAPRCISASERCFREHPELTQVGEGHLIRCFNFK

SEQ ID NO: 59251 - DNA, 1164 bp, Unknown
  Obtained from environmental sample
  misc_feature (1)..(1164): n is a, c, g, or t
atggacgatcaattttttactgtaaccagcgaagacctttcatgtgaagccagaacgggaaagatggctcttgcccacggggaagttgaaactcctgtctttatgccggtcggaaccaacggtacggtaaaagcccttacaagggaagacctcgcggaaataggctttcaaatcatcctgtcaaatacctaccacttgtacttaaggccgggaatggatgttattgcctccggcggaggcggcttgcacaagttttctggatgggacaggaacattcttaccgattcggggggctttcaggttttttccctggccccgttcagaaaaattacagacgaaggaatcaaattccgttcccacattgacggttcgtatcattttcttagcgcggaaaatgtggttgagcttcaggcagttttgggaagcgatatacagatgcagcttgatgtgtgcacaagttggggtgtttcaagaaaagaagccgagaaagcccttttcaccacatcgctttggatggataaggcaaataaaacctggaaacttgaacaagacaaaggataccagggccagttttttcccattgtccagggaaacttttttaaggatctaaggaccgaaagcagccggcgtgtcattgaaactaaaccgccaggcatcgctatcggcgggctttccgtgggagagccggaagaggtcttctttgaataccttgcctttaccgcttcgctgctgccgaagaacctgcccaggtacgttatgggcattggaacgcctgaatacatactctttgccattgaaaacggcattgatatgtttgactgcgtttttcctacaagaaacgcgcgcaacggcaacgtgcttaccagaagaggctcgtttgccttaaaaaaggccgaaaaccgccttaactttatgccgatagataaagagtgcggttgtaaagtctgccgcacgtattcaagggcttatttaaggcacctgtttaagacacaggaaattctttgttcgattctggcgagttttcataacttgtattttattaacgagcttgttgcaaatgcccgaaaggcgatcaaagaaaacagatttttggagttcaagaaagattttttggcaaagtataatgaaggaatagggaatagggagtggggagtggagaaatga

SEQ ID NO: 59252 - protein, 387 aa, Unknown
  Obtained from environmental sample
  DOMAIN (131)...(372): Queuine tRNA-ribosyltransferase
  misc_feature (1)..(387): Xaa is any amino acid
MDDQFFTVTSEDLSCEARTGKMALAHGEVETPVFMPVGTNGTVKALTREDLAEIGFQIILSNTYHLYLRPGMDVIASGGGGLHKFSGWDRNILTDSGGFQVFSLAPFRKITDEGIKFRSHIDGSYHFLSAENVVELQAVLGSDIQMQLDVCTSWGVSRKEAEKALFTTSLWMDKANKTWKLEQDKGYQGQFFPIVQGNFFKDLRTESSRRVIETKPPGIAIGGLSVGEPEEVFFEYLAFTASLLPKNLPRYVMGIGTPEYILFAIENGIDMFDCVFPTRNARNGNVLTRRGSFALKKAENRLNFMPIDKECGCKVCRTYSRAYLRHLFKTQEILCSILASFHNLYFINELVANARKAIKENRFLEFKKDFLAKYNEGIGNREWGVEK

SEQ ID NO: 59253 - DNA, 852 bp, Unknown
  Obtained from environmental sample
  misc_feature (1)..(852): n is a, c, g, or t
ttgggccgcgtcgcgccggaggaagaagcggacagtgttgcagactttctccttgattattacaacaaccgcagtcctagcgatgaaaacaaacgggaaattgttaacgccctgggagagacaggctcaaaagaaagtatttcttttctttccgccctgattaaggatgaggatgaaaggcctactctgcgcatggcggcccttgacgccatggcaaaaatcggggacgaagaagccatggacgtagttatagaggccgtttcgtcgcccgatcccaatgtgcgctcttccgcggttgcggcgctggctcccttttcgggggaggcggcggaaaacgctatattggacgcgttcagggattcttactaccgcacgcgcataggggcggcccaggccgcgggaaaacgccgccttgaaagcgcggttccttatttgcgctacagggctgaaaatgacgatgttcccaacgtaaaagacgaggcaataaaagctctgggcgcgattaacaacgaagaagcaatgggcatacttgattcgcttttttccgagcggaaaaattctgaccgcgtaaggataatggccgcggatatgcttctgcagaacaacgcggatgtttatggcccccgggtatttgccgaaatggaagacgctaagcttagaaaccagacagccctgtacaacgggtttgtaagaacaatgacaaccgcaaaagccccttctttggaaaccacggttctgcgtttaataaatggcgggggtgtaattgaaaaatcccttgccctggatctgatactgaacaacgaattccgccagttggaggaagtaatgcgctcgttgctggacgagaagtaa

SEQ ID NO: 59254 - protein, 283 aa, Unknown
  Obtained from environmental sample
  misc_feature (1)..(283): Xaa is any amino acid
MGRVAPEEEADSVADFLLDYYNNRSPSDENKREIVNALGETGSKESISFLSALIKDEDERPTLRMAALDAMAKIGDEEAMDVVIEAVSSPDPNVRSSAVAALAPFSGEAAENAILDAFRDSYYRTRIGAAQAAGKRRLESAVPYLRYRAENDDVPNVKDEAIKALGAINNEEAMGILDSLFSERKNSDRVRIMAADMLLQNNADVYGPRVFAEMEDAKLRNQTALYNGFVRTMTTAKAPSLETTVLRLINGGGVIEKSLALDLILNNEFRQLEEVMRSLLDEK

SEQ ID NO: 59255 - DNA, 696 bp, Unknown
  Obtained from environmental sample
  misc_feature (1)..(696): n is a, c, g, or t
atggtaaacgttgccggcattaaagccgcttttgaaaaaattgaatcgcagaaaagcgcgctcggcattgacgcggtagtttcaatggttgccggtcccggtatgacatgggtaaccggtctccacggcattaacgcctacctcaccctcggcctgccgtataacgactccgccaaatacattgacatgctgctgaaaggacaggttgacaacgcccgccttgccaaatttgccgagtattacaatctgctgttcaaatactccaataaaaacaccctgctcaccggcggctatgaccagcagctcggcgattatgcaatcggcaaaacggtgtttatccatcagggcaactggacggatccgactttcaaagatttgggtattacctttgaaatgggctatgttccccacgcgttccttgatgaaaccaccgacggcatttttgtcggagcgccttcatggtatattgttaacgcaaagtccaaaaatgttgaggaagccaaacaattcctcattgccatggccggaactctggaaggtcataactacatggtaaccaatgccggtatggttcccgccttcaaatcctgtacgctgaaaccagccggacaattttcaagagccgttcaggaatggtcaaccagggcaagatttacgcgtggcagcagaatgaaatgcccgacggctttggcatga

SEQ ID NO: 59256 - protein, 231 aa, Unknown
  Obtained from environmental sample
  misc_feature (1)..(231): Xaa is any amino acid
MVNVAGIKAAFEKIESQKSALGIDAVVSMVAGPGMTWVTGLHGINAYLTLGLPYNDSAKYIDMLLKGQVDNARLAKFAEYYNLLFKYSNKNTLLTGGYDQQLGDYAIGKTVFIHQGNWTDPTFKDLGITFEMGYVPHAFLDETTDGIFVGAPSWYIVNAKSKNVEEAKQFLIAMAGTLEGHNYMVTNAGMVPAFKSCTLKPAGQFSRAVQEWSTRARFTRGSRMKCPTALA

SEQ ID NO: 59257 - DNA, 924 bp, Unknown
  Obtained from environmental sample
  misc_feature (1)..(924): n is a, c, g, or t
atgggcaaggcaaagttcagggacataagcagaaggaacagccttttgttttttttatttttgttaccggctgttttcgctttctgcatggttattgtcatcccgtttatcatggggctttattattcgtttacaaactggaatgcgataaccggcacggcggtagaatgggtggggttaaaaaattattttgctgtaaaatcggatattacgttccttcactcatttttggttacggtagtttacgctgttttaaatattgttgtgcttaacatttgcgcttttttcatggcccttttggtaacaaacgatttgaaatttaaagggatttatcgggcggggttctttcttcccaacctgataggggggcttattttaggttatatttggcagttcatatttaataatgccataccggccttgggtaagtctatcgggtttacatggctctacgatcatcaattcctcgccgaccagtatttggcgctattggcgattgtaattgtcggcacatggcaatacgccgggtatattatgatgatctatgttgcgtcaattcagggtatccccgattcacttctggaagctgcggaaattgacggcgcgaattatttcaggaaattaagggctataatatttccgcttgtcgctccggcgttcactgtttcaatgttcctgacgcttataaattcgtttaagcagttcgacgtgaactattcgctgacggcgggagggccttccggcatgtttatgggcaaggcgcttatgacaaatgagtttctcgcgctgaacatttataatacggcgttttcctacaaccagcttgcccaggggcaggcgaaagcgattattttctttatcgtaattgccgttatttcaatgcttcaggtacgcgccaataaaaagagggagatagagatgtga

SEQ ID NO: 59258 - protein, 307 aa, Unknown
  Obtained from environmental sample
  SIGNAL (1)...(27)
  DOMAIN (72)...(305): Binding-protein-dependent transport system inner membrane component
  misc_feature (1)..(307): Xaa is any amino acid
MGKAKFRDISRRNSLLFFLFLLPAVFAFCMVIVIPFIMGLYYSFTNWNAITGTAVEWVGLKNYFAVKSDITFLHSFLVTVVYAVLNIVVLNICAFFMALLVTNDLKFKGIYRAGFFLPNLIGGLILGYIWQFIFNNAIPALGKSIGFTWLYDHQFLADQYLALLAIVIVGTWQYAGYIMMIYVASIQGIPDSLLEAAEIDGANYFRKLRAIIFPLVAPAFTVSMFLTLINSFKQFDVNYSLTAGGPSGMFMGKALMTNEFLALNIYNTAFSYNQLAQGQAKAIIFFIVIAVISMLQVRANKKREIEM

SEQ ID NO: 59259 - DNA, 789 bp, Unknown
  Obtained from environmental sample
  misc_feature (1)..(789): n is a, c, g, or t
gtggaaagcacctacggcgaccgccgccatgacaaaaccagcgacgctatggaaaaacttgcggagctggccaaacgcgccgtggagaccaggggaaggattatcattccctcgtttgccatagagcgtacccaggaactggtgtattatttccacctgcttgttgacgacgggataataccggaaatcccgatctatgtggattccccaatggcgactaacgcgacaacgattttccaggtacaccccgaatgttacgacgaggaaataatgaaagcctttatcaaacaccacaaaaacccctttggttttaacaatctccactttactaccagcgtccaggaatccaaggccctgaacgatgaaaaaggcccccttatcatcatctccgcggacgggatgtgcgaggccggacgtatacaacaccacctgatccacagcatacaggatcccaacacaaccattcttctcgtggggtacatggcggaaaacaccctgggccgcagaatacgcaaccgcgagagcgaggtaaaaatccacgggatgtggctcaagctaaaggcccatgtcgaacagataaacgcattcagcgcccatgctgattatgtggaaacggtagattggcttaacgaactggacagatcgcgcctaaaggggctttttatggttcacggcgaaaaaaaggcgcaggcggcgtttaaaaaatacctcgccgaacaagggtatgccaacacggagatagtcaagtacggaaaaacctacgaaatgcaggtaacagataataggtaa

SEQ ID NO: 59260 - protein, 262 aa, Unknown
  Obtained from environmental sample
  DOMAIN (184)...(228): RNA-metabolising metallo-beta-lactamase
  misc_feature (1)..(262): Xaa is any amino acid
MESTYGDRRHDKTSDAMEKLAELAKRAVETRGRIIIPSFAIERTQELVYYFHLLVDDGIIPEIPIYVDSPMATNATTIFQVHPECYDEEIMKAFIKHHKNPFGFNNLHFTTSVQESKALNDEKGPLIIISADGMCEAGRIQHHLIHSIQDPNTTILLVGYMAENTLGRRIRNRESEVKIHGMWLKLKAHVEQINAFSAHADYVETVDWLNELDRSRLKGLFMVHGEKKAQAAFKKYLAEQGYANTEIVKYGKTYEMQVTDNR

SEQ ID NO: 59261 - DNA, 849 bp, Unknown
  Obtained from environmental sample
  misc_feature (1)..(849): n is a, c, g, or t
atggacattatctattcattgattattgccgacaagcaatggggaagtaacggacgttacaattacctggaaatcgcccgcgcgatgctggctgatttatggcaatattgcgtacattctacatataaaaccctgctccttggcgactgggccagtaaaggtggcgataagggaaatcctgctcttgcggcaatccagatgaacgctacccgcccgtccgattttatcatcagccatcttaaggcgtataaggcgattgacagcgcccacaactggcaggaagtcatagacgctacttacggcgttattaaaggcgtctacgcggatgttaaagcaaaacatggcgtcagcaggggtttactgcctgatttcgttatcagaaatgatgccaaaactgcctgggtagttccggaagggcatgtacttgaagaagataccgacggatcatacgcatataattcatgccgtattccctggcgccttggcacagactatctgctctacggcggcaacaccacattagcgggctatgatatgtttgccgagactattcaaccgcttgataagttagctacagagatatatgaaaaatccgatttggacactttcggccctcttaccattacgggagacggtatttggaataccgataattgggatgagttttgggatgaccctcaatcatttaccgtcccattcctgataaccgcggcagccgccggcaacaaagacttggtcaacgaaatgtggaaatgggatggcctgaaagatttctggtgtgacacctggggcgattacattaaaatgttcgtaatgttgacagcatccggcaactattggaaaccataa

SEQ ID NO: 59262 - protein, 282 aa, Unknown
  Obtained from environmental sample
  misc_feature (1)..(282): Xaa is any amino acid
MDIIYSLIIADKQWGSNGRYNYLEIARAMLADLWQYCVHSTYKTLLLGDWASKGGDKGNPALAAIQMNATRPSDFIISHLKAYKAIDSAHNWQEVIDATYGVIKGVYADVKAKHGVSRGLLPDFVIRNDAKTAWVVPEGHVLEEDTDGSYAYNSCRIPWRLGTDYLLYGGNTTLAGYDMFAETIQPLDKLATEIYEKSDLDTFGPLTITGDGIWNTDNWDEFWDDPQSFTVPFLITAAAAGNKDLVNEMWKWDGLKDFWCDTWGDYIKMFVMLTASGNYWKP

SEQ ID NO: 59263 - DNA, 786 bp, Unknown
  Obtained from environmental sample
  misc_feature (1)..(786): n is a, c, g, or t
atgaggctgctctttcactgttgttgcggcccctgttcaatcgcaagcgttgaaagcctcataaccgaaggcgtgacgccaacgctgttctggtacaatcccaacatccaccccctaacagaataccgcagccgccgtgacgccctgtctcaattttcctctgaccaaaaactgtctttgataatgtttaacgaatacgggctggagttgtttctgcggagcattggctctgagacaggagtgccgggacgctgtgagatatgttaccgtcttcggctggaaaaaacggctgcctacgccgcggaacacggctttgacgctttcagcacgagcttgttgatcagcccataccagcagcacgaaacaattaaacacattggcgaggaactagcggcgcaatacggcattacttttctatacagggatttccgctctcttttcaggaaaggccaagctgctgcccgtgcccagagcctatatatgcaaaaatactgcggctgcatcttttccgaaaaagaaagatatgaaaactccccgaaccctgaaccccgaacccggaaccctgatcctcaaaccccgaaccccgaaccccgaaccctgatctctgacctcccagtccccagtccccagtccccagtccccagtttcttttcacgcttagctctgcttaccggcacagatgtgttaaaaaaattaaaacaaccaatgtgcaaatcttccgcncgggcgaatggggagctggtgcccggaaccctggttcgatcaggcatgggcagatcggcctaa

SEQ ID NO: 59264 - protein, 261 aa, Unknown
  Obtained from environmental sample
  DOMAIN (3)...(196): Uncharacterized BCR, COG1636
  misc_feature (1)..(261): Xaa is any amino acid
MRLLFHCCCGPCSIASVESLITEGVTPTLFWYNPNIHPLTEYRSRRDALSQFSSDQKLSLIMFNEYGLELFLRSIGSETGVPGRCEICYRLRLEKTAAYAAEHGFDAFSTSLLISPYQQHETIKHIGEELAAQYGITFLYRDFRSLFRKGQAAARAQSLYMQKYCGCIFSEKERYENSPNPEPRTRNPDPQTPNPEPRTLISDLPVPSPQSPVPSFFSRLALLTGTDVLKKLKQPMCKSSARANGELVPGTLVRSGMGRSA

SEQ ID NO: 59265 - DNA, 729 bp, Unknown
  Obtained from environmental sample
  misc_feature (1)..(729): n is a, c, g, or t
atgatatactcgctgcggacaaaaattctggctatcggcctcgcctttttcgcgttgataggcacggcgtttgtcctgtattcaatggcgacaaccgtacattacaagcgcctgcgccttgagggcataagaaagaccgttgaatttgagacggaaaaagtaaacaaggtaattatgggcatggaacagggcgcggaaattctcgcccttgacggccttatctcccatcaactgcaggcgcatgctataaacgaaacattggttatcgggtatctcaacggttttaaagaagctgtgggcggcggtttctggttcgaaccttacgccgacagggaagacaaattacgctccaattactatgtgttctttgataaatcaacaagcaagatacgttttgacgataccttcgactcggatgaatacgattatcacagcaagggctggtatcgggagttaattggcgggataacacggtcataccaggtagtgtggactaaaccgtatgttgacgactctggctcgttcagccttatgacgacggccggcgcgggcatatacagtcaaaacaggctgataggcgtttccacaatagactgggaaatagataaagtaatcacggaattgaccgcgataaaacctacaaaaaacagttttattttattatgcgctcctgaaacaggatatgtaatttcaggtacgcgcgccaacatcgntaccggcgcttcataa

SEQ ID NO: 59266 - protein, 242 aa, Unknown
  Obtained from environmental sample
  SIGNAL (1)...(28)
  misc_feature (1)..(242): Xaa is any amino acid
MIYSLRTKILAIGLAFFALIGTAFVLYSMATTVHYKRLRLEGIRKTVEFETEKVNKVIMGMEQGAEILALDGLISHQLQAHAINETLVIGYLNGFKEAVGGGFWFEPYADREDKLRSNYYVFFDKSTSKIRFDDTFDSDEYDYHSKGWYRELIGGITRSYQVVWTKPYVDDSGSFSLMTTAGAGIYSQNRLIGVSTIDWEIDKVITELTAIKPTKNSFILLCAPETGYVISGTRANIXTGAS

SEQ ID NO: 59267 - DNA, 846 bp, Unknown
  Obtained from environmental sample
  misc_feature (1)..(846): n is a, c, g, or t
atggataacggctggttgttatcggtgcaaattccaaaaactgaaatttttgacgaggtggaaaaacagaacaatcgtttttcgctgctcatagcgtttgcggcagccgcgatgatcggccttgcgtattacctcatttcaaaatttgtcaacgatccgataaaacggctgacagaggatgtctcgcggcttgcgcttggcagtctggatacgcgcattgaaataaattcaaatgatgaattgggcctgctggcccaggcctttaacaaaatgacttccgacctgaaaaaatccattgaggaaagcgcccgcgaacgcgcggaaaaagaacggattggcgccgagcttggcgtggcggccgcgatacaggccagtatgcttcccaatatttttccgcccttccccgagagaaccgaatttgacctgtacgcctccatgattccggcaaaggaggttggcggtgatttttatgatttctatttaattgacagggacaatctggcggtggttatcgcggatgtttcaggcaagggcgttcccgccgcgttattcatgatgattacgaaaaccatgatcaaggacagcagtccggataatagcctgaaagatatttttgaatctgtaaacaaaaaattatgcgaaggcaatgaagcggatatgttcgttacggcgtttatgggtatttacaatattcccagcggaagatttatgtttgtcaacgcggggcataatccgccgcttttaaaaaaacacggaagcggttatgagtttctggaaacggaacccggttatgtcttggcatggatgaagaactcgcaatacaaggaaaaagaaatcagcctttga

SEQ ID NO: 59268 - protein, 281 aa, Unknown
  Obtained from environmental sample
  DOMAIN (163)...(281): Stage II sporulation protein E (SpoIIE)
  misc_feature (1)..(281): Xaa is any amino acid
MDNGWLLSVQIPKTEIFDEVEKQNNRFSLLIAFAAAAMIGLAYYLISKFVNDPIKRLTEDVSRLALGSLDTRIEINSNDELGLLAQAFNKMTSDLKKSIEESARERAEKERIGAELGVAAAIQASMLPNIFPPFPERTEFDLYASMIPAKEVGGDFYDFYLIDRDNLAVVIADVSGKGVPAALFMMITKTMIKDSSPDNSLKDIFESVNKKLCEGNEADMFVTAFMGIYNIPSGRFMFVNAGHNPPLLKKHGSGYEFLETEPGYVLAWMKNSQYKEKEISL

SEQ ID NO: 59269 - DNA, 585 bp, Unknown
  Obtained from environmental sample
  misc_feature (1)..(585): n is a, c, g, or t
ttgttaccagccgtcaagagggaagttgataaatttgcggaaggaaccgaacaggccgacgatattaccatgcttgccctgaagataaatgacaatacggtacattccgaagaagcgcctgaaaacggcgcgtcgcagagcgacggcgcgtcgcagagcgacgcgatgaagaagctggaaattaaagcgagccttgaaaatctgaataaggcgctggactttataaacgcggagcttgaacagtgcggatgctctcaggacatacagggtaaaattgaagttgccgtggaagaggtctttgtaaacattgcggattacgcctacgccgccgacggcggcgccgatggcgccgttgtcatatttatttctgtcaccgataaaatcgtcatcaggtttgaagatacgggcatatcttataaccctcttgagaagcccgagccggatctggacaaaccgctgatggaacgcgatataggcggactgggcgtttttcttgtaaagaagctgatggacaatgtggaatacagccgtgttgggaataagaatgtgctggtgatgaccaagggaatggggagtagggagtag

SEQ ID NO: 59270 - protein, 194 aa, Unknown
  Obtained from environmental sample
  misc_feature (1)..(194): Xaa is any amino acid
MLPAVKREVDKFAEGTEQADDITMLALKINDNTVHSEEAPENGASQSDGASQSDAMKKLEIKASLENLNKALDFINAELEQCGCSQDIQGKIEVAVEEVFVNIADYAYAADGGADGAVVIFISVTDKIVIRFEDTGISYNPLEKPEPDLDKPLMERDIGGLGVFLVKKLMDNVEYSRVGNKNVLVMTKGMGSRE

SEQ ID NO: 59271 - DNA, 1491 bp, Unknown
  Obtained from environmental sample
  misc_feature (1)..(1491): n is a, c, g, or t
atgatcagatggccgagtttcctcatggaactaaaccaattcgaagttccgctcacgcaaaagaacgctattccacaagtgatggaaaaaatcttggggaaaaaggttttcaatgtgcatatagagcggcttgcacttgactatcggcgaaaaggaaatccgcattatgtttgcaatgccgtttatagtttagaaaaggattctggcgaagttccgcaaaattttagcactaaagatctgctaaaaaaatacaataaaaacaaatctatgccaagcgaggtttccattgtgggcgcgggacctgcgggtttgtgggctgcttatgctttactgttgaatgggcataaggtgaatttatatgagcaaggaaaacctgtggaagagagattcagggatattcgcagatttttaaaatctggaatttttttggaaaattcaaatatatttttcggcgagggtggagctggggctttttcggatgggaaactcaacactaggagccgcacggagttttcgcaggctgttcttggcgatttgataaatttgggcgcaagcgaagaaatagcgtatttatctaagcctcatattggcacagaccaattgcagtttttaattaaaaaaatgagaaagcaaattttggagttaggtgggaaaatttattttgaaagcactctgcaagatatttctgtgcgtgataattgcctgaattcaatttgcataaataaaaaatggcagccctgcgaagcacttgtgcttgcaaacggacattccgcaagaaacatttacgatatgctttttgcacacggcattgctttggagggcaagtcttttgcggttggaacacgtattgaacatcctcagagttttataaatgaaactcgctttggcaggggagtggattacaaattaacaggagctgcagattacacgctcacagggaaaaccgcatatagtttttgcatgtgccccggcggtgtggttgtgccttgcgcatcggagaaaggcggggttgcaactaacggaatgagttacagccgccgcaatagcccttatgcaaattcggctttagttgttccatataaaatagataaaaacgatgtgaaaagtgggattgcttttcaaagggaattggagcaaaaagcctttgaaatggctgggaaaaattactccgttcctaggcaaagggcagaggattttttgacaaaaaaaaacggggttttatgggatttaatgccaaaggacataagcacaagtttagaggctgctctttatgaatttgagaaaaaaatgccaggttttataaaaaacggtttgttgctcgcgccggaaactaggacctcttctccgcttaggattgtccgtaaagagagtggtgaatctatgtctgttgtgggcatttatcctgttggtgaaggggcaggttacgcaggcggaatcttgacgagtgcggcagatggggtgagacttgcattttctatgttatggcaatga

SEQ ID NO: 59272 - protein, 496 aa, Unknown
  Obtained from environmental sample
  misc_feature (1)..(496): Xaa is any amino acid
MIRWPSFLMELNQFEVPLTQKNAIPQVMEKILGKKVFNVHIERLALDYRRKGNPHYVCNAVYSLEKDSGEVPQNFSTKDLLKKYNKNKSMPSEVSIVGAGPAGLWAAYALLLNGHKVNLYEQGKPVEERFRDIRRFLKSGIFLENSNIFFGEGGAGAFSDGKLNTRSRTEFSQAVLGDLINLGASEEIAYLSKPHIGTDQLQFLIKKMRKQILELGGKIYFESTLQDISVRDNCLNSICINKKWQPCEALVLANGHSARNIYDMLFAHGIALEGKSFAVGTRIEHPQSFINETRFGRGVDYKLTGAADYTLTGKTAYSFCMCPGGVVVPCASEKGGVATNGMSYSRRNSPYANSALVVPYKIDKNDVKSGIAFQRELEQKAFEMAGKNYSVPRQRAEDFLTKKNGVLWDLMPKDISTSLEAALYEFEKKMPGFIKNGLLLAPETRTSSPLRIVRKESGESMSVVGIYPVGEGAGYAGGILTSAADGVRLAFSMLWQ

SEQ ID NO: 59273 - DNA, 810 bp, Unknown
  Obtained from environmental sample
  misc_feature (1)..(810): n is a, c, g, or t
ttgaaaatgaactataaagtaagggaattaaaagtatcttttttttccaaggaagaactcacttgtcctgtttgcagcaagaattttaacagggaggaactcctttccggttcgggaaggctcattgccgggaaactaaccgatgagctgcacaggctctatgaaccctcagccaagtacggggaagtttatcccctgatctatcaggcaactgtctgtcccgagtgctggtttgccgcaatggacaaggatttcattgattttccgcctttcacaagagaaaaggctaagaaagatacggaagagcgcatagcagacacaaagctaatttttccggaagcggattttacaaagccaagggatattatttcgggaaccgcctcgctttatctggctgtaaggtgttacgaattttacccaaaagaattttctcctacaataaaacaggcagttgccgcgctaagggccggctggcttcttgacgatataaacaaaaaatctcccgaacagcatttcgattggcttgcaatgttgttcaagaaaaaggccaactacctgtataacgaagcaatacggcgggagcagcgggggatagagacgctttcagccatgaaaaacttcggccctgacaccgataagaactacagctatgaaggagccctctacctgactgcattgcttagatataaatacagttacaaggataatcctgagcttcggggaaaggctcttgaagaagccaagcggaccatcgcgaggatcttcggtgtccggcaagtcttcaaaatccaagcccggcccgcttcttga

SEQ ID NO: 59274 - protein, 269 aa, Unknown
  Obtained from environmental sample
  misc_feature (1)..(269): Xaa is any amino acid
MKMNYKVRELKVSFFSKEELTCPVCSKNFNREELLSGSGRLIAGKLTDELHRLYEPSAKYGEVYPLIYQATVCPECWFAAMDKDFIDFPPFTREKAKKDTEERIADTKLIFPEADFTKPRDIISGTASLYLAVRCYEFYPKEFSPTIKQAVAALRAGWLLDDINKKSPEQHFDWLAMLFKKKANYLYNEAIRREQRGIETLSAMKNFGPDTDKNYSYEGALYLTALLRYKYSYKDNPELRGKALEEAKRTIARIFGVRQVFKIQARPAS

SEQ ID NO: 59275 - DNA, 837 bp, Unknown
  Obtained from environmental sample
  misc_feature (1)..(837): n is a, c, g, or t
ttgaacatgccaagaatctgtacgagacaatttccaaggagcttaacgaggttgatgtgtgaagctgcagggcttcgtaatattatgctcaccctggcttacgatggctcgaatttttccggatggcagaggcaggatgtaagggataaatgcccttcacccgttaagacaagaacagttcagggtgtagttgaagtcgcccttgaaaagcttcacaaagcgccggtggcccttacaggttcgggccgtaccgataccggcgtacacgccgcggctcaggtggcgaatttttatacttccatccggagcatggaagcctgccgttttgtcccggctttgaacagccttctcccccatgacgtcagggtgctggacgcccgcgaaaccggcgcggacttccatgcccgctttgacgcccggctgcgtacctaccgctattattttattaccggccgcaatgccatgccctgggaactccgctacgcctggcacattaggcggcagccggacatcttattattgaacgagtactcacgccttttccgcggcgagatggattttaccgccttcgcgattcccggcgataaaagcaaatcccgctttcggtatatagccaacgtttgctttttttttgaggaagacaagctggtcttcgaaattaccgccaacgcttttttatggaagatggttcgttccattgccgggacgttgatacgttttgaagaaaaaaaattgagttccgattatttacgggaagtaattgagtcgcggaaccggaagcttacaggccctaccgcgcctgcggcagggctttttttgtggaaaattgagttctga

SEQ ID NO: 59276 - protein, 278 aa, Unknown
  Obtained from environmental sample
  DOMAIN (177)...(278): tRNA pseudouridine synthase
  misc_feature (1)..(278): Xaa is any amino acid
MNMPRICTRQFPRSLTRLMCEAAGLRNIMLTLAYDGSNFSGWQRQDVRDKCPSPVKTRTVQGVVEVALEKLHKAPVALTGSGRTDTGVHAAAQVANFYTSIRSMEACRFVPALNSLLPHDVRVLDARETGADFHARFDARLRTYRYYFITGRNAMPWELRYAWHIRRQPDILLLNEYSRLFRGEMDFTAFAIPGDKSKSRFRYIANVCFFFEEDKLVFEITANAFLWKMVRSIAGTLIRFEEKKLSSDYLREVIESRNRKLTGPTAPAAGLFLWKIEF

SEQ ID NO: 59277 - DNA, 828 bp, Unknown
  Obtained from environmental sample
  misc_feature (1)..(828): n is a, c, g, or t
ttgaggggaatcacttaccgctaccgcctgagggcctccgtccaggatgcgggcaggcaggaaatttccgttcgtagcgcagcgattgtccaccccgcttcgttttacatcggttcccgtctggacacgggaaccttgagggccgcggatcccgcaagcactaaatcatccgctttctttttatcgagcggttcgcccgcaacagttagttgggctttactcacgccggaaggaacgccctttgagcaaagtgccgacaaccgcgacgcgcctgaaatctcctttaaattgatccgttacgagtggaagcagtcacgccaggccggcattggcggaaggatcaacctgtactgggaaagggttgaggaaacagttatggagcggagctttcgcccggcaagaagagaacatataggggtaattccctttacccctacaaccagcggcgagtaccaggtgcggctttcgagcaaagattctctaggccgttccgtgcaaacacgttacagtttttatgtgacaggcgcaggctgggcgctgtggggcaggggcgattcggacagcatcacactgaggccggataagagctcttacgcgcctggagagacggccaagcttttggtgcagtctcctctgcccaaaggaaagtacctccttacgcttgaaagagaaggaatacttgaagaaaaaatcatcgagcttgacggttccgcccttaccatcgacgttccaatcaaggaatcgtacataccaattgtgtacgctgccatcgcctcgtatacggtcagatccgggccgccgactcacacctactacgagcccgattga

SEQ ID NO: 59278 - protein, 275 aa, Unknown
  Obtained from environmental sample
  misc_feature (1)..(275): Xaa is any amino acid
MRGITYRYRLRASVQDAGRQEISVRSAAIVHPASFYIGSRLDTGTLRAADPASTKSSAFFLSSGSPATVSWALLTPEGTPFEQSADNRDAPEISFKLIRYEWKQSRQAGIGGRINLYWERVEETVMERSFRPARREHIGVIPFTPTTSGEYQVRLSSKDSLGRSVQTRYSFYVTGAGWALWGRGDSDSITLRPDKSSYAPGETAKLLVQSPLPKGKYLLTLEREGILEEKIIELDGSALTIDVPIKESYIPIVYAAIASYTVRSGPPTHTYYEPD

SEQ ID NO: 59279 - DNA, 942 bp, Unknown
  Obtained from environmental sample
  misc_feature (1)..(942): n is a, c, g, or t
gtggtaaggcagggcatgaccgatgcccaggggctggctgtttttgagttccgcgacggggagttcgtctcccgttttaccaatctggagccccactacggcgtagaagactggtcaaaaggctttcgcgtccgggtggtagatggcggcggggctatggcgggcggggaccaggcggaatttatcccgaacaacagccacaacatctggcgcttcccggttgaagtcgcagtaagccccttcaacgcggaaaaggacagggccctggttttcatctttacagatcgcgggctttacagacctggggagaccgttactttccggggcatagacaggaaccttgtacgggggaaattcttcccatacgaaggcaattacagcattgaggtctcaaccggcgggcgcaacgccccgctgattgctttgcttaggggaaaaactaccggaagcggcggaagccacggctcctttgcgattcccccaaatcttgctccgggtcgttacgttatgcgctacaagcgctttgagggcgacggccaggactacgcgattacctttctggtagccaacttcgaacggctccgtgtcgaagcgtccctgaaaatccccgatcttacgtactatcagggcgaaaaaatatcaggccgcctttccgcctcttacctttccggcggcggactttccggcgctccttacacctactactggagccgcgagccggcgtggttcaatcccgacggaaactggcgctattggcatttcggtccggagacctacgacagccgttactttgccgactctggtgaaggtaccctggggcccgacggcagcgcagacatagcacataacgtcggcgtggacggggttgaggggaatcacttaccgctaccgcctgagggcctccgtccaggatgcgggcaggcaggaaatttccgttcgtag

SEQ ID NO: 59280 - protein, 313 aa, Unknown
  Obtained from environmental sample
  DOMAIN (7)...(259): Alpha-2-macroglobulin family N-terminal region
  misc_feature (1)..(313): Xaa is any amino acid
MVRQGMTDAQGLAVFEFRDGEFVSRFTNLEPHYGVEDWSKGFRVRVVDGGGAMAGGDQAEFIPNNSHNIWRFPVEVAVSPFNAEKDRALVFIFTDRGLYRPGETVTFRGIDRNLVRGKFFPYEGNYSIEVSTGGRNAPLIALLRGKTTGSGGSHGSFAIPPNLAPGRYVMRYKRFEGDGQDYAITFLVANFERLRVEASLKIPDLTYYQGEKISGRLSASYLSGGGLSGAPYTYYWSREPAWFNPDGNWRYWHFGPETYDSRYFADSGEGTLGPDGSADIAHNVGVDGVEGNHLPLPPEGLRPGCGQAGNFRS

SEQ ID NO: 59281 - DNA, 1929 bp, Unknown
  Obtained from environmental sample
  misc_feature (1)..(1929): n is a, c, g, or t
atgaaaaaatttaaaattacccttgccaaattggaaacaaaatccacactttgggcaaaaagccgaaaaacactcatggagtttcatgtaaacagcgatgtccgtcatgagtatggtcttagcgacagcctcttttcattaaccggaaatgtggttcttgcagaccttaaacaatgcagagaactggcaaataaattcaaccttaaacaagaccctgctcatcctgaacggtatataaaagccggccatctttacgcgatggggctaatcgatgaaattctgcactatgtagttgcgctttaccgtgaggaagttcaaggcgatgtttttgaaaccgcgctggataggctgaacaacaatcttggcgaaggcaaaaccaatggtcttttaaatgaattttccaaacaatttcctccgcgtcctgtgtacaaaggtgaaaaaaatattgagcagtaccttaaaagcaaagaaaacggtgaaagctgccgcgccctttctatagaagaaacaacgcttctgtcgctcgcgaatcttaatccggcgtttaaacctttcaaatttttatttgacgataaaaaactttccgcaaaaaccgcctatcctgacgctatcgaagaaataaaagcacacttaaaagaaatgccggtcttcggtcccgacggcatgaacctttgggatttcctgcgctcacccgcgattcaattccccgactctctttttgcgcaacttgattatatgcgaagacattgggggcttcttatttcaaaattcatggcgcgattgttaatgagtcttgatgtaataaatgaagaaaacaagccatctttctttggtcccggtccaagcgaagttttatctttcgccggacttgatgaatacgaaaaatacagtcccgatctggactggatgcccaatacggtactaatggctaaaagcacacttgtctggctttttcaactttcgcaaaaatacaaaagggaaattacccgccttgatcaaatccctgatgaagaacttgatgagcttgcccgccgtggttttacggggctgtggcttatcggcacatgggaacgaagtcaggcaagcaaaacaataaaacagtggacaggtaatcccgaagccgccgcctccgcgtacagtttgtacgattacgatgttgcgggcgaacttggcggttggggcgcgcttaccaatttacgcgagcgttgtatgcgtcgaggaatccgcctcggttctgatatggttcccaatcacacaggtatcgacagtaaatggatgatcgaacatcccgaccgttttctgcaactgccatacccgccatttccaacttacaattacaactgcggaaatctttcaggtcgtgatgacataacggtacaaatcgaagaacattatttttcacgcagtgatgccgcagtagtctttaaacgaattgacaaccgcactggagaaacgcgctacatttaccacggcaacgacggcacttccatgccatggaacgataccgcacagattgatttcctcaatcccgaagcgcgtgaagcggtaatccgtacaatcatcggcgtgtgtcagcagttctctatcgtgcgctttgacgccgccatgaccctcgccaagcggcacattcagcggttatggtaccccgctccgggaagcggcggcgcaattgccagccgcgccgaacattcaatcaccaccgatgaatttaaccgccgtataccaaacgagttttggcgcgaagtagttgaccgctgcgcggctgaagcgccaaacacactgctccttgccgaggctttctggatgatggaaggctactttgtccgcacgcttggaatgcaccgtgtttataactcggcttttatgaacatgctaaaaacgaagaaaattcgaagtaccgttcaactatcaagaacacaatggagttga

SEQ ID NO: 59282 - protein, 642 aa, Unknown
  Obtained from environmental sample
  DOMAIN (322)...(638): Alpha amylase, catalytic domain
  misc_feature (1)..(642): Xaa is any amino acid
MKKFKITLAKLETKSTLWAKSRKTLMEFHVNSDVRHEYGLSDSLFSLTGNVVLADLKQCRELANKFNLKQDPAHPERYIKAGHLYAMGLIDEILHYVVALYREEVQGDVFETALDRLNNNLGEGKTNGLLNEFSKQFPPRPVYKGEKNIEQYLKSKENGESCRALSIEETTLLSLANLNPAFKPFKFLFDDKKLSAKTAYPDAIEEIKAHLKEMPVFGPDGMNLWDFLRSPAIQFPDSLFAQLDYMRRHWGLLISKFMARLLMSLDVINEENKPSFFGPGPSEVLSFAGLDEYEKYSPDLDWMPNTVLMAKSTLVWLFQLSQKYKREITRLDQIPDEELDELARRGFTGLWLIGTWERSQASKTIKQWTGNPEAAASAYSLYDYDVAGELGGWGALTNLRERCMRRGIRLGSDMVPNHTGIDSKWMIEHPDRFLQLPYPPFPTYNYNCGNLSGRDDITVQIEEHYFSRSDAAVVFKRIDNRTGETRYIYHGNDGTSMPWNDTAQIDFLNPEAREAVIRTIIGVCQQFSIVRFDAAMTLAKRHIQRLWYPAPGSGGAIASRAEHSITTDEFNRRIPNEFWREVVDRCAAEAPNTLLLAEAFWMMEGYFVRTLGMHRVYNSAFMNMLKTKKIRSTVQLSRTQWS

SEQ ID NO: 59283 - DNA, 1485 bp, Unknown
  Obtained from environmental sample
  misc_feature (1)..(1485): n is a, c, g, or t
atgaaaaagatactattccaagatactagctttcgcgatggctttcaatcggtttttggcgctcgcgttttgacaaaagattttctccctgctttggaagcgggggttcatgcgggaattgagcattttgaggctggcgggggtgcaagataccaagcaccttacctctattgcaacgaagatgcttttaatatgatggacactttccgcaaaacggttggtcccaaaattcgcttgcaaacgctcgctcgcggtataaatgtggttgccttggaaccccagcccagagatatgatagatttgcacgccaaaatgttcaaaaagcacggaatgacacgaattcgcaattttgatgccttgaacgatgtgaataaccttatatattcggggcagtgcataacaaatgcgggcttggaacacgaggttgtggtaactatgatggaacttccgcgccactgcgagggcaagggtgcgcacgaaccttcattttacattgaaaccttgaagaaaattatggattctggcgttccttttgtgagcgtgtgctttaaagatgcaagcggaacggcaaatccacgcaaagttcacgaaacctttaaagaggcacgcaaactccttggcgacaaagtggagcttagaatacactcccacgatacctgcggaacaggcattgcccaatatgtggctgccattgaaggcggagcagacggcgtttgctgcggcagagcacctctaagcggcggaacagctcaaccagatttgctttctctttggcacgctttgaaaggcacagactacactttggatattaatgttgaaaaaattatggaagcaaaccaagtgagcaaggaatgtttcaaagaatacgactttccacccgaggctttagccattgaacccgaagttatttttagcccaatgccaggcggtgcattaaccgcaaacacattgatgatgcgcgaaaccaaaacattccacctttacccgcaagtgattaaaaacatggcggagtgcgtagctcgcggcggatttggttcaagcgttacccctgtttctcaattctatttccagcaggcttatgccaacacagttcaaggcccttggaaaaaaataaccgatggttatggtaatatggttcttggctaccttggcaaaactccaagagacccagatccagaaatagtgaaaattgcaagcgaacagatgaaaaaacctgtattcaccggaaatccattggatgttttggaacccggtattccaaaagcgaaaaaagttttggaagaaaatcatttgcctgtaaccgatgaaaatattttcataattggcgcaatggcaacaaaaggtggcaacaagggcttggatttcttgcaaggaaaagctagagtgagcgttcccaaaaagaaacccgctgctccggcgccggcggcagcacccgttgctgcacacgctgcacctgcagcatctccactagttttgcacccatag

SEQ ID NO: 59284 - protein, 494 aa, Unknown
  Obtained from environmental sample
  DOMAIN (302)...(491): Conserved carboxylase domain
  misc_feature (1)..(494): Xaa is any amino acid
MKKILFQDTSFRDGFQSVFGARVLTKDFLPALEAGVHAGIEHFEAGGGARYQAPYLYCNEDAFNMMDTFRKTVGPKIRLQTLARGINVVALEPQPRDMIDLHAKMFKKHGMTRIRNFDALNDVNNLIYSGQCITNAGLEHEVVVTMMELPRHCEGKGAHEPSFYIETLKKIMDSGVPFVSVCFKDASGTANPRKVHETFKEARKLLGDKVELRIHSHDTCGTGIAQYVAAIEGGADGVCCGRAPLSGGTAQPDLLSLWHALKGTDYTLDINVEKIMEANQVSKECFKEYDFPPEALAIEPEVIFSPMPGGALTANTLMMRETKTFHLYPQVIKNMAECVARGGFGSSVTPVSQFYFQQAYANTVQGPWKKITDGYGNMVLGYLGKTPRDPDPEIVKIASEQMKKPVFTGNPLDVLEPGIPKAKKVLEENHLPVTDENIFIIGAMATKGGNKGLDFLQGKARVSVPKKKPAAPAPAAAPVAAHAAPAASPLVLHP

SEQ ID NO: 59285 - DNA, 762 bp, Unknown
  Obtained from environmental sample
  misc_feature (1)..(762): n is a, c, g, or t
atggaacttaaaaaattgatggaacatatttctattatccccgattacagacaagcctggaaagtggaacataaattatcggatattctactgttgactatttgtgccgttatttctggtgcagaaggctgggaagatatagaggattttggggaaacacatcccgattttttgaagcaatatggtgattttgaaaatggtattcctgttcacgataccattgccagagttgtatcctgtatctgtcctgcgaaatttcatgagagctttattaactggatgcttgactaccattcttcagatgataaagacgtcatcgcaattgatggaaaaatacaccggcattcttatgacaagagtcgccgtaagggagcgattcatgtcattagtgcgttctcaacaatgcacagtctggtcatcggacagatcaagacggataagaaatccaatgagatcacagctatccctgaacttcttaacatgctggatattaaaggaaaaatcatcaaaaccgatgcgatgggttgccagaaagatattgcagagaagatacaaaaacagggaggtgattatttattcgctgtaaaaggaaaccaggggcggctaaataaagccttcgaggaaaaatttccgctgaaagaattaaataatcccaagcatgacagttacgcaattagtgaaaagagtcacggcagagaagaaacccgtcttcatattgtttgcgatgtccctgatgagcttattgatttcacgtttgaatag

SEQ ID NO: 59286 - protein, 253 aa, Unknown
  Obtained from environmental sample
  DOMAIN (105)...(252): Transposase DDE domain
  misc_feature (1)..(253): Xaa is any amino acid
MELKKLMEHISIIPDYRQAWKVEHKLSDILLLTICAVISGAEGWEDIEDFGETHPDFLKQYGDFENGIPVHDTIARVVSCICPAKFHESFINWMLDYHSSDDKDVIAIDGKIHRHSYDKSRRKGAIHVISAFSTMHSLVIGQIKTDKKSNEITAIPELLNMLDIKGKIIKTDAMGCQKDIAEKIQKQGGDYLFAVKGNQGRLNKAFEEKFPLKELNNPKHDSYAISEKSHGREETRLHIVCDVPDELIDFTFE

SEQ ID NO: 59287 - DNA, 405 bp, Unknown
  Obtained from environmental sample
  misc_feature (1)..(405): n is a, c, g, or t
atggtgattttgaaaatggtattcctgttcacgataccattgccagagttgtatcctgtatctgtcctgcgaaatttcatgagagctttattaactggatgcttgactaccattcttcagatgataaagacgtcatcgcaattgatggaaaaatacaccggcattcttatgacaagagtcgccgtaagggagcgattcatgtcattagtgcgttctcaacaatgcacagtctggtcatcggacagatcaagacggataagaaatccaatgagatcacagctatccctgaacttcttaacatgctggatattaaaggaaaaatcatcaaaaccgatgcgatgggttgccagaaagatattgcagagaagatacaaaaacagggaggtgattatttattcgctgtaa

SEQ ID NO: 59288 - protein, 134 aa, Unknown
  Obtained from environmental sample
  misc_feature (1)..(134): Xaa is any amino acid
MVILKMVFLFTIPLPELYPVSVLRNFMRALLTGCLTTILQMIKTSSQLMEKYTGILMTRVAVRERFMSLVRSQQCTVWSSDRSRRIRNPMRSQLSLNFLTCWILKEKSSKPMRWVARKILQRRYKNREVIIYSL

SEQ ID NO: 59289 - DNA, 510 bp, Unknown
  Obtained from environmental sample
  misc_feature (1)..(510): n is a, c, g, or t
atgaatctacaacgatttgatgacagcaccctaatccgtatctttgcccttcatgagttacatcgactgaaagaacatggcttaacgcgcggggcgcttctcgattatcacagccgctataaactcgtctttctggcgcattctcagccggagtaccgcaaacttggcccgttcgtggctgatattcaccagtggcaaaatctggatgactattacaaccagtaccgccaacgcgtagttgttttgctttctcaccccgccaacccgcgcgatcacaccaatgttttgatgcacgttcagggttattttcgcccgcatattgattccacagaacgccagcagctggctgcgcttatcgacagttatcgccgtggcgagcaaccacttcttgcgccgctgatgcgtatcaaacactatatggcgctttatcctgacgcctggctttcagggcagcgttatttcgaactttggccgcgtgtgattaacttgcgcccttcgggagttttatga

SEQ ID NO: 59290 - protein, 169 aa, Unknown
  Obtained from environmental sample
  DOMAIN (41)...(158): Protein of unknown function (DUF1722)
  misc_feature (1)..(169): Xaa is any amino acid
MNLQRFDDSTLIRIFALHELHRLKEHGLTRGALLDYHSRYKLVFLAHSQPEYRKLGPFVADIHQWQNLDDYYNQYRQRVVVLLSHPANPRDHTNVLMHVQGYFRPHIDSTERQQLAALIDSYRRGEQPLLAPLMRIKHYMALYPDAWLSGQRYFELWPRVINLRPSGVL

SEQ ID NO: 59291 - DNA, 1425 bp, Unknown
  Obtained from environmental sample
  misc_feature (1)..(1425): n is a, c, g, or t
atgcacgacgtttatacggaggcgttaaggctcggcatacctgtgacggcctgccacaacgaggccgcgcccaaccagtacgagttcgccgcgacccatgagaggtcaagcctcgcggttgaccacaacctgcttcttacggacatcatggaacgtgtcgccaggcggcacaacctggtctgcctattgcacgaaaagcccttcgccggagtcaacggcagcgggaagcacgtcagttggtcgctttcggacgacgacggcgccaacctgctgaatcccggcggcacagccgaggataacctggtcttcctgacgcttttgacatccgtaatacacgcggcgcaccgccacggcgacctgctacgcgcctccgccgcctccgccggcaacgagagacggcttggcgcgggcgaggccccgcccgccataatgagcctcttcctaggcgaacaactcacgaagttcgtcgccgcgatagggtcaggaaaggcggaaaaaggaaagaagcgcgacccggccgacatcggcgcagacctgcccaagttcgcgcacgacgcggcggaccgcaaccgcacctcgccacttgcctttacgggcgcgaagttcgagttcagaatgcttggcgcctcgatgaacgccgcgaccgccgtcacagttatcaacgccatcgtggccgactccatgaagacgatatgcgaccggataaagaaggaactcaaaggcaaaggcgacaatcaaccgggagacgccgataatcacaaacaagagacggcagccgccgtgataaacgtcatctccgccgtaatcaaagagtctaaatccatcctctttgacggcgacaccctctcaagcgagtgggcgagcgaggctcagacgcgcgacctgcaaaacaccgcgtcaacgccggaagccctgaaagcatttatcgcccccaaagcagtggaactcttcaaacgccacaaaatattatcggaaaccgaactcacggcgaggtacaacgcccaactcgatcaatacgagaaaacgctcgacgcggagatcaaaacgctgacggagacggtcaacacgcagatactgcctaacgcctacaactaccaagccgacatcgcgagcggccttgaggtgctgagagtgctggccgacgacatgaccatagaaatgacggaaggcgcgttggaagaccgcaaagagatgttcgaaaaactcaccgcagacatctaccgcgtccgcaagagcctgaaagaactgtcggccatggcggacaaagcccgtaaaatgggaacaggagagagggccgcgtacctgttcaaagatgtcaaaccgcaaatagacaaaatcagacggtacgtagacgcgcttgaggggtacatgccggacgagacttggccgttggcgaaatataaggagatgttgtttgttttgtga

SEQ ID NO: 59292 - protein, 474 aa, Unknown
  Obtained from environmental sample
  DOMAIN (1)...(209): Glutamine synthetase, catalytic domain
  misc_feature (1)..(474): Xaa is any amino acid
MHDVYTEALRLGIPVTACHNEAAPNQYEFAATHERSSLAVDHNLLLTDIMERVARRHNLVCLLHEKPFAGVNGSGKHVSWSLSDDDGANLLNPGGTAEDNLVFLTLLTSVIHAAHRHGDLLRASAASAGNERRLGAGEAPPAIMSLFLGEQLTKFVAAIGSGKAEKGKKRDPADIGADLPKFAHDAADRNRTSPLAFTGAKFEFRMLGASMNAATAVTVINAIVADSMKTICDRIKKELKGKGDNQPGDADNHKQETAAAVINVISAVIKESKSILFDGDTLSSEWASEAQTRDLQNTASTPEALKAFIAPKAVELFKRHKILSETELTARYNAQLDQYEKTLDAEIKTLTETVNTQILPNAYNYQADIASGLEVLRVLADDMTIEMTEGALEDRKEMFEKLTADIYRVRKSLKELSAMADKARKMGTGERAAYLFKDVKPQIDKIRRYVDALEGYMPDETWPLAKYKEMLFVL

SEQ ID NO: 59293 - DNA, 498 bp, Unknown
  Obtained from environmental sample
  misc_feature (1)..(498): n is a, c, g, or t
gtggtaggcggcggagacacggcatgtgtcgaggctcagtacctttcgcatctatccaatcaggtgatcttaattcaccgcagagataaatttcgcgcccaaaaagcccttgcggatcgtgtgcttcataacccgaacataaatgtgcgcttcaacacggtgatgaaggaaatccggggtggagccaaggttacatcgattttactggaggaaaacggtatgtccggcgaagaaagcgccgacgcggtttttatctttaccgggatcgtcccacagacttctttggtttcgggggccgatggcggcctaaaagttgagctggacgaagccggttatattatcaccgatcaaaaaatggcaacttcggtgcccggacttttcgccgcaggagacgtcagaacgacccccttccggcaggtagtaaccgccgccgctgacggcgcagtggccgctcattgcgccgccgcttacatcgactgcttaaaaggcgaaatttaa

SEQ ID NO: 59294 - protein, 165 aa, Unknown
  Obtained from environmental sample
  DOMAIN (2)...(88): Pyridine nucleotide-disulphide oxidoreductase
  misc_feature (1)..(165): Xaa is any amino acid
MVGGGDTACVEAQYLSHLSNQVILIHRRDKFRAQKALADRVLHNPNINVRFNTVMKEIRGGAKVTSILLEENGMSGEESADAVFIFTGIVPQTSLVSGADGGLKVELDEAGYIITDQKMATSVPGLFAAGDVRTTPFRQVVTAAADGAVAAHCAAAYIDCLKGEI

SEQ ID NO: 59295 - DNA, 1167 bp, Unknown
  Obtained from environmental sample
  misc_feature (1)..(1167): n is a, c, g, or t
gtgaagaaaaagcttttgggatttttgcttttgatctcgcttcccgtgttttctctttcttttaacgatccgggtgatataaatgaacttgcgttgcgcctaacaaacgagatgagcgatgagcaggctctggctcaaacctttatgctgggctgggtaggggcagagccttcccccttaattctggactggatacgaagccgcaacattggcggagtgaaaattttcggctggaacaccgaagacacccgtaaactggcgcagacggttggcgatctgcaaaagaacgcactggcttccggattaggcatccccctttttgtggcaacggatcaggagggaggacttgtgcgccatgtaaaaggcgcgaccagtgagactccggggaacatggccataggcgcgtcaggaaggccgatggacgcttacttgtcggggtactacataggacgggaactgtctcttttgggtatcaacatgaattttgcccccagcgtggatctttacacgaacagagattcaactttgatcggcccgaggtctttcggttccgatcctgtgcaagcgggtatccttggagcggcctttgcgaaaggccacaaggaaatgggagttattgccacggcaaaacattaccccggccacggagacaccgatctggattcccacggggtgctgccgaaaatttacgcttcgtttgatttgctttgggacagggagcttctcccttacaggcttcttgcaaaagaggaactccctgcgataatgagcgggcatttggcctttccgaatactcaggccggcgcgacaccggcttccctttctacctggtttttgaaggatattttaagagacaaaatttcttacaagggccttataattaccgatgacttgatgatgaacggggctacagaatttgcaggaagcctttcgcgtgccgcaaagcaggcgcttcttgccggcaacgatatcatcatgttttcaaaaaccccaagccttaacgacagcgtatggacatatctggtctcttcaatgaagaatgagccggaatttcgggaccgtgtaagagacgcctgccgccgtagtctggttttaaaactggaatatctgcgcggagaaaaaaagttccatatattccagattttaaaaaaattgatgacggtctga

SEQ ID NO: 59296 - protein, 388 aa, Unknown
  Obtained from environmental sample
  SIGNAL (1)...(18)
  DOMAIN (96)...(327): Glycosyl hydrolase family 3 N terminal domain
  misc_feature (1)..(388): Xaa is any amino acid
MKKKLLGFLLLISLPVFSLSFNDPGDINELALRLTNEMSDEQALAQTFMLGWVGAEPSPLILDWIRSRNIGGVKIFGWNTEDTRKLAQTVGDLQKNALASGLGIPLFVATDQEGGLVRHVKGATSETPGNMAIGASGRPMDAYLSGYYIGRELSLLGINMNFAPSVDLYTNRDSTLIGPRSFGSDPVQAGILGAAFAKGHKEMGVIATAKHYPGHGDTDLDSHGVLPKIYASFDLLWDRELLPYRLLAKEELPAIMSGHLAFPNTQAGATPASLSTWFLKDILRDKISYKGLIITDDLMMNGATEFAGSLSRAAKQALLAGNDIIMFSKTPSLNDSVWTYLVSSMKNEPEFRDRVRDACRRSLVLKLEYLRGEKKFHIFQILKKLMTV

SEQ ID NO: 59297 - DNA, 435 bp, Unknown
  Obtained from environmental sample
  misc_feature (1)..(435): n is a, c, g, or t
gtgaattacaaggacgtttttccactgacccctgaaaatgcaggccgggtgcttctggctggaaactattcggattttatcacttatgggagaaaagcctttccgggcgcggtttcatactggtacgacacttcccaggccattccggatattgttccatatgccaggagtgttgataccgtgatcttctgcctttccaacaaggccggaatcagaatagtccagcagctccggtctttgaataaaagagtgatcgttttttctgtgctgagtccggcttatcttgacgaagtttcatgggtggatggcgccgtggcggtatatagttatgccccggaatcgtttatagctggtttttcggccatcattggcagaataaaaggggaagggaaactcccttttgcgttgaatatggaccctttatccggaaattaa

SEQ ID NO: 59298 - protein, 144 aa, Unknown
  Obtained from environmental sample
  misc_feature (1)..(144): Xaa is any amino acid
MNYKDVFPLTPENAGRVLLAGNYSDFITYGRKAFPGAVSYWYDTSQAIPDIVPYARSVDTVIFCLSNKAGIRIVQQLRSLNKRVIVFSVLSPAYLDEVSWVDGAVAVYSYAPESFIAGFSAIIGRIKGEGKLPFALNMDPLSGN

SEQ ID NO: 59299 - DNA, 1626 bp, Unknown
  Obtained from environmental sample
  misc_feature (1)..(1626): n is a, c, g, or t
atggaggccaggcggctaaaagaaaagcttgtcggctttcttgggggaaaatttcctgaactaaaagaactaaaaagtttgagattactcaagcgttacgacgcggacagtctcgatgaggaacagttcaggcagcttactggggctgttttttcagagcctcaggttgatcgggtattttacggaacggaattttccaaaaaaatgaaaaacatatctttttttggaattgaattcctgccggggcaatacaatcagagagccgattcggcggaacaatgcgcggagcttgttacaggcgtaaagccccggattagaaccgcggaaatttacgtttttgaaggcggccacgcgccgctttccggcgccgcccttgagggcataaaaaaataccttattaacccggtggactcaagggaagcttcgcttgagcttccccttacacttgacgatgaaacaagcgaaccggctgatgtagagatacttgccggctttattaaaacggacggtacagacctgaaagagcttagcacgcgctacgggctttccatgtcgattgacgatctcattttctgccgggactggttcgtcaaagaaggccgcgatcctacattggcggaactttgcgttcttgacacctactggtcggatcattgcaggcacagcacctttaacaccgctctggaagaaatcgcggtttccagcggtaacgatggcctaaaaaaagctctggagctttacgaggaaacccggcgggtagtttatggagcggcagcccaagaccggaaacgctctctcatggatatggctaccctcggagtaaaggcgctgaaaaaacggggccttgtaaacgatcttgacgagtctcccgagatcccatcagggcggnnaangncanagcanaanncaccaagggngctctcaggggccngncngcncccannnaagaatgagacccacaaccatcccaccgaaatagaacccttcgggggagcggctacctgcctgggcggcgcaatacgcgatcccctttctggcagggcgtatgtacatcaggccatgcgcgtaacaggcggcggcgatcccagaagcggccttaggaacactttgcctggcaaattgccccagatcaaaatcgcgttagaatcggcggccggttattcgtcatatggcaatcaaataggccttgcgacggggcaggttgctgaattttatcattctggctttctcgccaagcgaatggagctgggcgcggtaatcggcgcggtaccggaagcctgggtgcgccgcgaggaacccgttgcgggcgaccttgtgatcctcgtggggggcagaaccggcagggacggtatcgccggcgcaaccggttcttccaaggtacacacaggcgaatccgtggagagcgccggggcggaagtgcaaaaagggaatgccgtagaagagcggaagctccagcgccttttccgcaatcccgatgttagccgcctgataaagcgatgcaacgacttcggcgcaggcggcgtttccgtagcagttggggagcttgccgaaggcattgacatcaacctcgacgcagtacctaaaaagtacgccggccttaaccggcatggagctgtctatttctga

SEQ ID NO: 59300 - protein, 541 aa, Unknown
  Obtained from environmental sample
  misc_feature (1)..(541): Xaa is any amino acid
MEARRLKEKLVGFLGGKFPELKELKSLRLLKRYDADSLDEEQFRQLTGAVFSEPQVDRVFYGTEFSKKMKNISFFGIEFLPGQYNQRADSAEQCAELVTGVKPRIRTAEIYVFEGGHAPLSGAALEGIKKYLINPVDSREASLELPLTLDDETSEPADVEILAGFIKTDGTDLKELSTRYGLSMSIDDLIFCRDWFVKEGRDPTLAELCVLDTYWSDHCRHSTFNTALEEIAVSSGNDGLKKALELYEETRRVVYGAAAQDRKRSLMDMATLGVKALKKRGLVNDLDESPEIPSGRXXXXXXXPRXLSGAXXXPXKNETHNHPTEIEPFGGAATCLGGAIRDPLSGRAYVHQAMRVTGGGDPRSGLRNTLPGKLPQIKIALESAAGYSSYGNQIGLATGQVAEFYHSGFLAKRMELGAVIGAVPEAWVRREEPVAGDLVILVGGRTGRDGIAGATGSSKVHTGESVESAGAEVQKGNAVEERKLQRLFRNPDVSRLIKRCNDFGAGGVSVAVGELAEGIDINLDAVPKKYAGLNRHGAVYF

SEQ ID NO: 59301 - DNA, 720 bp, Unknown
  Obtained from environmental sample
  misc_feature (1)..(720): n is a, c, g, or t
gtgaaacagacgcagcctgttcaaaataatacgcctgtcgcgactactgtttccgccgttatcaatcctaaagttccggttgaaaacaaggggactttggtttttattattgacgacgccggaaataatttaagggaactggaaccttttctgcgtattcaatttccatttacaatcgcagtattgcccggtcttccgcattcagcggaagcggcgcggaagataagggagagcggaaaagaagtgattttacaccagccgatggaagctataggagggcaggagccaggtccgggagcgatttattccggtatgagcgacgcggaaataagggaagtgttgtcgcgtaacattgaagaagtcgggcctgtcgccggaatgaataatcatcaggggtcgaagataacaatggacaaagaggcaatgcggacgatattggctttttgtaatgaaaagggcatttgttttattgattccagaacgaccgcggacactgttgttcccttggtagcgaaccagatggggattaaaatcgccgaaagaaatgtttttattgataacgaacagaataaggacgctatgctccgctatatttcaggcgggcttgcaagagcgcagaagagcggcagcgcggtgatgattggacacacatggtcgcctgatttagcgccatttgcttgcgatcaatttcggatttttctgaacaggggtacactctaa

SEQ ID NO: 59302 - protein, 239 aa, Unknown
  Obtained from environmental sample
  DOMAIN (35)...(235): Divergent polysaccharide deacetylase
  misc_feature (1)..(239): Xaa is any amino acid
MKQTQPVQNNTPVATTVSAVINPKVPVENKGTLVFIIDDAGNNLRELEPFLRIQFPFTIAVLPGLPHSAEAARKIRESGKEVILHQPMEAIGGQEPGPGAIYSGMSDAEIREVLSRNIEEVGPVAGMNNHQGSKITMDKEAMRTILAFCNEKGICFIDSRTTADTVVPLVANQMGIKIAERNVFIDNEQNKDAMLRYISGGLARAQKSGSAVMIGHTWSPDLAPFACDQFRIFLNRGTL

SEQ ID NO: 59303 - DNA, 399 bp, Unknown
  Obtained from environmental sample
  misc_feature (1)..(399): n is a, c, g, or t
atgacgctggaggaaaaagtgggacagatgacccaggcggagtgcggacaagtgctgaaaggcgatattgaaaaatacttcattggctctgtcttaagcggaggcggatcaactccaagggataataccccgcagggctggataaaaatggttaacggctttgtggaagaatccctgaagacgcggcttagaattcctgttgtttacggaattgacgcggtacacgggcacaacaacgcgaaaggcgcgactattttaccgcataacatcgcccttggcgcgattgccgccggcgatccacaacggggagcgcaaaccgcttacattgcgggaaaaattaccgcggaggaatgcttgcgacaggcatacgctggacattcgctccggtgctgggcgtag

SEQ ID NO: 59304 - protein, 132 aa, Unknown
  Obtained from environmental sample
  misc_feature (1)..(132): Xaa is any amino acid
MTLEEKVGQMTQAECGQVLKGDIEKYFIGSVLSGGGSTPRDNTPQGWIKMVNGFVEESLKTRLRIPVVYGIDAVHGHNNAKGATILPHNIALGAIAAGDPQRGAQTAYIAGKITAEECLRQAYAGHSLRCWA

SEQ ID NO: 59305 - DNA, 882 bp, Unknown
  Obtained from environmental sample
  misc_feature (1)..(882): n is a, c, g, or t
atgcttgcgacaggcatacgctggacattcgctccggtgctgggcgtagcgcaggatccgcggtggggacgcacttacgaaagttacagcgagaataccgatattgtttcggcgctgggcgaatattttattaaaggcgtacaggagaacggcggcgccgcctgcatgaaacactttcttggagaggggcagacggcagacgggcgcaatcagggcaacgctcttttggataaggatggaatcgaaaaaattcttccgccataccgcgcggcaattaatgcgggcgcaatgtcattaatgccttcgttctcaagcataaacggaatcaaaatgcaccagaacaaagaactgcttacggatttattaaaaggggaaatggattataagggctttgttgtttccgactggtcggcggttaaacagctgacgggcggcagttacaaaatgcagattgcgaacgcgattaacgcgggagtggatatgtgcatggcggccgacggccgcagcaactggataaattttatcaatgagcttaccaaactggttgaagacggcattgttcccatgtcgcgcattgacgacgctgttattcgcattctgcgttttaaacaaaaactaaagttatttgaaacccccttgataacgcaagcgggcgaaatcggcactgctgaaaacagggccgccgcgcgcgaacttgtttccgattcgcttgttcttttacgcaacgaanaagacacgattagaagactttccgagagcaaaaaaatcttggtcgccggccagagcgccaataatatcggaaatgcatgcggcggatggacaataacatggcagggaggaaacggcactattacaaaggaacaacaatactggaaggaataa

SEQ ID NO: 59306 - protein, 293 aa, Unknown
  Obtained from environmental sample
  DOMAIN (1)...(164): Glycosyl hydrolase family 3 N terminal domain
  misc_feature (1)..(293): Xaa is any amino acid
MLATGIRWTFAPVLGVAQDPRWGRTYESYSENTDIVSALGEYFIKGVQENGGAACMKHFLGEGQTADGRNQGNALLDKDGIEKILPPYRAAINAGAMSLMPSFSSINGIKMHQNKELLTDLLKGEMDYKGFVVSDWSAVKQLTGGSYKMQIANAINAGVDMCMAADGRSNWINFINELTKLVEDGIVPMSRIDDAVIRILRFKQKLKLFETPLITQAGEIGTAENRAAARELVSDSLVLLRNEXDTIRRLSESKKILVAGQSANNIGNACGGWTITWQGGNGTITKEQQYWKE

SEQ ID NO: 59307 - DNA, 885 bp, Unknown
  Obtained from environmental sample
  misc_feature (1)..(885): n is a, c, g, or t
atgaaaaaatattctgtgctattcgtggttttcttttttacgctcggcttgtggctacagccacttccgcttttttcaatagactggccttcggtatccggcgcaataaggaaaaatttcggctggaatgatcagggcctgccccatcttggcattacctttgataccgacgaacaagtgaaagcggccgatgtcggggatatctttttctcccgccgggaaggagataccgcttcacgcctcccctcgcctttaggcgtctggacggcacttgatcacggggacggaatcgtaagcatctactcccgcatggatgacaaaagccaaaaagcggttgcaggccgtacagaaaaaggcactgttctgggcgaagccggaatttccggttggacaaaccgaaagggggtctattttcagcttttcgatcgcaaggaaagacgctggctaaaccccgccctgattatcaccccccctgaagaccaaaggccgcctgaagtaatgtcggtaaggctcaggaacgacgatggacagctcatcaatccttatcaaacccataacataagtcaggggcgttatacgatcattgtgaacgcgcttgacaccatgcgctcgccaagcgaaaatcccctggccccttacaggataatgtgctccctcaacggtagcgaagccggggtactgtcttttgaaacgttttccgccagggacggccggctgatggtctacagaaacggcctggttccggtaaggcagatatactcccccgtccccgcctacgaaatagcggacgtgtggttcagccgggggcagacaacccttgaaataatcgcgcaggatataacaggcaatgtccgcaatgttgtttacaggctcatggtggaatga

SEQ ID NO: 59308 - protein, 294 aa, Unknown
  Obtained from environmental sample
  SIGNAL (1)...(26)
  DOMAIN (47)...(151): Peptidase family M23
  misc_feature (1)..(294): Xaa is any amino acid
MKKYSVLFVVFFFTLGLWLQPLPLFSIDWPSVSGAIRKNFGWNDQGLPHLGITFDTDEQVKAADVGDIFFSRREGDTASRLPSPLGVWTALDHGDGIVSIYSRMDDKSQKAVAGRTEKGTVLGEAGISGWTNRKGVYFQLFDRKERRWLNPALIITPPEDQRPPEVMSVRLRNDDGQLINPYQTHNISQGRYTIIVNALDTMRSPSENPLAPYRIMCSLNGSEAGVLSFETFSARDGRLMVYRNGLVPVRQIYSPVPAYEIADVWFSRGQTTLEIIAQDITGNVRNVVYRLMVE

SEQ ID NO: 59309 - DNA, 897 bp, Unknown
  Obtained from environmental sample
  misc_feature (1)..(897): n is a, c, g, or t
atgaaggggcatgaaaaaacctggtcaacgccggtaatcgctgaagaaaaaaaaatcgttccctgcaacatctgcggttcaagcctgtttaagccctccctgttatgcgaaggattttcatacgtccgctgcgccaaatgcggccttgtacaaatgaacccccagcccctgcaagacgaaatcaagcgccgctatggggaaggctcagggcaggattacctggcctacgagcttgccaacgaaaaagcatttttggatcttgagctccttgccctgaacgacgccggttttgaaaaactggaaaaagagctttttgcaaacggcaaaagcgccgtcggtataaatgccatccgtattttggatgtaggctgtgccacaggaagccttctcgcttttcttcgccaaaggggatgggaaacgatcggcgttgaaatcaacgagacacaggcggaatacggaagaagggaaagaaaactggatgttctcaagaagcccctgnaagaaacacattttcccgatggttattttaacgcggtaattgcctctcatcttattgaacacctgaatgatcccgcctcccttgttgccgaggtttatcgcatcctcgctgacggagggcgtttttttgttaccactcccaacatagccggattccaggcccggcttttcaaaggccgttggcgttcggcaattttcgatcatctctaccttttttcagttaaaacgcttacgcggcttttaaaggaaaaaggctttgcgattgaaaaaatagccgtctggggaggcctggcaaaaggcagtgcacctgatagagtaaagagattgttcgataaagcggccaagcgtttcggctttggcgacgttatgataataagggcgataaaacaaaggcggtaa

SEQ ID NO: 59310 - protein, 298 aa, Unknown
  Obtained from environmental sample
  DOMAIN (59)...(295): Cyclopropane-fatty-acyl-phospholipid synthase
  misc_feature (1)..(298): Xaa is any amino acid
MKGHEKTWSTPVIAEEKKIVPCNICGSSLFKPSLLCEGFSYVRCAKCGLVQMNPQPLQDEIKRRYGEGSGQDYLAYELANEKAFLDLELLALNDAGFEKLEKELFANGKSAVGINAIRILDVGCATGSLLAFLRQRGWETIGVEINETQAEYGRRERKLDVLKKPLXETHFPDGYFNAVIASHLIEHLNDPASLVAEVYRILADGGRFFVTTPNIAGFQARLFKGRWRSAIFDHLYLFSVKTLTRLLKEKGFAIEKIAVWGGLAKGSAPDRVKRLFDKAAKRFGFGDVMIIRAIKQRR

SEQ ID NO: 59311 - DNA, 657 bp, Unknown
  Obtained from environmental sample
  misc_feature (1)..(657): n is a, c, g, or t
atgaagcaaaaatacaagggcgtatttttcgatatggacggaaccctggttgataccctggaggatattgccgcgtcaatgaaccgagctcttaaattcatgggttttccggaactgccggttgaagaatacctggacaaggtaggctggggcacggaacgccttgcctttctctcgcttcccgaaaaagaacgccaaaaagaaaccgcagcccgcctggccgcgcagatgtcgcttttctacgcggaggccccgcttgcgtatacccggccttatccgggtataccggaacttgtcagtgctttgcggcaaagaaaaataaagattgccgttctgaccaataaaactgacccggtagcccaaaaagtggcctctggcctcttcccttccggttcttttgatcgcgttcagggaggtgcgcccggaaagccgcttaagcccgatcccgcgagcgtctgggagttattggtcgaacttgaccttgcccccagcgatacaattttcgtaggcgattcggaagtcgacatcgaaaccgccgtctcttcaggctgttttcccctgggcgtcagctggggctaccgttccagggaaacaatcttaaaggcaggggcgcggaggattattgaaaagccagaagaaatgctggaaatactataa

SEQ ID NO: 59312 - protein, 218 aa, Unknown
  Obtained from environmental sample
  DOMAIN (5)...(192): haloacid dehalogenase-like hydrolase
  misc_feature (1)..(218): Xaa is any amino acid
MKQKYKGVFFDMDGTLVDTLEDIAASMNRALKFMGFPELPVEEYLDKVGWGTERLAFLSLPEKERQKETAARLAAQMSLFYAEAPLAYTRPYPGIPELVSALRQRKIKIAVLTNKTDPVAQKVASGLFPSGSFDRVQGGAPGKPLKPDPASVWELLVELDLAPSDTIFVGDSEVDIETAVSSGCFPLGVSWGYRSRETILKAGARRIIEKPEEMLEIL

SEQ ID NO: 59313 - DNA, 816 bp, Unknown
  Obtained from environmental sample
  misc_feature (1)..(816): n is a, c, g, or t
atgagtaatatcgcgaaagcgtttcaaaacggtaaagcttttatcggttttgtaaccggcggggatccggacatcgaaaaaacaaaagaatttgcgctggaaatgatcagggccggagccgacctggtagaaatcggcattcccttttcagaccccatagccgaaggcccggttatacaggaagcgaatatccgcgctctgggtaacggcgcgacagtggaaaaactgtttacccttgttcaagatttgcgtaaaaagacccaggtcccgattgtgttcttaacgtacctcaatccggtttttcattacggtctgaccacttgctcggcaaatggtcagacaggttacgacgctttctttaagaaagcaaacttctgcggtcttgacgggatcatcatccccgatctgccctttgaggaacaggccgaggtaagggaagccgcatcccaatacggcgtagacatcatctcgctaatcgccccaacttcagaaacccggataaaggaaatcgcccaaaacgcgtcgggttatatctatctggtttcctcaatgggcgttaccggagtccgcagcgaaatcaccaccgatctcgcttctattgtcaaaacgatccgttccgtgacagaggttcccgtcgcaatcggctttggcatacacaccccgtcccaggccgcgcaaatggcgcaaatggcggacggcgttatcgtaggcagcgccattgtcaaaatcatcgcggaacacggcggggaggcggaaccccatatttaccgttatgtgaaggaaatgaaggaagcggcaaattcaggtaaaagataa

SEQ ID NO: 59314 - protein, 271 aa, Unknown
  Obtained from environmental sample
  DOMAIN (8)...(267): Tryptophan synthase alpha chain
  misc_feature (1)..(271): Xaa is any amino acid
MSNIAKAFQNGKAFIGFVTGGDPDIEKTKEFALEMIRAGADLVEIGIPFSDPIAEGPVIQEANIRALGNGATVEKLFTLVQDLRKKTQVPIVFLTYLNPVFHYGLTTCSANGQTGYDAFFKKANFCGLDGIIIPDLPFEEQAEVREAASQYGVDIISLIAPTSETRIKEIAQNASGYIYLVSSMGVTGVRSEITTDLASIVKTIRSVTEVPVAIGFGIHTPSQAAQMAQMADGVIVGSAIVKIIAEHGGEAEPHIYRYVKEMKEAANSGKR

SEQ ID NO: 59315 - DNA, 1002 bp, Unknown
  Obtained from environmental sample
  misc_feature (1)..(1002): n is a, c, g, or t
gtgatagattggccgagaattgatgacgagcttctcaatctggaaaaagcctataaccattacagcaaggacagcgcctttaacgcggagttaaacgatctgctgaaaaattacgcgggccgcccttcgcttttatattacgctcaaaagatgaccggggatttggggggggcgaagatctacctcaagcgggaggacatgaaccataccggctcgcacaagatcaataacgtgcttggccagaccctgctggcaaaaaaaatgggcaaaacgcggattatagccgagacgggcgcgggccagcacggagtcgcggcggcgaccgcggccgccctgctggggctggactgcgaggtctttatggggaaagaggacaccatccgccaggcacttaacgtataccgcatggaactgttaggcgcaactgtacatcccgtgacatccggcacgcaaaccctgaaagacgcggtgaatgaaaccatgcgggaatgggtcagccgcgtccatgacacccactatgtgctcggctccgtgatggggcctcatccctttccgacaatagtgcgggattttcagagcgttatcggcagggaggcgcgtgaacaaatacttgccgcggaaaataaacttccagccgcagtcctggcctgcgtgggcggcggcagcaatgccatgggcattttttatcattttattcaggataccggagtgaagttaatcggctgcgaggccgcgggccttggaatcgaaacggataagcacgccgccaccatcgcanagggctccgtgggaatatttcacgggatgaaatcctacttctgccagaatgacgagggccagatccgccccggtttattcatttcagcgggccttgattattccgggcataggccccggaacacgcctggctcaatgacacgggacgcgccgaatacgtacctgtcaccgacgaggaagcggtctgcgcctntgagtacctctcccgcacagagggaatcataa

SEQ ID NO: 59316 - protein, 333 aa, Unknown
  Obtained from environmental sample
  DOMAIN (36)...(333): Pyridoxal-phosphate dependent enzyme
  misc_feature (1)..(333): Xaa is any amino acid
MIDWPRIDDELLNLEKAYNHYSKDSAFNAELNDLLKNYAGRPSLLYYAQKMTGDLGGAKIYLKREDMNHTGSHKINNVLGQTLLAKKMGKTRIIAETGAGQHGVAAATAAALLGLDCEVFMGKEDTIRQALNVYRMELLGATVHPVTSGTQTLKDAVNETMREWVSRVHDTHYVLGSVMGPHPFPTIVRDFQSVIGREAREQILAAENKLPAAVLACVGGGSNAMGIFYHFIQDTGVKLIGCEAAGLGIETDKHAATIAXGSVGIFHGMKSYFCQNDEGQIRPGLFISAGLDYSGHRPRNTPGSMTRDAPNTYLSPTRKRSAPXSTSPAQRES

SEQ ID NO: 59317 - DNA, 444 bp, Unknown
  Obtained from environmental sample
  misc_feature (1)..(444): n is a, c, g, or t
ttgtcagattggccgagattcgaaattgacggaatgcagacgctggcggctatcttaaaacagggagactatgatttcggcgacaagataatcaacgagctggagcagagcagtcccgatataggaaaaagccttaaagaaaaaatctacactcttgacgatgttgtccttaccgttgacaggcctatacaggaaaaactttcgctgatgtcggatcaggagatagcgatattaatgaagggcaggggaaagccgttttgcgaaaaaattctttcctgcgtatcggcggggcgcaggaaaataatccgcgaagaatttgaagttctcggcgcggttccgaagcgggactgcgacgccgccgcgggggaatttctttcctggttcaggaaagcccgagaaaacggggaaattatactttacagtgataaggatgtttatttatga

SEQ ID NO: 59318 - protein, 147 aa, Unknown
  Obtained from environmental sample
  DOMAIN (31)...(140): FliG C-terminal domain
  misc_feature (1)..(147): Xaa is any amino acid
MSDWPRFEIDGMQTLAAILKQGDYDFGDKIINELEQSSPDIGKSLKEKIYTLDDVVLTVDRPIQEKLSLMSDQEIAILMKGRGKPFCEKILSCVSAGRRKIIREEFEVLGAVPKRDCDAAAGEFLSWFRKARENGEIILYSDKDVYL

SEQ ID NO: 59319 - DNA, 2976 bp, Unknown
  Obtained from environmental sample
  misc_feature (1)..(2976): n is a, c, g, or t
atgagtaaaccgaataccgaacttaaaaaagggcagattttagacagcggatttgtcattctggacatagttgatatggacgaaatgaaggccgtaggcgtttgggcaaaacacgaaaaaagcggcgcggaagtttttcatgttttgaacgacgacagcgagaaccttttttcatttacttttaaaacttttccgcaggacaacacgggggtagctcacattcttgaacattcggttttgtgcggctcgcaaaattatccgctgaaagacgcgtttatagttctagcgcagggaagccttcagacttttttgaacgcgatgacatttcccgacaaaacggtgtatcctgcaagttccacaaacgaacacgattattttaatttgatgtccgtgtacggtgacgcggtcttccggcctctgctccccgaatggacttttatgcaggaaggacacaggtacgagtatcaggacggcaaacttacaatcaccggagttgtttacaatgaaatgaaaggcgcttactcttcgcttgattcattcgcctctacatggtcggtaaaggcggtactgcccggcactccctacgcttttgattcaggcggcgatcctcaggaaattccggagctttcatgggaaggcttaaagaattttcaccttaagcgctattcgccggcgaattgcaaagtgtttctcgcgggcaacatacctacggaaaaacaactttcattcttaaacgatcaatttttttcaaaaatagacggcggaaaagaatgtgcgcccgttaacaagactgaacgctggaaagagccgaaagaatttacaattccctgccccgcggagggcgaggcgaaatcaacaatatttttatcgtggctttgccccgatgtcaccgaaatcgaagaatgtttcatgttaggcgtactttcggaaattttattgagccacgacggctctccgttaacgcggaaattaattgaatccggttatggagaagacataacgcccgtctccgggtttgaaagcgaaataagagaagcgttatttgtcgccggcttaaaaggcgtaagcggcgatacacagcagatggggcggaaggttgaaaaacttatcatggatgagttgaacaggcttgtcaccgaaggtatcccgccggaagaaatagaagcggctgttttatccgttgaattcgggcatagggaaatacgcaggtcgagcggaccgtattcccttatttggatgcgccgctccctgcacacatggctgcacggccgcaagccctgggaaagtctgctaattctgcctttgcttgaaaagttaaaagaaaatatttcatcagacaaacgttttttcgaaaaactgataaaaaaatattttctggataacccgcaccgcgcccttgtcatccttgagccgaagaaagatttccttcagaaacaggatgaagaactttcgctgcggcttgccgataccgagaaaaacatgagcaaggaagcgcgtgaaaaaattatcgagaaggcggaagaactggaaaaaatccaaagcgaagccgacagcccgcaggcgctcgccgcaattcctcatctttcgcgtaacgacctctcggttgaaaccgacatcatacaccgccgtcaggaggatttaagcgggataccggctttatgccacgatctttacacaaacggcattacctacgcggatttggctttccccgtggacattttaccggaagacgattatccgtggctgccgtttttttcaagagcgattgtttccgttggtcttcccggcatggattacggcgaggtgtcaagtttgctggcgcggacagtcggcggctttaacgcggtgttacatacagggtccgccgccgccggtacggacaagcttttaagaaccgcgtccggtcttatggacttatccggccgcgactggctgattttccgcttaaagtgccttgacgagaaaatcgctccgtctttggatattaccctgcgcctgatccgcgaagcggatttttccgatcttgatcgcataacagaccttgttttggaaatgaagaacgaagtttcttccagtcttgcgccgatgggacaccagtacgcctctgccagggcgggaaggggcaattctttatgcaaaaaaacagaagaaacatggaacgggctttctcagatagaatttgtccaccgccttgcagggtatgaggcggcggcagtcgncgctaaatttaaatatttacaggaaaaatttcaaagcgcagggttaatcgccaacctgacaggccagtccttgcagaccgcgggcgcggaagtttcgcaaagtttcggcaggtttggcgctcccgcgcctcgcttttttgcgcttcgcgccgatgtttcaggaaaaaaagcattcgccgaagttttcgcgtctccctctttgcaggttggtttcgcggcgcgttcgatgaactctgcggcttttgatactacagagcaaattgcggaaatggtactgactcaccagctttcgacaggggcgctttgggaagatatacgaatgaagggcggcgcttacggcgcgttcgcaaccagcgacagccttgaaaactgtgtttcctttgcgacctaccgcgatcccaatcctttgcgctcgcttgacattttttccgcaatactgaaaaacgccgcgcatgggaattgcgacgaagactcgcttgttaaaaatataatcgggtgttatgcgaaagaaacacgccccaggacaagcgccgaaaacgggctggttgatttttaccgtttcctttacgggatagaagacagttaccgcaagagaaaaatagaacgccttgtttcgacttcaacatcggatattcaggcggctttttcggcgcttggatcaagggctgcgacaggctcggtagttatcgcgggaacaaaagccgcggaacaggcggcaaaggcgcttggaacggaagtacaattactgcctgtgtaa

SEQ ID NO: 59320 - protein, 991 aa, Unknown
  Obtained from environmental sample
  DOMAIN (208)...(394): Peptidase M16 inactive domain
  misc_feature (1)..(991): Xaa is any amino acid
MSKPNTELKKGQILDSGFVILDIVDMDEMKAVGVWAKHEKSGAEVFHVLNDDSENLFSFTFKTFPQDNTGVAHILEHSVLCGSQNYPLKDAFIVLAQGSLQTFLNAMTFPDKTVYPASSTNEHDYFNLMSVYGDAVFRPLLPEWTFMQEGHRYEYQDGKLTITGVVYNEMKGAYSSLDSFASTWSVKAVLPGTPYAFDSGGDPQEIPELSWEGLKNFHLKRYSPANCKVFLAGNIPTEKQLSFLNDQFFSKIDGGKECAPVNKTERWKEPKEFTIPCPAEGEAKSTIFLSWLCPDVTEIEECFMLGVLSEILLSHDGSPLTRKLIESGYGEDITPVSGFESEIREALFVAGLKGVSGDTQQMGRKVEKLIMDELNRLVTEGIPPEEIEAAVLSVEFGHREIRRSSGPYSLIWMRRSLHTWLHGRKPWESLLILPLLEKLKENISSDKRFFEKLIKKYFLDNPHRALVILEPKKDFLQKQDEELSLRLADTEKNMSKEAREKIIEKAEELEKIQSEADSPQALAAIPHLSRNDLSVETDIIHRRQEDLSGIPALCHDLYTNGITYADLAFPVDILPEDDYPWLPFFSRAIVSVGLPGMDYGEVSSLLARTVGGFNAVLHTGSAAAGTDKLLRTASGLMDLSGRDWLIFRLKCLDEKIAPSLDITLRLIREADFSDLDRITDLVLEMKNEVSSSLAPMGHQYASARAGRGNSLCKKTEETWNGLSQIEFVHRLAGYEAAAVXAKFKYLQEKFQSAGLIANLTGQSLQTAGAEVSQSFGRFGAPAPRFFALRADVSGKKAFAEVFASPSLQVGFAARSMNSAAFDTTEQIAEMVLTHQLSTGALWEDIRMKGGAYGAFATSDSLENCVSFATYRDPNPLRSLDIFSAILKNAAHGNCDEDSLVKNIIGCYAKETRPRTSAENGLVDFYRFLYGIEDSYRKRKIERLVSTSTSDIQAAFSALGSRAATGSVVIAGTKAAEQAAKALGTEVQLLPV

SEQ ID NO: 59321 - DNA, 843 bp, Unknown
  Obtained from environmental sample
  misc_feature (1)..(843): n is a, c, g, or t
atggccgaggtctggatctgtaaagcagggcttgtctttacatacgtaaaagaacagacaccggaaatctgccttgaagctgtcaggcaaaacggatcaaatttagtatatgttgaaaaacaaacaccggaaatctgccttgaggctgttaagcaaaacgggtccgcattacaatatgtaaaggagcaaacaccggaaatttgtctggaagctgtaaaaaacaatggcttgtctttacaatacgtaaaaaaacaaacaccggaaatttgtttagaggctgttaagaaacatggttacgcattacaacatgtaaaggagcaaacatcggaaatttgcctgaaggctgttagatcatttggatcagcattaaaatatgtaaaagagcaaacaccggaaatttgcctggaggctgtcaggtcatttggctccgcattaaaatatataaaacagcaaacaccggaaatttgcctggaggctgttaagcaagacgggtcagcattagaatatgtaaaggagcaaacgccggaaatttgtctcgaagctgttaaaacaagcggggccgcattacaacatgtaaaaaaacaaacgccggaaatttgtatggaagccgttaaacgtgaccataaaaaccctaataatcagcattttttacagggaatcttttccagaattgaagagcaaacgccggaaatctgtcttgaagttgttaagcagcaaggtgctttattacgggatgtaaaaaaacaaacgccggaaatctgccttgaagccgttaaaaacagccgttctgcattaaaatatgtgaaaaacataataacaaaaatttggttgttttttaaataa

SEQ ID NO: 59322 - protein, 280 aa, Unknown
  Obtained from environmental sample
  misc_feature (1)..(280): Xaa is any amino acid
MAEVWICKAGLVFTYVKEQTPEICLEAVRQNGSNLVYVEKQTPEICLEAVKQNGSALQYVKEQTPEICLEAVKNNGLSLQYVKKQTPEICLEAVKKHGYALQHVKEQTSEICLKAVRSFGSALKYVKEQTPEICLEAVRSFGSALKYIKQQTPEICLEAVKQDGSALEYVKEQTPEICLEAVKTSGAALQHVKKQTPEICMEAVKRDHKNPNNQHFLQGIFSRIEEQTPEICLEVVKQQGALLRDVKKQTPEICLEAVKNSRSALKYVKNIITKIWLFFK

SEQ ID NO: 59323 - DNA, 405 bp, Unknown
  Obtained from environmental sample
  misc_feature (1)..(405): n is a, c, g, or t
gtgcctttggctttatcctgtaatgaatgggaaaagctggagagccagattgttaaggagaccactccttttgatgatgaggaccgcgccttaacacagaggataatcggtcccaagcaagatgttgacattgataagcagggaaggatattaatacccccgacattacgtatttttgcggggttgaataaggattgtatcgtgcttggacagcacaattacatagagatttggtctgaaggccgctaccaggcgcatctggaagcgagcgaggaagcctttaaggcggcgcgcaggaaactggccgacagaataaagagggaaagggatttgacttatgatagttcacgttccggtgctgctgcaacaggttctgcattacctggcgccgaggggcggaaatga

SEQ ID NO: 59324 - protein, 134 aa, Unknown
  Obtained from environmental sample
  DOMAIN (35)...(103): MraZ protein
  misc_feature (1)..(134): Xaa is any amino acid
MPLALSCNEWEKLESQIVKETTPFDDEDRALTQRIIGPKQDVDIDKQGRILIPPTLRIFAGLNKDCIVLGQHNYIEIWSEGRYQAHLEASEEAFKAARRKLADRIKRERDLTYDSSRSGAAATGSALPGAEGRK

SEQ ID NO: 59325 - DNA, 939 bp, Unknown
  Obtained from environmental sample
  misc_feature (1)..(939): n is a, c, g, or t
atgatagttcacgttccggtgctgctgcaacaggttctgcattacctggcgccgaggggcggaaatgagcttttaattgacgcaactgtcggagaaggcgggcacagcctggcttttctatcccgtttccatgatctttccgtggttggcattgacgccgaccctgcgatacaggcggtcgcaaaggaaaggttggctgagtttggggagcgtatgcggttttataccggctggtcccaggatttttttgccgattaccccgccgatctgaagcgcccggacacggtgctttttgatctgggggtaagtctcttccactacgaaaagagcgggagggggtttagtttctcggcggcggagaaactggacatgaggattgacacctcaaaaggtttttcggcggcggagcttttagcgcaaagacccgagaaggaaattgccgatattatttataagaacgccggcgagcgatactcgcggcgtatcgcgaaagcgatagtacaggggcggcggaagggagcaatctccactgccgcggatctctcggaactgataatgcgggcggtaccggccccgtacaggcatggcccgatacacccggcgacaagaacctttatggctctgcgtgttgccgtaaacggggagttggaaaggcttcccggactccttgagggcgcgttcaatgttttgaagcccggaggggtaatgggagtaatcagtttccaatcactggaagacagggttgtcaagaatttcttcaggatgaagaacaggtcttgtagctgcccgccggaacaggcagtttgcaaatgttccggtttgcggtcagtaaacattctgacccccaagggcgtgaccgcggacgcggatgaaattatacgtaacccgccttcgcggagcgcaaggctgagggttgcgaaaaaaattttaggagaataa

SEQ ID NO: 59326 - protein, 312 aa, Unknown
  Obtained from environmental sample
  DOMAIN (1)...(309): MraW methylase family
  misc_feature (1)..(312): Xaa is any amino acid
MIVHVPVLLQQVLHYLAPRGGNELLIDATVGEGGHSLAFLSRFHDLSVVGIDADPAIQAVAKERLAEFGERMRFYTGWSQDFFADYPADLKRPDTVLFDLGVSLFHYEKSGRGFSFSAAEKLDMRIDTSKGFSAAELLAQRPEKEIADIIYKNAGERYSRRIAKAIVQGRRKGAISTAADLSELIMRAVPAPYRHGPIHPATRTFMALRVAVNGELERLPGLLEGAFNVLKPGGVMGVISFQSLEDRVVKNFFRMKNRSCSCPPEQAVCKCSGLRSVNILTPKGVTADADEIIRNPPSRSARLRVAKKILGE

SEQ ID NO: 59327 - DNA, 399 bp, Unknown
  Obtained from environmental sample
  misc_feature (1)..(399): n is a, c, g, or t
ttgggggtcagaatgtttactgaccgcaaaccggaacatttgcaaactgcctgttccggcgggcagctacaagacctgttcttcatcctgaagaaattcttgacaaccctgtcttccagtgattggaaactgattactcccattacccctccgggcttcaaaacattgaacgcgccctcaaggagtccgggaagcctttccaactccccgtttacggcaacacgcagagccataaaggttcttgtcgccgggtgtatcgggccatgcctgtacggggccggtaccgcccgcattatcagttccgagagatccgcggcagtggagattgctcccttccgccgcccctgtactatcgctttcgcgatacgccgcgagtatcgctcgccggcgttcttataa

SEQ ID NO: 59328 - protein, 132 aa, Unknown
  Obtained from environmental sample
  misc_feature (1)..(132): Xaa is any amino acid
MGVRMFTDRKPEHLQTACSGGQLQDLFFILKKFLTTLSSSDWKLITPITPPGFKTLNAPSRSPGSLSNSPFTATRRAIKVLVAGCIGPCLYGAGTARIISSERSAAVEIAPFRRPCTIAFAIRREYRSPAFL

SEQ ID NO: 59329 - DNA, 615 bp, Unknown
  Obtained from environmental sample
  misc_feature (1)..(615): n is a, c, g, or t
gtggtctctgaccgaattcttatggatttccccgagctgtgccgatctcttggggcgcggcttctttcttttggggaagccggggctaacgccggcttttcatccgtaagcatcgattcccggaccgtgagggacggcgcgcttttcgcggcgcttcccggttcaaactgcgacggccattccttcgtggaagcggcctttaaaaaaggggcggccgccgccctggttgaacgtcaaaaacttgaaaattataatttatccgctgtagcgaaatccctggggaaaacgctcgttgttgttgacaattcgcttgagggactgcagaaagccgcggccgcgtacctggaaaaattccccggccttttgaaaatcgccattacaggctcgtcgggaaaaaccaccaccaaggaaatagccgcgagaattatcggaatcgaaaagcgcgtaacgatgaatcccggaaattacaattccgaaaccggcctgccccttgccgtttttaatttaaagccgggcgacgaggtaggcgtgtttgagatgggcatgaatcatgaaggggaaatcgcctccctggcccgggtgcttaatcctgatatcgcgttgattacaatatag

SEQ ID NO: 59330 - protein, 204 aa, Unknown
  Obtained from environmental sample
  DOMAIN (32)...(115): Mur ligase family, catalytic domain
  misc_feature (1)..(204): Xaa is any amino acid
MVSDRILMDFPELCRSLGARLLSFGEAGANAGFSSVSIDSRTVRDGALFAALPGSNCDGHSFVEAAFKKGAAAALVERQKLENYNLSAVAKSLGKTLVVVDNSLEGLQKAAAAYLEKFPGLLKIAITGSSGKTTTKEIAARIIGIEKRVTMNPGNYNSETGLPLAVFNLKPGDEVGVFEMGMNHEGEIASLARVLNPDIALITI

SEQ ID NO: 59331 - DNA, 432 bp, Unknown
  Obtained from environmental sample
  misc_feature (1)..(432): n is a, c, g, or t
ttgttcgggcgcggtgaaataatttacggcaaggcgactgttatccaggactgctataactccaacccggaatcgcttgccgtcgcgctggaattctgcgaaagcctgaactggccgggccgccgcgtgtacataatcggggaaatgctggagttaggcgaagattctgaaaaggcccatgaaggcatggggcgccttctggcggagagcaaggcggacatggtgttcctctacgggaaagaaaccgccgccggcctcaaagcgcttgacgcgaagcgttttttccatacatgcggtatggatgaactgagggccgccgttaacggttatgtgcgggacggggatctggttcttctgaaaggttcgcgcggctgcgccctggaaagggtttttggcggcttgtccagtcacggagaggcgtctgatgtttaa

SEQ ID NO: 59332 - protein, 143 aa, Unknown
  Obtained from environmental sample
  DOMAIN (1)...(91): Mur ligase family, glutamate ligase domain
  misc_feature (1)..(143): Xaa is any amino acid
MFGRGEIIYGKATVIQDCYNSNPESLAVALEFCESLNWPGRRVYIIGEMLELGEDSEKAHEGMGRLLAESKADMVFLYGKETAAGLKALDAKRFFHTCGMDELRAAVNGYVRDGDLVLLKGSRGCALERVFGGLSSHGEASDV

SEQ ID NO: 59333 - DNA, 339 bp, Unknown
  Obtained from environmental sample
  misc_feature (1)..(339): n is a, c, g, or t
atggacgcagtcttaaagactaaaatcataacgatagcgccgccgccttcggaagaatcacagcccatgcgaggattgtctttttgtttcacgggagaactaaagtccatgaaaaggggagaggcggaggagaaaataaaagcccttggtgcgcaggctaaatcttcggtagtgaaggggctttcctaccttgttacaaacgacccgtcttcaggctcgtcaaaaaacaaaaaagcgagggaactggggataaaaataattgatgaagatgaatttttggcgctgttgaattcaaagccgaaaaaacagccggtttcagaacagggcgaattgttttaa

SEQ ID NO: 59334 - protein, 112 aa, Unknown
  Obtained from environmental sample
  DOMAIN (18)...(96): BRCA1 C Terminus (BRCT) domain
  misc_feature (1)..(112): Xaa is any amino acid
MDAVLKTKIITIAPPPSEESQPMRGLSFCFTGELKSMKRGEAEEKIKALGAQAKSSVVKGLSYLVTNDPSSGSSKNKKARELGIKIIDEDEFLALLNSKPKKQPVSEQGELF

SEQ ID NO: 59335 - DNA, 2028 bp, Unknown
  Obtained from environmental sample
  misc_feature (1)..(2028): n is a, c, g, or t
atgacaatttcggaaatgcccgtctttattccagttgaaacttacccggctatccgtgcgttttttaaccagtctgacgaaggcgcaaagcctctatatatagccaccggctttattggcagcacaaaggacaattcggttaccaccctgggcaggggcggatctgaccttagcgcagcaattttcgccgctgcgttggaagcggaagagctggagatctggaccgatgtagacgggatattgacagcggatcccaggcaggttaaaaacgcgttcagaattgacaacatttcgtatgtagaggctattgaactgtcgcactttggagcaaaggtcatctatcctcccaccatcaggccggcgctggaaaaaggaatcccaatcaggattaagaatacttttaatccctcctgccccggaaccgctattataaacgacgcggaggagggggatttcgcaatccgcggcattagttccataagcggtattgccctggtatgcgtagaaggttccggcatggtgggggttgcgggtttttctgccaggctattcggcgcgcttgccagacgggggatcaacatcattttgatctcgcagagctcaagtgagtactcaatctgctttgccgtgcttccttccgatgccgaagccgcaagcgacgctgtcaaagaagagtttgcccaggagattgccgtgngaaccattgaagagccgggtgtcgaanagggccttnttattgtcgcggtagtaggcgcaaagatgaaaaaactctccggcgtttcggggaaatttttccacgcgctggggcggaacggcattaatatcgtagccatagcgcagggctcgtcggagataaacatctccgccgttatctcaaggcaggatgaatccaaggccctcaacgcggttcacgaggcgtttttccaggccacgacccgctccgtaaatcttttcctgattggaaccgggaatataggcgggaccctgcttgatcagattgccagccaccggaaaatactcgcggacagggataaaatccacattaacctcgtcggagtcgccaatatagaccggatggttttttcccagaacgggcttgaccccaaaaaaacaaaagccctgctgaacgacgaaagcaaaaacgaaacaagccgggagacggcgccgttcaatcttgttaattatattgacacaatgatctcttttaacctgcccaacgcctgtttctgcgactgcacggccaacgaggatatagcctcttcttacgggaagatactcggcgcgtccattcctgttgttacgcctaacaaaaaggcgaattcaagcacgttaaaatattaccattttctgaaagggtactcgcgcgagcgcgggataccctacctttatgagaccaccgtctgcgccgggcttccggtaatttcgacgctgcgggaccttaccctgtccggggacaagatacggcgcatcgaggcggttctttccggcacattaagttttattttcaacaactttgacgggaaaaaaaccttctccgccctggttcgggacgcgaaggcgaagggttataccgaacccgatccccgcgacgatctgaatgccatggacgcggcccgcaaagccctaatccttgcccgcgaatgcggcctgtcccttgaatttgccaatgtcgccattgagccgattctgccccgcgcctgtttcaaggcgaaaaatgttgacgctttctttaaggaactggaaaaatcggatgccgcttttgaaaaacgccgcgccgaagccgccgcgcagggaaaggccctgcgctatgtagccgttgttgaagaaggcgccgcaaaactcgctttaagggcggaagcggcggacagccccttccgttcgttggtagacagtgacaacatggtggtaattaccaccgaccgttattcgaaactgccgatggtgatcaaggggcccggcgcgggcgcacaggtaaccgccggcggtatttttgccgacattgtgcggatcgcgcggacattggtttaa

SEQ ID NO: 59336 - protein, 675 aa, Unknown
  Obtained from environmental sample
  DOMAIN (1)...(132): Amino acid kinase family
  misc_feature (1)..(675): Xaa is any amino acid
MTISEMPVFIPVETYPAIRAFFNQSDEGAKPLYIATGFIGSTKDNSVTTLGRGGSDLSAAIFAAALEAEELEIWTDVDGILTADPRQVKNAFRIDNISYVEAIELSHFGAKVIYPPTIRPALEKGIPIRIKNTFNPSCPGTAIINDAEEGDFAIRGISSISGIALVCVEGSGMVGVAGFSARLFGALARRGINIILISQSSSEYSICFAVLPSDAEAASDAVKEEFAQEIAVXTIEEPGVEXGLXIVAVVGAKMKKLSGVSGKFFHALGRNGINIVAIAQGSSEINISAVISRQDESKALNAVHEAFFQATTRSVNLFLIGTGNIGGTLLDQIASHRKILADRDKIHINLVGVANIDRMVFSQNGLDPKKTKALLNDESKNETSRETAPFNLVNYIDTMISFNLPNACFCDCTANEDIASSYGKILGASIPVVTPNKKANSSTLKYYHFLKGYSRERGIPYLYETTVCAGLPVISTLRDLTLSGDKIRRIEAVLSGTLSFIFNNFDGKKTFSALVRDAKAKGYTEPDPRDDLNAMDAARKALILARECGLSLEFANVAIEPILPRACFKAKNVDAFFKELEKSDAAFEKRRAEAAAQGKALRYVAVVEEGAAKLALRAEAADSPFRSLVDSDNMVVITTDRYSKLPMVIKGPGAGAQVTAGGIFADIVRIARTLV

SEQ ID NO: 59337 - DNA, 831 bp, Unknown
  Obtained from environmental sample
  misc_feature (1)..(831): n is a, c, g, or t
atgatagtaggggtcgccggccttggtcttatcggcggttctttagccaaagcgtactcaagcggcaatcacactgtttacggttatgacatagacgaatcaatattaggttttgcgaaactctcaggcgcggtaaacggtccgctggactcaagcacaataaaattatgcgatgttctgcttgtcgccgtaaatcccgaagacgcggtaaagtacattgagaccgccgcgccgaatatcgcaaaacacacgtttgtaatagactgctgtggtgttaaacgctatatctgcgacaagtgctttccgttggcgaaaaagtacggctttactttcgtgggcggtcacccgatggcgggaaaccacaagggcggcttcaagaacagccgcgaaaatcttttcaaaggagcgtccatgatactcgttccgcctgtttttgacgacgccgccttattcggcaggatagaggaattgataaagcccgcgggtttcggcaatttaacttttaccaccgcggaaaaacatgacgagatgatcgcgttcagctcgcagatggcgcacgttgtttcaaacgcctttatcaaaagcccgtcggcaggcggccacaaaggtttttccgcaggaagttacaaagaccttacccgcgtcgcccagcttaacgcccaaatgtggacggagctttttatgaaaaacagcgacaatttaattcacgaactggatatatttattaaagagatttcccgttacagggacgcgcttgcggatcacaatgacgcaagaatgacggaactgttaatcgaaggcagtaagataaaggaaaagctggacagataa

SEQ ID NO: 59338 - protein, 276 aa, Unknown
  Obtained from environmental sample
  SIGNAL (1)...(18)
  DOMAIN (5)...(271): Prephenate dehydrogenase
  misc_feature (1)..(276): Xaa is any amino acid
MIVGVAGLGLIGGSLAKAYSSGNHTVYGYDIDESILGFAKLSGAVNGPLDSSTIKLCDVLLVAVNPEDAVKYIETAAPNIAKHTFVIDCCGVKRYICDKCFPLAKKYGFTFVGGHPMAGNHKGGFKNSRENLFKGASMILVPPVFDDAALFGRIEELIKPAGFGNLTFTTAEKHDEMIAFSSQMAHVVSNAFIKSPSAGGHKGFSAGSYKDLTRVAQLNAQMWTELFMKNSDNLIHELDIFIKEISRYRDALADHNDARMTELLIEGSKIKEKLDR

SEQ ID NO: 59339 - DNA, 1056 bp, Unknown
  Obtained from environmental sample
  misc_feature (1)..(1056): n is a, c, g, or t
atgaaaaaaattacagttaacgcttctaaaacatacgatataaacatcggtttcggcattattgacgaggcggccgtcattttaaacaaaatcggctcagccgccgccgttgttaccgacgatattgtcgccccattgtacgcccagcgtctggagcaagtcctttcacaaaataaaatccgcattgtgcgctatgttatcccgcacggggaagcttccaaaagcgcggaacaactggtgtcccttgtaaattttcttgcaaaggaaaaactttcgcgcacagacaccgtaatcgcgctgggcggcggcgttgtcggcgacttggcaggctttgcggcggcggtttacatgcgcgggattggctttgtgcagatacccactaccctgcttgncgcggtagattcctcagtaggcggaaagaccgcggttaatcttgaggcgggcaaaaatttagcgggagctttttaccagccggacgctgtgttatgcgacatctctttgctttcaacgcttaagcctgaagttttcaaggacggctgcgcggaagttataaaatacgcagttttagcggacggcgaattgtttaaatcctttgagaaacctataaaagaccggcttgaagacgttatcgcccgatgtgttgagataaaacgcgatatagtcgcacaagacgaatttgaaaagagtgtaagaaaatttttaaacttcgggcacacaatagggcacgctatagaacttttaagcgggtacgaaattacccacggaagcgccgtcgccgccggaatggcgatagttacccgcgccgcggcgcaaatgagaatatgcgatgactcatgcaggcaggatttattaaaaaccttaaaactctacaaccttcctgttaacaccgcatacgacgctgcaagtctcgctcaagcctgcctttccgacaagaaaagggacggcggcaaagtaacaatgatcttcccggaaataatagggaaatgtatcatgaaagagataaaagtagaagaattggaaaacgtgatccggcttggtctggaggagcaaacttga

SEQ ID NO: 59340 - protein, 351 aa, Unknown
  Obtained from environmental sample
  DOMAIN (16)...(314): 3-dehydroquinate synthase
  misc_feature (1)..(351): Xaa is any amino acid
MKKITVNASKTYDINIGFGIIDEAAVILNKIGSAAAVVTDDIVAPLYAQRLEQVLSQNKIRIVRYVIPHGEASKSAEQLVSLVNFLAKEKLSRTDTVIALGGGVVGDLAGFAAAVYMRGIGFVQIPTTLLXAVDSSVGGKTAVNLEAGKNLAGAFYQPDAVLCDISLLSTLKPEVFKDGCAEVIKYAVLADGELFKSFEKPIKDRLEDVIARCVEIKRDIVAQDEFEKSVRKFLNFGHTIGHAIELLSGYEITHGSAVAAGMAIVTRAAAQMRICDDSCRQDLLKTLKLYNLPVNTAYDAASLAQACLSDKKRDGGKVTMIFPEIIGKCIMKEIKVEELENVIRLGLEEQT

SEQ ID NO: 59341 - DNA, 609 bp, Unknown
  Obtained from environmental sample
  misc_feature (1)..(609): n is a, c, g, or t
atgtatcatgaaagagataaaagtagaagaattggaaaacgtgatccggcttggtctggaggagcaaacttgaacatcaggattgttaagccggttcaaggcggcacaataggagcaattgcctcaaaatccgccgctcaccgtttgttaatttgcgcctctcttgcggatagtgaaacatttgtaatctgccaggaacgctctcaggatattgacgcaacggctctttgccttaaatcacttggttcagttatccgctatgaaaacggcggcttttttgtaactcctataaataaaacaaaagacttaacaaaagaacgctctttgaactgcggcgaaagcggatcaactctccgtttcttactccccgtctgcggcgctctgggaatgaaggtaaaatttaacatggagggccgccttcccgcccgccctcttaccgggctgtacgaggaaatgacatctaacggctgtaaactatcggaacagggatattcctctcttgtccttggcggaaaattaaaaagcggcaattattatctgccgggaaaatatttcctctcagttcataagcggattactgttcgctcttccattactcgaaggttatag

SEQ ID NO: 59342 - protein, 202 aa, Unknown
  Obtained from environmental sample
  misc_feature (1)..(202): Xaa is any amino acid
MYHERDKSRRIGKRDPAWSGGANLNIRIVKPVQGGTIGAIASKSAAHRLLICASLADSETFVICQERSQDIDATALCLKSLGSVIRYENGGFFVTPINKTKDLTKERSLNCGESGSTLRFLLPVCGALGMKVKFNMEGRLPARPLTGLYEEMTSNGCKLSEQGYSSLVLGGKLKSGNYYLPGKYFLSVHKRITVRSSITRRL

SEQ ID NO: 59343 - DNA, 1569 bp, Unknown
  Obtained from environmental sample
  misc_feature (1)..(1569): n is a, c, g, or t
atgattatgtcggaaaaatcgccttttaatcctgataccgatacaacactaaccgcgatcatagaaataggttccacgggtataaggctgaatatcgctgaaattcattcaaacggaagctggcaaacgctcgacagggcgatgcagcccgcgtcccttgngcgcgatgtttttacttcaagactgctttcccgtgaatcaatccttgagtgtctttcggttcttcaaaactaccgcgaacttttatcggggtggggtattgcggataacaatattcatcttattgccacaagcgcccttcgcgccgcgcgtaacagggatgtttttatcgaccgcatatatcaggagacgggattaatctttctattcgtggaaggcatgaggaaaaacagactgatgtatcttgctgtgcgttttgcgctaaaggatgatcttccccttatttggcgcgccaattccatgattatcgagattggcggcggctctacggaaattatgcttttgcggaagggacagatggtagcggctcacagcttaaaaatgggaacgataattatcgatcagcgttcacgtcaggggtttggcacgggcattttttacgagcgttatctgaatgagaatctcaggagtactttgacgcatctaaacatggagatggatcttgcccgcgtgcgtatgattgtcgttgccagcgccgacgcgcgtcttgccgccgacaaggttggaaaagagttaaatgaaaactgtcgtatcatcaaacgcgaagattatattaagtttgtggaacaactccgaaattacagcatagaggactgcatgcataattttggaatcccttacgccgacgctgaagggcttgtcctcggtcttttggtactcaaactttttctagagcagacgggagccgcgaatatcgcagttccgcttgttacaatccgcgacggctatcttgtcgatttggcttccggcgttgattcttccatgcaggaagaatttttctcgcagattatcgcatccgcagtcaaccttgggcgtaaatttcattttgatgaaccgcattcccttaatgtcgccaagcattgcatgaccttatttgacgcgcttgtaaaagaacacggcatgagccgccgtcatcgcgtaatgctggagacagccgctattctgcacgatattggcggctatataaaagcgtccggtcatcagaaacacagccagtacattgtcgcaaactctgaaattttcggacttcatcaggacgagcttggcattatttcaaatgtggttaactaccatcggggggaacctccttcgtcatctgatcttgagtttatgatactccagcgggaagagcgcgttgttgttcttaagatggcttctatcttaagggttgcggacgctctggatcgcggtcatactcagcaaataaaaaaaatcaccgttgagcggcgctcggaaacaattgtgcttcatgtggataaggcgtatgatctttcgcttgagttgatgggacttgaggagaaaggcgggttgtttcaggatgtgtttgggtataaggtgattttgagttag

SEQ ID NO: 59344 - protein, 522 aa, Unknown
  Obtained from environmental sample
  DOMAIN (350)...(470): HD domain
  misc_feature (1)..(522): Xaa is any amino acid
MIMSEKSPFNPDTDTTLTAIIEIGSTGIRLNIAEIHSNGSWQTLDRAMQPASLXRDVFTSRLLSRESILECLSVLQNYRELLSGWGIADNNIHLIATSALRAARNRDVFIDRIYQETGLIFLFVEGMRKNRLMYLAVRFALKDDLPLIWRANSMIIEIGGGSTEIMLLRKGQMVAAHSLKMGTIIIDQRSRQGFGTGIFYERYLNENLRSTLTHLNMEMDLARVRMIVVASADARLAADKVGKELNENCRIIKREDYIKFVEQLRNYSIEDCMHNFGIPYADAEGLVLGLLVLKLFLEQTGAANIAVPLVTIRDGYLVDLASGVDSSMQEEFFSQIIASAVNLGRKFHFDEPHSLNVAKHCMTLFDALVKEHGMSRRHRVMLETAAILHDIGGYIKASGHQKHSQYIVANSEIFGLHQDELGIISNVVNYHRGEPPSSSDLEFMILQREERVVVLKMASILRVADALDRGHTQQIKKITVERRSETIVLHVDKAYDLSLELMGLEEKGGLFQDVFGYKVILS

SEQ ID NO: 59345 - DNA, 750 bp, Unknown
  Obtained from environmental sample
  misc_feature (1)..(750): n is a, c, g, or t
atgcgacggacggcttttattacgacatanacaaaaacgaaaaacaaatccccattaagacaatcgccgggtatctgccccttttggcggaaattcccaatgngggaaaaagccgaaacgtatatcgagaaactttctgaccccaaaatattcggcacggctcacccgttcccctcgcttgcgctgtccgaaaaagaatttgacgaaacagggcgaggattcagaggatcggtttttccttatctgacattcatggttataaaagggcttgagcgttatcagcgttgggatttggcgcgggagtgcgcaatcaggcacatgtactttatgcttgattcaatgagtccggacggtaatcatcacaggggaaatctgtgggaagcgtatttgcccacaaaggaagggcccgcaaaatggtcgggtaaaccaactttcccacgcccacagtatttaacttatgacgctctttctaccatctgtttaacaatagaaaatatagtcgggctttcaatttcgcttccgcgtaaaaccgtggactgggttattcccaatctggaaattatgggagtggaaaatctttcccttaaaaataatatgattacaattctttccaataaaagcggcagaggctgggagattcacatggaaagtgaaaaactctattactttaccattaacattctgggtgtaaaagaaaaaacactaccaattccctctggaaaatgttccattcttattgataaactataa

SEQ ID NO: 59346 - protein, 249 aa, Unknown
  Obtained from environmental sample
  misc_feature (1)..(249): Xaa is any amino acid
MRRTAFITTXTKTKNKSPLRQSPGICPFWRKFPMXEKAETYIEKLSDPKIFGTAHPFPSLALSEKEFDETGRGFRGSVFPYLTFMVIKGLERYQRWDLARECAIRHMYFMLDSMSPDGNHHRGNLWEAYLPTKEGPAKWSGKPTFPRPQYLTYDALSTICLTIENIVGLSISLPRKTVDWVIPNLEIMGVENLSLKNNMITILSNKSGRGWEIHMESEKLYYFTINILGVKEKTLPIPSGKCSILIDKL

SEQ ID NO: 59347 - DNA, 747 bp, Unknown
  Obtained from environmental sample
  misc_feature (1)..(747): n is a, c, g, or t
atgggcgtggatcaagattgctggattagcggcggtgaaaagagtaaaatagaaggaaaaatcttctcttaccccgattctcaggcggtaactcagaccgacgctatcctttcctcattctttttggtgtactctaatagtattttccaagctcattcgactttggatttcttttatagccgtcaggaggaaaatggggcgattcgctccgtctatgacatcaattcaggggagcctgtaatcgataaagataaccccgaagggcttggaatgcctcttttcgcttgggcggagtacaatatctaccacaaatcgggcaataaaaagcgtgttaaggatactttaacggctttatgcaaatactcaacatggatcgataataccttcaaaaagccgaatgggctgtataaagcgcctcttggagcgggcggaatgataaatgccccgcgcggggacgcttattatcctatggacttcaacaccatgatggcgataaatatgctctacatttccgcccttgcggatattttgaacgataaggaaacaagctttcagtacaaacggctgtatttctcccttaaaaccagaatcaatacgttgatgtacaatgcgacggacggcttttattacgacatanacaaaaacgaaaaacaaatccccattaagacaatcgccgggtatctgccccttttggcggaaattcccaatgngggaaaaagccgaaacgtatatcgagaaactttctga

SEQ ID NO: 59348 - protein, 248 aa, Unknown
  Obtained from environmental sample
  misc_feature (1)..(248): Xaa is any amino acid
MGVDQDCWISGGEKSKIEGKIFSYPDSQAVTQTDAILSSFFLVYSNSIFQAHSTLDFFYSRQEENGAIRSVYDINSGEPVIDKDNPEGLGMPLFAWAEYNIYHKSGNKKRVKDTLTALCKYSTWIDNTFKKPNGLYKAPLGAGGMINAPRGDAYYPMDFNTMMAINMLYISALADILNDKETSFQYKRLYFSLKTRINTLMYNATDGFYYDIXKNEKQIPIKTIAGYLPLLAEIPNXGKSRNVYRETF

SEQ ID NO: 59349 - DNA, 381 bp, Unknown
  Obtained from environmental sample
  misc_feature (1)..(381): n is a, c, g, or t
atgttcttcggccagaatattaaccctataagcggtcagtactatattcacaagggaattgatatttccacccatcgcgccggcgatcaggttttggcgaccgcggacggtcaggtagtggctaccgaatataccaacgacttcggcaattttgtaattatcaggcacaagcacggttattatacccgttacgcgcacttgcagagcagcagggtaaaactggggcagagcgttcagcagggcgaggttatcggttatatcggaaatacaggcatatcaacgggtccccatctgcattatgaagttcatataggttcagatgttgtagatccctatcgctatattacccttcgttccagagttgccaaacaaggacattaa

SEQ ID NO: 59350 - protein, 126 aa, Unknown
  Obtained from environmental sample
  DOMAIN (15)...(111): Peptidase family M23
  misc_feature (1)..(126): Xaa is any amino acid
MFFGQNINPISGQYYIHKGIDISTHRAGDQVLATADGQVVATEYTNDFGNFVIIRHKHGYYTRYAHLQSSRVKLGQSVQQGEVIGYIGNTGISTGPHLHYEVHIGSDVVDPYRYITLRSRVAKQGH

SEQ ID NO: 59351 - DNA, 501 bp, Unknown
  Obtained from environmental sample
  misc_feature (1)..(501): n is a, c, g, or t
gtggcgcaggacagaagcggcgactattcaattaatacgattataggccccaacacaaattttaccggcaacattatcgccggcggttttacgcgcatagacggcagtataagcggagacgtaagagcgaatggcagggtagtgatcggagagcgggcgcgcatgaaggggaacgtgtccggcacgaatattaccataggcggggtagtgtgcggaaatattttcgcggacggtcatcttgttattctttcaaccgccgtagttttaggcgatattattacccgccgtatacaggcggacgacggctgctttgtcaacgggacggttagggtctgtcccaatgaagaaagctgggtaaagactatgtccgagtacaaggacgcgcagggaataaatcgaccctgcctgttttccataaaactcacagttaaacaacatggcaaaagtagaaagcgccgacacttctttttacatgaaccctgccgcctacgcgcaggttaa

SEQ ID NO: 59352 - protein, 166 aa, Unknown
  Obtained from environmental sample
  DOMAIN (3)...(115): Protein of unknown function, DUF583
  misc_feature (1)..(166): Xaa is any amino acid
MAQDRSGDYSINTIIGPNTNFTGNIIAGGFTRIDGSISGDVRANGRVVIGERARMKGNVSGTNITIGGVVCGNIFADGHLVILSTAVVLGDIITRRIQADDGCFVNGTVRVCPNEESWVKTMSEYKDAQGINRPCLFSIKLTVKQHGKSRKRRHFFLHEPCRLRAG

SEQ ID NO: 59353 - DNA, 546 bp, Unknown
  Obtained from environmental sample
  misc_feature (1)..(546): n is a, c, g, or t
atggcaaaagtagaaagcgccgacacttctttttacatgaaccctgccgcctacgcgcaggttaaagaagaaaaaaaagcaaaaacttccaaaaccggaaaaacggatttttcccgtttctttgacgatcttcgcggcgttacggcggatggaatcggccctttgcgggatcttcctgtttccgaggatactgtaaatcttttaatggacgaagtccgcagcacgggcgatattttacgcagccgcccctttccggaagagatcatgcgctacaaacaggcagttcgtaattttatgaactatgttgtaaaaaacagttttacccttgaacacgaggaagggctcccgaattttttaaaaccgggtttttccggcaggcgcggcacacccgaagcgatgaaaggaaagctgtacaccaaaattcaggttatagacaagaaacttgaagaccttgcggccatgctcctttccagccagagtcagcaaatggaattggtttcccgtcttgaggaaatacgcggccttctggtagacttaatgcaatag

SEQ ID NO: 59354 - protein, 181 aa, Unknown
  Obtained from environmental sample
  DOMAIN (2)...(181): Protein of unknown function (DUF327)
  misc_feature (1)..(181): Xaa is any amino acid
MAKVESADTSFYMNPAAYAQVKEEKKAKTSKTGKTDFSRFFDDLRGVTADGIGPLRDLPVSEDTVNLLMDEVRSTGDILRSRPFPEEIMRYKQAVRNFMNYVVKNSFTLEHEEGLPNFLKPGFSGRRGTPEAMKGKLYTKIQVIDKKLEDLAAMLLSSQSQQMELVSRLEEIRGLLVDLMQ

SEQ ID NO: 59355 - DNA, 942 bp, Unknown
  Obtained from environmental sample
  misc_feature (1)..(942): n is a, c, g, or t
atgagtgacgataacgagtatgaaaatatagaagacgacgttgttcttgatgacgagcccaaagtaaacaatgtcattacaggcgccgacgccggcatagaatccctcgctcccgacacgcccatttacaggcttaggcttttatattcccatgaaaccttccttgccgtttacagggaagacaaccttgcccccaacacaatggttatagtgcctacccgttacggccgcgatctcgctcaggtaatcggctccgtgcgcggaaaacttccgcccgtttcagaaatcgcctggatagtgcgcgccgcgactcaggaggatttggacaaggcctgcaagaaccacaaacaggaaaaagaaacttttgacatctgttttaaaaaaatcgaacagcacaaactggaaatgaaacttgtccttgtgcattatcttttggaagagcctaaaatactgttcttctttaccgccgacaacagggtagacttccgcgaacttgtaaaagaccttgtaagcgtttttaagatgaggatagaacttcgccaaatcggcgtacgcgacgaggcgcgcgttcttggcggtcttggcgtctgcggccgcggctattgctgccactgtgtttccgacaaattaaaacccgtttccattaaaatggcaaaagatcaaaaactctcgcttaactccgtaaaaatttccggtccctgcggcaggctaatgtgctgtttattttatgaatacaacttctacagcgaacagcagcgcaccctcccccaggaaggcgtaagggtaagcctgaacaacgaatcatggaaaatcacggaagtaaaccccgttaccggccaaataaaattaagctccgacgacggccgcttcatgaccgcctcctccgcccagtttgaaagaaccgaaaaccactggcgcctgcgtgacgcggtgaaaaattga

SEQ ID NO: 59356 - protein, 313 aa, Unknown
  Obtained from environmental sample
  DOMAIN (95)...(182): PSP1 C-terminal conserved region
  misc_feature (1)..(313): Xaa is any amino acid
MSDDNEYENIEDDVVLDDEPKVNNVITGADAGIESLAPDTPIYRLRLLYSHETFLAVYREDNLAPNTMVIVPTRYGRDLAQVIGSVRGKLPPVSEIAWIVRAATQEDLDKACKNHKQEKETFDICFKKIEQHKLEMKLVLVHYLLEEPKILFFFTADNRVDFRELVKDLVSVFKMRIELRQIGVRDEARVLGGLGVCGRGYCCHCVSDKLKPVSIKMAKDQKLSLNSVKISGPCGRLMCCLFYEYNFYSEQQRTLPQEGVRVSLNNESWKITEVNPVTGQIKLSSDDGRFMTASSAQFERTENHWRLRDAVKN

SEQ ID NO: 59357 - DNA, 783 bp, Unknown
  Obtained from environmental sample
  misc_feature (1)..(783): n is a, c, g, or t
ttgggctgtgatattctcctggtggctgaaccttcgtattctcttgaattgaaacagaaaggcctgcttcaccgttatatctccggcgaggccgccagtctcgcttttgcttacgacagggaaggctactggtatccggtcagggtttccgctatggtcctggcgtataacccggaaaaaaattccagaaacagcgttcccaattctttctttgatttcgccaataacgcgggctttaggggcgccatatcaatgggcgaccctcttgtctccgggacgaccctggccgcggtcgcggcgcttaaggataaatacggttatgattatcttgaggctcttggcaggcaaaagatagcgatagaatcaagtcctgcagccctgacaaaactggaaaccggggaatacaaggcggttatgaccctggaagaattggtattaaagaaacggcaggaagaagcgtccaaactggaaatcatttaccccgcggacggggcggttattattccttctacaatcatgactatcgcggacaggtggagcgccaacaacaataccaggtcggccgaagtaataaccgactggttcctgagcccctacgggcaaaacgccattgtagccggctggatgcattcggtcaggaaagattttgaagttgttccctacgcatcgattcctgtcggccggatattgacagacagtatgccgctgaattgggaaaaaattttcaagcagcgggaggatatacagatcaagttcgaggaattcgtaacctacaggagataa

SEQ ID NO: 59358 - protein, 260 aa, Unknown
  Obtained from environmental sample
  misc_feature (1)..(260): Xaa is any amino acid
MGCDILLVAEPSYSLELKQKGLLHRYISGEAASLAFAYDREGYWYPVRVSAMVLAYNPEKNSRNSVPNSFFDFANNAGFRGAISMGDPLVSGTTLAAVAALKDKYGYDYLEALGRQKIAIESSPAALTKLETGEYKAVMTLEELVLKKRQEEASKLEIIYPADGAVIIPSTIMTIADRWSANNNTRSAEVITDWFLSPYGQNAIVAGWMHSVRKDFEVVPYASIPVGRILTDSMPLNWEKIFKQREDIQIKFEEFVTYRR

SEQ ID NO: 59359 - DNA, 414 bp, Unknown
  Obtained from environmental sample
  misc_feature (1)..(414): n is a, c, g, or t
atggaaaagacaaaaaaaagagcgctgaaattggcaaataaaaaaatcgcgtttgttggttctgtcaacgaacataatgtgccaaacattaaggcaatgtcggttgtaaaacataacgggctggaaacgttttattttatatcaaatcattctgaaattaaaacggaacattacaaacgtaattttaacgcttgtatatattttaccggcgggccgatttataaagaacttatactggagggtataatgaaagtcttccatggcgatgagataaaaaattttgtccggatgaataataataaaaacgcgcataaaaacggcggacaggattctgattattgcgtgctgcaatttgtcacaaagaaggggcggtttcatcattggttcaaaaccgaagcgtttgatattgattag

SEQ ID NO: 59360 - protein, 137 aa, Unknown
  Obtained from environmental sample
  DOMAIN (4)...(90): Pyridoxamine 5'-phosphate oxidase
  misc_feature (1)..(137): Xaa is any amino acid
MEKTKKRALKLANKKIAFVGSVNEHNVPNIKAMSVVKHNGLETFYFISNHSEIKTEHYKRNFNACIYFTGGPIYKELILEGIMKVFHGDEIKNFVRMNNNKNAHKNGGQDSDYCVLQFVTKKGRFHHWFKTEAFDID

SEQ ID NO: 59361 - DNA, 336 bp, Unknown
  Obtained from environmental sample
  misc_feature (1)..(336): n is a, c, g, or t
atgagaggcattgagtataaagggctttcccgtatagagggtccggtggtaatcactacccgtagcaaaaatgtaggctataatgaggtagttgccgtttacggccgcgatggcaacaggcggcttggcagggtggttgacttaagcgaggactgggcggctatacaggtttttggcagcagcacaggtctttccgcaagcgactccagggttgagtttttggagaagcccatggaactgcgggtcggcaccgacctgatggggcggatcttcacggcctgggagagccaatcgacggttacggcgacattttttcctcaacaacgattgatgtaa

SEQ ID NO: 59362 - protein, 111 aa, Unknown
  Obtained from environmental sample
  DOMAIN (9)...(75): ATP synthase alpha/beta family, beta-barrel domain
  misc_feature (1)..(111): Xaa is any amino acid
MRGIEYKGLSRIEGPVVITTRSKNVGYNEVVAVYGRDGNRRLGRVVDLSEDWAAIQVFGSSTGLSASDSRVEFLEKPMELRVGTDLMGRIFTAWESQSTVTATFFPQQRLM

SEQ ID NO: 59363 - DNA, 312 bp, Unknown
  Obtained from environmental sample
  misc_feature (1)..(312): n is a, c, g, or t
gtgatcctcgcgggtcatgccggggcctatgccgtccttcataagccgcgagaggctgggcaggcccgcgaccggcggataaatccccctctggaaaagctcgcggtcaagaactatctggccctcggttatatagccggaaagatcggggatcggatggctgatatcatcatttggcatggtaagaatcggcagctgcgtaatggaaccctccaagtcctttatctttcccgcccgctcgtacagggacgcgaggtccgagtacaggtagccgggatagcctttacggctggggacttcgccccgtattga

SEQ ID NO: 59364 - protein, 103 aa, Unknown
  Obtained from environmental sample
  misc_feature (1)..(103): Xaa is any amino acid
MILAGHAGAYAVLHKPREAGQARDRRINPPLEKLAVKNYLALGYIAGKIGDRMADIIIWHGKNRQLRNGTLQVLYLSRPLVQGREVRVQVAGIAFTAGDFAPY

SEQ ID NO: 59365 - DNA, 558 bp, Unknown
  Obtained from environmental sample
  misc_feature (1)..(558): n is a, c, g, or t
atgagttatgtaaaaataggagtcggcggacctgtaggctccggtaaaaccgctctcattgaacggctgacaagaaaaatggcggacaagtacagcatttgcgttgtaaccaacgatatttacacgcgcgaggacgcggagttccttgtaaaaaattccgtcctgccgcctgagcgaatcgtcggcgtggaaaccggcggctgtccgcacaccgcaatccgcgaagactgctccatgaacttggaagccgtcgaggaaatggcgcgcaatttccccgacgtgcagattatttttgttgaaagcggcggcgataatctttccgcgacattttcgccggagcttgcggacgctaccatttatgtaatcgacgtagcgcaaggcgacaaaataccgcgcaagggcggtcccggcgtcacccgctcggatttactcgtcatcaataaaatcgatcttgcgcctatggttggggctaaccttgatgtaatggcaagggattcggcaaaggggcgcggcgaacgtcctttcctgtttaccaatttgtcacaacggaaggagtga

SEQ ID NO: 59366 - protein, 185 aa, Unknown
  Obtained from environmental sample
  DOMAIN (4)...(150): GTPase of unknown function
  misc_feature (1)..(185): Xaa is any amino acid
MSYVKIGVGGPVGSGKTALIERLTRKMADKYSICVVTNDIYTREDAEFLVKNSVLPPERIVGVETGGCPHTAIREDCSMNLEAVEEMARNFPDVQIIFVESGGDNLSATFSPELADATIYVIDVAQGDKIPRKGGPGVTRSDLLVINKIDLAPMVGANLDVMARDSAKGRGERPFLFTNLSQRKE

SEQ ID NO: 59367 - DNA, 600 bp, Unknown
  Obtained from environmental sample
  misc_feature (1)..(600): n is a, c, g, or t
atgtcgggcggcatggaaacctacacgcaaaaaggacttgtgcaggataaatcttctcttgtctcatacctaaaggctcaactttacattttgccctacggcgacttaggcgtctgcgccaaaacagcgcaaggcgaagattttattttaatggacagcctttgcgccgctatgaaacaaccctgcgagatacgaacgggcagtgaaaaaatctgcacgcgttttttgaaagcgcaggagacgctatgcggctatccgtcgcttgccgcgtacagactggcgataaaacaggaaaaatgcaaaggacattatcctgtcgcggtcggtcttttcatacgcgacttaaaagcgaacataggcgaggcgctggaattgtattgctacagccttttgtcgcagacagtaaaccacgccgtcaaattaattccgcttgggcaatcagacggacaggcggctctttttgaagctctgagcctgatccccggcgcggcgcaaaaggcaatggcggcggatgttgacggcttgggagtctccggctgcggttttgatttacgcgcaatgcagcatgagacgctgcgcggaagactttatataaattaa

SEQ ID NO: 59368 - protein, 199 aa, Unknown
  Obtained from environmental sample
  DOMAIN (13)...(159): UreF
  misc_feature (1)..(199): Xaa is any amino acid
MSGGMETYTQKGLVQDKSSLVSYLKAQLYILPYGDLGVCAKTAQGEDFILMDSLCAAMKQPCEIRTGSEKICTRFLKAQETLCGYPSLAAYRLAIKQEKCKGHYPVAVGLFIRDLKANIGEALELYCYSLLSQTVNHAVKLIPLGQSDGQAALFEALSLIPGAAQKAMAADVDGLGVSGCGFDLRAMQHETLRGRLYIN

SEQ ID NO: 59369 - DNA, 1035 bp, Unknown
  Obtained from environmental sample
  misc_feature (1)..(1035): n is a, c, g, or t
atgccggatgttcacctggggaagtccactgttataggctggacggcaacatacaatacgttgcttattccctcggttatcgggtttgatattggctgcggcctttgcgcctgcaaccttggccgggggaaattacgctttgacaaactggatttattcctccgaaaaaatatcccatcaggtcaggcggtacatccttcgcttcatgagtcgctggaagatatgaacgcgtttgcttcacagaacagcgaatttaccgaattgtcaagtcttgagcgtttcgggaatgaaacccgcaagctttgcgaaaaacagggccgagatccggatcgtgtgtttgcttcgcttggcacgcttggaggcgggaatcactttatcgaaattgatgttgatgaaaaccacaaccgctggctgctgattcattcgggatcaagaatattgggggctaataccgccgactatcacgaaaccatcgccttaagggagacagacgcggacagccccatcaaatacctttccgacggctatgcagatgattaccttgcggatatccgcgtcgttcagcattacgccaaagtcaaccgcttgctgatggtacaaacgatcgtgaagggctttttcaagcttgacatacgggaacttgaataccgggactgcgtgcacaactacattgacctctccggctctattatccgcaagggcgctatttccgcaaagaaagatgagccgattatcattccctttttcatgtcggaaggcgcggttttggcagagggcaaaggaaacgccgaatggaaccattctgccccccacggttcaggaaggaagaaagcccgaacggatgcccgaagcctttcgcttgatgaataccgcagagaaatgcgtggcgtctggtccagcgttatctgcaaggacacgttggaagaaagtccgatggcttataaaaagccaaaagacgtgcttgattacatcgccggaacagtagaggttaaacagcgccttaagcccttatacaattttaaggctgttgactaa

SEQ ID NO: 59370 - protein, 344 aa, Unknown
  Obtained from environmental sample
  DOMAIN (1)...(342): Uncharacterized protein family UPF0027
  misc_feature (1)..(344): Xaa is any amino acid
MPDVHLGKSTVIGWTATYNTLLIPSVIGFDIGCGLCACNLGRGKLRFDKLDLFLRKNIPSGQAVHPSLHESLEDMNAFASQNSEFTELSSLERFGNETRKLCEKQGRDPDRVFASLGTLGGGNHFIEIDVDENHNRWLLIHSGSRILGANTADYHETIALRETDADSPIKYLSDGYADDYLADIRVVQHYAKVNRLLMVQTIVKGFFKLDIRELEYRDCVHNYIDLSGSIIRKGAISAKKDEPIIIPFFMSEGAVLAEGKGNAEWNHSAPHGSGRKKARTDARSLSLDEYRREMRGVWSSVICKDTLEESPMAYKKPKDVLDYIAGTVEVKQRLKPLYNFKAVD

SEQ ID NO: 59371 - DNA, 516 bp, Unknown
  Obtained from environmental sample
  misc_feature (1)..(516): n is a, c, g, or t
ttgaaaaggccgggggttcccgaaggctactatgagattcccgagggagagcccgttatacgcaagcagggcagggacatcaccattgccactttgggggcaacgctttacaaggcgatggaggccgcaaaaaaactggaaacgcaattcggcctttccgccgagattatcgatctgcgttttatcaatccccttaattacgaaaagattatcgagtcggttaagaagaccggaaagatactcctcgcaagcgacgcggcagagcgcggctctttcctccacaccgtagccagcaatatccaaaccctggcctttgattaccttgacggcccgataacggttgtcggaagccgcaactggatcaccccggcggcggaaatggaagagctctactttccgcaagttgactggatcatcgacgccattcacgagcgcatcctgccactggctggttacagtccggtaacggtgcagacaacgggagatttactcaggaagaacaagcgcggcgtttag

SEQ ID NO: 59372 - protein, 171 aa, Unknown
  Obtained from environmental sample
  DOMAIN (16)...(138): Transketolase, C-terminal domain
  misc_feature (1)..(171): Xaa is any amino acid
MKRPGVPEGYYEIPEGEPVIRKQGRDITIATLGATLYKAMEAAKKLETQFGLSAEIIDLRFINPLNYEKIIESVKKTGKILLASDAAERGSFLHTVASNIQTLAFDYLDGPITVVGSRNWITPAAEMEELYFPQVDWIIDAIHERILPLAGYSPVTVQTTGDLLRKNKRGV

SEQ ID NO: 59373 - DNA, 1719 bp, Unknown
  Obtained from environmental sample
  misc_feature (1)..(1719): n is a, c, g, or t
atggccgagcatcttcggcagccacagggagccacgggggaaataatcgcaaagtgtttttcttccatttggcagcttacgcaaaatgtcgaaggcgagaaaaaaatcgaggcgataatgaaaggctttctggaaggggaaaccctcatggccgccgaaaagatcccgcataaaaacctccgcgacctggcggagaactttgccctttacggaacccttgcggaaattttcgcgaggaaggccgggttcaaccggggcttgggcggttccatgcacgccttctttacgccctttggctccatgcccaacaacgcaatcgtgggcggttccggtgacattgccgtgggcgcggcgctttacaagcggatcaactgcaaacccgggatcgtcattgcaaacataggcgacgcgtcgatgggctgcgggccggtttgggaaggtatgatgctagccgcgatggatcagtacaacaccctttggcccgaaagcaggcataaaaccgccggagcggtcagcaaaggagcgccgcccatccttttcaattttttcaacaatttttacggcatgggcggtcagacctccggggagaccatgggctacggcgttatggccagggttggcgcgggcgtcaatccagacaacatgcacgccgaacgggtggacggttacaacccccttgcggtagcggacgcggtggcgcggaaaaaagccctgttgcttgaaggcagggggccggcgctacttgataccatcacctaccgcatctcaggccattccccctcggacgcttcaagttaccgcacgccggaagagataaaactttggcaggaagccgattccatcgaagcctacggagcgtatttaatcgaaaacaaggccgcgtctagaagcgagatcgattcgttacgtgatggtatcaaagcaaagcttattgaagtagtgaaacttgccacgaacgacgaggcgtcccccagagcaagcggggccttcatcgagtcggtgatgttctccaacggaaaagttgaaaaactggacgagcgcgagccggaaataattcaacctgtggcagaaaattcgcgtgtcaaagctctggcgggaaaggcccgctgcggcttcgacgcggaaggcaagcctgtttcaaagaacaaagcgtttcaataccgggacgcgctgttcgaggccgtccttcaccgctttacgattgatcccaccatggcggcatggggcgaggagaaccgcgattggggcggcgcgttcgcggtttatcgcggccttaccgatttgctgccctaccaccggcttttcaacagccccatctccgaaggtgccgtcgtgggcgcaggcgtgggttatgcgctatccggcgggcgggcgctggtggaacttatgtactgcgatttcatgggaagggcaggggacgaaatttttaaccaggcctcaaaatggcaatccatgtcagcggggctcctaaaaatgccgctggtggtgcgggtttcggtaggcaacaaatacggcgctcagcacagccaggactggtcggcccttaccgcccacattcccggcctgaagtcttacttccccgccacgccctacgatgccaagggaatgttgaacctggcgcttcgcggcaccgacccggtgatcttttttgaaagccagctcctgtacgatgtgagcgaacagtttgaaaaggccgggggttcccgaaggctactatga

SEQ ID NO: 59374 - protein, 572 aa, Unknown
  Obtained from environmental sample
  DOMAIN (11)...(325): Dehydrogenase E1 component
  misc_feature (1)..(572): Xaa is any amino acid
MAEHLRQPQGATGEIIAKCFSSIWQLTQNVEGEKKIEAIMKGFLEGETLMAAEKIPHKNLRDLAENFALYGTLAEIFARKAGFNRGLGGSMHAFFTPFGSMPNNAIVGGSGDIAVGAALYKRINCKPGIVIANIGDASMGCGPVWEGMMLAAMDQYNTLWPESRHKTAGAVSKGAPPILFNFFNNFYGMGGQTSGETMGYGVMARVGAGVNPDNMHAERVDGYNPLAVADAVARKKALLLEGRGPALLDTITYRISGHSPSDASSYRTPEEIKLWQEADSIEAYGAYLIENKAASRSEIDSLRDGIKAKLIEVVKLATNDEASPRASGAFIESVMFSNGKVEKLDEREPEIIQPVAENSRVKALAGKARCGFDAEGKPVSKNKAFQYRDALFEAVLHRFTIDPTMAAWGEENRDWGGAFAVYRGLTDLLPYHRLFNSPISEGAVVGAGVGYALSGGRALVELMYCDFMGRAGDEIFNQASKWQSMSAGLLKMPLVVRVSVGNKYGAQHSQDWSALTAHIPGLKSYFPATPYDAKGMLNLALRGTDPVIFFESQLLYDVSEQFEKAGGSRRLL

SEQ ID NO: 59375 - DNA, 1623 bp, Unknown
  Obtained from environmental sample
  misc_feature (1)..(1623): n is a, c, g, or t
gtgaaagtgcgttcaaaaacatggagattgaccagcgtaactattcccaacagtgttaatcacattggcgacggcgcgtttcaaaacaataaattgtccggtgtaatctttggcaacagtgttaatcacattggcaacaacgcgtttcaaaacaataaactgtccggtgtaatttttgaaaacagtgttaatcacattggcgacggcgcgtttcaaaacaatgaactgatcagtgtaatgattggcaacaatgttaattacattggtgatgccgcgtttcaaaacaatgaactgaccggtataactatcccaaacagtgttactcatatcggtgatagggcattttccggaaataaactgaccaaggtaactattggcaataaagttactaatattggtaatagagcattttccggaaataaattgaccggtgtaattatcccaaacagtgtaaataaaatcggggatgaggcgtttgaaggcaatcaactgaccgccattaccattggaagcggtgttaccggtatttggaaagacgatttttggtcttccgatcgcttaacaagtataactttagatgttaataatcctaatttttcaagcgtagatgggatactgtacaataaagcaaaaacagaatttattttaattccaaaaaatttaaccggaaatataaatatacccggcggcattattaacattaaggaaagatcttttgaatctaaaagcattaccggcgtaattatagggaacggcgttaccggtatcggagagggcgcctttttcgattgcaaaagacttacaggcgtaacaatacctaatagtattaccaatattgggaagagcgctttttacggttgtataggtctgaccagaataacattacctaataacaccggttttacaagcattgcgagtaacactttttccggctgcagcaaacttaccagcgtaacgatacccaatagtgtcaccgccatcggagagagcgcttttcgcggttgttccagccttgtaagcgtaaccatagggagcagcgttaccagaattgaggagaacgctttttctgaaaccaaactgatcggtgttatccttcccaacagcgttgcttacataggtaaatacgcgttttacagcgacagccttatcagcgtaagatttgaaagaaaagataccgaaattgataacaacgcgttccccgccgacagtttaccgaatgcgtacaaatcaagaggagtgggtacatatacgagggcaagcggcggtaacaactgggcgacaacggcgacggcagccagagatgaaacagaatcaaaagcaatatccaagtataacaacttattgaataaagcgacggacctttcacagaaagtatcggaatacagaacaaatcgccccaaaacaaccgaccttatcaaagacgcggcaaaagaatataccgttcttttaacggaaatggcggagtttagaaaacaaaatccgccaatcacttctattgatatgactaatcttaacaaccgcataaataatataaaggattattttaagtgggggtcggaaagctggtttaacaaaaatgaattagatgattttcgcaaggaatttccggggatttttaattaa

SEQ ID NO: 59376 - protein, 540 aa, Unknown
  Obtained from environmental sample
  misc_feature (1)..(540): Xaa is any amino acid
MKVRSKTWRLTSVTIPNSVNHIGDGAFQNNKLSGVIFGNSVNHIGNNAFQNNKLSGVIFENSVNHIGDGAFQNNELISVMIGNNVNYIGDAAFQNNELTGITIPNSVTHIGDRAFSGNKLTKVTIGNKVTNIGNRAFSGNKLTGVIIPNSVNKIGDEAFEGNQLTAITIGSGVTGIWKDDFWSSDRLTSITLDVNNPNFSSVDGILYNKAKTEFILIPKNLTGNINIPGGIINIKERSFESKSITGVIIGNGVTGIGEGAFFDCKRLTGVTIPNSITNIGKSAFYGCIGLTRITLPNNTGFTSIASNTFSGCSKLTSVTIPNSVTAIGESAFRGCSSLVSVTIGSSVTRIEENAFSETKLIGVILPNSVAYIGKYAFYSDSLISVRFERKDTEIDNNAFPADSLPNAYKSRGVGTYTRASGGNNWATTATAARDETESKAISKYNNLLNKATDLSQKVSEYRTNRPKTTDLIKDAAKEYTVLLTEMAEFRKQNPPITSIDMTNLNNRINNIKDYFKWGSESWFNKNELDDFRKEFPGIFN

SEQ ID NO: 59377 - DNA, 477 bp, Unknown
  Obtained from environmental sample
  misc_feature (1)..(477): n is a, c, g, or t
ttgattgccttcaaacgcctcatccccgattttatttacactgtttgggataattacaccggtcaatttatttccggaaaatgctctattaccaatattagtaactttattgccaatagttaccttggtcagtttatttccggaaaatgccctatcaccgatatgagtaacactgtttgggatagttataccggtcagttcattgttttgaaacgcggcatcaccaatgtaattaacattgttgccaatcattacactgatcagttcattgttttgaaacgcgccgtcgccaatgtgattaacactgttttcaaaaattacaccggacagtttattgttttgaaacgcgttgttgccaatgtgattaacactgttgccaaagattacaccggacaatttattgttttgaaacgcgccgtcgccaatgtgattaacactgttgggaatagttacgctggtcaatctccatgtttttga

SEQ ID NO: 59378 - protein, 158 aa, Unknown
  Obtained from environmental sample
  misc_feature (1)..(158): Xaa is any amino acid
MIAFKRLIPDFIYTVWDNYTGQFISGKCSITNISNFIANSYLGQFISGKCPITDMSNTVWDSYTGQFIVLKRGITNVINIVANHYTDQFIVLKRAVANVINTVFKNYTGQFIVLKRVVANVINTVAKDYTGQFIVLKRAVANVINTVGNSYAGQSPCF

SEQ ID NO: 59379 - DNA, 357 bp, Unknown
  Obtained from environmental sample
  misc_feature (1)..(357): n is a, c, g, or t
atggccgagatggtttggcatctatggcaggaagacacttcccctatcaccaccagcacaacaagcggctcagtcttgggcagttttacggttgacgacgcggtttataatgttgtcagaaatgtaagaatccaacagccttcgatagacggaaccaaaacattcgtccaatacttcagcattcgccaaacaccccgccagagcgggacaatttccgttaccgaacacttcaagcaatgggagcgcatgggcctgcagctcggcaatatgtacgaggcaaaatttcttgttgaagctggcggcggcacagggtggctggaatttacatacctcaaattaacgatggaagaccgctga

SEQ ID NO: 59380 - protein, 118 aa, Unknown
  Obtained from environmental sample
  DOMAIN (4)...(110): Glycosyl hydrolases family 11
  misc_feature (1)..(118): Xaa is any amino acid
MAEMVWHLWQEDTSPITTSTTSGSVLGSFTVDDAVYNVVRNVRIQQPSIDGTKTFVQYFSIRQTPRQSGTISVTEHFKQWERMGLQLGNMYEAKFLVEAGGGTGWLEFTYLKLTMEDR

SEQ ID NO: 59381 - DNA, 519 bp, Unknown
  Obtained from environmental sample
  misc_feature (1)..(519): n is a, c, g, or t
atgattatgttttacacacagggaaagacggattgcaggccaagtgaagtttgttatgatgaacagcggcttgacgtgataaacggtacagcccgcgaagaaaacggcccctggggaaaatttaaaattccctcgactgctggcggtttgaattcaacagtttatgaccttagccgttttgggaatatgatgctttctggcggtacgttaaacggcgcgcgtgtccttggcagaaaagccgttgaaaaaatgacaacggctgccatcgcccttccgaactattgctggaattcaaaagaaaaggaacggtactacggcgtgggctttgatatgcgcaacggcccggctttcacattttcgcagggtacttttatgcacgaaggttctggtgcgtgttcattgtacatcgatcctaaagaagaacttgtcgcggcgtggatcgttccgtttgcaaaagagggctggttcgcgcgcacgcttttcaatgtacaaaacattatttggtcgggtttgatatag

SEQ ID NO: 59382 - protein, 172 aa, Unknown
  Obtained from environmental sample
  misc_feature (1)..(172): Xaa is any amino acid
MIMFYTQGKTDCRPSEVCYDEQRLDVINGTAREENGPWGKFKIPSTAGGLNSTVYDLSRFGNMMLSGGTLNGARVLGRKAVEKMTTAAIALPNYCWNSKEKERYYGVGFDMRNGPAFTFSQGTFMHEGSGACSLYIDPKEELVAAWIVPFAKEGWFARTLFNVQNIIWSGLI

SEQ ID NO: 59383 - DNA, 924 bp, Unknown
  Obtained from environmental sample
  misc_feature (1)..(924): n is a, c, g, or t
gtggatcgttccgtttgcaaaagagggctggttcgcgcgcacgcttttcaatgtacaaaacattatttggtcgggtttgatatagggaacaggaaaattgtgaaaacgttgtacgtatcggatttggatggaacattactcagaagtaacgataaaatgtcagaatatactataaagacaataaataacttaataaataatggtatgtgtttttcttatgcaaccgcccgttcattatcatcggcgtcaattgttacaaacggtttgataacaaatataccggttattattcataacggaacatttattgtaaacgcatctacaaaagaaaaactgctttctttgcattttaccgaagaagaaaaggcaaagataataaatatttttgataaatatccaattaatccattggtgtacggatttgtcaatgatgaagaaagagtttcatggataacaaacaaagaaaatgacggtataaagggatacataaattcaagaagaggagacaaacgattaagacctattggaacaaaagaagaattgtatagcggtaaacttttttattttacttgtattggagagaggaaagaactaatagatatttataattattttaaacattctgatgaatttacatgtaccttacaacaagaattatatcgggaagaatattggtgtgaaataatgccaaaaaaggcaactaaaggaaatgcgatattagcattgaaggaagagctaaaatgtgataaaataatatcatttggggactctgtaaatgatataccaatgtttgaaatatcggaagagagttacgctgttgaaaatgccgttgatgagctaaaaaaacatgcgacgagaataataatgtcaaatgaaaaagacggagtagcgcattggttggaagaaaattataaaagaatataa

SEQ ID NO: 59384 - protein, 307 aa, Unknown
  Obtained from environmental sample
  DOMAIN (34)...(300): Sucrose-6F-phosphate phosphohydrolase
  misc_feature (1)..(307): Xaa is any amino acid
MDRSVCKRGLVRAHAFQCTKHYLVGFDIGNRKIVKTLYVSDLDGTLLRSNDKMSEYTIKTINNLINNGMCFSYATARSLSSASIVTNGLITNIPVIIHNGTFIVNASTKEKLLSLHFTEEEKAKIINIFDKYPINPLVYGFVNDEERVSWITNKENDGIKGYINSRRGDKRLRPIGTKEELYSGKLFYFTCIGERKELIDIYNYFKHSDEFTCTLQQELYREEYWCEIMPKKATKGNAILALKEELKCDKIISFGDSVNDIPMFEISEESYAVENAVDELKKHATRIIMSNEKDGVAHWLEENYKRI

SEQ ID NO: 59385 - DNA, 354 bp, Unknown
  Obtained from environmental sample
  misc_feature (1)..(354): n is a, c, g, or t
atgaaaaaatatgtttatagaaaagctgctgaaaaagatatagaatttatttctaatattagattggaagttttaaaatccgctaataatcctgataataatgtaaatatggataatatttttactaaaacacatgagtattatatggattgtataaaagaagaaaatattacatatttagcatttaatggtacagaatttattggttgtgtttcaatttgttttataaaattaatgccgacatataataatcaaactggtaaaaaagcatatattatgaatatgtacacaagggagaaatatagacgaaaaggagttgggacaaatattttaaacttattaataatggtataa

SEQ ID NO: 59386 - protein, 117 aa, Unknown
  Obtained from environmental sample
  misc_feature (1)..(117): Xaa is any amino acid
MKKYVYRKAAEKDIEFISNIRLEVLKSANNPDNNVNMDNIFTKTHEYYMDCIKEENITYLAFNGTEFIGCVSICFIKLMPTYNNQTGKKAYIMNMYTREKYRRKGVGTNILNLLIMV

SEQ ID NO: 59387 - DNA, 762 bp, Unknown
  Obtained from environmental sample
  misc_feature (1)..(762): n is a, c, g, or t
ttgaacgtattcggcaacaaagtacacgctctggaatcaaagataaagaaattacgcgaagtaaaggaagtgcctttcagcgaaatgttaaacctgaccatggaaatagaaaaaatttccaaagaaaaagacgggtttgcggatattcttaacaagatacaaagttatgccggcggcggcaacaagaacaaaggcggcgagaaacaaaatatcaaagttctggttgaatctctcgctaaaacaacatccagagttgccggcgatttggaaaaacaaattaaatttatttcctccgacattgatcccgaagccattgataaaggtccaagacgcgcaatgaaagaaatactaatgcagttaatccgcaactccgcattgcatggaatagaatcgcccgatgacagaaaagccaaagggaaaaacccaatcggcgtcataaagctttccatcaagatgacggaagatcataagaatattcaaataaaacttattgacgacggaagaggtcttgattacaagaagattgcccaaagagccttagccaaaaaattaatcaagccggaagacgcgaaaaatcccgacgtgttaatgaaagtaatattcatgcccggctttagcaccgctgacacggaaacagttcacggcggaagaggcatcgggttaaatcttgtacgcgaccgcataaaagaagtaaaaggctctgttaaaattaaatcggaaacaaacaagggaacactgttctttatatcacttcctgtttga

SEQ ID NO: 59388 - protein, 253 aa, Unknown
  Obtained from environmental sample
  DOMAIN (108)...(253): Histidine kinase-, DNA gyrase B-, and HSP90-like ATPase
  misc_feature (1)..(253): Xaa is any amino acid
MNVFGNKVHALESKIKKLREVKEVPFSEMLNLTMEIEKISKEKDGFADILNKIQSYAGGGNKNKGGEKQNIKVLVESLAKTTSRVAGDLEKQIKFISSDIDPEAIDKGPRRAMKEILMQLIRNSALHGIESPDDRKAKGKNPIGVIKLSIKMTEDHKNIQIKLIDDGRGLDYKKIAQRALAKKLIKPEDAKNPDVLMKVIFMPGFSTADTETVHGGRGIGLNLVRDRIKEVKGSVKIKSETNKGTLFFISLPV

SEQ ID NO: 59389 - DNA, 825 bp, Unknown
  Obtained from environmental sample
  misc_feature (1)..(825): n is a, c, g, or t
ttggagaatattttgataataggaatagatattggcagtacaataacaaaagctgtttccatagaagacgggaaagtaacaagaaaaataaaaacaaaagcgttagacgctgtaacagccgctaccggcgcttttggaaaaatagttcttgaaaacggaataaaaataagcgctgtggaaagaatcgaaattaccggagccggcgcgtcaaaaattaaagatgatattttcggtattcccacaggcagagtaaatgaaatcgaggctatcggcataggcgggatgtttctttcaggcatgaataatataattattacgaatatcggaacaggaaccgtaataatcgaagccggcgacaaaggcatttctcattttggcggctcaggcgtcggcggaggaacaatattggggcttggaaaaaaacttttgtccgtcgccgaatttcatgacattatggagttggcaaagaacggaaaattaagtcaggttgatcttttagtcggcgatattaccgatacaagtcttagttttttaaacggcgagagtaccgcttccaatttcgggaaaatgctggataccgccacccacagcgatattgccctagctattatcaacatggtgtatcaggtaatcggcgttctttctgtttttgcggcaaaggcgaaaaattacagccgcgttattgttacgggaaacggcaataaaaaccctataggcaaaaaagtgcttaccgatgtctccgctatgtatggaattgaatttgtctatcctgaacatgccgaatatactacggcgattggagccggattatcaaacaggaagtga

SEQ ID NO: 59390 - protein, 274 aa, Unknown
  Obtained from environmental sample
  DOMAIN (5)...(273): Fumble
  misc_feature (1)..(274): Xaa is any amino acid
MENILIIGIDIGSTITKAVSIEDGKVTRKIKTKALDAVTAATGAFGKIVLENGIKISAVERIEITGAGASKIKDDIFGIPTGRVNEIEAIGIGGMFLSGMNNIIITNIGTGTVIIEAGDKGISHFGGSGVGGGTILGLGKKLLSVAEFHDIMELAKNGKLSQVDLLVGDITDTSLSFLNGESTASNFGKMLDTATHSDIALAIINMVYQVIGVLSVFAAKAKNYSRVIVTGNGNKNPIGKKVLTDVSAMYGIEFVYPEHAEYTTAIGAGLSNRK

SEQ ID NO: 59391 - DNA, 585 bp, Unknown
  Obtained from environmental sample
  misc_feature (1)..(585): n is a, c, g, or t
atgaaaaaactactccttatatgcctgcttatcctcgcttgcgaggaaaaatacttaacgctctggcacgaagacttagacgaaacagaagtagcagacatcacggctttcttgcaggaaaacaaatataaatacaagttggaaaaaaacgacagcacaatattagttcccagagaaaccctttacgaaatccgtatggctttggcaagaaatggactgcctaaaaaccacatattcattgaacccccaactccaagcatagataaattcttgcaaaacacagaataccgtgaggcagtagaaagcgagtttgcccttgtcatagaaacattaagtgaagttgaaaaggcaggggttagcataaataaagataccaccgcacttgttatggtacaactgcacccatacaaaacattggatgaaaagcaaataaaaggcatccagcatttaatcgcaagtgcggtagatgaattaaaaacagagagggtaagcgtttgcgttttagacgataaagggatagaactgacggaaaactgccctgaaaaaaaagcagtgcgttcctgcggtagttcctgtggagattag

SEQ ID NO: 59392 - protein, 194 aa, Unknown
  Obtained from environmental sample
  SIGNAL (1)...(13)
  DOMAIN (1)...(182): Secretory protein of YscJ/FliF family
  misc_feature (1)..(194): Xaa is any amino acid
MKKLLLICLLILACEEKYLTLWHEDLDETEVADITAFLQENKYKYKLEKNDSTILVPRETLYEIRMALARNGLPKNHIFIEPPTPSIDKFLQNTEYREAVESEFALVIETLSEVEKAGVSINKDTTALVMVQLHPYKTLDEKQIKGIQHLIASAVDELKTERVSVCVLDDKGIELTENCPEKKAVRSCGSSCGD

SEQ ID NO: 59393 - DNA, 1008 bp, Unknown
  Obtained from environmental sample
  misc_feature (1)..(1008): n is a, c, g, or t
atgacgacccaaggtgatgtcgtatccgccggcagtattttcgttacaacaaacttagcggctgcaaccgcggcggtctttaccatgttcattacatggatacgctacaaaaaacctgatgtatctatgacattgaacggcgcccttgccggtcttgtggcaattactgcgggttgtgacgctgtatctccgttcggcgcattctgcatcggtatcgtagcttcttttgttatcgtatttggtatagagttcgttgataaagtaataaaggttgacgatcctgtcggagcaatcggcgtacatggtcttgccggagcggcgggaacaattcttaccggtgtattcgctcttgatggcggattgttttacggcggtggatgggcgatggttggagttcagactctcggtgtcgttgcggtagcggcatgggtagcaataacaatgggcattgtctttacgttgataaagaaaacaatcggtctgcgcgttgcgccagccgaagaaattgccggtatggatattacggaacacaacattgaaagcagctatgccgactttatggtatctacagccgtagcggattcctcttctaaggatgaggcagttccttccaacgtggcgattcctgttgtaaacaactcgaagcccggcgcaaagatgacaaaaataacaatcattaccaatcagaataaacttacaagacttcataccgctcttgacagtatcggtattacaggtctcacggttaccaacgttctcggtcatggaatgcaaaaaggacatacggaatactatcgcggtactcctgtaactataaaactgcttcccaaagttcaaattgatataatcgtatgtaaaataccgccgcaaaccgttatagacaccattaaaaaggtattgtatacgggcaatgtaggcgacggtaagatatttgtttctgatattgaaaatgtggttaaagtccgcacaggagaacaaggctacgacgctttgcaagataacgaataa

SEQ ID NO: 59394 - protein, 335 aa, Unknown
  Obtained from environmental sample
  SIGNAL (1)...(21)
  DOMAIN (1)...(183): Ammonium Transporter Family
  misc_feature (1)..(335): Xaa is any amino acid
MTTQGDVVSAGSIFVTTNLAAATAAVFTMFITWIRYKKPDVSMTLNGALAGLVAITAGCDAVSPFGAFCIGIVASFVIVFGIEFVDKVIKVDDPVGAIGVHGLAGAAGTILTGVFALDGGLFYGGGWAMVGVQTLGVVAVAAWVAITMGIVFTLIKKTIGLRVAPAEEIAGMDITEHNIESSYADFMVSTAVADSSSKDEAVPSNVAIPVVNNSKPGAKMTKITIITNQNKLTRLHTALDSIGITGLTVTNVLGHGMQKGHTEYYRGTPVTIKLLPKVQIDIIVCKIPPQTVIDTIKKVLYTGNVGDGKIFVSDIENVVKVRTGEQGYDALQDNE

SEQ ID NO: 59395 - DNA, 435 bp, Unknown
  Obtained from environmental sample
  misc_feature (1)..(435): n is a, c, g, or t
gtgatatacggctatattagagtcagtacagacaaacaaacggttgataatcaacggtttgagattgaacggttttgtatgaaaaacagtttgaaaatcgacgaatggattgaagaaactatcagcgggtgtaaaacgcctgataagcgtcttttaggatcgcttctggcggaggtaaggtcgggcgatttaattatttgttcggaattatcaaggcttggaagaagtctttttatgattatgtcgatacttaaccagttaatgctgaacgaggtaagagtatggacgataaaagacaattacaggttaggtgacaatatccaatcaaaagttttggcgtttgctttcggtttgtcggctgaaattgagcgtgatttgatctctcaaagaacaaaggaagcgcttgcgcgaaaacgcgccgaaggtatggtttag

SEQ ID NO: 59396 - protein, 144 aa, Unknown
  Obtained from environmental sample
  DOMAIN (2)...(144): Resolvase, N terminal domain
  misc_feature (1)..(144): Xaa is any amino acid
MIYGYIRVSTDKQTVDNQRFEIERFCMKNSLKIDEWIEETISGCKTPDKRLLGSLLAEVRSGDLIICSELSRLGRSLFMIMSILNQLMLNEVRVWTIKDNYRLGDNIQSKVLAFAFGLSAEIERDLISQRTKEALARKRAEGMV

SEQ ID NO: 59397 - DNA, 1287 bp, Unknown
  Obtained from environmental sample
  misc_feature (1)..(1287): n is a, c, g, or t
atggaattacttgcacccgcgggctcgcctgaggcgcttgacgccgcaatcggcgaaggcgcagacgctgtttatcttggcttaaaagattttaacgcccgcttaagaagcgccaattttacttacgcgcaatttgaaagcgctctgcgttctctgcataaaatgggaaaaaaagtttacgttacggtaaatactgtttttgaacagcgcgaagccgatagaatgtaccaatttttgaaatatcttgcaggacaggaaccggatgcgctgattgttcaggattacggcgttatcgcgatggcaaaaaatgagttcccgtccttgcggcttcatgcttctactcagatgaatatcgcgtcggcaagaggagcgaatgcgctttcgcgtcacggcgtttcacgcgtggttttagcgcgggaactatcccttgaagaacttaaaagcataaaaagcgaaactaatcttgaacttgaggtttttgtccacggagcgttatgcataagcgtttcgggtctttgtcttttttcaagttttcttggcggaaaatcagctaacaggggaatgtgtactcaggcgtgcagaagattgtaccatagagccgacggcgagagcggctactatttcagccctaacgatttacagttattggagaacgtaccgcagttagccgccgccggaatcagcgcgttaaagattgagggacgcatgaaaagcgcggcttatgtgggaacggtagtttccgcttaccggcttgtaatggacgcctacgctgatggagatgaagatgaaattcagcgaaatattgaacgcgggcgggagattttgcgtaacgattttgcgcgtccaaaaactcagtatttttttggcggattgacaaaagccgcgcaagacagcgaaggcgttgattggctgaaccccgcgcaggacggcggcacaggcatcagtcttggcacaattttaaaagtaaaaggcgcggatgatgaaagacgcgcccttgtctgtccgccgagagggctttccatttccgttagggattcggtgcggatacaccacagcgacgactccggcagagtttctcataaattgacttacgcgcaggaagacagcggacattccggttactggatttccgcgccggaaggaagccttggcgaccatgtatatttgatacaaattaaggaaatgcgaaagcgttatgcgccaatacttactaaagtatccgcaagcaagggaccgggcagggaaaaagctcccttccgcagaacaagaccaaaatggccgcgataa

SEQ ID NO: 59398 - protein, 428 aa, Unknown
  Obtained from environmental sample
  DOMAIN (72)...(294): Peptidase family U32
  misc_feature (1)..(428): Xaa is any amino acid
MELLAPAGSPEALDAAIGEGADAVYLGLKDFNARLRSANFTYAQFESALRSLHKMGKKVYVTVNTVFEQREADRMYQFLKYLAGQEPDALIVQDYGVIAMAKNEFPSLRLHASTQMNIASARGANALSRHGVSRVVLARELSLEELKSIKSETNLELEVFVHGALCISVSGLCLFSSFLGGKSANRGMCTQACRRLYHRADGESGYYFSPNDLQLLENVPQLAAAGISALKIEGRMKSAAYVGTVVSAYRLVMDAYADGDEDEIQRNIERGREILRNDFARPKTQYFFGGLTKAAQDSEGVDWLNPAQDGGTGISLGTILKVKGADDERRALVCPPRGLSISVRDSVRIHHSDDSGRVSHKLTYAQEDSGHSGYWISAPEGSLGDHVYLIQIKEMRKRYAPILTKVSASKGPGREKAPFRRTRPKWPR

SEQ ID NO: 59399 - DNA, 1848 bp, Unknown
  Obtained from environmental sample
  misc_feature (1)..(1848): n is a, c, g, or t
ttggccgagggagcctacgccattgacggtcaggacgctcgtaatataggcagacgcggctcaacccccacgggacagttcgcttataccttgacaagggaaaaagggacgatagagacaattaccaacggcgacgtttcgggcataatggctattttgaacggtcccaactccaaagtagttaatatgagcgatcccgctccaatgtcgaatcagggggtagaaacatatgccgtcagaatctgcgttcccattatcaataaacgtctcaatgaagcggtcggagttgtactctgtcagctggatattgccataatacaacccagggtagaaatgactatcaaagagttcgatgaagttacttctatggttatttactccgacaacgggtttattttggcaaattacataccggattttataggaaaacaaattgacacggaaacacaatacggtcaccaattaaacgatgttaaagaggccattagaaaagcggaagaatgggaggggacagagtttgaccctgaactgaaaaaaaacatggtaatggcagtagccaatattcccataggagcatctccgacaacatggtcggtaatgataggttcaactgaagaatacattttgacagatgtcaacgcattgagaacttttgtcattattttgatttcagtagctcttgtagcggcgataatacttatctacgttatactgggcggcattaccgccccaatcgttaaggtagccgatgtcttaaaaattatagccgaaagcgatatgacgaagcaaataactgtacatacaaaagacgaaataggcggggcttgccaagacgttaactttacgattggtaaaatcagagacctagtgctcatgattaaaaaacagtcgcatgttttgtcggacatcggcaatgatttgtccagtaatatgaccgaaacagcggcggcgataaaccaaatcacctcaaatatacagagtataaagggcagggtaattaaccagagcgcaagcgtaaccgagaccaacgcgacaatggaacaggttatcgccaacatcaacaaactcaacggtcatattgaaagaatggcgtcaaatgtcggcgctgtcaccaagacgctgctcaacaacgccgacaatgtaaaaacattactggaagcctccgaagtaggaaagaccggattggcggaagtagtgactgacattcaggaaatcgccagagaatccgaaggcttgctggaaatcaactccgtaatggaaaacatagccagccagactaacctgctttcgatgaacgccgcgattgaagccgcccatgcgggagaagcgggaaaaggtttcgctgtagtcgccgatgaaattcgtaaacttgcggaatcatcaagcgaacagtcaaaaacgattggcaatgttttgaagaagataaaagagtcaattgataagataaccaaatccaccgaaaccgtaacaacgaggtttgagtcgatagacacgggcgtcaaaacggtggcggagcaggaagaaaacatcctcaacgcaatggaagaacagcataaagaacatgaggaagaagcagcctccagacagacgggcaacatcagtttggctgaaatttcaagggtggtaaagaccggttccgaggaaatgcttgagggcagtcaagaagtattaaaagaaagccagaaccttgaaaaggtaacgcaggaaataacaggcggtatgaacgaaatggcaagcggagcggatcagataaacttggcggtaaacaacgtcaatgatatgacttccaaaaaccgcgacgccataaacagcttgattaaagaagttgagcgatttaaggtagaataa

SEQ ID NO: 59400 - protein, 615 aa, Unknown
  Obtained from environmental sample
  DOMAIN (219)...(288): HAMP domain
  misc_feature (1)..(615): Xaa is any amino acid
MAEGAYAIDGQDARNIGRRGSTPTGQFAYTLTREKGTIETITNGDVSGIMAILNGPNSKVVNMSDPAPMSNQGVETYAVRICVPIINKRLNEAVGVVLCQLDIAIIQPRVEMTIKEFDEVTSMVIYSDNGFILANYIPDFIGKQIDTETQYGHQLNDVKEAIRKAEEWEGTEFDPELKKNMVMAVANIPIGASPTTWSVMIGSTEEYILTDVNALRTFVIILISVALVAAIILIYVILGGITAPIVKVADVLKIIAESDMTKQITVHTKDEIGGACQDVNFTIGKIRDLVLMIKKQSHVLSDIGNDLSSNMTETAAAINQITSNIQSIKGRVINQSASVTETNATMEQVIANINKLNGHIERMASNVGAVTKTLLNNADNVKTLLEASEVGKTGLAEVVTDIQEIARESEGLLEINSVMENIASQTNLLSMNAAIEAAHAGEAGKGFAVVADEIRKLAESSSEQSKTIGNVLKKIKESIDKITKSTETVTTRFESIDTGVKTVAEQEENILNAMEEQHKEHEEEAASRQTGNISLAEISRVVKTGSEEMLEGSQEVLKESQNLEKVTQEITGGMNEMASGADQINLAVNNVNDMTSKNRDAINSLIKEVERFKVE

SEQ ID NO: 59401 - DNA, 588 bp, Unknown
  Obtained from environmental sample
  misc_feature (1)..(588): n is a, c, g, or t
atggaaaaaaccctttttaaaggagaaccgattccctttgtaatggaactgccgaattaccgctttccttccgccaagaccgtattacaactttgctgggataaagcgaaggattttattcaaagggcgtttaccgtcatctttttagctacagtcataatttggtttttacaatccttcgatttacggctgaaccatgttgaaggcggcgaaggttctctgcttgcgttaatcgggcggttaatcagcgggatatttactcctctgggcttctcagactggcgtatttccacggcgctcattaccggttttaccgcaaaggaagccgttataagcacattggctgtactaaccaacgctaacgccgcggggcttgaacatactttacatacattgttttctcctttaagcgcggtcagtttccttgtgtttacgcttttatacactccatgtgttgcggcaatagcgacagtaaagcgggaatacggcagtataaaaggattgatttttataattgtgtatcagactgctattgcgtggcttgcggcgttctgcgtgtatagaatcgggtgtttgctggggttttaa

SEQ ID NO: 59402 - protein, 195 aa, Unknown
  Obtained from environmental sample
  DOMAIN (40)...(166): Nucleoside recognition
  misc_feature (1)..(195): Xaa is any amino acid
MEKTLFKGEPIPFVMELPNYRFPSAKTVLQLCWDKAKDFIQRAFTVIFLATVIIWFLQSFDLRLNHVEGGEGSLLALIGRLISGIFTPLGFSDWRISTALITGFTAKEAVISTLAVLTNANAAGLEHTLHTLFSPLSAVSFLVFTLLYTPCVAAIATVKREYGSIKGLIFIIVYQTAIAWLAAFCVYRIGCLLGF

SEQ ID NO: 59403 - DNA, 951 bp, Unknown
  Obtained from environmental sample
  misc_feature (1)..(951): n is a, c, g, or t
atggacgcggtcaggaacaacattgagcgcatgaagggcagtatcgcgattcagactaaatctggggagggaacgacgtttaccatttcggttcccctgtcgctggccgcccttatgggattccccatttcatcgggcagcatgaaatttatcatccccgcgaattttgtggacacggtcatgcttatcaatacaaaagacatcatcaccgtggtagaccgtccgggtattaaatacaacgggcgcatcatcaaacttttctaccttcatcatgtcttaaaaatccccatgcccatagaagaaaaaaagaactcaggcgattcgatttttgtcgccatcgtccaggcttatgaggaaacggtagccctcgccgtaaatcaggtaagcagcatgaggcaggtgatccttaaaaatctgccctcttttatggaaaagatggaagtgttctccggggtggtgttaagcgaagactatgaaatgatacccgccctgcatattccaacggtgataaggatggcgcggcgcacaaaaaccatcgacatgaaaaaacgccatattgattatgagcgcatgcgcaagtccattctggtggttgacgattcccgtccgacgcgggatatagagcgtgatattctggaggccgagggctataaggtggacgccgccgctgacggctccgaagcgctggccgccgcgaagaacgcccaatacgatttgatctgcaccgatattgtaatgccgaatatggacggctttatgctggcggagaacatccgcaaaaacgaccgtctcaagaacatccccattatcgccatttcatccaaaagcggcgagaaagaccggaacagggccgcgcttctcgggataaaccgctttatcgcgaaaaattcgtttaacgtccacaatttgacagccattgtgcgggaattaatcggagaagccaatggataa

SEQ ID NO: 59404 - protein, 316 aa, Unknown
  Obtained from environmental sample
  DOMAIN (37)...(174): CheW-like domain
  misc_feature (1)..(316): Xaa is any amino acid
MDAVRNNIERMKGSIAIQTKSGEGTTFTISVPLSLAALMGFPISSGSMKFIIPANFVDTVMLINTKDIITVVDRPGIKYNGRIIKLFYLHHVLKIPMPIEEKKNSGDSIFVAIVQAYEETVALAVNQVSSMRQVILKNLPSFMEKMEVFSGVVLSEDYEMIPALHIPTVIRMARRTKTIDMKKRHIDYERMRKSILVVDDSRPTRDIERDILEAEGYKVDAAADGSEALAAAKNAQYDLICTDIVMPNMDGFMLAENIRKNDRLKNIPIIAISSKSGEKDRNRAALLGINRFIAKNSFNVHNLTAIVRELIGEANG

SEQ ID NO: 59405 - DNA, 645 bp, Unknown
  Obtained from environmental sample
  misc_feature (1)..(645): n is a, c, g, or t
ttggacgcttacggcgaagacgccgagtatcaagaaactcttgccgtccccttggagagcgttaacgaagaaaacgacgccgatgacgacaccccgttaccggatgaagaaccagccaaaccagtcgggcccgtaagaaagattattgaactgccagtagaaaatccttttataaacggaaaattggccgatcacggcaagaaaacgaccactcaccaaagaaggcgcctgcccgaaacggtgaaaatgaaggaccgcagggtgatcttagccgaagacgtggcgatcaaccgcgacctcatagcaatgtacttcgacggctccggcgtgaagttcgagttcgccgtgaacggcagggaggtctgcgaaaagttcgaacgcgaccccagctcgtacagcctgatcctcatggacatccaaatgccggagatggacggctacgaagtctcccgcaaaatccgcgccatggacgtagactgggcaaagcaaatcccgattatagcaatgacgggcaacgaccaaaaagaggacatagaccgatgtttcgaggccggcatggacgaccacataccaaagcctatagacatggaagtgctgcaagataaggtattcgacatattgacgctgaatgcggagagttattga

SEQ ID NO: 59406 - protein, 214 aa, Unknown
  Obtained from environmental sample
  DOMAIN (86)...(204): Response regulator receiver domain
  misc_feature (1)..(214): Xaa is any amino acid
MDAYGEDAEYQETLAVPLESVNEENDADDDTPLPDEEPAKPVGPVRKIIELPVENPFINGKLADHGKKTTTHQRRRLPETVKMKDRRVILAEDVAINRDLIAMYFDGSGVKFEFAVNGREVCEKFERDPSSYSLILMDIQMPEMDGYEVSRKIRAMDVDWAKQIPIIAMTGNDQKEDIDRCFEAGMDDHIPKPIDMEVLQDKVFDILTLNAESY

SEQ ID NO: 59407 - DNA, 813 bp, Unknown
  Obtained from environmental sample
  misc_feature (1)..(813): n is a, c, g, or t
ttgagaaagccagcgcgcggcaaggatagaaatatgagcactatcgctctaattaccgatttcggtaccgaggattggttcgccggagagttgaagggaactatactctcgataaatccgctcgccattcccatagacctgacccacaccgtccagcgcggctacatacgtgaggcggcgtttatcctcttggcctcctaccgtagctttccggaaaacacggtattcatgtcggcggtggactacgggagcacgcgcacaagggtaatctgcgccaagacggcgtcgcacatattccttgctccggacaacggtctattgtcgtgggtactgcgacgcgaaacggcggcggacgtgcgtgaagtgaacgtagacgagtacctgctgccgtcaggctgctcgaccttcccggcccgcgacctcttggcgccgctggccgccggtctctccgactggttggagttcgagagctgcggagaggagactaaagagtacgtaacgctgcattggccggagccgaacctaggcaagggcaccgctgaggcggcggtgatatacatagaccgcttcggcaacgcgataacgtctataagcccacgcgaggtggtcttctcctgcggcgactctccggagtgcattttggagaacgacaggcgcgttccgctcggcaaccactacagcgacgtaccgctatggaacgcggtggcgtacccggggtcggcggggcttatggagataggggtcaacggcgggaacgcggcggagatactggggttggacgtggggagcaacgtttgctttacggcgcattga

SEQ ID NO: 59408 - protein, 270 aa, Unknown
  Obtained from environmental sample
  DOMAIN (14)...(269): Protein of unknown function DUF62
  misc_feature (1)..(270): Xaa is any amino acid
MRKPARGKDRNMSTIALITDFGTEDWFAGELKGTILSINPLAIPIDLTHTVQRGYIREAAFILLASYRSFPENTVFMSAVDYGSTRTRVICAKTASHIFLAPDNGLLSWVLRRETAADVREVNVDEYLLPSGCSTFPARDLLAPLAAGLSDWLEFESCGEETKEYVTLHWPEPNLGKGTAEAAVIYIDRFGNAITSISPREVVFSCGDSPECILENDRRVPLGNHYSDVPLWNAVAYPGSAGLMEIGVNGGNAAEILGLDVGSNVCFTAH

SEQ ID NO: 59409 - DNA, 840 bp, Unknown
  Obtained from environmental sample
  misc_feature (1)..(840): n is a, c, g, or t
ttgggaaaattgacggagatggcggagggcgatcctaccgcgtataaagatttttggaagagtttcggagcggtgttgaaagaggggctgtacaacgactacgagaaccgcgagaaactcttggagctggcgcgttttcaatcgtccatgggcgagagcgacgatttcgtatcgcttaaacagtacgtaggcagaatgagggaggatcaaaaggacatctactacatcacggcggacagccgcggcgtggcggagaaaagcccgcatttggagatattcagggctaagagcatagaggtgctgtaccttgtcgatcccgtagacgagtggattgtcggcatgggcggcataagcgaatacgacgggaagcagctcaaatccgtcacgaaaggcgaccttgacttgggggatttgggcaaggaggaggcggagaagcggaagagcgctcaggcggagctagccggtttatccgagcgtataaaggagatattggccgaatcggttgaggaggtgcgggtgacgggcaggcttaaagacagcccggcctgtttggtcgcgggcgcacaatccgtcggggcgcatctggagaagatgatgaaggctatgggtcaggaggtaccggtatctaaacgggttctcgaaataaacgccgagcatcccattatcaaaaacataaacacgcgttacggcgaggcgcccggcgatccggagcttgcggattgngtgcggctcctctacgacggggcgttaatagccgagggccgtccggcagccgacccggcggcctacctgaagcgtgtaaacgccatgcttgagaaagccagcgcgcggcaaggatag

SEQ ID NO: 59410 - protein, 279 aa, Unknown
  Obtained from environmental sample
  DOMAIN (2)...(277): Hsp90 protein
  misc_feature (1)..(279): Xaa is any amino acid
MGKLTEMAEGDPTAYKDFWKSFGAVLKEGLYNDYENREKLLELARFQSSMGESDDFVSLKQYVGRMREDQKDIYYITADSRGVAEKSPHLEIFRAKSIEVLYLVDPVDEWIVGMGGISEYDGKQLKSVTKGDLDLGDLGKEEAEKRKSAQAELAGLSERIKEILAESVEEVRVTGRLKDSPACLVAGAQSVGAHLEKMMKAMGQEVPVSKRVLEINAEHPIIKNINTRYGEAPGDPELADXVRLLYDGALIAEGRPAADPAAYLKRVNAMLEKASARQG

SEQ ID NO: 59411 - DNA, 807 bp, Unknown
  Obtained from environmental sample
  misc_feature (1)..(807): n is a, c, g, or t
atgacagattggccgaggtctgagaacctcggcaccatcgcccgttccggctcaaaggcgtttctcgaaaagatgacgggcgaccaacgggccgactcgaacctcatcgggcagttcggcgtgggcttctactccgcgttcatggtggcgaaccgcgtcaaagtggtcaccaagcgggccggaagcgacggcggcgctgtggcgtgggagtctaacggagaaagctcgtacaccataagcgacgccgagaaagagggtcacgggacggacgtcgtagtctacttgaaagacgacgaagcggagtacgcggagctttggcaagcgcgctcgcttatcaaaaaatactccgatttcatagccttccccatctacctgccgaacgacaaaggggaaagcgaggtcgtcaatcagaccaagccgctgtggctacgcccggcctccgagatcacatccgaacaatacgaggagttctatcatcaggctttgggcggttacggcaagccgatctgctccatacacaacaaggcggaggggatactcgaatactcgtctctcctctttataccgtcgcaaccggctttcgaccttttttcgtctttcgagcgcaaacacggcgtcaaactctacgtgcggcgcgtcttcataatggacaactgcaaggagcttctgccggattacctgcgtttcgtacgcggcgtcgtcgattcggaagacttgccgctaaacgtatcgcgcgaaatgctgcagaaaaacgcggtgatagagaagatgtctaagtcgcttgtctcaaggttttgggaaaattga

SEQ ID NO: 59412 - protein, 268 aa, Unknown
  Obtained from environmental sample
  DOMAIN (101)...(268): Hsp90 protein
  misc_feature (1)..(268): Xaa is any amino acid
MTDWPRSENLGTIARSGSKAFLEKMTGDQRADSNLIGQFGVGFYSAFMVANRVKVVTKRAGSDGGAVAWESNGESSYTISDAEKEGHGTDVVVYLKDDEAEYAELWQARSLIKKYSDFIAFPIYLPNDKGESEVVNQTKPLWLRPASEITSEQYEEFYHQALGGYGKPICSIHNKAEGILEYSSLLFIPSQPAFDLFSSFERKHGVKLYVRRVFIMDNCKELLPDYLRFVRGVVDSEDLPLNVSREMLQKNAVIEKMSKSLVSRFWEN

SEQ ID NO: 59413 - DNA, 876 bp, Unknown
  Obtained from environmental sample
  misc_feature (1)..(876): n is a, c, g, or t
atgatggccggcggcttctactacagatactacagctacgacggactcttcaaccgttacttccacgacctggagaccggcggcatacttgggcttagctacccgttctccatgttctcacgcgccgacctcgacctctttggccgctacattcaacgaacgccgatcaccggaagcgaccggacggtgatcgaatcaaacgcgcttttgacgagcctcggctactcattcgacaacatcctctggggaataaccggcccgcttaccggcatacgcgcctccgcctcggttcagcttgccccgccgctcccgttcaccaacgaggcgtatctctccggcgacatagacatacgccgctacacgcacatattcggacgctacgtttgggcgaatcgattggttctgggcgcgagcatgggaataggcgacggcgcgaaggcggcgagaaggtactttttgggcggcaatgaaaactggttcaactacggcgtcaacgtcgataactacaaccaaaatctggactacagctactactcaagcatcgtatcgccaatgcgcggatggaactacttcgacatcaccggcgacaaggttgcgctcttgaactcggaattccgcttcccctttatacgcgaggtgacgactgtgtggccgattccactgcaaatcagatacataaacggcgcgctatttatggacgccggatacgcctggacagacgaagttcttccgccgaagatagcggccggttacggattcggaatgagggcaaatctaggaatctttgtactgcgttatgaccgcggttggcctacagattttaagggcctgtcgcgcaggcccattaattatttctcgctgggggcggagttctaa

SEQ ID NO: 59414 - protein, 291 aa, Unknown
  Obtained from environmental sample
  DOMAIN (3)...(291): Surface antigen
  misc_feature (1)..(291): Xaa is any amino acid
MMAGGFYYRYYSYDGLFNRYFHDLETGGILGLSYPFSMFSRADLDLFGRYIQRTPITGSDRTVIESNALLTSLGYSFDNILWGITGPLTGIRASASVQLAPPLPFTNEAYLSGDIDIRRYTHIFGRYVWANRLVLGASMGIGDGAKAARRYFLGGNENWFNYGVNVDNYNQNLDYSYYSSIVSPMRGWNYFDITGDKVALLNSEFRFPFIREVTTVWPIPLQIRYINGALFMDAGYAWTDEVLPPKIAAGYGFGMRANLGIFVLRYDRGWPTDFKGLSRRPINYFSLGAEF

SEQ ID NO: 59415 - DNA, 1617 bp, Unknown
  Obtained from environmental sample
  misc_feature (1)..(1617): n is a, c, g, or t
ttggccacaggactcccgcacttcgggcactttgtcccaagcacaatcaaagacataatcccccgctatcaggcaatgaaaggcaaaaaagtcgaacgccgcttcggctgggattgccacggactccccgtcgaaaacctaatcgaaaaagaactcggactcaactcaaaaaccgcaatcgaaagctacggcgtcgccaaattcaacgaagcctgccgagccgccgttctgcgttatgtgaaagaatggcgagccacaatcacccgactcggacgctgggttgacttcgatcacgactacaaaacaatggaagccgactacatggaaacaatctggtgggtaatgaaaaccctctgggacaaaggctacctctacgaaggacactacatactcccatactgcccccgctgcgccaccgtcctctccaaccacgaactcaacctcggcggttacaaagacgtacacgatccggcaatcaccgtgcgcttcaaagttgcagacggcaaaaaattcggggcggataacagtaacacttatctgctggcgtggacaaccaccccgtggacgcttccttcaaacctcgccctaacactcggcgctgacattgactatgttttaatcgaagacaaaaacgaacactacatattagcggaagcgagactatcggcgtattacaaagaagcgtcggaatataaaatcatctggcgtaaaaaaggaaacgaacttgcgggacttcaatacgaaccgcttttcccttacttcaaagatgcgcctaacgccttccgcaccttcctcggcgattttgttacaaccgaagacggcacaggcatagtgcataccgcccccggattcggcgaagacgacgcccgagtactcaaaggaacaggcatacccgttatctgtccggtagacgccgaatgccgcttcactcaggaagttcccgattttgcgggcgtgtttgtaaaagacgccgacaaagcaatcatcgaaaaattaaaaaacgaaggcaaacttgtaaagagagatcaaatacttcactcttatccgcattgctggcgctgttccagcccgctaatttaccgcgcagtaggctcatggtttgtcagcgtagaaaaaataaaaaaagatatgttagacgcaaacagccaaatatattggatacccgaacatatcaaggaaggcagattcggcaaatggctggaaggcgctcgtgattgggcaatcagccgaagccgctattggggaaacccattgccgatatggcgatgccccgactgcggaaaaacaatctgcgtcggaagccgagccgagttaaaagaactatcgggcgtataccccgacgaccttcacaaacattttgtagatgaaataaaaatcccctgctcctgcggcgcaaaaatgacacgcgttcccgaagtattagactgctggtttgagtccggagcaatgccatacgcgcaaaatcattatccgtttgaaaacaaagaattttttgacagccatttcccctcggattttatcagcgagggattggatcaaacacgaggctggttttacaccctaacagtccttgcggcggcgctccttaaaaaaccagcattcaaaaactgcatataa

SEQ ID NO: 59416 - protein, 538 aa, Unknown
  Obtained from environmental sample
  DOMAIN (1)...(537): tRNA synthetases class I (I, L, M and V)
  misc_feature (1)..(538): Xaa is any amino acid
MATGLPHFGHFVPSTIKDIIPRYQAMKGKKVERRFGWDCHGLPVENLIEKELGLNSKTAIESYGVAKFNEACRAAVLRYVKEWRATITRLGRWVDFDHDYKTMEADYMETIWWVMKTLWDKGYLYEGHYILPYCPRCATVLSNHELNLGGYKDVHDPAITVRFKVADGKKFGADNSNTYLLAWTTTPWTLPSNLALTLGADIDYVLIEDKNEHYILAEARLSAYYKEASEYKIIWRKKGNELAGLQYEPLFPYFKDAPNAFRTFLGDFVTTEDGTGIVHTAPGFGEDDARVLKGTGIPVICPVDAECRFTQEVPDFAGVFVKDADKAIIEKLKNEGKLVKRDQILHSYPHCWRCSSPLIYRAVGSWFVSVEKIKKDMLDANSQIYWIPEHIKEGRFGKWLEGARDWAISRSRYWGNPLPIWRCPDCGKTICVGSRAELKELSGVYPDDLHKHFVDEIKIPCSCGAKMTRVPEVLDCWFESGAMPYAQNHYPFENKEFFDSHFPSDFISEGLDQTRGWFYTLTVLAAALLKKPAFKNCI

SEQ ID NO: 59417 - DNA, 1272 bp, Unknown
  Obtained from environmental sample
  misc_feature (1)..(1272): n is a, c, g, or t
atgtcagaagttttatcaatcattctaggaggaggtaagggaacccgtttattcccgttaacccagttccgttcaaagcccgcggtacctttcggaggaaaattcagacttatagatattcccatttccaactgtattaacgcgaatttacgccaaatttacgtcgtaacccagtttaattcggcgtcccttcatttgcacataggccaaacttacgtctttgacccttttacaaaaggttttgtagaaattcttgccgcggagcaaactcttgaacattcaggctggtacgagggcacagccgacgcaatccgcaagaatctgccgcattttaggacgcaaaacccctcatattacgttattttatcaggcgaccagctttacagaatggatttagaagaattaatgaagaaacacatcagttccggagccgccatttccatcgcgtgtacgggcgttaccagagaaagcgcgggaggcttaggcattcttaaagttgacaaatccaaccaaattaccgaattcttggaaaaacccggccctaccaaagatatttccaatttcagggcgccgcaggaattgcttacggaaaaaaacaaagacgactgctatcttgcctctatgggcatttatgtttttaacgccaagacaatggaagaatgtcttgcgaacgatcttaccgatttcggaaaagaaataatcccctcggcaatcagcaggttaaaggtaaacgcctatctttttgacggttattgggaagatataggaacgataagaaatttttatgacaccaatcttgaacttactacattaaggccgcgcttcgatttttatgacgagcctaaaccaatctatacccacatgagaaaccttccgccctcaaagatgaacttttcaaacatgaaccagtccattgccgccgaaggctgtattattaccaacgccaacattaccaattcaattgtcggcatacgtacaatcatagaaacaggttcaagcctgaacggcgtcgtctgcatgggtgccgactattatgagactgaatcgcaaaaaatgaaaaacgccgaatcaagaatccccaatgtgggaatagggcgcggcgctattgtcaaaggcgctatcatagacaaaaacgtatgcgtgggcgaaggctgccgcataggcgtggacgacataaaacgcaccgacggcaactacggccattatcatgtcgtggacggaattatcgttattccgaaaaacactattttgtatcccggaacagttatttga

SEQ ID NO: 59418 - protein, 423 aa, Unknown
  Obtained from environmental sample
  DOMAIN (5)...(271): Nucleotidyl transferase
  misc_feature (1)..(423): Xaa is any amino acid
MSEVLSIILGGGKGTRLFPLTQFRSKPAVPFGGKFRLIDIPISNCINANLRQIYVVTQFNSASLHLHIGQTYVFDPFTKGFVEILAAEQTLEHSGWYEGTADAIRKNLPHFRTQNPSYYVILSGDQLYRMDLEELMKKHISSGAAISIACTGVTRESAGGLGILKVDKSNQITEFLEKPGPTKDISNFRAPQELLTEKNKDDCYLASMGIYVFNAKTMEECLANDLTDFGKEIIPSAISRLKVNAYLFDGYWEDIGTIRNFYDTNLELTTLRPRFDFYDEPKPIYTHMRNLPPSKMNFSNMNQSIAAEGCIITNANITNSIVGIRTIIETGSSLNGVVCMGADYYETESQKMKNAESRIPNVGIGRGAIVKGAIIDKNVCVGEGCRIGVDDIKRTDGNYGHYHVVDGIIVIPKNTILYPGTVI

SEQ ID NO: 59419 - DNA, 1026 bp, Unknown
  Obtained from environmental sample
  misc_feature (1)..(1026): n is a, c, g, or t
atgaccgagcgtgaaaatctggaaaaaatacttgagagccccgaatttgcgcctaatatagttataaaccgccttataccggcaaaagagggagtttacgccccgtttccgaaatatctggatgttagaattgtagattctttaaagaaaaggggcatagacaagctctatactcaccaaacagaggtttacgatttagcgcaagccggaaaaaatgtggtagttgtaacgcctaccgcgtccggaaagacactttgctacaatcttccctgtttacaggcgctattagcagacgaaagcgcgcgctgtctgtacctatttcccacaaaagcgctttcccaggaccagcaggcggaattgaacgagaccgtgggcgatgacgatgcaggtttaaacctgaaaatcgcgacttatgacggggatacgcccgaatctttgcggatttcagcgcgggatacaggcagaatcatcatttccaatcccgatatgctgcatacgggcattcttcccaaccatccaaagtggattaaattcttttcccatttgaaatatatcgtaatagacgaggcccacgcctaccgcggcgttatggggagccatgtagcaaatgtgatccgccgcctccgcagaattgccgccttttacggcgcaaagccgcaatttatcctctgttccgcgactataggcaaccctaaggagttggcgcaagcgctgacaggccttcccatggaattagttgacaataacggcgcgccgcgcggagaaaagcggataatcctttacaacccgcctcttgttgacaaggtgcagggcatacgccgttcttcggtaacggaaagccgccgctggatgattgccctcttaaaagcgggaataaaaacgatacttttcgcccactcaagggtaaagaccgaagtagccgcctcctatgtaaacgaggatttaaaaaacatctttacggacaactccccgcataggntagaggcgtaccgcggcggctttttgcccatgnnacgcgtgagataa

SEQ ID NO: 59420 - protein, 341 aa, Unknown
  Obtained from environmental sample
  DOMAIN (53)...(230): Type III restriction enzyme, res subunit
  misc_feature (1)..(341): Xaa is any amino acid
MTERENLEKILESPEFAPNIVINRLIPAKEGVYAPFPKYLDVRIVDSLKKRGIDKLYTHQTEVYDLAQAGKNVVVVTPTASGKTLCYNLPCLQALLADESARCLYLFPTKALSQDQQAELNETVGDDDAGLNLKIATYDGDTPESLRISARDTGRIIISNPDMLHTGILPNHPKWIKFFSHLKYIVIDEAHAYRGVMGSHVANVIRRLRRIAAFYGAKPQFILCSATIGNPKELAQALTGLPMELVDNNGAPRGEKRIILYNPPLVDKVQGIRRSSVTESRRWMIALLKAGIKTILFAHSRVKTEVAASYVNEDLKNIFTDNSPHRXEAYRGGFLPMXRVR

SEQ ID NO: 59421 - DNA, 570 bp, Unknown
  Obtained from environmental sample
  misc_feature (1)..(570): n is a, c, g, or t
ttggagcggcgttctattccggttcttgatgttgacaagctgggacaccaggccattgaaaccgaaaaagagcggcttttggaacgttttggcagcgacatcctgagccaagacgggtctatgtctatgtctatcgatcgcaggcggctggggaataaagtttttggcaaaccaaaagaactacaggccctggaggaaataatccacccggtcgcaaacagggaaacccttgcatggatcaatgcgcgacaggaacctgtctgcgtaataaatgcggcgctgcttcatcgctcctcggcttttgaaatgctggatgcggttattatcgttgaagcccccttttttgtcaggctccttagggccagaaaacgggatcgcctgccgtggacagcccttttaaagcgtttcaaaagccaaaaaaaattcaacactcaacttttcaagaaaatagccgatatatacaaagtggagaactctgcctgttttggttttaacaagaattccgcagaaaaaaagctggataaacgggtcagcgaaattctttcgattgaagggataaccctggtgtaa

SEQ ID NO: 59422 - protein, 189 aa, Unknown
  Obtained from environmental sample
  DOMAIN (4)...(161): Dephospho-CoA kinase
  misc_feature (1)..(189): Xaa is any amino acid
MERRSIPVLDVDKLGHQAIETEKERLLERFGSDILSQDGSMSMSIDRRRLGNKVFGKPKELQALEEIIHPVANRETLAWINARQEPVCVINAALLHRSSAFEMLDAVIIVEAPFFVRLLRARKRDRLPWTALLKRFKSQKKFNTQLFKKIADIYKVENSACFGFNKNSAEKKLDKRVSEILSIEGITLV

SEQ ID NO: 59423 - DNA, 978 bp, Unknown
  Obtained from environmental sample
  misc_feature (1)..(978): n is a, c, g, or t
atggaaaagaaaaaattacttttggttgcaatatccgtcggggtatttctagcattaaccataggggcggccattttggtgtttgccccaaaagacgctttcgcggcttccaaagcggttgccaggcctattcaggcggttgatactggcatcaccatacccccaccctcgtctgcctctccttccgtttccgacccatcagcgggccaggagcctactccgcagtcttcctcactggacccggttgagctggtaaatgctactcccggcctccagcaagctcctggagggactactcgacagggcgaagatttttacatcggtggaaataacggaaataacggaaataacggaaataacggaaataacggaaataacggaaataacggaaataacggaaataacggaaataacggaaataacggaggaacaggcaaaagcacagataccgtaatcaacgtacccaaacccagtacggcggctgtcccggacacgcctccggcggggaaagccacctccaccgcttcggctgagaaaaccgcgacaaccaccgcgaccaccccgactgtgaaagccacgcctgccaccccggctcaaaccgctcccaaacctgccgccacgaccgttgccgccgctgtaaccactcctgcagctaaagcagctcctgccgctacagctgctcctgccgcacaaacccaggcaaagcctgcgtcaacgcaaaccaaagtttacaatgattactgggttcaaaccggcgcgttctcaaccatagacagggccgaaggggttaaaaatactctttcatccaagggaatcacctcgattattgaaaaccgcgaggttgaaggcaaaacagttttcagggtgagggtcggcccctacacatcccaaaacgaagccaattactggctttcactcatcaagtcaataaacggctttgaagacagccaggtaagacagactcaatccctgcgctaa

SEQ ID NO: 59424 - protein, 325 aa, Unknown
  Obtained from environmental sample
  SIGNAL (1)...(23)
  DOMAIN (243)...(320): Sporulation related domain
  misc_feature (1)..(325): Xaa is any amino acid
MEKKKLLLVAISVGVFLALTIGAAILVFAPKDAFAASKAVARPIQAVDTGITIPPPSSASPSVSDPSAGQEPTPQSSSLDPVELVNATPGLQQAPGGTTRQGEDFYIGGNNGNNGNNGNNGNNGNNGNNGNNGNNGNNGNNGGTGKSTDTVINVPKPSTAAVPDTPPAGKATSTASAEKTATTTATTPTVKATPATPAQTAPKPAATTVAAAVTTPAAKAAPAATAAPAAQTQAKPASTQTKVYNDYWVQTGAFSTIDRAEGVKNTLSSKGITSIIENREVEGKTVFRVRVGPYTSQNEANYWLSLIKSINGFEDSQVRQTQSLR

SEQ ID NO: 59425 - DNA, 462 bp, Unknown
  Obtained from environmental sample
  misc_feature (1)..(462): n is a, c, g, or t
ttgtgcggcaggagcagctgtagcggcaggagctgctttagctgcaggagtggttacagcggcggcaacggtcgtggcggcaggtttgggagcggtttgagccggggtggcaggcgtggctttcacagtcggggtggtcgcggtggttgtcgcggttttctcagccgaagcggtggaggtggctttccccgccggaggcgtgtccgggacagccgccgtactgggtttgggtacgttgattacggtatctgtgcttttgcctgttcctccgttatttccgttatttccgttatttccgttatttccgttatttccgttatttccgttatttccgttatttccgttatttccgttatttccgttatttccaccgatgtaaaaatcttcgccctgtcgagtagtccctccaggagcttgctggaggccgggagtagcatttaccagctcaaccgggtccagtga

SEQ ID NO: 59426 - protein, 153 aa, Unknown
  Obtained from environmental sample
  misc_feature (1)..(153): Xaa is any amino acid
MCGRSSCSGRSCFSCRSGYSGGNGRGGRFGSGLSRGGRRGFHSRGGRGGCRGFLSRSGGGGFPRRRRVRDSRRTGFGYVDYGICAFACSSVISVISVISVISVISVISVISVISVISVISVISTDVKIFALSSSPSRSLLEAGSSIYQLNRVQ

SEQ ID NO: 59427 - DNA, 660 bp, Unknown
  Obtained from environmental sample
  misc_feature (1)..(660): n is a, c, g, or t
atgattacaggctattcggcggtacaggccatgagcaggctggtaatcgcccctgtcgccttaaagcgcaagctcctggagcttataactcgagagatgagccgttccagtaccgaagcgcccggcaggattatggccaagatgaacgctttggcggatcctgatattattaaagccctttacgcggcttcccaggccggagtaaaggtgtttctcagcgtaaggggaatttgtacgctagttcccggtgtcgaaggtttgtcggaaaatattcgtgttatcagcgtcatagaccattatctagaacattccaggatttattatttttccaacgggggagccgaagaactgtacctggccagcgctgatctgatgacccgtaaccttgaacgtagggtggaactcatgtttccggttctatcagatgatcttcgaaaaaccataatcaagggcctttcttcttactttaaggacaatacccaggcctggcttttggattcttccggcgcatggacccgccttgagccgggccacggagaanaaccatttcgcgtccaggcttactttcattccatggcgtcaaagaccaacgagacagagatctctggttccgcaaacggagaattcatagtgcgccggagtccccccagcaagaattga

SEQ ID NO: 59428 - protein, 219 aa, Unknown
  Obtained from environmental sample
  DOMAIN (1)...(195): Polyphosphate kinase
  misc_feature (1)..(219): Xaa is any amino acid
MITGYSAVQAMSRLVIAPVALKRKLLELITREMSRSSTEAPGRIMAKMNALADPDIIKALYAASQAGVKVFLSVRGICTLVPGVEGLSENIRVISVIDHYLEHSRIYYFSNGGAEELYLASADLMTRNLERRVELMFPVLSDDLRKTIIKGLSSYFKDNTQAWLLDSSGAWTRLEPGHGEXPFRVQAYFHSMASKTNETEISGSANGEFIVRRSPPSKN

SEQ ID NO: 59429 - DNA, 837 bp, Unknown
  Obtained from environmental sample
  misc_feature (1)..(837): n is a, c, g, or t
atgattcgtaggggcggcaacatgccgcccgctccttaccataaagacggaaagaatttattaatgtggcgagtccgcaattttttcagggggctattttcgggcggcggttccggcgatcctaagttggatgagtttcaacgcgtcatcggctataggttcaaggacgtcgcgttgcttaaacaagcattgacccacaagtcttttgccggtcacgacgggccgtgcggactattgtcgaacgagcgtttggagtttttgggcgactcttttgtgaattgccttgtcaccgagtacctctacggcgcctaccccggcaacagcgagggttatctgtccaagatcaagtctttggtcgtgagccgtaaaatattgggagaggttgcgctaggactgcgcttcggggactaccttataatgagcgccgccgaggagaaatcaggggggcgcgatcgttgttccacggtgtccaacgcctttgaggcggtatgcggggcgatgtatttggacggcgggttggcggaggtcaagacctttttggagcgttgcctctttgggcggataggcgctttctggggagacgagagcaacgtaaactacaagagcaggatattggagatgtcgcaacgcgacggtttcggcatcccgcgctacgtgacgacggaggccgagggcccggaccacgcgaagcggtttaccgtgaagatatacgtgggcggcgcggaacttggggaaggggccgggccgagcaagaaggcggcgcagcaagcggcggcgcaaaacgccggcataaactacgacaaggcaaaaatcgccgccgctcaacaggtggcgtga

SEQ ID NO: 59430 - protein, 278 aa, Unknown
  Obtained from environmental sample
  DOMAIN (200)...(266): Double-stranded RNA binding motif
  misc_feature (1)..(278): Xaa is any amino acid
MIRRGGNMPPAPYHKDGKNLLMWRVRNFFRGLFSGGGSGDPKLDEFQRVIGYRFKDVALLKQALTHKSFAGHDGPCGLLSNERLEFLGDSFVNCLVTEYLYGAYPGNSEGYLSKIKSLVVSRKILGEVALGLRFGDYLIMSAAEEKSGGRDRCSTVSNAFEAVCGAMYLDGGLAEVKTFLERCLFGRIGAFWGDESNVNYKSRILEMSQRDGFGIPRYVTTEAEGPDHAKRFTVKIYVGGAELGEGAGPSKKAAQQAAAQNAGINYDKAKIAAAQQVA

SEQ ID NO: 59431 - DNA, 396 bp, Unknown
  Obtained from environmental sample
  misc_feature (1)..(396): n is a, c, g, or t
atgaggatggcgctttcgagcgccgaaattgcggctggcgacatagattatataaacgcgcatgggacgtccacaccgctcaacgataagtacgagtccatagccatagagcgtgtgtttggagaggcggcgaagaaagttaacatcagctccacaaagtcgatgacggggcatttgttgggcgcttccggcggggtggagtttgtggcttcgctctttgcgattcgggacggggttattccgccgactataaattacgaagatccggatccggagtgcgccttgaactatacgcctaatgtcgcggttaagcgggaggttaagtacgctatgagcaatacgtttgggtttggggggcacaacgcgtcggtgattataggacgttatgattcgtag

SEQ ID NO: 59432 - protein, 131 aa, Unknown
  Obtained from environmental sample
  DOMAIN (1)...(129): Beta-ketoacyl synthase, C-terminal domain
  misc_feature (1)..(131): Xaa is any amino acid
MRMALSSAEIAAGDIDYINAHGTSTPLNDKYESIAIERVFGEAAKKVNISSTKSMTGHLLGASGGVEFVASLFAIRDGVIPPTINYEDPDPECALNYTPNVAVKREVKYAMSNTFGFGGHNASVIIGRYDS

SEQ ID NO: 59433 - DNA, 1476 bp, Unknown
  Obtained from environmental sample
  misc_feature (1)..(1476): n is a, c, g, or t
ttggcggcagcctgcgccgtagcgcgtcttgaaattgtcagttctgttgacggaagggaggcgtggcggcttgccgcaggtccgggggaagcgcgagcgcttgaaatcgaacaaacacgcagaacaaaggggtcaacggtaagggcgttaaatctttacgaaactattccggcgcgcaaacgttttttgaaaagggaaggaagcgaggcggcgctttgccgtcaagtttttattgaaaaagctcttgcctttaacggtatcaattttcgttatgtgcaggacggcaaactaaaagattttctgcccgccgttaaaacaaagaaggagcgttttgccgccgttttacaaacaggcgaagaaaattttctgcatgaaataaatgttactggagcgggtttttccgctgttgtagttatcggcggacccgagctttacagaaacgacaggcggcagctttatattttcgctaacggcagaagggttcaagaatactcgctggttcaagctgttgaatacggctctcaagggtggtttccgaacggcgttcatcctgtagcggcggtttatgtggaaatagacccgtctctggcggattttaacattcaccccgcaaaacgagaggtgcgtttccgcgaccccggcgcaattcatcaggcgatttctggcggagttaaaaacttttttcatagtttgtatcttaaaaactccgacaaagacaatgcgccgaaaacagaaaacgaagaaagttataacggcagcgcagaaccttccgccggatattcgcaaaaagggataaaagagttttcatttacatataacaaaaataattcagaggttaaacgcaacacggaagaatacgaaaagtttgccgattttgtttccgcttccttgcgtaaccgtgaaaattcatcttcaaatatacccgctcccgcatacggcgatatgcgctatgccggaagattatttgatttgtttatattaatggaatggggagacaaactttatattatagaccagcacgctgcgcatgaacgcatcctatacaataaattcctaagcgagcctgttccgaaacaggaactgcttgcgcccattcctttcactgcggaaagcgacgaagaagacgcttttctttcagcgaacaaagaagaactgtcccgtcttggcgttgaaattgaaaaagacgcagaaagctggagcattgaagctctgccagccgactggcgaatgggcgatgccgacaccgtgaaagaaattctagggcttcggttagccggcgaaaacatggcaaaacgctgggctgcgacattctgctgccgcgcggcaatcaaagacggagatattctcgacgacaaaaccgcttttgaacttggaaaagaagcgttagctctgcccgatccgcgctgtcctcacgggcggcctgtgtggacggagattagcagggaagcgttgtttaaagctgtcagacgggattaa

SEQ ID NO: 59434 - protein, 491 aa, Unknown
  Obtained from environmental sample
  DOMAIN (115)...(229): DNA mismatch repair protein, C-terminal domain
  misc_feature (1)..(491): Xaa is any amino acid
MAAACAVARLEIVSSVDGREAWRLAAGPGEARALEIEQTRRTKGSTVRALNLYETIPARKRFLKREGSEAALCRQVFIEKALAFNGINFRYVQDGKLKDFLPAVKTKKERFAAVLQTGEENFLHEINVTGAGFSAVVVIGGPELYRNDRRQLYIFANGRRVQEYSLVQAVEYGSQGWFPNGVHPVAAVYVEIDPSLADFNIHPAKREVRFRDPGAIHQAISGGVKNFFHSLYLKNSDKDNAPKTENEESYNGSAEPSAGYSQKGIKEFSFTYNKNNSEVKRNTEEYEKFADFVSASLRNRENSSSNIPAPAYGDMRYAGRLFDLFILMEWGDKLYIIDQHAAHERILYNKFLSEPVPKQELLAPIPFTAESDEEDAFLSANKEELSRLGVEIEKDAESWSIEALPADWRMGDADTVKEILGLRLAGENMAKRWAATFCCRAAIKDGDILDDKTAFELGKEALALPDPRCPHGRPVWTEISREALFKAVRRD

SEQ ID NO: 59435 - DNA, 2787 bp, Unknown
  Obtained from environmental sample
  misc_feature (1)..(2787): n is a, c, g, or t
atgcaaggtacgggtaacaaaaaatttcccgaactgactatatgccccatgaaagaagttatctggacagacgacagaattgaagctctgcaaaaaaatctttctgtctgcaaagaattttccgacggcggaaaatccgtgattgaaagccttattacttccaagagtgtaaaaggcgaagagatgtttttcccccttgcctttgaaaaaccaagctgtcttttggattacatcgggcggaatggggttttattcttaatcgacagggaaagacttgaaaacacccatgagagccttgtacgagagtaccacggcttgtattcgagggcggtaagggaaaagtacgaatatcccctgccggagcgtctattgcttaattttgaagaaatgctgaaaaaagacacttcttcagtttcccgcatgatttcgtttagatcgattaagggagaggcgaaaaaaggagtctgtcacattgaacttgcctgcgaaccgggacgcagttttttcggcaacattaattacctaaaagaggagtttgcctctctccttgaaagcggctggcaaattgccgtagcggcggagtcgcaggtgcaggcggatcgcataaaaacgcttcttgagccgcataagtctttatcaataatggcagtccctctttccgccggtttttgtctgccggatataaaatttatgctggtgcaggaaaacgagattttcggcaggcgtaaacttccgccgcgctccttaaaaaccgtccgctcaagcccgatagacacattccttgaaatcaaccccggcgattacattgtccatgtaaaccacggcatcggtctttttaagggtatcgaaaggttgtcgtccggcggaaatgaaagagactatataaaaattgaatacgccgacgaggagacggtatttgttcccgtagaacagcttaaccttgtacagcggtatatcggaaacgacggattgcaagcgccgcggttagacaaactcggctccaagagctgggaaaacagaaaagggaaggtaaaaaaatccgtagaagacatcgcgcatagactgatagagctttattcaaaacggaaacaggcgcaaggcttcgcctttcccaaagacagcgaatggcagacaatgtttgaagccgccttcccgtttgacgagaccgaggatcaacttcgctgtatacaggaaatcaagcaggatatggaaagctcttcgcccatggacaggcttgtctgcggcgacgtaggttacggcaagacagaagtcgctctgagggcgtgcttcaaagcgataatgggcgggaagcagaccgccttcctcgctcccacgacaattcttgttgaacagcactatgaaaactttttggaaagattttcccgcttctcagtaaatgtggcaatgctttcgcgttttgtagacagaaaaaaaactcgtatcattcttgaacaattaaaaaaaggcgagattgatttacttataggcactcacagaattattcagagggacgtacagtttaagaacctcggtttaattgtaattgacgaagaacagcgtttcggcgtaaaagacaaagaacgccttaaagaattaaaaacaaacgtggactgcctgactcttacagcaacgccgattccccgcacacttcacatgagccttgtaaaaataagagacatgagcctgttggcaaccgctcccggcggcagacacccgatagaaacatttgtcgaagaatacgacgaccatttaatagcgcaagctgtccgcagagaagttgaaagaggagggcaggtttttttcctgcacaaccgcattgaatcgctgaaagaaattcgcataaaactggaacatttaatgcctgaaatactgattgaaacagcccacggacaaatggatgcgcaggaacttgaagacgtaatgcgccgtttcattcacggcggtttccacgttctagtatcgaccacgattatcgagaacggcatagacattccgaacgtaaacacaatcatcatagaccgcgccgatatgtacggagtatcgcagttataccagttaaggggcagagtaggaaggtcagatcgcgtagcgtacgcctaccttttctatcccgaacaaaaagcgctttcagaaattgccatgaaacgtttgcagacaatttccgattttaccgagcttggctcaggtttcaaaatagccatgaaagacatggaaatacgaggggcgggaaatcttttaggcagggaacaatccggcgacatttattctgtaggttttgatttatatgtgaaacttttggaagaagccgtgaaacgtcttgaagactcaaattacgagtcggaaacagaaacccttcttgaacttgaatacacaggcttcattcccgactcctacatcgactcgccccagcaaaaaatggaagtttacaaaatgatagccgcgatacgcgacaaagaagacttggagcgcgtatactcggaattgctagaccgcttcggtccgctccccgatgaagccgcctccctgcttgccctagccgaaatcagaataatatgccgccaattaacaatctcggtactaaaagaaagagccggcgttgtgcgtatagagttcgccaaggcggcgcgtgtaaacgtagaccgtcttatccgcatgatgcagcaatccgccggcaaagtgaaactcgatcccaaaaaagcgaacatgattctgcttacaacagggagcataggtttaaaagaaaaaagcgaattcatccgtgaaaaactatcgtcactagcaagataa

SEQ ID NO: 59436 - protein, 928 aa, Unknown
  Obtained from environmental sample
  DOMAIN (385)...(547): Type III restriction enzyme, res subunit
  misc_feature (1)..(928): Xaa is any amino acid
MQGTGNKKFPELTICPMKEVIWTDDRIEALQKNLSVCKEFSDGGKSVIESLITSKSVKGEEMFFPLAFEKPSCLLDYIGRNGVLFLIDRERLENTHESLVREYHGLYSRAVREKYEYPLPERLLLNFEEMLKKDTSSVSRMISFRSIKGEAKKGVCHIELACEPGRSFFGNINYLKEEFASLLESGWQIAVAAESQVQADRIKTLLEPHKSLSIMAVPLSAGFCLPDIKFMLVQENEIFGRRKLPPRSLKTVRSSPIDTFLEINPGDYIVHVNHGIGLFKGIERLSSGGNERDYIKIEYADEETVFVPVEQLNLVQRYIGNDGLQAPRLDKLGSKSWENRKGKVKKSVEDIAHRLIELYSKRKQAQGFAFPKDSEWQTMFEAAFPFDETEDQLRCIQEIKQDMESSSPMDRLVCGDVGYGKTEVALRACFKAIMGGKQTAFLAPTTILVEQHYENFLERFSRFSVNVAMLSRFVDRKKTRIILEQLKKGEIDLLIGTHRIIQRDVQFKNLGLIVIDEEQRFGVKDKERLKELKTNVDCLTLTATPIPRTLHMSLVKIRDMSLLATAPGGRHPIETFVEEYDDHLIAQAVRREVERGGQVFFLHNRIESLKEIRIKLEHLMPEILIETAHGQMDAQELEDVMRRFIHGGFHVLVSTTIIENGIDIPNVNTIIIDRADMYGVSQLYQLRGRVGRSDRVAYAYLFYPEQKALSEIAMKRLQTISDFTELGSGFKIAMKDMEIRGAGNLLGREQSGDIYSVGFDLYVKLLEEAVKRLEDSNYESETETLLELEYTGFIPDSYIDSPQQKMEVYKMIAAIRDKEDLERVYSELLDRFGPLPDEAASLLALAEIRIICRQLTISVLKERAGVVRIEFAKAARVNVDRLIRMMQQSAGKVKLDPKKANMILLTTGSIGLKEKSEFIREKLSSLAR

SEQ ID NO: 59437 - DNA, 1662 bp, Unknown
  Obtained from environmental sample
  misc_feature (1)..(1662): n is a, c, g, or t
atgaaaagcgattccgtaaacaagggccttgcccgttcgccccatcgctcgctatttaaggccctgggcttcattgatgaagaatttaaaatgccgctcatcggcatcgcctgcgcgaaaagcgaaatagtgccgggccatctgcaccttgacaacattgccaaagcggcggcggacggaattcgcatggcgggcggagcgcccgtcatatttccggtaatcggcgtatgcgacggaatcgcgatggggcacgaaggcatgcgctactccctgccgacaagggaacttatcgccgactcggttgaatgtatggcgattgcccacgcgtttgacgcccttgtctttatccccaactgcgacaagatagtgccgggcatgctgatggcgtcggcacggcttaacctcccctcggtttttgtttccggcggcccgatgctcgccgggcgcaaaaacggaaaaccgctgacgcttaccaccatgtttgaggctgttggcgccgtagccgccggaaagatcagcgaacaggaacttgaagagcttgaaaacctcgcctgccctggctgcggttcctgcgcgggaatgtttacggctaactcgatgaactgcgtaaccgaagcgctcggcatggccctgccggggaacggcactatcccggcggtaatggcggagcgcgtccgcctcgcgaaaaaaaccggaatgttgatcatggacgcgcttaaaaaagacctacgcccgaaaagcatactcacgcaaaaagcgtttatgaacgccctcgccctggacatggcgctgggctgttccacaaataccgccctccaccttcccgccatcgcgggggaagcgggcattgctctcgatctggaactccttaacaaggtaagcgcggttacgcctaacctctgccgcctcgcccccgcgggaaaggacgcaatcgaggatctgcacgccgccggcggaatttccgcggtcttaaatgaactctccaaaaagaaccttgtcgatcttacggccgcaactgtatacggctgtctgggcgacgcgttggacaaggccgttaaccgcaatcccgatgtcataaggccgattgaaaatccttattccgcgacaggggggcttgccgcgttaaagggaaacatcgcccgggacggctgcgtcgtaaagcgcagcgctgtagccgcctccatgctgaggcacgaagggccggcaagggtcttcgattccgaggaagccgcgtttgacgcgattatgggaaaaaaaataaaaccgggggacgtggtcgttatccgttatgaggggccaaagggcggtcccggcatgaaggaaatgctcgcgcccaccgcggccctcgccggcatgggccttgacgacaaggttgccctgattacggacgggcgcttctccggcgcttccaaaggcgcttctataggccacgtatcgcctgaagccgcgatgggcggaaacatcggaatcatcaatgagggggacatcatcgccatagacattgacgggctttccataaacgtaaagataagcgaagaggaaatcgagaggcggcgcaaagactggaagcctctttcaaagacccacacgggctatctggcccgctatgccgcgcaagtcgggtcggccgcgcaaggcgcggtgtttaattctgaccaataa

SEQ ID NO: 59438 - protein, 553 aa, Unknown
  Obtained from environmental sample
  DOMAIN (31)...(550): Dehydratase family
  misc_feature (1)..(553): Xaa is any amino acid
MKSDSVNKGLARSPHRSLFKALGFIDEEFKMPLIGIACAKSEIVPGHLHLDNIAKAAADGIRMAGGAPVIFPVIGVCDGIAMGHEGMRYSLPTRELIADSVECMAIAHAFDALVFIPNCDKIVPGMLMASARLNLPSVFVSGGPMLAGRKNGKPLTLTTMFEAVGAVAAGKISEQELEELENLACPGCGSCAGMFTANSMNCVTEALGMALPGNGTIPAVMAERVRLAKKTGMLIMDALKKDLRPKSILTQKAFMNALALDMALGCSTNTALHLPAIAGEAGIALDLELLNKVSAVTPNLCRLAPAGKDAIEDLHAAGGISAVLNELSKKNLVDLTAATVYGCLGDALDKAVNRNPDVIRPIENPYSATGGLAALKGNIARDGCVVKRSAVAASMLRHEGPARVFDSEEAAFDAIMGKKIKPGDVVVIRYEGPKGGPGMKEMLAPTAALAGMGLDDKVALITDGRFSGASKGASIGHVSPEAAMGGNIGIINEGDIIAIDIDGLSINVKISEEEIERRRKDWKPLSKTHTGYLARYAAQVGSAAQGAVFNSDQ

SEQ ID NO: 59439 - DNA, 303 bp, Unknown
  Obtained from environmental sample
  misc_feature (1)..(303): n is a, c, g, or t
gtgtgggtctttgaaagaggcttccagtctttgcgccgcctctcgatttcctcttcgcttatctttacgtttatggaaagcccgtcaatgtctatggcgatgatgtccccctcattgatgattccgatgtttccgcccatcgcggcttcaggcgatacgtggcctatagaagcgcctttggaagcgccggagaagcgcccgtccgtaatcagggcaaccttgtcgtcaaggcccatgccggcgagggccgcggtgggcgcgagcatttccttcatgccgggaccgccctttggcccctcataa

SEQ ID NO: 59440 - protein, 100 aa, Unknown
  Obtained from environmental sample
  misc_feature (1)..(100): Xaa is any amino acid
MWVFERGFQSLRRLSISSSLIFTFMESPSMSMAMMSPSLMIPMFPPIAASGDTWPIEAPLEAPEKRPSVIRATLSSRPMPARAAVGASISFMPGPPFGPS

SEQ ID NO: 59441 - DNA, 1065 bp, Unknown
  Obtained from environmental sample
  misc_feature (1)..(1065): n is a, c, g, or t
atggttggcgacaagtacggtcatatattcaactatgtcgaacttgaagctggcgggcttgccatcgatcacagcggggagccgcttccacaggaaacacttgaggcggcgaaacagtgcgacgctcttcttttaggagcggtcggcggtcccaagtgggacaaccttcccggacatctgcgtcccgaaagagcgttgctgggtcttcgcgccggacttggcgttttcgctaaccttcgtcccgccgaattgctccctcagttaaaatctgcctgccccattaaggacgaggtactgatagcgagtaatagcgaaggaaaagccgcctttgatttattaattgtaagggaactgacgggcggactttatttcggcaagcgcggacggcttgacgaaccttcaaacggacacagtcccggttccgcatttgatacagaaacatattcatggatggagatcgagagggtactccgcgcaggttatgaagcggctgcggtacgacgtaaaaaactctgcgtagtggataaagcgaatgtgcttgagtcgtcccgtttttggcgcgaagtggccgcggtagtttcaaaagactatcccgacatagagacaagttacctctacgttgacaacgccgccatgcagttgatccgcgccccgggacaattcgacgttatcgttacgtcaaatctttttggagacatactttccgatgaagcgtcagtacttacaggttcaataggaatgcttgcctccgctagtcttggcgcgccagcgcanaccggaacaagacccggaatgtacgagcctattcacggctccgcgcccgacatcgcaggtaaggacatcgccaatccgcttgcgacaattctttccgcggcgatgatgctccgttactccttcgcccttgagaaggaagcgcagtctattgaaacagccgtcaacaacgtgctggatcagggactgcggacggctgacatagcaagccgaagttccgcgaatagcggtgaaaaaattgtagggacaaaagcaatgggcaaagctgtgctcaaggcattggagaaattatga

SEQ ID NO: 59442 - protein, 354 aa, Unknown
  Obtained from environmental sample
  DOMAIN (2)...(347): Isocitrate/isopropylmalate dehydrogenase
  misc_feature (1)..(354): Xaa is any amino acid
MVGDKYGHIFNYVELEAGGLAIDHSGEPLPQETLEAAKQCDALLLGAVGGPKWDNLPGHLRPERALLGLRAGLGVFANLRPAELLPQLKSACPIKDEVLIASNSEGKAAFDLLIVRELTGGLYFGKRGRLDEPSNGHSPGSAFDTETYSWMEIERVLRAGYEAAAVRRKKLCVVDKANVLESSRFWREVAAVVSKDYPDIETSYLYVDNAAMQLIRAPGQFDVIVTSNLFGDILSDEASVLTGSIGMLASASLGAPAXTGTRPGMYEPIHGSAPDIAGKDIANPLATILSAAMMLRYSFALEKEAQSIETAVNNVLDQGLRTADIASRSSANSGEKIVGTKAMGKAVLKALEKL

SEQ ID NO: 59443 - DNA, 429 bp, Unknown
  Obtained from environmental sample
  misc_feature (1)..(429): n is a, c, g, or t
atggggaaaaaaataaaggcgggagacgtagtagttatccgttatgaaggaccgaagggtggtcccggtatgaaggagatgcttgcgcccacggcggctcttgccggaatgggtcttgatgacaaagtcgccctgattacggacggacgtttctcaggtgcttcaaagggcgcgtccattggtcacgtctgtccggaagcggcaatgggaggaaacataggcatcatcaacgaaggagacataatcgcaattgacattgacgggctttcaataaatgtgaagataagtgaagaagagatcgtgcggcggcgtaaagattggaagcctctttccaaaaccaataccggttaccttgcccgctacgccgcgcaagtcggctccgcggcgcatggcgctgtctttaattctgattcatgtaaaggaaattaa

SEQ ID NO: 59444 - protein, 142 aa, Unknown
  Obtained from environmental sample
  DOMAIN (1)...(135): Dehydratase family
  misc_feature (1)..(142): Xaa is any amino acid
MGKKIKAGDVVVIRYEGPKGGPGMKEMLAPTAALAGMGLDDKVALITDGRFSGASKGASIGHVCPEAAMGGNIGIINEGDIIAIDIDGLSINVKISEEEIVRRRKDWKPLSKTNTGYLARYAAQVGSAAHGAVFNSDSCKGN

SEQ ID NO: 59445 - DNA, 1260 bp, Unknown
  Obtained from environmental sample
  misc_feature (1)..(1260): n is a, c, g, or t
atgaaaagcgattccgtaaacaagggcattgcccgttcgccccaccgcgctctttttaaggcgttgggatttatcgaggaagaatttaaaaggccgctcgtcggcatcgcctacgcgaaaagcgaaatagtgccgggccatctgcaccttgacaacattgcaaaagcggccgcggacgggattcgcatggcgggcggaacgccggtgatctttccggtaataggagtatgcgacgggatagcgatgggacatgagggaatgaaatactccctgccgacaagggagctaatagcggactctgttgaatgtatggcgatagcccacgcttttgacggacttgtctttatacccaactgcgacaagataatacccggtatgctgatggcttcggcgcggcttaaccttccgtctgtttttgtttccggcggcccgatgcttgccggtcgcaaggacggaaaaccgttgacgcttaccaccatgtttgaggcggttggcgctgtcgcctccggaaagatcagcgaggaagaacttaaagaacttgaaaaccttgcctgtcctggttgcggctcatgctcaggaatgtttacggcaaactcaatgaactgcgtaaccgaggcgcttgggatggctttgccgggtaacggtactattccggccgtgatggcggagcgtatccgtctagcgaaaaagacaggaatgttaatcatggacgttctgaaaaaagatctgcgtcccaaaaccatactaacacgggaggcgtttatgaacgccctcgccctcgacatggcgctcggctgttccacaaataccgcgcttcatcttcccgccgtcgcgggggagaccggtattaaactcgatctggaacttcttaataaggtaagcgctgtaactcctaacctttgccgtcttgccccagcgggaaaggacgtaatagaagatctgcacgcggcagggggaataccggcggtcttaaaagaactttctaaaaagaaccttatcgatcttaaggctacaaccgcatacggctgtcttggcgacgcgttgggcaaggctgaaaaccgcaacagcgatgtcataagacccattgaaaatccatactccgcgacgggcggacttgccgcattaaaaggaaacatcgcacaggacggatgtgtcgtaaagcgaagcgcggtagcgacctccatgttgaaacatgaaggcccggcgagagtcttcgattcagaggaaacagcgttgacgctatcatggggaaaaaaataa

SEQ ID NO: 59446 - protein, 419 aa, Unknown
  Obtained from environmental sample
  DOMAIN (31)...(419): Dehydratase family
  misc_feature (1)..(419): Xaa is any amino acid
MKSDSVNKGIARSPHRALFKALGFIEEEFKRPLVGIAYAKSEIVPGHLHLDNIAKAAADGIRMAGGTPVIFPVIGVCDGIAMGHEGMKYSLPTRELIADSVECMAIAHAFDGLVFIPNCDKIIPGMLMASARLNLPSVFVSGGPMLAGRKDGKPLTLTTMFEAVGAVASGKISEEELKELENLACPGCGSCSGMFTANSMNCVTEALGMALPGNGTIPAVMAERIRLAKKTGMLIMDVLKKDLRPKTILTREAFMNALALDMALGCSTNTALHLPAVAGETGIKLDLELLNKVSAVTPNLCRLAPAGKDVIEDLHAAGGIPAVLKELSKKNLIDLKATTAYGCLGDALGKAENRNSDVIRPIENPYSATGGLAALKGNIAQDGCVVKRSAVATSMLKHEGPARVFDSEETALTLSWGKK

SEQ ID NO: 59447 - DNA, 693 bp, Unknown
  Obtained from environmental sample
  misc_feature (1)..(693): n is a, c, g, or t
gtggaacagccgagcgccatgtcgagggcgagggcgttcataaacgcctcccgtgttagtatggttttgggacgcagatcttttttcagaacgtccatgattaacattcctgtctttttcgctagacggatacgctccgccatcacggccggaatagtaccgttacccggcaaagccatcccaagcgcctcggttacgcagttcattgagtttgccgtaaacattcctgagcatgagccgcaaccaggacaggcaaggttttcaagttctttaagttcttcctcgctgatctttccggaggcgacagcgccaaccgcctcaaacatggtggtaagcgtcaacggttttccgtccttgcgaccggcaagcatcgggccgccggaaacaaaaacagacggaaggttaagccgcgccgaagccatcagcataccgggtattatcttgtcgcagttgggtataaagacaagtccgtcaaaagcgtgggctatcgccatacattcaacagagtccgctattagctcccttgtcggcagggagtatttcattccctcatgtcccatcgctatcccgtcgcatactcctattaccggaaagatcaccggcgttccgcccgccatgcgaatcccgtccgcggccgcttttgcaatgttgtcaaggtgcagatggcccggcactatttcgcttttcgcgtag

SEQ ID NO: 59448 - protein, 230 aa, Unknown
  Obtained from environmental sample
  misc_feature (1)..(230): Xaa is any amino acid
MEQPSAMSRARAFINASRVSMVLGRRSFFRTSMINIPVFFARRIRSAITAGIVPLPGKAIPSASVTQFIEFAVNIPEHEPQPGQARFSSSLSSSSLIFPEATAPTASNMVVSVNGFPSLRPASIGPPETKTDGRLSRAEAISIPGIILSQLGIKTSPSKAWAIAIHSTESAISSLVGREYFIPSCPIAIPSHTPITGKITGVPPAMRIPSAAAFAMLSRCRWPGTISLFA

SEQ ID NO: 59449 - DNA, 444 bp, Unknown
  Obtained from environmental sample
  misc_feature (1)..(444): n is a, c, g, or t
ttgatacgcgccccggggcaattcgacgttatagttacgtctaacttattcggggacattctttccgatgaggcctcggtgcttacggggtcaatcggtatgcttgcgtccgctagtcttggcgcgccggtacaggggggaacaaggccgggaatgtacgagcctatccacggctccgcgcccgacatcgcggggaaggacatcgcgaatccccttgcgacgattctttcggcggcgatgatgctccgctactccttcgggcttgagaaggaagcggaggccattgaaagcgccgtcaacaatgtgctggatcaggggctgagaacaggagacatcgcaagcagaagcggcgctgtaaacagcggcgctgtaaacagcggcgaaaaaatcgtgggtaccaaagcaatgggagacgcggtactcaaagagttggagagattatga

SEQ ID NO: 59450 - protein, 147 aa, Unknown
  Obtained from environmental sample
  DOMAIN (2)...(140): Isocitrate/isopropylmalate dehydrogenase
  misc_feature (1)..(147): Xaa is any amino acid
MIRAPGQFDVIVTSNLFGDILSDEASVLTGSIGMLASASLGAPVQGGTRPGMYEPIHGSAPDIAGKDIANPLATILSAAMMLRYSFGLEKEAEAIESAVNNVLDQGLRTGDIASRSGAVNSGAVNSGEKIVGTKAMGDAVLKELERL

SEQ ID NO: 59451 - DNA, 714 bp, Unknown
  Obtained from environmental sample
  misc_feature (1)..(714): n is a, c, g, or t
atgcagttggattattgttctccctggggcgcaagccgtaaggaagccgaaaaagcccttgcgattaccaccgaatggcttggcagggcaaagtgcaaattggaagaagttaccgcagacggaaaatatcggggcagtttattcagtattgtacagggaaacttttttaacgatctgaggaaaaagagcgcggatgtttgcatagagtcgaatactcccggcatagccataggcggtttatcggtaggggagccctcggagattttttatgaaactttggcttataccgccgcgtttttaccggaagaaaagccccgttatgtaatgggaatagggacgcccgaatacattttaaacgcgatagagcatggaatagacatgtttgactgcgttttattcacccgcgaggcgcgaaacgggcgtgtttacacccataaaggcgcgtttgccctaaaaaagcccgaaaataccgatgatttttcgccgatagataaagagtgtgggtgtaaagtttgcaaagactactcccgcgcctatttacggcatctttttaagaccggggagatactttgttccatattggcaagttatcataacctgtactttattaatgaattgataacaaacagccgtaacgccataaaagaagggcggtttttagagtataaaaaggactttttatcaaggtatactgaaggaaatgctaatgaatag

SEQ ID NO: 59452 - protein, 237 aa, Unknown
  Obtained from environmental sample
  DOMAIN (1)...(228): Queuine tRNA-ribosyltransferase
  misc_feature (1)..(237): Xaa is any amino acid
MQLDYCSPWGASRKEAEKALAITTEWLGRAKCKLEEVTADGKYRGSLFSIVQGNFFNDLRKKSADVCIESNTPGIAIGGLSVGEPSEIFYETLAYTAAFLPEEKPRYVMGIGTPEYILNAIEHGIDMFDCVLFTREARNGRVYTHKGAFALKKPENTDDFSPIDKECGCKVCKDYSRAYLRHLFKTGEILCSILASYHNLYFINELITNSRNAIKEGRFLEYKKDFLSRYTEGNANE

SEQ ID NO: 59453 - DNA, 1038 bp, Unknown
  Obtained from environmental sample
  misc_feature (1)..(1038): n is a, c, g, or t
atggattatctgggtaaaatgaaatccggcgagtcggttcccgttcttatggaactccttgaaacagaagaaaaaaagtttttaaacgccggctttcgcgccatcggcagcgcaagctcaggggacaaaaaactggcggacaagacggcggaatttttggttgatttttataacgacaaagaccccggcaatgataaccgcagcgtagtaataaccgccataggagccacaggatcatcggcgggtgttgagttccttacggaacttgctacaaatcccgatgagcgcgtacctcttcgcatggcggcgttaggcgctctatcccaaataggcgacccaaagggacttgacgcgatagtaagctgtatcagcgcaaaagatccaaacttgcgctcctcagcggtcgcagcccttggtccgttttcaggttcagccgcggagaacgcgatattcgacgctttcagggattcatactaccgcacaagaatcgccgcggcgcaggcaagccgcgaccgtaaacttgccgccgccgttccttttttaaaattccgcgccgagcgcgacgatgttccaagcgtaaaagacgaatcaatccgcgcgttaggcgctatcgccagcgatgaggcgattgcggttcttgaaagtttgtttacagagcggaaaaatacagaccgcgtccgcatccttgccgccgatatgcttagtaaaaattcaagccaaaaatatttcagcaaagttgtcgtagaacttgacgaggcaaagaaaagaaatcaaacaaacctttacaatggctttttaaaaattgtaggcgaggcagtaatagaaaatgataaatcggaaatagaaaccgtagcccgccgttttttaagcacgggcggcattatggaaaaattgtacggtcttgatatggcaagtaacaataaacttatggggcttaaagaagagataattacgcttacgaaagacaaaaatgaaggtctttcaaaaaaggcaaaaagaacggcggaaaatcttggtatagaaattccgagtgattaa

SEQ ID NO: 59454 - protein, 345 aa, Unknown
  Obtained from environmental sample
  misc_feature (1)..(345): Xaa is any amino acid
MDYLGKMKSGESVPVLMELLETEEKKFLNAGFRAIGSASSGDKKLADKTAEFLVDFYNDKDPGNDNRSVVITAIGATGSSAGVEFLTELATNPDERVPLRMAALGALSQIGDPKGLDAIVSCISAKDPNLRSSAVAALGPFSGSAAENAIFDAFRDSYYRTRIAAAQASRDRKLAAAVPFLKFRAERDDVPSVKDESIRALGAIASDEAIAVLESLFTERKNTDRVRILAADMLSKNSSQKYFSKVVVELDEAKKRNQTNLYNGFLKIVGEAVIENDKSEIETVARRFLSTGGIMEKLYGLDMASNNKLMGLKEEIITLTKDKNEGLSKKAKRTAENLGIEIPSD

SEQ ID NO: 59455 - DNA, 1122 bp, Unknown
  Obtained from environmental sample
  misc_feature (1)..(1122): n is a, c, g, or t
gtgcttgaaaaccctgtgcgaacgcgcatagacaaacttgaagaaatagtggatccgaaaaagagcaaaaactaccaaaagtatcataagatgttaaataagtactggaagaaaggcctgtatgaccgaagctacaaagatctttccgcaaataatacaatcaggcatccaaacaatgatgaattgacagaaatttaccacagtttgaagaaattcaagaaagaggatttatacaactgtacctgctgcgggtacggaaaatgcgaatcaatggctacggcaatttacaacaaactcaacaaaccggaaaattgcgcccattatattctggccctgcttaaagaagaaaaaagcgtagaagaacttaaccggcagcttaaggagcatatcggccaggcatccgaacttatcaggggaataaccgctttagtgaataaactgaacaacactatcagttcgcaggcggaaacaatcgccaattcttcggtggcaaccgaaaaaatgatcggctcgatcagggaaacttcggaaatgtcacggaaaaaacaggagtccataagagggttgatagaggacgccgacaaaagccaggagtccatgaggggaaccattcaatcggttgatgacatttccaaatctatggacggaatagcccaggctattaaaataatcagttcaatagcggccaataccaatttactgtccatgaacgcggcgatagaatctgcgcacgccggcgaagcgggcaggggctttgctgtggttgcaggcgaaatacgacgcctttcggacagtaccagggaaaattctcttaacatctccaagacactgaaaaatatcattgacggtattgccgttaccgaaaaacaatcggacgataccggtgtcaggattaccgcaatctccaaagaaatcagcagttttgccgaaaccatgtccagtttgatcaatacctttaacgaactggctgagcatagcggtgaaattaccgccgcaatgaacagccttaacagccaaagcggcatggtaaaaaccgattatggcgaaatactgtcaatgacggcaaaactgagttctgctatgctcgacctgactatgttagcagaagggaatgtagggtaa

SEQ ID NO: 59456 - protein, 373 aa, Unknown
  Obtained from environmental sample
  DOMAIN (138)...(373): Methyl-accepting chemotaxis protein (MCP) signaling domain
  misc_feature (1)..(373): Xaa is any amino acid
MLENPVRTRIDKLEEIVDPKKSKNYQKYHKMLNKYWKKGLYDRSYKDLSANNTIRHPNNDELTEIYHSLKKFKKEDLYNCTCCGYGKCESMATAIYNKLNKPENCAHYILALLKEEKSVEELNRQLKEHIGQASELIRGITALVNKLNNTISSQAETIANSSVATEKMIGSIRETSEMSRKKQESIRGLIEDADKSQESMRGTIQSVDDISKSMDGIAQAIKIISSIAANTNLLSMNAAIESAHAGEAGRGFAVVAGEIRRLSDSTRENSLNISKTLKNIIDGIAVTEKQSDDTGVRITAISKEISSFAETMSSLINTFNELAEHSGEITAAMNSLNSQSGMVKTDYGEILSMTAKLSSAMLDLTMLAEGNVG

SEQ ID NO: 59457 - DNA, 894 bp, Unknown
  Obtained from environmental sample
  misc_feature (1)..(894): n is a, c, g, or t
atgaacaccgaaactttaagtgtcggcggaatgacctgcgccgcctgttccgcgcgggtagaaagggcgcttcgcaagcttgacggtgttgaaagcgccgtagtgaaccttgccactgaaaaagctacggtcgtntacgacactggcgttctgcgcctttcggcgattaaggaagcgattaccaaagccggttatcaggcgttggaagtttcaaaggacactgttgatgaagataaactccgcaaggaaaaggaaataaaagtccttaggataaaattcattgtcgccgcttcactggggcttcccctgctgtatattgctatggctccgatgataccgtgggttgcccttcctttccctaaatcgctaaaccccatgaatttccctctgatttacggtttggtgcaattgatgctgaccattcctatcgttattgccggataccggttttacactgtcggtttcaaaaacctttttctccgcagcccgaacatggattcgcttatcgccgtcggtactacggcggcggtggtttacagcgtttacaatcttctgcggattatcagaggtactttcacggcggtagaatctctttattttgaaaccgccggagtaatcatcgccctcattcttttgggaaaactgcttgaagcaatatccaaaggacgcacgagcgaagcgataaaaaaactcatgggacttgcgcccaaaactgctgttattgtagaaaacggcgaagaaaaagaaatccccattgacgaggtaatccccggcgatataatcatcgtaaaacccggcgcgaaaatccctgttgacggaattgttaccgaagggcaaagcgctgtgacgaagcaatgctcaccggagagagtatgccgtctcgtgccgatctga

SEQ ID NO: 59458 - protein, 297 aa, Unknown
  Obtained from environmental sample
  DOMAIN (205)...(296): E1-E2 ATPase
  misc_feature (1)..(297): Xaa is any amino acid
MNTETLSVGGMTCAACSARVERALRKLDGVESAVVNLATEKATVVYDTGVLRLSAIKEAITKAGYQALEVSKDTVDEDKLRKEKEIKVLRIKFIVAASLGLPLLYIAMAPMIPWVALPFPKSLNPMNFPLIYGLVQLMLTIPIVIAGYRFYTVGFKNLFLRSPNMDSLIAVGTTAAVVYSVYNLLRIIRGTFTAVESLYFETAGVIIALILLGKLLEAISKGRTSEAIKKLMGLAPKTAVIVENGEEKEIPIDEVIPGDIIIVKPGAKIPVDGIVTEGQSAVTKQCSPERVCRLVPI

SEQ ID NO: 59459 - DNA, 489 bp, Unknown
  Obtained from environmental sample
  misc_feature (1)..(489): n is a, c, g, or t
ttgcttcgtcacagcgctttgcccttcggtaacaattccgtcaacagggattttcgcgccgggttttacgatgattatatcgccggggattacctcgtcaatggggatttctttttcttcgccgttttctacaataacagcagttttgggcgcaagtcccatgagtttttttatcgcttcgctcgtgcgtcctttggatattgcttcaagcagttttcccaaaagaatgagggcgatgattactccggcggtttcaaaataaagagattctaccgccgtgaaagtacctctgataatccgcagaagattgtaaacgctgtaaaccaccgccgccgtagtaccgacggcgataagcgaatccatgttcgggctgcggagaaaaaggtttttgaaaccgacagtgtaaaaccggtatccggcaataacgataggaatggtcagcatcaattgcaccaaaccgtaaatcagagggaaattcatggggtttag

SEQ ID NO: 59460 - protein, 162 aa, Unknown
  Obtained from environmental sample
  misc_feature (1)..(162): Xaa is any amino acid
MLRHSALPFGNNSVNRDFRAGFYDDYIAGDYLVNGDFFFFAVFYNNSSFGRKSHEFFYRFARASFGYCFKQFSQKNEGDDYSGGFKIKRFYRRESTSDNPQKIVNAVNHRRRSTDGDKRIHVRAAEKKVFETDSVKPVSGNNDRNGQHQLHQTVNQREIHGV

SEQ ID NO: 59461 - DNA, 1611 bp, Unknown
  Obtained from environmental sample
  misc_feature (1)..(1611): n is a, c, g, or t
atgatcagatcggccgaggcagttggtatggcagtagcggaaaccatgctcgccgcgcgattcaacaccccaagccgtaaaatcgttgaccattacacctacgccctctgcggcgacggctgtcttatggaaggcgtcgcatcggaggcaagctctttcgcagggcataacggcctgggcaagctcatcgtgttttatgattcaaacaaaattacaatagacggcagtacggatattgcctttaccgaggatgtcgccaaacgctacgaggcctacggctggcaggttcttcgcggttccatgtacaattttgaggaaattgccaaacttaccgcgcaggcaaaagcagaaacaaaaaagccaagcataattatacttacgtcgataatcggaaaaggcgcgcccaacaagcagaacaaagcggatatacacggcgcccctctgggcgcagacgaggtaaaggccgcccgtgcaaaccttggaatcacaggcgatttttatatcgcccctgaagcacaggcttactttagcgcaaagcaaaccgagtggaaaaaggcccacgctgactggcaggccatgtttgatgcgtggtcaaaggaaaaccccgagaagcgcaaggagtgggacaagttccattccaagaccgccgcttccgcctccctgccttcttacaacatcggcgacaaaatcgccacccgcaccgcaggcaataaagccttatgtgccgaagcgactgctaatgccaatctcgtcggcggctcagccgacctaaagggccccaacgctgtcggccttcccgccgacgccggaacatggacaaaagataacaatgctggccgttacatacactttggcatccgcgaattcgcgatggcggcgatttgtaacggcatatcgcttcacggaggtctgcgttcctattgctcaaccttcatggtctttgtcgattatctgcgcccggccctgcgaatgtccgcgttgatgaaccagcctgttgtatacgtccttacccacgattcgatccttgtaggcgaagacggccccacccaccagcccattgaacaccttgccagcatgagggtcataccgaatgttttggttctccgccccggtgacgcagaggaaagcgccgaggcctgggcaatggcgatggaaaacacaaagggccccaccgtcatcaccctttcccggcagaacatcacggtcttccccaaggacgaccccgactggaaaaacacgatccgcgttggcgcgtacatcgccaaacaagttgaaggctctcccgacatcgtaatcatcgccacaggctcggaagtaggcatggcgctggaagccgcggccaaggcgtcggacaaaaagatccgcgtggtctcaatgatcagcaaggagcttttcgagtcccagcccgcggctatccgcgacgcgatgatcccccccaacgcgcgggtcattgtcagcgaggccggcgtgaaattcggctgggaacgctgggcaaaaccggaggacatccactcaatagaccgcttcggcgagtccggccccgcggcgaaagtcgccgagcatttgggaatgacggtggaagggctgttgaagattataaacaacaggtaa

SEQ ID NO: 59462 - protein, 536 aa, Unknown
  Obtained from environmental sample
  DOMAIN (418)...(529): Transketolase, C-terminal domain
  misc_feature (1)..(536): Xaa is any amino acid
MIRSAEAVGMAVAETMLAARFNTPSRKIVDHYTYALCGDGCLMEGVASEASSFAGHNGLGKLIVFYDSNKITIDGSTDIAFTEDVAKRYEAYGWQVLRGSMYNFEEIAKLTAQAKAETKKPSIIILTSIIGKGAPNKQNKADIHGAPLGADEVKAARANLGITGDFYIAPEAQAYFSAKQTEWKKAHADWQAMFDAWSKENPEKRKEWDKFHSKTAASASLPSYNIGDKIATRTAGNKALCAEATANANLVGGSADLKGPNAVGLPADAGTWTKDNNAGRYIHFGIREFAMAAICNGISLHGGLRSYCSTFMVFVDYLRPALRMSALMNQPVVYVLTHDSILVGEDGPTHQPIEHLASMRVIPNVLVLRPGDAEESAEAWAMAMENTKGPTVITLSRQNITVFPKDDPDWKNTIRVGAYIAKQVEGSPDIVIIATGSEVGMALEAAAKASDKKIRVVSMISKELFESQPAAIRDAMIPPNARVIVSEAGVKFGWERWAKPEDIHSIDRFGESGPAAKVAEHLGMTVEGLLKIINNR

SEQ ID NO: 59463 - DNA, 909 bp, Unknown
  Obtained from environmental sample
  misc_feature (1)..(909): n is a, c, g, or t
ttgttaaaacttgcacatgtaaaaaaagatgttgttatttttaaggaaggcgacaaaggggaaaatatgtttatccttttgtcaggttctttaagcgcgtttggcacccaatccgacgggaatcaaaaatggttatttgacataaaaccctgtgatttttttggcgagatgtcaataatcgcgcatgaaccgcgttccgcgacaatatccgcaaagactgattccgtcataatgatgttgaacaatgttgatttcttcaaaataattaacgattacccgataattggctataaaatactcagaactatcggtatcgtacaaaatcaatggttaagccagtcgtcaaagtcctataacgatttaatccggtggggcgaaaacgcgcgccgcagggcaatcactgatgaaatgacggggttgtacaaccgccgttttctggaagaatccatcaaggagcgttttaataattcatttatgaatttacgcattatgtccctgttaatgatggatcttgacaagatacacggcataaatgaccgttatggtcccaaagcgggcgatataataattacatcctgcgcggagattattcgcgattgtctgcgtcacggcgatattccagcccgtctttcaggcgatgaattcgcgtttcttcttcccgataccgaaagttcaagcgccgcaaatgttgctgaattaatcagaaagaatatagaaaacaaacaatttgaaattcccataggtccaggttccggtgaaactgttttaattggaatccataccagtatcggtattgcggttgcgccttcccatgcttccaccgccgaagagctttttgagaaatcagacacggctctcagaaaagttaaagaactcggcagaaaccgcgtcgggatttttgctgattaa

SEQ ID NO: 59464 - protein, 302 aa, Unknown
  Obtained from environmental sample
  DOMAIN (4)...(94): Cyclic nucleotide-binding domain
  misc_feature (1)..(302): Xaa is any amino acid
MLKLAHVKKDVVIFKEGDKGENMFILLSGSLSAFGTQSDGNQKWLFDIKPCDFFGEMSIIAHEPRSATISAKTDSVIMMLNNVDFFKIINDYPIIGYKILRTIGIVQNQWLSQSSKSYNDLIRWGENARRRAITDEMTGLYNRRFLEESIKERFNNSFMNLRIMSLLMMDLDKIHGINDRYGPKAGDIIITSCAEIIRDCLRHGDIPARLSGDEFAFLLPDTESSSAANVAELIRKNIENKQFEIPIGPGSGETVLIGIHTSIGIAVAPSHASTAEELFEKSDTALRKVKELGRNRVGIFAD

SEQ ID NO: 59465 - DNA, 1644 bp, Unknown
  Obtained from environmental sample
  misc_feature (1)..(1644): n is a, c, g, or t
atggaatttattgaaaaaactctaagtcaggtattgcgcgataaaacacaggcccaccccgatcatgattttcttgtttattcggaccgcagtcttcattttacatacgctcaatttgacaaaagggtggatgatttggcgaagggctttcttgcgatgggcataaaaaaaggcgacaatgtgggaatttgggcgacaaatgtgccggactggaacacggtgctttttgcctgcgccaggataggcgccgttcttgttacgattaacacgggctataaaacccacgagttggaatatgtgttaaaacaatccgacatggtctgcctgtgccttacaaacggctggcgcgattcagactatataggcatggtaaacgagcttgttcctgaattaaaaacttcgcagaggggtcatattaattccgaaaaatttcccttcttaaaatacgttgtccatgtaggccagcagaaacaccgtggcatgtacagttttaacgaggttcttcttttaggtcagcataccgatcccgcactgttaagcgaaattgaggcgacgcttgataccaacgatgtcgtgaacatgcagtacacttcaggcactacgggctttccaaagggcgtaatgcttactcacagaaatatcttaaataacgggcttggcataggcgacaaccagcggcttaccgaaaaagacatcgtgtgccttcccgtacctttattccactgtttcggccttgtgcttggaatgatggcgattcttacccacggctcgaccgccgcgatgatagagtggttcgatcctctgcttgtactggctaccattcaaaaggaaaaatgcaccgcggtttacggagtccccacaatgtttatcgccgagcttaaccaccccatgtttaaaatgtttgatctttcaagccttcgcaccggcatcatggcgggctctccctgtccaattgaagcgatgcgccgggtaatcgatcttatgttcatgaaagaggttaccatttgctacgggcttactgaatcgtcgcccgttatgactcagacgcgctatgacgacgacattaatgtaaaagtggaaaccgtaggccgcgccctgcccggggtagaggtgacaatccgcgacccggaaacaggcgaagaatgtcccgacggagtgcacggagagttttgctgccgaggttataatactatgaagggttattataaattgccggaagctaccgctcagtgtattgatgaaaaaggctggcttcattcaggcgacaggggggtaaaagacaaagacggcaacttcaaagtaacaggccgcataaaggacatgattatacgcggaggagagaatatttccccaaaagaagtagaggattttttgtataccatgcccggtatcaaggatgtacaggtagtcggaattgccagcgaaaaatacggcgaagaagtaggcgcttttgttatacttcatcccgatgtgaaaatgaatgtggaagatgtccgcgactattgccgcgacaaaataggcaggtataaaatccccaaatatgtgttttttgttgacagttttcctcttacatccagcggaaagatacaaaagtacctgttacgcgaaataggcaataaaatggccaaagagcggggagtatag

SEQ ID NO: 59466 - protein, 547 aa, Unknown
  Obtained from environmental sample
  DOMAIN (35)...(469): AMP-binding enzyme
  misc_feature (1)..(547): Xaa is any amino acid
MEFIEKTLSQVLRDKTQAHPDHDFLVYSDRSLHFTYAQFDKRVDDLAKGFLAMGIKKGDNVGIWATNVPDWNTVLFACARIGAVLVTINTGYKTHELEYVLKQSDMVCLCLTNGWRDSDYIGMVNELVPELKTSQRGHINSEKFPFLKYVVHVGQQKHRGMYSFNEVLLLGQHTDPALLSEIEATLDTNDVVNMQYTSGTTGFPKGVMLTHRNILNNGLGIGDNQRLTEKDIVCLPVPLFHCFGLVLGMMAILTHGSTAAMIEWFDPLLVLATIQKEKCTAVYGVPTMFIAELNHPMFKMFDLSSLRTGIMAGSPCPIEAMRRVIDLMFMKEVTICYGLTESSPVMTQTRYDDDINVKVETVGRALPGVEVTIRDPETGEECPDGVHGEFCCRGYNTMKGYYKLPEATAQCIDEKGWLHSGDRGVKDKDGNFKVTGRIKDMIIRGGENISPKEVEDFLYTMPGIKDVQVVGIASEKYGEEVGAFVILHPDVKMNVEDVRDYCRDKIGRYKIPKYVFFVDSFPLTSSGKIQKYLLREIGNKMAKERGV

SEQ ID NO: 59467 - DNA, 585 bp, Unknown
  Obtained from environmental sample
  misc_feature (1)..(585): n is a, c, g, or t
atggcggaacatacacctggcgagcgtatcgccgaaattcggaaaacttactcaatcagcagggaagacctggctgaacggtcgggcgtgtcggtagaactgatatctaaaattgaagacgacgggcttattcctgatttggctcctctcattaaaatatcgcgagggcttggggtaagacttggaacccttcttgacgaccatgaacagcttggtcccattatttgcagggcggggcaggccgctacctccggccgttttaagaccgggattcccgacggggcggataattcttccggtcaccacggcatgaactttaacgcgcttgcggccgaacaaaaactcaggcacatggagccgtttgtcgtaaccattcaagcgacgccccaacaggaaaaatccacgcacgagggcgaagagtttatatatgttctggaagggaaactggcgctggaatacggcatggataaagacaccttaaatactggggattccgtttattacgattctatcgtgccgcaccgcgttttttcggcggataaaaatcctgtgaaaattcttgccgtattatatacgccggtttaa

SEQ ID NO: 59468 - protein, 194 aa, Unknown
  Obtained from environmental sample
  DOMAIN (10)...(64): Helix-turn-helix
  misc_feature (1)..(194): Xaa is any amino acid
MAEHTPGERIAEIRKTYSISREDLAERSGVSVELISKIEDDGLIPDLAPLIKISRGLGVRLGTLLDDHEQLGPIICRAGQAATSGRFKTGIPDGADNSSGHHGMNFNALAAEQKLRHMEPFVVTIQATPQQEKSTHEGEEFIYVLEGKLALEYGMDKDTLNTGDSVYYDSIVPHRVFSADKNPVKILAVLYTPV

SEQ ID NO: 59469 - DNA, 2142 bp, Unknown
  Obtained from environmental sample
  misc_feature (1)..(2142): n is a, c, g, or t
atgatcagatcggccgagaagtgtttttccgctgtctggcagttttcacaaaacgccgaaggcgaaaagcaacttgaaacgattatgaaaaattttcttaacggcgaaacattgagcgttgccgaaaagattccttataaaaacttacgtgaccttgccgaaaactttgtcctgtacggaaccctgggtgaaatatttgccagaagggcgggatttaaccgggggcttggcggttccatgcacgccttctttcctcccttcggttcaatgcccaacaacgccattgtgggtggctcggcggacatcgcagttggctccgctctgtacaagcggatcaaccgcaaacatgggatcgttatcgccaatataggtgacgcttcaatgggttgcggcccggtctgggaagcgatgatgttatccgctatggatcagtaccacactctctggcccgaaagcgcgggtggagcgccgccgattcttttcaatttcttcaacaatttctacggcatgggcggacagacatcaggagaaacaatgggctacggctttatggcaagagtcggcgcgggcgttaatcccgacaatatgcacagcgagcgggtggacggctataacccgctggcggtcgccgatgcgattatccgtaaaaaagccattcttcttgaaggccggggaccggttcttcttgacaccatcacctaccgcatatcgggtcattcgccttccgacgcttcaagttatcgtaccccggaagaattaaaactctggcaacagaccgattccatagaacaatacggcgcgtaccttatcgaaaacaaagcgataagcaaatcggaacttgacgcgttacgcgaaacagtgcaggcaaaactccttgaaacggtaaaacttgccgtcaacgacgaagtctctccccggctgggcggcgctttcattgaatcggtcatgttttcaaaccgcaagattgaaaaaatggacaaccgtgaaccggagctttccgagcctgtggagaagaaccaccgtgttaaagccctggccgcaaaagcccgctacggctttgacgccgaagggaaaccactgtccaaaaacaaaacattccattaccgtgacgcgctgttcgaagccatgctccaccgttttacgatagatcccaccatggcggcctggggcgaggaaaaccgggactggggcggcgcttttgccgtataccggggcttgacggaactccttccttacaaccgtcttttcaacagccccatttccgagggggctattgtaggcgcgggagtgggttatgcgctatccggcggcagggcggttgtggaactgatgtactgcgactttatgggccgcgccggggatgagattttcaaccaggcttcaaagtggcagtcaatgtcggccgggcttttgaaaatgccgcttgtggtacgggtttcggtcggcaataaatacggcgcgcaacacagccaggactggacagcgatgacagcccacattcccggacttaagtcctatttccccgccacgccctacgacgcgaaagggatgttaaatctggccctgcgcggcaccgatccggtgatcttctttgagagccagctcctgtacgacatgagtgaacagtttgaaaagaacggagttcccgaaggctattacgaagttccggaaggcgaaccggccgtccgcaaacagggtacggacctcactatcgctaccatcggggcaaccctctacacggccatgaaggcggcggacaaactgcaaagccaatttggcctttcggtggaagtgatcgacctgcgttttatcaacccgttgaattacgaaaaaataatagagtcggtaaagaagaccggaaaactcctgttggccagtgacgctgccgagcggggttcattcctccatacggttgccagcaacgttcaaacttatgtctttgattatctggacgcacctgtggcggtaacgggaagccgcaactggatcaccccggcggctgaaatggaacatctgtactttccccaggttgactggatcattgacgcgattcacgagcgcatcctgcccctgcctggttacagccccgttacggtgcaaactaccggtgatatgctgcggaagaaccgtctgggagtatag

SEQ ID NO: 59470 - protein, 713 aa, Unknown
  Obtained from environmental sample
  DOMAIN (1)...(306): Dehydrogenase E1 component
  misc_feature (1)..(713): Xaa is any amino acid
MIRSAEKCFSAVWQFSQNAEGEKQLETIMKNFLNGETLSVAEKIPYKNLRDLAENFVLYGTLGEIFARRAGFNRGLGGSMHAFFPPFGSMPNNAIVGGSADIAVGSALYKRINRKHGIVIANIGDASMGCGPVWEAMMLSAMDQYHTLWPESAGGAPPILFNFFNNFYGMGGQTSGETMGYGFMARVGAGVNPDNMHSERVDGYNPLAVADAIIRKKAILLEGRGPVLLDTITYRISGHSPSDASSYRTPEELKLWQQTDSIEQYGAYLIENKAISKSELDALRETVQAKLLETVKLAVNDEVSPRLGGAFIESVMFSNRKIEKMDNREPELSEPVEKNHRVKALAAKARYGFDAEGKPLSKNKTFHYRDALFEAMLHRFTIDPTMAAWGEENRDWGGAFAVYRGLTELLPYNRLFNSPISEGAIVGAGVGYALSGGRAVVELMYCDFMGRAGDEIFNQASKWQSMSAGLLKMPLVVRVSVGNKYGAQHSQDWTAMTAHIPGLKSYFPATPYDAKGMLNLALRGTDPVIFFESQLLYDMSEQFEKNGVPEGYYEVPEGEPAVRKQGTDLTIATIGATLYTAMKAADKLQSQFGLSVEVIDLRFINPLNYEKIIESVKKTGKLLLASDAAERGSFLHTVASNVQTYVFDYLDAPVAVTGSRNWITPAAEMEHLYFPQVDWIIDAIHERILPLPGYSPVTVQTTGDMLRKNRLGV

SEQ ID NO: 59471 - DNA, 579 bp, Unknown
  Obtained from environmental sample
  misc_feature (1)..(579): n is a, c, g, or t
atgctcaccaattttgttaccattaaaaaatctttgctccgtcttaaaaagcttgaaaagatggagattgacggaacctttgaaaacctgaccaaaaaagaaatcgcggctctgggcaaggagcgggccaagctccagaaaaaccttgggggcatcaaggaaatgaaagagccccccggaatccttttcattatagataccagggtggaagccatagccgtggcggaagccaagcgcatgggcattcccatagttgccgtggtagacacgaactgtaaccccgacggcatcgactatcccatccccggcaatgacgatgccatccgggccattaccctctttacgcagataattgccaacgcggtggttgaagcggacaatgaagtggggctcaagatcatcgaaaaccttgaacaggacgaagaggaagaaatgatgaccgatgcttccataagggaggaggacagggaaatcgacataacaacatacacggaagtgccttctgcgcccaaagaggagcaggaagcggaggaagacgatcttccggtggacatagacaaagcctacggcgaagaataa

SEQ ID NO: 59472 - protein, 192 aa, Unknown
  Obtained from environmental sample
  DOMAIN (1)...(126): Ribosomal protein S2
  misc_feature (1)..(192): Xaa is any amino acid
MLTNFVTIKKSLLRLKKLEKMEIDGTFENLTKKEIAALGKERAKLQKNLGGIKEMKEPPGILFIIDTRVEAIAVAEAKRMGIPIVAVVDTNCNPDGIDYPIPGNDDAIRAITLFTQIIANAVVEADNEVGLKIIENLEQDEEEEMMTDASIREEDREIDITTYTEVPSAPKEEQEAEEDDLPVDIDKAYGEE

SEQ ID NO: 59473 - DNA, 444 bp, Unknown
  Obtained from environmental sample
  misc_feature (1)..(444): n is a, c, g, or t
atggcagatataagcgcatcagatgtaaaagccctccgggaaaagaccggagcgggtataatggactgtaaaaacgccctggttgaaacaggcggcgactttgcaaaagcagaaaaacttttaaaagagaagggccttgcggcggttgaaaaacgatccggaagggccaccaaagaaggaaagatatttgtcaaaataaaggactcaggaactcaaggctcgacggcagttctggtagaattggtttccgagacggactttgtggccaaaaacgaggaattcattgcccttggcggcaaaatcgcggatatagtcctggaaaagggttattccgaacctaacgatgagctaaacggccttgttatggatttggccgccaagataagggaaaacatgagccttaggcgcattaaaacgttacggcgaaagcaggcgaatacctga

SEQ ID NO: 59474 - protein, 147 aa, Unknown
  Obtained from environmental sample
  DOMAIN (4)...(44): UBA/TS-N domain
  misc_feature (1)..(147): Xaa is any amino acid
MADISASDVKALREKTGAGIMDCKNALVETGGDFAKAEKLLKEKGLAAVEKRSGRATKEGKIFVKIKDSGTQGSTAVLVELVSETDFVAKNEEFIALGGKIADIVLEKGYSEPNDELNGLVMDLAAKIRENMSLRRIKTLRRKQANT

SEQ ID NO: 59475 - DNA, 387 bp, Unknown
  Obtained from environmental sample
  misc_feature (1)..(387): n is a, c, g, or t
gtggtaaaattcagcgcggataaagagggggcgttcagcagcgaagaggtaaaagctttcgcctttaccattgcccttcatgtggcggcctttaacccttacgccctggaccaaacaaaaatcgaccaggggtggctcaaggagcaggaagaaattttccgaaagcaaacagagcaggacgaaaagatgcagggcaaacccgcaaacgttatagaaactatcctgaaaggcaaggtaagcaaattcctcaaagaaatctgcctaatggatcagggctacgtaaaagacgaaaaaatgaccgtggcacaggccttggcggacgcggggaagcgttttggtttcaagttaagcgtcgccgattatgtctactttaaggtaggcgactaa

SEQ ID NO: 59476 - protein, 128 aa, Unknown
  Obtained from environmental sample
  DOMAIN (8)...(128): Elongation factor TS
  misc_feature (1)..(128): Xaa is any amino acid
MVKFSADKEGAFSSEEVKAFAFTIALHVAAFNPYALDQTKIDQGWLKEQEEIFRKQTEQDEKMQGKPANVIETILKGKVSKFLKEICLMDQGYVKDEKMTVAQALADAGKRFGFKLSVADYVYFKVGD

SEQ ID NO: 59477 - DNA, 555 bp, Unknown
  Obtained from environmental sample
  misc_feature (1)..(555): n is a, c, g, or t
atgagcgagacccaaactacggcggaagaacggatgaaaaaaaccctggcaagcctaaaggacggtttttcctctcttaggaccggcagggcttcagccgctttattcgacaagatacgggtagacgcttacggagaaaaatcgccgataaaccaggtggccaacatttccatacccgaagcgcggctcattgtgattcagccctgggacaaggcgcttatcggcgaaatagaaaaagccatacgctcatcggagctttccctgaacccttcaaacgacggcnaggttatccgcatatccattcctcccctgaccggcgagcgccgcaaagagctggtaaaagtggcaaggaacaacgcagagcagagcagggtcgcggtcaggaacatccgcagggacggtaacgaagagctaaaaaagctgttaaaggacagcaagatcaccgaggacgaggaaagcaagactacggaggaacttcagaagcttaccgatttgtatattggaaagattaaccaggttcttgaggaaaaagaaaaggagataatggaggtttga

SEQ ID NO: 59478 - protein, 184 aa, Unknown
  Obtained from environmental sample
  DOMAIN (18)...(182): Ribosome recycling factor
  misc_feature (1)..(184): Xaa is any amino acid
MSETQTTAEERMKKTLASLKDGFSSLRTGRASAALFDKIRVDAYGEKSPINQVANISIPEARLIVIQPWDKALIGEIEKAIRSSELSLNPSNDGXVIRISIPPLTGERRKELVKVARNNAEQSRVAVRNIRRDGNEELKKLLKDSKITEDEESKTTEELQKLTDLYIGKINQVLEEKEKEIMEV

SEQ ID NO: 59479 - DNA, 693 bp, Unknown
  Obtained from environmental sample
  misc_feature (1)..(693): n is a, c, g, or t
ttgacggagaaaaccgccgtcccgacccatataggcattataatggacgggaacggccgctgggccaaaaaacgcgggcaactgcgcacccaggggcacctggagggactaaaggcggcaaagcgcgttgtaaaagccgccgcgaatttgggcgtttcatacctcaccctttacacgttttccacggagaactggaagcgcgccgccgaagaggtcgggttcattatgggtctggtaaagcagtaccttaagggagaaatggatttttaccgggagaacaacatcagaattcgccacgccgggaaccgcgaagggttgcccgttgatattttgcaagacctggacgaagcctgcgccgctaccggcggttttggcggtctccaggtaattctggcgctcaactacgggggcagggacgaaattgtccgagccgtaaaaaaactaattgaagctggagattcggcgacggctgaaaaactaagtcaatacatggacaacccggacgttccggatgcggatctcataatcaggacggcgggagaatacaggacaagcaattttcttttatgggaaggagcctacgccgaatactatatctctgataaactatggcctgactggacagaagacgatcttgaaaaggcaatcctggcctacaatagcagggatcgccgcttcggagccgcgcaatga

SEQ ID NO: 59480 - protein, 230 aa, Unknown
  Obtained from environmental sample
  DOMAIN (14)...(228): Putative undecaprenyl diphosphate synthase
  misc_feature (1)..(230): Xaa is any amino acid
MTEKTAVPTHIGIIMDGNGRWAKKRGQLRTQGHLEGLKAAKRVVKAAANLGVSYLTLYTFSTENWKRAAEEVGFIMGLVKQYLKGEMDFYRENNIRIRHAGNREGLPVDILQDLDEACAATGGFGGLQVILALNYGGRDEIVRAVKKLIEAGDSATAEKLSQYMDNPDVPDADLIIRTAGEYRTSNFLLWEGAYAEYYISDKLWPDWTEDDLEKAILAYNSRDRRFGAAQ

SEQ ID NO: 59481 - DNA, 1578 bp, Unknown
  Obtained from environmental sample
  misc_feature (1)..(1578): n is a, c, g, or t
gtgagcaaaattcccgatgacggaactttccccaccgccacaacccagtacgaaaagcgtgcggttgcggaaagggttccctcctggaatccggaagtgtgcatacagtgtggtctgtgttcggttgtttgttcccacgggtgtatcaagatgaagaacctgagcgccgcagaagcttccgccgcgcctaagggctttaagacagcggaaattaagccgaagccagtggatggaaaaaagacaacgctcgctatttcagccgaagactgcatggaatgtggagtttgcataaactgctgcccaatgtcaaaggacacctcaaagccaactgccctttcatggaaatcttacgccgacgatccggcttaccacgcggaacaggccgaagcatggtattacttcctttcactgccggaagtgcccgccgcagaactcaatcttggcacccagaagggtcttgcgtataaaaggccgctctttgaattctccggtgcatgcggcggctgcggcgagacgccctatgttaagctcataacccagctctttggcgacaggatggtcatggccaacgcaaccggctgttcttccatttacggcggtaacctgcccaccactccgtattgccaaagggcggacggaaggggcccggtgtgggcaaacagcctgtttgaagacgccgctgaattcggtatgggcatgaggcttacaagcgacaagctcgccttacacgcccatgaaatcgcggagaaggcaaaatcagaaggaattgccgttgccatcatcgacaagattctggcaaacgaccaaaaagacgatgacgctatagaagcccagcgcaaaagcgtggacgagttaaaagcggctctcaagaacgattccaaaccgacggcaaagttgctactctctctggcagatttctttatcaaacggtcggtttggattctgggtggcgacggctggggctacgacatcggcttcggcggccttgaccacgttatcgcttccaaccggaacgtgaacctgctatgtatggacaccgaggtttattccaacaccggcggtcagatgtccaaagctactcctgtgggcgctatcgccagattcgcggcggcgggcaaggaaattacaaagaaagaccttggcgcaattgcgatgagttacggttatgtgtacgtggcaagggtttccatggggggaaacacggctcaggccatcaaggcgttccgggaagccgagtcctacgacgggccatccctcatcatcgcctactcccactgtattaaccatggcatcgatatgagccacggaatggatcagcaaaaagcggcggttacttccggtatttggccgctttaccgctacgatccgcggctcaaggccgagggcaaaaaccccttccagctggacagcaaggatcccacaactagccttgaagacttcatgtacaaggaagtgcgctttaagagccttaaagccgctgatccagcgcgagccgacgcccttttggccaaagccaaagcccataccgaaagggtcttgaagaatacaagtatctggctgagagatcattctaagtaa

SEQ ID NO: 59482 - protein, 525 aa, Unknown
  Obtained from environmental sample
  DOMAIN (27)...(50): 4Fe-4S binding domain
  misc_feature (1)..(525): Xaa is any amino acid
MSKIPDDGTFPTATTQYEKRAVAERVPSWNPEVCIQCGLCSVVCSHGCIKMKNLSAAEASAAPKGFKTAEIKPKPVDGKKTTLAISAEDCMECGVCINCCPMSKDTSKPTALSWKSYADDPAYHAEQAEAWYYFLSLPEVPAAELNLGTQKGLAYKRPLFEFSGACGGCGETPYVKLITQLFGDRMVMANATGCSSIYGGNLPTTPYCQRADGRGPVWANSLFEDAAEFGMGMRLTSDKLALHAHEIAEKAKSEGIAVAIIDKILANDQKDDDAIEAQRKSVDELKAALKNDSKPTAKLLLSLADFFIKRSVWILGGDGWGYDIGFGGLDHVIASNRNVNLLCMDTEVYSNTGGQMSKATPVGAIARFAAAGKEITKKDLGAIAMSYGYVYVARVSMGGNTAQAIKAFREAESYDGPSLIIAYSHCINHGIDMSHGMDQQKAAVTSGIWPLYRYDPRLKAEGKNPFQLDSKDPTTSLEDFMYKEVRFKSLKAADPARADALLAKAKAHTERVLKNTSIWLRDHSK

SEQ ID NO: 59483 - DNA, 648 bp, Unknown
  Obtained from environmental sample
  misc_feature (1)..(648): n is a, c, g, or t
atgcctgatgtcattaataaggtaatgtcgttcattaacagggacggcgaaggcgaatcggaaaaggacatactgctaaagcagatagccaaagatatttctcaaaacaaatacgccaggttttaccgcgtaaggcagcaggaagctgatatttctttggggcagcttttttacaatttatataaacttgtttaccctatgcaagtttttctgaaagacccggctaaagtagccaaaatcaggcagatcacccttgaggcttttttggataagaaaacgatggatcttatcaagaagctcagccttgacgcagtgaacgaaaatatgaaagccggaagcgatgtagtaaaaattctggaagacgatcttgccgctttaaacgcggcttttgacggcccaaggattgtagcggcggacaagtgccataacctcatcgcctccttgaaacaatttgtgtttttcgattttagttcggtaatcagaaagttcgatcccgaatttaaagagggggatttccttactcagttgaaattttccccggtggatatcagcgtcatggcttccgatctctctgcctttttgtccgttctgccatcaatggaaagggaagacgactggaaaacagtttttgaaattcttaagtactga

SEQ ID NO: 59484 - protein, 215 aa, Unknown
  Obtained from environmental sample
  misc_feature (1)..(215): Xaa is any amino acid
MPDVINKVMSFINRDGEGESEKDILLKQIAKDISQNKYARFYRVRQQEADISLGQLFYNLYKLVYPMQVFLKDPAKVAKIRQITLEAFLDKKTMDLIKKLSLDAVNENMKAGSDVVKILEDDLAALNAAFDGPRIVAADKCHNLIASLKQFVFFDFSSVIRKFDPEFKEGDFLTQLKFSPVDISVMASDLSAFLSVLPSMEREDDWKTVFEILKY

SEQ ID NO: 59485 - DNA, 762 bp, Unknown
  Obtained from environmental sample
  misc_feature (1)..(762): n is a, c, g, or t
ttgccgccaccgggccaggatgagttccacaagaatttcggcccctttacggaaggctttgtgtacgtgcctggcggggacatcgacgcgttggaaaaggccctcgaccccaaaacaacagcgggctttctgctggaagccatccagggcgaaagcggcatctggccgcagacgccggaatacatcgccgccgccgtcaagctctgcgccgagcgtgacatactcctgatgtttgacgaggttcagacgggcgtgggcagaacaggcaacttccttgcctgcgaaggctacggtgtaaagcccgacgtggttaccattgccaagggcctttcaggcggaattccttccggcgcgtttctggcaggcgaaaaggccgcggacgtgcttcagacaggagatcacggctcgacttttggcgggaaccccatcgccgccgccgcgggccttgtggttctggaaaccgtaacaaaccccggctttatgaaggaaatcgcgcgaaaggggcagaagatgaaagatgccgtcgcaggctggaaccaccccaaaataaccgccatccggggcgtgggcctgatgctcggcgtagacattaccgtcgaagcttggccgattctggaagccttaatttcccgggcgcaaaacacagatgcggggcttctgcttcttagcgcgggcaagcagaccctgcgcttccttccaccctacatagttagcgacggcgagattgagcaggggctggagatgttgagaggcgtgttgtaa

SEQ ID NO: 59486 - protein, 253 aa, Unknown
  Obtained from environmental sample
  DOMAIN (1)...(199): Aminotransferase class-III
  misc_feature (1)..(253): Xaa is any amino acid
MPPPGQDEFHKNFGPFTEGFVYVPGGDIDALEKALDPKTTAGFLLEAIQGESGIWPQTPEYIAAAVKLCAERDILLMFDEVQTGVGRTGNFLACEGYGVKPDVVTIAKGLSGGIPSGAFLAGEKAADVLQTGDHGSTFGGNPIAAAAGLVVLETVTNPGFMKEIARKGQKMKDAVAGWNHPKITAIRGVGLMLGVDITVEAWPILEALISRAQNTDAGLLLLSAGKQTLRFLPPYIVSDGEIEQGLEMLRGVL

SEQ ID NO: 59487 - DNA, 666 bp, Unknown
  Obtained from environmental sample
  misc_feature (1)..(666): n is a, c, g, or t
ttgaaggagagagcgctaatgaatgacgcctttatgaatacataccacagactgcccgtgatcttcgcgaaaggggagggggcctggcttacggatattgacggaaaaaaatacctggacttctgttccggcatcgcggtaaattgcctgggccacgcctatccgccgttggtcgaggcgatttccgaacaggccgccaggctcaaccacacctgcaactatttcctgagcgatacaaccgctgcctttgcggaaaaactcatcgcggcctgcgcgggcgcggggatgaaaaaggtctttctggccaattcgggggcggaggccaacgagggggcctgcaaggtagccagaaagtattcactggcaaagtacggccccggcagggcatacaatcgtaaccctccggggcagttttcacggcaggacgataaccacccttgccgccaccgggccaggatgagttccacaagaatttcggcccctttacggaaggctttgtgtacgtgcctggcggggacatcgacgcgttggaaaaggccctcgaccccaaaacaacagcgggctttctgctggaagccatccagggcgaaagcggcatctggccgcagacgccggaatacatcgccgccgccgtcaagctctgcgccgagcgtgacatactcctga

SEQ ID NO: 59488 - protein, 221 aa, Unknown
  Obtained from environmental sample
  DOMAIN (21)...(215): Aminotransferase class-III
  misc_feature (1)..(221): Xaa is any amino acid
MKERALMNDAFMNTYHRLPVIFAKGEGAWLTDIDGKKYLDFCSGIAVNCLGHAYPPLVEAISEQAARLNHTCNYFLSDTTAAFAEKLIAACAGAGMKKVFLANSGAEANEGACKVARKYSLAKYGPGRAYNRNPPGQFSRQDDNHPCRHRARMSSTRISAPLRKALCTCLAGTSTRWKRPSTPKQQRAFCWKPSRAKAASGRRRRNTSPPPSSSAPSVTYS

SEQ ID NO: 59489 - DNA, 654 bp, Unknown
  Obtained from environmental sample
  misc_feature (1)..(654): n is a, c, g, or t
atgctgaaaaaaaccgggaaggaaagccgctttatcaacggtctgcgctacactgacggggaaacaatggagatcgtccagatggttctctgcggcaagctgaacaaagacatctgttcactgatccagcacgcggggggcagggcggtcggactctgcggcatcgacggggcgctgctccaggcccgccgccgcaaaggcggggaagacctaggccttgtcggcgatgtggaaaccgtggacgccacgattctcaattccgcgctgaacgacgggatcatcccggtggtttcttccgtggcctacggcatcggagaagacgaaggctgctcgctcaatatcaacgcggacacagccgccgcgaaaattgccggggcccttaaagcggaaaagctcatgcttatgaccgacgttcagggcatactccgcgacgttcaggatccggcctcattaatccggcaggttaaccgatctgaactggaagcgcttaaacggaacggcatagtgagcaagggcatgatcccgaaggttgactgctgcctccttgcgatggacggcggcgtcaagaggagctacataattgacggccgcctgccccacgcccttttgatcgagctttttaccgacgaaggcatgggcactatgatcgaatga

SEQ ID NO: 59490 - protein, 217 aa, Unknown
  Obtained from environmental sample
  DOMAIN (2)...(195): Amino acid kinase family
  misc_feature (1)..(217): Xaa is any amino acid
MLKKTGKESRFINGLRYTDGETMEIVQMVLCGKLNKDICSLIQHAGGRAVGLCGIDGALLQARRRKGGEDLGLVGDVETVDATILNSALNDGIIPVVSSVAYGIGEDEGCSLNINADTAAAKIAGALKAEKLMLMTDVQGILRDVQDPASLIRQVNRSELEALKRNGIVSKGMIPKVDCCLLAMDGGVKRSYIIDGRLPHALLIELFTDEGMGTMIE

SEQ ID NO: 59491 - DNA, 960 bp, Unknown
  Obtained from environmental sample
  misc_feature (1)..(960): n is a, c, g, or t
ttggtgtcgtggttccattcgcgtaatttaaaaacaaatgtttccagaggggaattccagaccattatcggcctcatcggcgataccagccaggtggacatcgatcttctggaagggcttgaaatcgttgagtccgtcaagcggatcagcgagccgttcaaacgggctaaccggaaattccacccctctgacacggtaatagatataggcggatataaaataggcggcgggcattttcaaatgattgccggtccatgttccgtagaatcgcccgagcaaattctctgcattgccgaaagcgtcaaaacctccggcgccaaccttctgcgcggaggagcgtttaagccgcgtacctcgccttatgccttccagggtatgcgcgccgaaggcatagaactcctgttgaaaacaagagacaaaaccggcatgcccatagttacggaaataatgaacgcggatcatctgcccttatttgaacaggttgacgtgattcaggtgggcgcgcggaatatgcagaacttcgagttattgaaggaacttgggcaggtaaagaagcccatcctcctaaaacgcggatttgcgaacaccctgcaggaactattaatgagcgccgagtacctcatggctgaaggaaacgataatgtgatcctctgcgagagggggatacgcacctttgaaacttacacgaggaacaccctcgatctgtccgccgtgcccgtgctgaaggaactctcccacctgccggtgatcatcgatccgagccacgctatcggcgtttcgcgttatgtgaaatcgatgacgcttgcgtcggtggccgccggcgcggacgggcttattatcgaagtacacaatgatccgaaaaacgccgcctgcgacggcgcgcagtccctcacgctggaacagttcgccgatgtcgcggaaaaggtgcggcggatacgcgaagtagtcgtggcgctttag

SEQ ID NO: 59492 - protein, 319 aa, Unknown
  Obtained from environmental sample
  DOMAIN (64)...(318): DAHP synthetase I family
  misc_feature (1)..(319): Xaa is any amino acid
MVSWFHSRNLKTNVSRGEFQTIIGLIGDTSQVDIDLLEGLEIVESVKRISEPFKRANRKFHPSDTVIDIGGYKIGGGHFQMIAGPCSVESPEQILCIAESVKTSGANLLRGGAFKPRTSPYAFQGMRAEGIELLLKTRDKTGMPIVTEIMNADHLPLFEQVDVIQVGARNMQNFELLKELGQVKKPILLKRGFANTLQELLMSAEYLMAEGNDNVILCERGIRTFETYTRNTLDLSAVPVLKELSHLPVIIDPSHAIGVSRYVKSMTLASVAAGADGLIIEVHNDPKNAACDGAQSLTLEQFADVAEKVRRIREVVVAL

SEQ ID NO: 59493 - DNA, 378 bp, Unknown
  Obtained from environmental sample
  misc_feature (1)..(378): n is a, c, g, or t
atgaagataggcattatcggtctgggccttatcggcggctccttcgctaaagcgtacaaagccgccgggcacaccgtatacgcaagcgagatcgataaaagcatacttgattttgccgttctttcaggcgctgttgacgcgccgctggacgccggggcgctgtccatctgcgacctgatcctgatcgccctgtatccgcaggcggctatagaatttctggacaggatggcgtgtcacatacaaagctctgccactgtcatcgactgctgcggcataaaaaaaaatgtatgcgccgccggtttcaaggccgcctcccggtaccgtttcacctttgcgggcggacacccgatggcgggcaccgaacattccgggctttag

SEQ ID NO: 59494 - protein, 125 aa, Unknown
  Obtained from environmental sample
  SIGNAL (1)...(16)
  misc_feature (1)..(125): Xaa is any amino acid
MKIGIIGLGLIGGSFAKAYKAAGHTVYASEIDKSILDFAVLSGAVDAPLDAGALSICDLILIALYPQAAIEFLDRMACHIQSSATVIDCCGIKKNVCAAGFKAASRYRFTFAGGHPMAGTEHSGL

SEQ ID NO: 59495 - DNA, 441 bp, Unknown
  Obtained from environmental sample
  misc_feature (1)..(441): n is a, c, g, or t
atgttcaagggagcgtccatgatcattgtgccgcctgtgtatgacgacatcttgtttctcgaaaagatcaaacgcctgcttgcgccagcggaattcggcagactgaccgttaccacggcggaaaagcacgacgcgatgatcgcgtttacctcgcaaatggcgcatctggtttccaacgcgttcattaaaagcccgaccgtgtttgaacacaagggattttccgccgggagctataaggacttgacgcgcgtggcgtggctcaacgagcagttgtgggccgagctgtttttagaaaaccgggatcatctgctgcatgagcttgatttattaattgcttctctcgcacagtacagggacgcgctccagaatgaggattttgattatctaaagaaccttctctacgatggcaggtgcctgaaagaaaaggttgaccgccaatga

SEQ ID NO: 59496 - protein, 146 aa, Unknown
  Obtained from environmental sample
  misc_feature (1)..(146): Xaa is any amino acid
MFKGASMIIVPPVYDDILFLEKIKRLLAPAEFGRLTVTTAEKHDAMIAFTSQMAHLVSNAFIKSPTVFEHKGFSAGSYKDLTRVAWLNEQLWAELFLENRDHLLHELDLLIASLAQYRDALQNEDFDYLKNLLYDGRCLKEKVDRQ

SEQ ID NO: 59497 - DNA, 399 bp, Unknown
  Obtained from environmental sample
  misc_feature (1)..(399): n is a, c, g, or t
atgaacgaagtaattcgtattgatgaaacaaatatagtttcgattctgaactcggcaaaaagcggtttggagcttgggaaaccattctcccggcaaatatttcttatatccgcctcaattgcaggctcatattatgtggacgatattgataaactgcttgacgaaatgaagatcggagccaaactgcgttttgtccgtgagccggataataaatatgataagttggctatattggttaaagaccaaaatgaaaataaacttggctatgtcccgcgtgaaaagaaccctattcttgcaagactgatggatgccggaaaactcatttttggtacagtcaaatcaataaataatgacgacagttatataaatattgaaatggaaatatttatggatgattaa

SEQ ID NO: 59498 - protein, 132 aa, Unknown
  Obtained from environmental sample
  misc_feature (1)..(132): Xaa is any amino acid
MNEVIRIDETNIVSILNSAKSGLELGKPFSRQIFLISASIAGSYYVDDIDKLLDEMKIGAKLRFVREPDNKYDKLAILVKDQNENKLGYVPREKNPILARLMDAGKLIFGTVKSINNDDSYINIEMEIFMDD

SEQ ID NO: 59499 - DNA, 357 bp, Unknown
  Obtained from environmental sample
  misc_feature (1)..(357): n is a, c, g, or t
gtgatagtccggataaagccccatgaatattttgagcgtcatgaatatgatctgtactgcgcggttccaatctctgtaacacaggcggcccttggcgcggaaatccgcgtcagcactcttgacggaaaaacaataaaggtaaaagttccccccggaacccagaacggcaaaatgctccgcatccgcgatgaaggcgtgccgtcgggaagccaccggggtaatctctacatcaaattaattgtccgcataccggataaactttcccgccgcggcaaggaactgatggaagaactatcccgtaccgaaggcgaaaacgaaagccccggacctgttcctctttcgcagctaagcgaataa

SEQ ID NO: 59500 - protein, 118 aa, Unknown
  Obtained from environmental sample
  DOMAIN (2)...(99): DnaJ C terminal region
  misc_feature (1)..(118): Xaa is any amino acid
MIVRIKPHEYFERHEYDLYCAVPISVTQAALGAEIRVSTLDGKTIKVKVPPGTQNGKMLRIRDEGVPSGSHRGNLYIKLIVRIPDKLSRRGKELMEELSRTEGENESPGPVPLSQLSE

SEQ ID NO: 59501 - DNA, 780 bp, Unknown
  Obtained from environmental sample
  misc_feature (1)..(780): n is a, c, g, or t
gtggcaaagcgcgattattatgaggttctcggagtacagaaaaacgcttcaaaagacgatataaaaaaggcatatcgtaaacttgccattcaatatcatccggacaagaatccgggcaacaaggaagctgaggaaaaattcaaggaagctaccgaagcttacgaggtgctcgccgatgaaaagaaaaaagccgcctatgatcagttcggctttgccggcgttgacaacatgggcggccaaacccatgactggagcaatttccggggctttgaggatattttcggcggcggcgactttggcagtatctttgacagtatctttggcacctttggcggcggcggcttccgcagaagcggcggcggccagggcggggtaaggcagggagcggatctccgctacgatcttgatattgctttcaaggacgctgtttttggcaccaaagaagaaatccagtttttacataacgaatcctgccaggcctgcaaaggctccggagccgccaaaggcgcggaaagaaaaacctgtcctacctgtcagggctccggtcaggtacggcacacccaaagttttttctcggtagcctccacctgtcccagctgcagagggcaaggctttatcattgaaagaccctgcccggaatgcggcgggttcgggcacccaaaagaaacggataaaaatcgccgtgacaattcccgctgtgttgaaaacggaaggcggctggtattccccggcagggcgacgcgggccagaacggcggcccgtcaggcgatctgtatgtga

SEQ ID NO: 59502 - protein, 259 aa, Unknown
  Obtained from environmental sample
  DOMAIN (145)...(225): DnaJ central domain (4 repeats)
  misc_feature (1)..(259): Xaa is any amino acid
MAKRDYYEVLGVQKNASKDDIKKAYRKLAIQYHPDKNPGNKEAEEKFKEATEAYEVLADEKKKAAYDQFGFAGVDNMGGQTHDWSNFRGFEDIFGGGDFGSIFDSIFGTFGGGGFRRSGGGQGGVRQGADLRYDLDIAFKDAVFGTKEEIQFLHNESCQACKGSGAAKGAERKTCPTCQGSGQVRHTQSFFSVASTCPSCRGQGFIIERPCPECGGFGHPKETDKNRRDNSRCVENGRRLVFPGRATRARTAARQAICM

SEQ ID NO: 59503 - DNA, 1044 bp, Unknown
  Obtained from environmental sample
  misc_feature (1)..(1044): n is a, c, g, or t
atggtttctgacctgcttgagcgatccaaagaaccctgcatcaaagcgctgagggatgccggtttaaccgccgagcagatcgacgaagtaatccttgtcggcggttctacgcgtatcccagcggtgcagcagattgttaaagaccttttcaaaaaagagcccaacaagggcgtaaaccccgacgaggcggtcgcggtcggcgcggcgatacagggcggtatactgggcggcgatgtcaaagacgtgctgctgttagacgtaactcccctttcgctcggcatagaaaccctgggcggcgttatgacaaaactcataccgcgcaacacgacaattcccacccgcaagagccagattttctcaacagccaccgacagccagccggcggtttccattaacgtattacagggcgaacgggaaatggcgagccagaaccgcgtgctgggtcgttttgatctggttggtataccccccgcgccgcgcggcgttccccaaattgaggttggttttgacattgacgcgaacggtattgtccatgtcagcgcaaaagacctgggcacgggcaaagagcaaaatatccgcatagaaagttccagcggccttaacgatcaggacattgagcgcatggtaaaagaagcggagttgcacgccgaagaagataaaagagagcgggaaaaagcggaagtccgcaacgaagcggattcgatgatctacgctactgaaaagaacatcaaagacctgggcgacaaggttagcgccgcggacaaggccaagaccgaagaagccatagccgatcttcgcaaagccctggaaggcggcgaccttcaagcgataaaggacaagaccgaggcacttaaacaggcatcttacaaaattgccgaggagatctacaagcagcaagcggcggcgcagcagggggcgggcaaacagcccggcggcgaccccaacatgggcggcatgggcggcggctccggtcaagccggttccggcggcggcaacagcaaaggcgccgaagacgccgattacgaagtggtggacgagaagtaa

SEQ ID NO: 59504 - protein, 347 aa, Unknown
  Obtained from environmental sample
  DOMAIN (1)...(297): Hsp70 protein
  misc_feature (1)..(347): Xaa is any amino acid
MVSDLLERSKEPCIKALRDAGLTAEQIDEVILVGGSTRIPAVQQIVKDLFKKEPNKGVNPDEAVAVGAAIQGGILGGDVKDVLLLDVTPLSLGIETLGGVMTKLIPRNTTIPTRKSQIFSTATDSQPAVSINVLQGEREMASQNRVLGRFDLVGIPPAPRGVPQIEVGFDIDANGIVHVSAKDLGTGKEQNIRIESSSGLNDQDIERMVKEAELHAEEDKREREKAEVRNEADSMIYATEKNIKDLGDKVSAADKAKTEEAIADLRKALEGGDLQAIKDKTEALKQASYKIAEEIYKQQAAAQQGAGKQPGGDPNMGGMGGGSGQAGSGGGNSKGAEDADYEVVDEK

SEQ ID NO: 59505 - DNA, 576 bp, Unknown
  Obtained from environmental sample
  misc_feature (1)..(576): n is a, c, g, or t
ttgaccggagccgccgcccatgccgcccatgttggggtcgccgccgggctgtttgcccgccccctgctgcgccgccgcttgctgcttgtagatctcctcggcaattttgtaagatgcctgtttaagtgcctcggtcttgtcctttatcgcttgaaggtcgccgccttccagggctttgcgaagatcggctatggcttcttcggtcttggccttgtccgcggcgctaaccttgtcgcccaggtctttgatgttcttttcagtagcgtagatcatcgaatccgcttcgttgcggacttccgctttttcccgctctcttttatcttcttcggcgtgcaactccgcttcttttaccatgcgctcaatgtcctgatcgttaaggccgctggaactttctatgcggatattttgctctttgcccgtgcccaggtcttttgcgctgacatggacaataccgttcgcgtcaatgtcaaaaccaacctcaatttggggaacgccgcgcggcgcggggggtataccaaccagatcaaaacgacccagcacgcggttctggctcgccatttcccgttcgccctgtaa

SEQ ID NO: 59506 - protein, 191 aa, Unknown
  Obtained from environmental sample
  misc_feature (1)..(191): Xaa is any amino acid
MTGAAAHAAHVGVAAGLFARPLLRRRLLLVDLLGNFVRCLFKCLGLVLYRLKVAAFQGFAKIGYGFFGLGLVRGANLVAQVFDVLFSSVDHRIRFVADFRFFPLSFIFFGVQLRFFYHALNVLIVKAAGTFYADILLFARAQVFCADMDNTVRVNVKTNLNLGNAARRGGYTNQIKTTQHAVLARHFPFAL

SEQ ID NO: 59507 - DNA, 642 bp, Unknown
  Obtained from environmental sample
  misc_feature (1)..(642): n is a, c, g, or t
atgcggatattttgctctttgcccgtgcccaggtcttttgcgctgacatggacaataccgttcgcgtcaatgtcaaaaccaacctcaatttggggaacgccgcgcggcgcggggggtataccaaccagatcaaaacgacccagcacgcggttctggctcgccatttcccgttcgccctgtaatacgttaatggaaaccgccggctggctgtcggtggctgttgagaaaatctggctcttgcgggtgggaattgtcgtgttgcgcggtatgagttttgtcataacgccgcccagggtttctatgccgagcgaaaggggagttacgtctaacagcagcacgtctttgacatcgccgcccagtataccgccctgtatcgccgcgccgaccgcgaccgcctcgtcggggtttacgcccttgttgggctcttttttgaaaaggtctttaacaatctgctgcaccgctgggatacgcgtagaaccgccgacaaggattacttcgtcgatctgctcggcggttaaaccggcatccctcagcgctttgatgcagggttctttggatcgctcaagcaggtcagaaaccatctgttcgaatttcgcccttgtaagggattttgcaaatgttggggccgctcggccaatctga

SEQ ID NO: 59508 - protein, 213 aa, Unknown
  Obtained from environmental sample
  SIGNAL (1)...(25)
  misc_feature (1)..(213): Xaa is any amino acid
MRIFCSLPVPRSFALTWTIPFASMSKPTSIWGTPRGAGGIPTRSKRPSTRFWLAISRSPCNTLMETAGWLSVAVEKIWLLRVGIVVLRGMSFVITPPRVSMPSERGVTSNSSTSLTSPPSIPPCIAAPTATASSGFTPLLGSFLKRSLTICCTAGIRVEPPTRITSSICSAVKPASLSALMQGSLDRSSRSETICSNFALVRDFANVGAARPI

SEQ ID NO: 59509 - DNA, 1290 bp, Unknown
  Obtained from environmental sample
  misc_feature (1)..(1290): n is a, c, g, or t
gtggcggaaatagccgaagcctggtatgacgcgtctgcccgtaatcccaattcccccgccggcagggatgccgtaagtaaggcgacggttctggcaagtgaagccatccaattagatcaaagcctggccctgcctcattccacattgggaaaaatcaaccgtgaccagcaggactgggataaggccattgcagaattcagggaagcagcccgtctggattcttccaactatgtatacttttatgaactgggccgaagttgtttttccgcacagcgctatgttgatgcaagagggggctttgagaacacagtcaggttaaatccccggtttgaggccggctggtacaacctgggcggaaccttgcggattttaaatcgttatgacgatgctcttaccgcgtaccgcagggcaatatcaataaagaccgattatgccgcggcgcaccgggagcttgggcgtattctggttttaaagaaagattacaagggcgcgatagaatcctttaacaatgcccttaaatataatcccaacgatcttgcttcgctgcgggaactgggcgccgcgcagaatgaggcgggctattattcctccgcagaggaatcttttgccagggctttacaggcagctccctcggacggtcagacaaactacaatatgtcggtggtaaaacttgctcttaagaagaacaatgaggcgctttcctatgcccgtcatgccgtagaaagtaatccttccagcgcagtatatacctataccctggggcttgcccttgaagccacaggcaacagcgacgccgccgttgaagcatacaaaaaatccgcttcgctcgatcgaaaatatgtgcggccgcgcatcaacctgggaaacctttatctgtcacgcaataatgttaacgagggaatacgctgtctttccgaggcttacgccatagagccggcaaattttgaagtgaataacaatcttggcgcggtatacgcgaaaatggagaactgggcgaaaagcgtcgagcattacgaaaaggcgcttgccgtggaatcaaaaaatcccaccgtgcatttgaatctggcgagggcctacaccagcgccggcgatcttgccaaggcgcagaattcatatcaggccgttctgcggcttgctcccgataactgggacgctatgtatgagctgggaaaaacctgcgtcagcatgggaaagccggatgaagcaaaaaaatacctcagggatctgttgcagcggaattcttcatacagcgcaagggctgacgcggaaaggatactcgcggggctatga

SEQ ID NO: 59510 - protein, 429 aa, Unknown
  Obtained from environmental sample
  DOMAIN (247)...(280): Tetratricopeptide repeat
  misc_feature (1)..(429): Xaa is any amino acid
MAEIAEAWYDASARNPNSPAGRDAVSKATVLASEAIQLDQSLALPHSTLGKINRDQQDWDKAIAEFREAARLDSSNYVYFYELGRSCFSAQRYVDARGGFENTVRLNPRFEAGWYNLGGTLRILNRYDDALTAYRRAISIKTDYAAAHRELGRILVLKKDYKGAIESFNNALKYNPNDLASLRELGAAQNEAGYYSSAEESFARALQAAPSDGQTNYNMSVVKLALKKNNEALSYARHAVESNPSSAVYTYTLGLALEATGNSDAAVEAYKKSASLDRKYVRPRINLGNLYLSRNNVNEGIRCLSEAYAIEPANFEVNNNLGAVYAKMENWAKSVEHYEKALAVESKNPTVHLNLARAYTSAGDLAKAQNSYQAVLRLAPDNWDAMYELGKTCVSMGKPDEAKKYLRDLLQRNSSYSARADAERILAGL

SEQ ID NO: 59511 - DNA, 576 bp, Unknown
  Obtained from environmental sample
  misc_feature (1)..(576): n is a, c, g, or t
atgctggtaatggtgttttcgctgttttttttctatgccgacgggccgtatctttcacgactggtacttcacgccatcccgataagaacagagtacatcagtaccctcacgagaaaattcatggatattacaaggaatcttttttttggttacattatcgtggcattgctgcaggcgatagtggcgtttattatttttactatttttgatatcaacggatcactggtgcttgcggtagtgacatttctctttgtatttattcccgtacttggagccacagttgtttacatacctctggctattctgaaaatcgcaagcgggaatatagcgggcggggtgattttctttattgtatccgctgtttttatttccggcatcgacaatgttctaaggccgatgtttctgagagaccggatacagcttcatccattgataatattttttgcgattctcggcggattggccgtttttggcttcaacgggtttattctaggcccggtactggtaattctgtttctcaccgttctggatctgtttttaaccgaacataagatcggtacgcaggatcaggcataa

SEQ ID NO: 59512 - protein, 191 aa, Unknown
  Obtained from environmental sample
  misc_feature (1)..(191): Xaa is any amino acid
MLVMVFSLFFFYADGPYLSRLVLHAIPIRTEYISTLTRKFMDITRNLFFGYIIVALLQAIVAFIIFTIFDINGSLVLAVVTFLFVFIPVLGATVVYIPLAILKIASGNIAGGVIFFIVSAVFISGIDNVLRPMFLRDRIQLHPLIIFFAILGGLAVFGFNGFILGPVLVILFLTVLDLFLTEHKIGTQDQA

SEQ ID NO: 59513 - DNA, 2052 bp, Unknown
  Obtained from environmental sample
  misc_feature (1)..(2052): n is a, c, g, or t
atgccaaaagttaaattaacagatttagtgctgcgtgatgcgcatcaatcattgtttgctacccgcatggttactgcggatatgcttaccatttgcgacaagcttgataaagtgggcttctttgcgttagaagcttggggcggagccacttttgattcctgtataaggtttttaaatgaagatccgtgggaaaggcttaaaaaactaaaaaaagccctgcccaacacaaaaataatgatgcttttacgcggtcagaaccttttgggatacaggcattatgccgatgacgttgtagaaaaatttgttgaatacgccgcaaaagacggggttgatgttttccgtatttttgacgcggtaagcgatccgcgcaaccttaaagccgcaacggctgccgccaaaaaaacaggcaaacacatacaggcgacaatttcttacgcggtaacccccttccacacgatagaaaaatacgctgaattcgcaaaacagcttgtagacatcggcgcggattcaatttgtattaaagatatgtccggtcttcttaaaccctacgaaggttatgagcttgtaaaagcaatcaagaaggtgacagacttaccgatcgaaatccacactcacgccactacgggtatgtccgtagcgactcttaccaagtgcgccgaggcgggagcggagattttagacactacaatttcatcaatgtcgatgggaacaagccacagcccaacggaaacaatggtggaaattttaaaaggcactgagtacgacacgggactggacaccgccctgttactcgacattgccgcgtatttccgcgatgtccgcaaaaactacaaaaaattcgaatcaagcttcctcggcgcggatacccgtatcctcgcaagccaggttccaggcggaatgttaagcaacctggaaagccagcttaaagaacaaggcgcttcggataaaattgacgacgtactcaaagagatcgccgttgttcaaaaagactcaggctatccgccgcttgttactcccacaagtcaaattgtcggaacacaggctgtgtttaacgtactgttcggcagatacaacaaactttcaggcgagttccaagaccttgtcgccggaaaatacggcgcttgccccgctccgaaaaatcccgatgtagtaaaaaaagctcttgaagctttaaaaatggaaaaagaaatcacccatcgtccggcggatgatattcccgctgaatattcaaaacttgaagacgaaaccaaaaaactcttaggcacaagcactgttacaactgaagacgttcttacctacgccatgttcccgaaagtcgccccggaattcttcaaaaaacgcgccaacggccccgtggtcttcaaaccggaagctgacgctcccaaagccgccgctcctgccgcgccgggacaggccgcccgttactctgtaaacgtgaacggctccaattacgacgttgttgtctctcccgcgggaactgtagccgccgttcccgccgcttcttcagcggcgcctgcggcttcatccgctgccgcggctggcgcgtccgtatcgggcggcgcgacaatccccgcgcctgtagccggaactatactccgctatgtcgcgtccgaaggctcgcaggtaaaatcaggcgataccgtattaattattgagtccatgaaaatggaactggaaataaaggccacttcctcaggtcccattcacttccttgttccaaccggaacacaggttgcggcccagcaggctgtcgcgcaaatcggcggcggcgctccggcggccgctcccgctcccgcggcagcggcacccgctcctgcagccgctccggcaacttccggcggcggcgctgtaattccggcgcctgttgcgggaacaattctacgttacgctgtaaacgagggcgccgttgtcgccgcgggcgataatgttgtcataattgagtccatgaaaatggaactggaaataaaagcgacttcgtcaggaaaagttcacttccttgttccaaccggaacacaggtcgcttcccaacagcccattgccgaaataatataa

SEQ ID NO: 59514 - protein, 683 aa, Unknown
  Obtained from environmental sample
  DOMAIN (521)...(587): Biotin-requiring enzyme
  misc_feature (1)..(683): Xaa is any amino acid
MPKVKLTDLVLRDAHQSLFATRMVTADMLTICDKLDKVGFFALEAWGGATFDSCIRFLNEDPWERLKKLKKALPNTKIMMLLRGQNLLGYRHYADDVVEKFVEYAAKDGVDVFRIFDAVSDPRNLKAATAAAKKTGKHIQATISYAVTPFHTIEKYAEFAKQLVDIGADSICIKDMSGLLKPYEGYELVKAIKKVTDLPIEIHTHATTGMSVATLTKCAEAGAEILDTTISSMSMGTSHSPTETMVEILKGTEYDTGLDTALLLDIAAYFRDVRKNYKKFESSFLGADTRILASQVPGGMLSNLESQLKEQGASDKIDDVLKEIAVVQKDSGYPPLVTPTSQIVGTQAVFNVLFGRYNKLSGEFQDLVAGKYGACPAPKNPDVVKKALEALKMEKEITHRPADDIPAEYSKLEDETKKLLGTSTVTTEDVLTYAMFPKVAPEFFKKRANGPVVFKPEADAPKAAAPAAPGQAARYSVNVNGSNYDVVVSPAGTVAAVPAASSAAPAASSAAAAGASVSGGATIPAPVAGTILRYVASEGSQVKSGDTVLIIESMKMELEIKATSSGPIHFLVPTGTQVAAQQAVAQIGGGAPAAAPAPAAAAPAPAAAPATSGGGAVIPAPVAGTILRYAVNEGAVVAAGDNVVIIESMKMELEIKATSSGKVHFLVPTGTQVASQQPIAEII

SEQ ID NO: 59515 - DNA, 1683 bp, Unknown
  Obtained from environmental sample
  misc_feature (1)..(1683): n is a, c, g, or t
atgaatgtagacgggaaagatacctggtatttcaggataatggttcctatcattaatagacgcaacaacgaagtagtgggaggcgtgggctgtctttgcgttatagacgcgatacagccgacggtagagaataccataaaaaccagggaagatatttctgcggcggtaatttactcaagcaacgggtttattatgggacactatctgcctgagcgcgtaggcaagataatgaaagacgtagataatgtctacgacaaattcatggatgaagccgttagggctgttcaaaacggcgactcttttgaatgtaaaagttattcttcggctttgaagacagacttagaaattactatacagtctttcccgatgggcaattccggcaaatcatggagcgtaatgatcgcggcgacggaatcttacatcttaaaagaagtaagtgcaatgaccaggtttacgatcattattgcggcaatagccattgtaatagcggtggtaattgtatactttgccctcctcagtactaccaaaccaatcgtcaaggtagcggacacgctcaaggacatttccgaaggcgaaggcgacctgacgcggagcattgtcgtcaagtccaaagacgaggttggcgacctggccctgtacttcaacaaaacgattgaaaaaatcaaaaacctggttgctaccatcaagaaagaagctgtaagcctccagaccatcggaaccgaccttgccagcaacatgacagagaccgccgcggctatcaatcaaatcacggccaacatacaaagcatcaagggccgtgtcattaaccagagcgccagcgttaccgaaacaacgccaccatggaacagggtaatcaacaacattaacaagctcaacagccatgtggaaaaccagacccgcaatgtctcgcaggtttcatccgcgattgaggagatggtagcgaacatcaactcggtaaccaacacgctggtcaacaacgccgccaacgtcaagagcctaagagatgcctccgaagtggggcgcggcggattgcaggaagtagcgaccgacatccaggaaatcgcgcgcgagtccgaaggcttgctggaaataaactctgtaatggaaaatatagccagccagaccaacctgctttcgatgaacgccgcgatagaagccgcccatgcgggagaggcgggcaagggctttgccgtagtcgccgacgagatacgcaaactggctgaaagttccagcgagcagtccaaaacgattggtacggtattgaaaaagatttcggaatcgatcaaaaaaataaccggctcggctgataatgtgcttaagaggttcgaggcaattgactcaggcgtgaagacagtttcggatcaggaagaaaatatccggaacgccatggaggagcagggcgaagggagcaagcagatccttaaaagtgtcggcagtttgaacgagctaactcagaatgtcaggagcagctctgaggaaatgcttaacggcagccaggaagtcataaaggaaagccagaaccttcaaagtgcgacgcaggagataacgggcggcatgaacgagatggcatccggtgctgaccagataaacatagctgtaacccaggttaacgagataagcaccaagaaccgggaaggcatcgatactttgatgagggaggtctcgcgcttcaaggtagagtga

SEQ ID NO: 59516 - protein, 560 aa, Unknown
  Obtained from environmental sample
  DOMAIN (152)...(223): HAMP domain
  misc_feature (1)..(560): Xaa is any amino acid
MNVDGKDTWYFRIMVPIINRRNNEVVGGVGCLCVIDAIQPTVENTIKTREDISAAVIYSSNGFIMGHYLPERVGKIMKDVDNVYDKFMDEAVRAVQNGDSFECKSYSSALKTDLEITIQSFPMGNSGKSWSVMIAATESYILKEVSAMTRFTIIIAAIAIVIAVVIVYFALLSTTKPIVKVADTLKDISEGEGDLTRSIVVKSKDEVGDLALYFNKTIEKIKNLVATIKKEAVSLQTIGTDLASNMTETAAAINQITANIQSIKGRVINQSASVTETTPPWNRVINNINKLNSHVENQTRNVSQVSSAIEEMVANINSVTNTLVNNAANVKSLRDASEVGRGGLQEVATDIQEIARESEGLLEINSVMENIASQTNLLSMNAAIEAAHAGEAGKGFAVVADEIRKLAESSSEQSKTIGTVLKKISESIKKITGSADNVLKRFEAIDSGVKTVSDQEENIRNAMEEQGEGSKQILKSVGSLNELTQNVRSSSEEMLNGSQEVIKESQNLQSATQEITGGMNEMASGADQINIAVTQVNEISTKNREGIDTLMREVSRFKVE

SEQ ID NO: 59517 - DNA, 801 bp, Unknown
  Obtained from environmental sample
  misc_feature (1)..(801): n is a, c, g, or t
atggttaggagtttatggaccggcgcttccggaatgataggccagcaggccaatgtcgacgctatttcaaataaccttgcaaacgtgaacacccacggctataaaaagcagcgggtcgattttgaggaccttctctatcaaaccgtcaaggtcgcgggaactcccgccaccgaagacaccgttgtccccgtcggcgtccagatggggcacggcgttaaagttgccgacacccagagggtttttgcgcagggcagcctgcaggagacttcggttccaaccgatatggcgattgccggagagggctttttcaggatacagatgtacgacgggtcctgggcctatacccgcaacggcaacttcaaagttgactccgacggccgcatggttacgagtaacggctactggctgctgcccgacatcatcatgcccgaaggcttcctccccgacaagatcaccatttctcaggacggcagggtgtcggtgatggttccgcagatcgatttgaacaacccgatagaagtcggccgcatagagctttaccgcttccccaaccctgtcggccttaccacggtgggcgaaaacctgttcaagattacaacggcctcgggagagccaattcccggcaggcccggctttgagggcatgggctctatcgcccataaattcctggaaatgtccaatgtaaatgtcgcgcaggaaatggtcaaccttatcgtcgcccagcgcgcctatgaatttaactcgaagacaatccagaccagcgacaatatgctcggaacggcaacatcactaaaaaggtaa

SEQ ID NO: 59518 - protein, 266 aa, Unknown
  Obtained from environmental sample
  DOMAIN (5)...(35): Flagella basal body rod protein
  misc_feature (1)..(266): Xaa is any amino acid
MVRSLWTGASGMIGQQANVDAISNNLANVNTHGYKKQRVDFEDLLYQTVKVAGTPATEDTVVPVGVQMGHGVKVADTQRVFAQGSLQETSVPTDMAIAGEGFFRIQMYDGSWAYTRNGNFKVDSDGRMVTSNGYWLLPDIIMPEGFLPDKITISQDGRVSVMVPQIDLNNPIEVGRIELYRFPNPVGLTTVGENLFKITTASGEPIPGRPGFEGMGSIAHKFLEMSNVNVAQEMVNLIVAQRAYEFNSKTIQTSDNMLGTATSLKR

SEQ ID NO: 59519 - DNA, 558 bp, Unknown
  Obtained from environmental sample
  misc_feature (1)..(558): n is a, c, g, or t
ttgtacagcgggcaggacgtgcgcatcaacgagtaccttattacccataacgacgaggacgcggagactgatcccgaattgcaggcccacaaccgcgaactgctcaggcagatgacattttacgcgaccggaaacgagtgcctgcgccgccgcctgctctcttacttcggcgagagctcgcccgcctactgcgggcattgttccgcctgcctcacaggtcatgaagacgccgatgtaagcatggaagcgaggaagatcatctcctgtgttttccgtttaaaagagcgcagacgcagttttggcaaaacaatgatcatcgacatattgcggggcagtaaaaatgaaaaaattgcccgttttggactggagaatttaagcgtttatggaattatggcaggtgtggacgccaaaaagattcgcgccgtgcttgatttcctgattgacaggggttttcttgtgtctgaaggcgataaatatccggttgtggcgcttggttcggcttacgaagaagcgatgaatgaaaagcggcttgttatgaaattgccgaaaggggtatag

SEQ ID NO: 59520 - protein, 185 aa, Unknown
  Obtained from environmental sample
  misc_feature (1)..(185): Xaa is any amino acid
MYSGQDVRINEYLITHNDEDAETDPELQAHNRELLRQMTFYATGNECLRRRLLSYFGESSPAYCGHCSACLTGHEDADVSMEARKIISCVFRLKERRRSFGKTMIIDILRGSKNEKIARFGLENLSVYGIMAGVDAKKIRAVLDFLIDRGFLVSEGDKYPVVALGSAYEEAMNEKRLVMKLPKGV

SEQ ID NO: 59521 - DNA, 1383 bp, Unknown
  Obtained from environmental sample
  misc_feature (1)..(1383): n is a, c, g, or t
atgaatgggggcgctctaccgggcggcagaagcagggcgagtattcaacgcgtagttatgcagaatatggccgcgcttcgccacgcctacaacagacgcttacgcgatataccggatatgaacggcaaagtaaccgtcaaattcgctatcgatgagtttggaaaggttatattcgccaaagtggtggaatcaacgctcttcgaccacgaacttgaaaacaccgtgctgtcgaaagtgaacggttggaattttgaacggatcgataagcccggagacgtgacggaagttacctatccgttcgttttctttcatgacagcatcccgctccaaaaatatctgggtcccgacgcgtacaacggagcgttcgcggcggcaagcaatctgagatactggtggaataccgatttcgcgctcccgccgaaatccaaatatcccacgccggataaacttaataaaatagagggcgccctcgacatatactccgcggccagagataacggctatcttaacaaactgaccggaagatctgcggaagattataaattatacctaaagataagaaaggattacgcccactcccctgccttctactttgatatggcaagctggttctactcgctcgacgataaggaaaccgcgctccgcatactcacctctatcgccgatttggagctcgaaaacgcctcgctctatcgattgctgggctaccgtcttaaagaacacggcgagtacgctctcgagaaattcgtttgcggaaaagtgctcatttggcggccgatggaaccgcagagctaccgcgactacgccttagccctggccgacaacggcgagacgcagacggcgctcgactatctctacggcctgctcgcaaaaacatatccgaagaacatcagagaccgtagccgcggaatagaagaaaccgtggttacggagataaatcacctcatcgccaaagactcgaccctaaacacgtcaaaaatcgacaaacgcctgataataaacattcccgtcgatatccgcgtggtgataaactggaacatgaacagcgccgacatcaacctgcacataaaagaccctaacaatgaggagtgctaccgcggccgccgcgaaacaagcataggcggacgcataagcgccgacattaaagacggctacgggccggaacaattcctcttgaagaaagccgcaaggggaaaataccgcgtctacgtcaactattacggcgacaaccaattaaccgacgccggcccttccaccgtaatggcggaaatctacaccaaatacgccgacgcgaccgaacgccgccaagtcgtttgcttgcaaatgtcaaacgcgacgaagaatgagggtaattttgtagaggtggcagagtttgagttttga

SEQ ID NO: 59522 - protein, 460 aa, Unknown
  Obtained from environmental sample
  misc_feature (1)..(460): Xaa is any amino acid
MNGGALPGGRSRASIQRVVMQNMAALRHAYNRRLRDIPDMNGKVTVKFAIDEFGKVIFAKVVESTLFDHELENTVLSKVNGWNFERIDKPGDVTEVTYPFVFFHDSIPLQKYLGPDAYNGAFAAASNLRYWWNTDFALPPKSKYPTPDKLNKIEGALDIYSAARDNGYLNKLTGRSAEDYKLYLKIRKDYAHSPAFYFDMASWFYSLDDKETALRILTSIADLELENASLYRLLGYRLKEHGEYALEKFVCGKVLIWRPMEPQSYRDYALALADNGETQTALDYLYGLLAKTYPKNIRDRSRGIEETVVTEINHLIAKDSTLNTSKIDKRLIINIPVDIRVVINWNMNSADINLHIKDPNNEECYRGRRETSIGGRISADIKDGYGPEQFLLKKAARGKYRVYVNYYGDNQLTDAGPSTVMAEIYTKYADATERRQVVCLQMSNATKNEGNFVEVAEFEF

SEQ ID NO: 59523 - DNA, 963 bp, Unknown
  Obtained from environmental sample
  misc_feature (1)..(963): n is a, c, g, or t
atgaatctgagtgaaagctataagcctttaataacaaaaagtctcgccattcaggaacaaattgagattgttaaaaaggtggcaaaaaccgactcgtccgttctgcttttgggagaaagcggggtagggaaggaaattttcgcggagcttatacaccagaacagccgcagaaattccctgccttttgtcaaagttaactgcgccgccctgccggaaggacttctggaaagcgaattattcggccatgtaaagggcgcgtttaccaacgccgtttccaaccgtcaagggcgttttgaaatggcggacacaggcacaatccttttggacgaaatcggcgatatccccttaccgcttcaggcaaagattttacgcgttattcaggaaaagaaatttgaaaaagtaggctccgatattaccgtttccgccgacgtgcgtattctcgcggctacaaacaaagacattgaagagcttgtgcaaaaaggcagtttccgcgccgatttgtactaccgccttaacgttcttccggtttatattccgcctctgcgccggcgtccggaagacattccggaattggcgcgttttttccttgacatttatatgaggcaggccaataaacaatttgagggttttacgcaggacgccctgcaagctctgcttgcctattcctggccgggcaatgtccgggaacttcaaaattgcatagaacgggcctgcataataggcaagaacaagcttataggccatgaagaccttttcataaaacacggggattctcctgatatcaggggacaaataacggaccgcaaccttaaaacggctttaaacgtgtttaaggccaattttatccgcaaagtactggaggaaaacaactggaatcagacagaggccgccagggtacttgccatacagcgcacttatttgtcaaaattgataagagaactcaaaataaacgtaaaggagtga

SEQ ID NO: 59524 - protein, 320 aa, Unknown
  Obtained from environmental sample
  DOMAIN (33)...(179): ATPase family associated with various cellular activities (AAA)
  misc_feature (1)..(320): Xaa is any amino acid
MNLSESYKPLITKSLAIQEQIEIVKKVAKTDSSVLLLGESGVGKEIFAELIHQNSRRNSLPFVKVNCAALPEGLLESELFGHVKGAFTNAVSNRQGRFEMADTGTILLDEIGDIPLPLQAKILRVIQEKKFEKVGSDITVSADVRILAATNKDIEELVQKGSFRADLYYRLNVLPVYIPPLRRRPEDIPELARFFLDIYMRQANKQFEGFTQDALQALLAYSWPGNVRELQNCIERACIIGKNKLIGHEDLFIKHGDSPDIRGQITDRNLKTALNVFKANFIRKVLEENNWNQTEAARVLAIQRTYLSKLIRELKINVKE

SEQ ID NO: 59525 - DNA, 339 bp, Unknown
  Obtained from environmental sample
  misc_feature (1)..(339): n is a, c, g, or t
gtggaaggcgaagtcgcttccgttacggatttcggcgttttcctgcgcgtacccggcggcatagaggggcttattcacaagtcaaaccttgttgaaaaccgcgaagatgacccggatgaggcccttaaaaagattaaggtcggggacaaattaaaagccattgtactggaaattcagggtgacaaacaaaaagtcgctttttcactgcgaggatatcaaaagaaggcgcaaaaggatgaattatcgcgttacatggcggaagaagaagtctccgattccacttatacgctgggctctcttttaaaatccaaaaatcctcaggcaaatgaatctgagtga

SEQ ID NO: 59526 - protein, 112 aa, Unknown
  Obtained from environmental sample
  DOMAIN (1)...(70): S1 RNA binding domain
  misc_feature (1)..(112): Xaa is any amino acid
MEGEVASVTDFGVFLRVPGGIEGLIHKSNLVENREDDPDEALKKIKVGDKLKAIVLEIQGDKQKVAFSLRGYQKKAQKDELSRYMAEEEVSDSTYTLGSLLKSKNPQANESE

SEQ ID NO: 59527 - DNA, 636 bp, Unknown
  Obtained from environmental sample
  misc_feature (1)..(636): n is a, c, g, or t
atgaacgccatgaacaaccaagttatatcggtgaaggatctcaccaaacgttacaagagggcggacagggccgccgtcgacggcgtcagtttttccgtcaggcggggggagttcttcgccttcctcggcgcgaacggcgcggggaagacgactaccatctcgatcctaaccacgacgctgtccaaaagctccggcgaggtgaaaatcgccgggttcgacatcgacaaggaggcgcgcaaggtgcgggagaagatcggcatcatcttccagcagcccagcctcgacccgcagcttacggcggaggagaacatacgctttcacgcctgcctctacgggatgtgcggctaccggccctccttcaaatccatgccggcggcgtaccgcgacaaggtgatggaactggccgcgatagtcggcctgcaagacgcgctgtttaaacccataaagaagctctccggcgggatgcagcgcaagctggagatcatccgcagcctgatccacacgccggaggtgctattcttggacgagccgacccaggggctggacgcggtaagccggcgcgggctttgggagtacatcaacagcgcccgcgagcgctacgggactacggtctcggccgatctgatcaatgggtaa

SEQ ID NO: 59528 - protein, 211 aa, Unknown
  Obtained from environmental sample
  DOMAIN (36)...(211): ABC transporter
  misc_feature (1)..(211): Xaa is any amino acid
MNAMNNQVISVKDLTKRYKRADRAAVDGVSFSVRRGEFFAFLGANGAGKTTTISILTTTLSKSSGEVKIAGFDIDKEARKVREKIGIIFQQPSLDPQLTAEENIRFHACLYGMCGYRPSFKSMPAAYRDKVMELAAIVGLQDALFKPIKKLSGGMQRKLEIIRSLIHTPEVLFLDEPTQGLDAVSRRGLWEYINSARERYGTTVSADLING

SEQ ID NO: 59529 - DNA, 1749 bp, Unknown
  Obtained from environmental sample
  misc_feature (1)..(1749): n is a, c, g, or t
atggcaagacgcttcgtgatgaagttgaaaccgcatacgggctttgtccatgcgttacttgaaaaaatggaaaatactggggaactccttgagaaagcgaaaagcgacggctccacgactcaggcgttgatagaagaacatcacaatttacaggaacagattgaagaaacaggtttttacaggcgcgaaggcgaaatcgccgcagttttatcaggtcttggtttttccgccaaagacataaaccgcgacacgggggaattttcaggcggttggcagatgcgtatcgcccttgcgaaaattcttttggaaaaacctgatatccttcttttggacgaacctaccaattaccttgacatagaggcaagagcatggcttgaaaattggcttaacgattttaaaggcgggtatcttttagtctctcatgacaggtattttcttgatacgtgcgtcaatgaagtttatgagctttacaatggggaattaaaaagatacgccggaaattacactgcgtacgaaaaaacgcgccaaatagaacttgcaagccttttaaagcgttatgccgaacagcaggaagagatcgcgaaaactgaagcccttatccgccgtttccgttacaaggcgactaaagccgcttttgcgcaggaaatgataaaacgtcttgaaaaaatggaacgcgttgaaatacctgaatcctttaaaaaaattgaaatcagttttccgcctccgccgcattcgcccaatgtcgccctcactcttgaaggaatcggaaaaagttacggaaaacatccggtattatccgcacttgacctctgccttgactcaggagaacggcttgtggtcgcgggccccaacggcgcgggtaagactaccctactgcggataatcgcaggcgctgataatgactttacgggaagcgtaaaacttggaaccggcataaagacgggatacttctcccaggatgcggcggaggcgatggactctccgttgtcaatacttgagtttatggaagaagaagcgcctttttcccttgttccaaaattacgcgacatgttaggcgcatttttattcaggggagacgacgtatacaagagcgtatcggttttaagcggaggggaaaaaagcagacttgcgctgttaaaaatgtttttaaaaccgatgaaccttctcattcttgacgaaccgacaaaccaccttgacctgtattcaaaggatattttactggacgctttaaaaaaattcgccggaactattatttttgtctcccatgaccgcgcttttatggaagagctatctacaaaaacacttgaactgacgccggggacggacaatactcccgccaaggcaaaattattttacggtaactacgcttactatttggactctaaaataaacgcggatcataaggaaatggaatcttcgcaaacatcaaaaacaaaaagttttattcctgataacacaaaacagaataacgtaacaaatattgaaaaaaggattttagacaaacagaaacaggcaaaagtccgtaaactggaaagacaggaagcggaaattattaaatcgcttgaagaacttgaaaaagagaaaactaaattagaagcggaacttgcgtgtcctgacgtttattcaaacggcgagaaagcgaaagctgttaaaataaaacttgatgaatgtatcgctattatagaagtcaaaacccgtgagtgggaattaatttccaaagaacttgacaatatttcttttatgttataa

SEQ ID NO: 59530 - protein, 582 aa, Unknown
  Obtained from environmental sample
  DOMAIN (14)...(159): ABC transporter
  misc_feature (1)..(582): Xaa is any amino acid
MARRFVMKLKPHTGFVHALLEKMENTGELLEKAKSDGSTTQALIEEHHNLQEQIEETGFYRREGEIAAVLSGLGFSAKDINRDTGEFSGGWQMRIALAKILLEKPDILLLDEPTNYLDIEARAWLENWLNDFKGGYLLVSHDRYFLDTCVNEVYELYNGELKRYAGNYTAYEKTRQIELASLLKRYAEQQEEIAKTEALIRRFRYKATKAAFAQEMIKRLEKMERVEIPESFKKIEISFPPPPHSPNVALTLEGIGKSYGKHPVLSALDLCLDSGERLVVAGPNGAGKTTLLRIIAGADNDFTGSVKLGTGIKTGYFSQDAAEAMDSPLSILEFMEEEAPFSLVPKLRDMLGAFLFRGDDVYKSVSVLSGGEKSRLALLKMFLKPMNLLILDEPTNHLDLYSKDILLDALKKFAGTIIFVSHDRAFMEELSTKTLELTPGTDNTPAKAKLFYGNYAYYLDSKINADHKEMESSQTSKTKSFIPDNTKQNNVTNIEKRILDKQKQAKVRKLERQEAEIIKSLEELEKEKTKLEAELACPDVYSNGEKAKAVKIKLDECIAIIEVKTREWELISKELDNISFML

SEQ ID NO: 59531 - DNA, 1017 bp, Unknown
  Obtained from environmental sample
  misc_feature (1)..(1017): n is a, c, g, or t
ttgaacaaggagcgttttatgaccagttataccgaattaggcttggtgaacaccaagaaactgtttgaaaaagcagtaagcggcggatacgctatcccggcgtacaatttcaataacatggagcagatacaggccatcatccaggcctgcgtggaaaccaaatcaccggttatcctgcaggtgtcatccggggcgcgcaaatacgccaacaaaaacatattgaagaacatggcaaaaggcgcggtggaatacgccaaagaacttggctttgccattcccatcgtactgcatctggatcacggcgacactttcgagttgtgcaaggactgcatcgaaaccgggttttcctcggttatgatcgacggttcacatctgtcctacgacgagaatgtggctttaaccaggaaggtctgcgattttgcccattcccagaaagactatgtaacggttgaaggcgagcttggggtgcttgccggcgtggaagacgacgtatcatccgagcacagccattatacccagccaagcgaagtaattgattttgtcagcaagaccaaggtcgactcgcttgccatatccatcggtacaagccacggccgcgccaagttcaaacccgagcaatgcacaagggacgccgacggcatactgatcccgcccccgcttcgttttgacatccttgaagaaattgaaaagaagctccccggcttccccatcgttctgcacggttcttcctctgtacccattgaatatgtgcatatgatagagaagtacggcggcaagctgaccgactccgtgggcattcccgaagaccagctccgcagggcggcaaaaagcgccgtctgcaagatcaacatcgattccgacggccgccttgcaatgaccgcccttatccgcaaagtcctggtcgaaaaaccggacgaattcgacccccgcaaaatcctgggccctgcccgcgacgagctgaaaaagctctacgcccacaaaaaccagaacgtgctgggttccgccgggcaggcttaa

SEQ ID NO: 59532 - protein, 338 aa, Unknown
  Obtained from environmental sample
  DOMAIN (15)...(338): Fructose-bisphosphate aldolase class-II
  misc_feature (1)..(338): Xaa is any amino acid
MNKERFMTSYTELGLVNTKKLFEKAVSGGYAIPAYNFNNMEQIQAIIQACVETKSPVILQVSSGARKYANKNILKNMAKGAVEYAKELGFAIPIVLHLDHGDTFELCKDCIETGFSSVMIDGSHLSYDENVALTRKVCDFAHSQKDYVTVEGELGVLAGVEDDVSSEHSHYTQPSEVIDFVSKTKVDSLAISIGTSHGRAKFKPEQCTRDADGILIPPPLRFDILEEIEKKLPGFPIVLHGSSSVPIEYVHMIEKYGGKLTDSVGIPEDQLRRAAKSAVCKINIDSDGRLAMTALIRKVLVEKPDEFDPRKILGPARDELKKLYAHKNQNVLGSAGQA

SEQ ID NO: 59533 - DNA, 864 bp, Unknown
  Obtained from environmental sample
  misc_feature (1)..(864): n is a, c, g, or t
atgaaacaaaaccgctatttttttacctcagaatcagtaggagaggggcatcctgacaagctttgcgatcaggtgtcggacgcgattcttgatgcctgcnttaaggatgatccccacagccgggttgcctgcgaaacctntgcatcaacttcgctggtgcttgtgggcggggaaatcacaaccacaacatttattgactttcaggaaatagtacgcaatgtggtaaaggaaatcggttataccaagcccgaatacgggctggactgtaattcaatggcggtgatggatatgatccacaaccaatctcctgacattagccagggggtttcaggtaccgggctggatatttaccatggccagcagggggcgggcgatcaaggcatgatgtttggttatgcctgtaacgagaccgaagagctaatgcctttgccgattacccttgcacataagcttttgcttcacgctacaaaacttcggaaagaaaaaaccattaaatggctaaggcccgattccaaaagtcaggtaacggtggaatatgaagggtacaaacccatccgcattgacgcggtggtaattgcccatcagcacgatcctgatgtgagctacaaggatatagagtccggtattatagaaggcattgtaaaacctatccttgagccaaccggccttttggataaaaacacaaaatattacatcaacccgacggggcgtttcgtggtgggcgggccgttcggcgatacggggcttacaggccgcaaaattattgttgacacttacggcgggatgggccgccacggcggcggcgctttctccggcaaagacccaaccaaagtgaccgtccgcgctatctcgtgccgaatctga

SEQ ID NO: 59534 - protein, 287 aa, Unknown
  Obtained from environmental sample
  DOMAIN (4)...(103): S-adenosylmethionine synthetase, N-terminal domain
  misc_feature (1)..(287): Xaa is any amino acid
MKQNRYFFTSESVGEGHPDKLCDQVSDAILDACXKDDPHSRVACETXASTSLVLVGGEITTTTFIDFQEIVRNVVKEIGYTKPEYGLDCNSMAVMDMIHNQSPDISQGVSGTGLDIYHGQQGAGDQGMMFGYACNETEELMPLPITLAHKLLLHATKLRKEKTIKWLRPDSKSQVTVEYEGYKPIRIDAVVIAHQHDPDVSYKDIESGIIEGIVKPILEPTGLLDKNTKYYINPTGRFVVGGPFGDTGLTGRKIIVDTYGGMGRHGGGAFSGKDPTKVTVRAISCRI

SEQ ID NO: 59535 - DNA, 783 bp, Unknown
  Obtained from environmental sample
  misc_feature (1)..(783): n is a, c, g, or t
atgataggttttctcataaaaaaagcgttttttgatttttgggacaatatgttccggatgatcctcgtaaacctgggttttatcgcttcgctgacgatacccatttttttgccgggagtcattcccatcccgatcctttcccttcttgtgtttgcggcggggctgctctggtgctttgtgtatctcgccgccgccgctttatcggtaaaggcggtatcggactacggcatttttggcttttccgactttctggctaatctgaaggaaggatggaaaacgggtctggcgttgggaattacaggcttcttgttatacgtcattgcaaagaacgccatcccgttttatctgcggctgaattcactgtttggcttattccttgccgcggtcatattctggactatcgcggcggcgattttctctctccagttctttttagcgatccgcgcaaggcttgatacaaaactggtaaaggtatttaaaaagagctttattattttttttgataatcccggttttgcgatctactcattgctgcatacaattgtgatattgataatatcggcagtccttgctttgctcctgcccgggcccgcgggaatactcctcttccttgatgaagccttgcggctgcgcctgctcaaatacgactggctggacgccaaccccgatgaaacaggctcaaaaaagcggcggaaaattccctgggatgagattttaattgaagaaagggaaaaaaccggaacaaggtcattcaggagcttcattttcccctggaaagattaa

SEQ ID NO: 59536 - protein, 260 aa, Unknown
  Obtained from environmental sample
  misc_feature (1)..(260): Xaa is any amino acid
MIGFLIKKAFFDFWDNMFRMILVNLGFIASLTIPIFLPGVIPIPILSLLVFAAGLLWCFVYLAAAALSVKAVSDYGIFGFSDFLANLKEGWKTGLALGITGFLLYVIAKNAIPFYLRLNSLFGLFLAAVIFWTIAAAIFSLQFFLAIRARLDTKLVKVFKKSFIIFFDNPGFAIYSLLHTIVILIISAVLALLLPGPAGILLFLDEALRLRLLKYDWLDANPDETGSKKRRKIPWDEILIEEREKTGTRSFRSFIFPWKD

SEQ ID NO: 59537 - DNA, 1128 bp, Unknown
  Obtained from environmental sample
  misc_feature (1)..(1128): n is a, c, g, or t
atggctagtttatttgattatatttcctggcggggggatttggaatttgacaagttgccctttaaccctgttgataacattgtcttttcccaactgtcctatctgccgatggaaggcattgttcccggccccaaagatcatgacactataacggttgaggaacttgccgcgaggtacgcgataaaacagcgtgacaatccttccgaaatacccaatgatattacggttaacgacgcgacttccgttatcaacgcgattggatcggctccccgttataaaaactgcaggctgtttgcttacaccaacaatatcgaccttgagcaggaaaaacagtttgccgcttattgcgcgataatcggcaggaaacgcctgtccagaaaaatgcttgtggtttaccggggtacggacatgacccttatcggctggaaagaaagttttaacatgagcttaatcacttctattccctcgcaaaaagaggccgtatcctaccttgagaaaacatcaagaagatatccttatcccctgatcatagccggacattcaaagggcgggaatctggcggtttacgcggccgccttttgcggtaaacttacccaagggcgcatcactgccatttacagcaatgacgcgcccggctttcacaaagaagtaatacagagcaaaggctacaaggcaatctgctcccggattcaatcctttattccgcagtcgtcattaatcgggatgctgtttgagcatggcgagaccccgatggtgataaaaagcaccgcaagcggccccatgcagcataacctctgttcgtgggaagttacgtataacaacatggttgatgccggtgaactcacgccgcagagccgttttattgacaatattatctgcgaatggatcaatcagattgacgaggggcaacggcagcagtttatccaggctatatacaagatccttgtttcctgcgacgcggattccgtgaccgatcttaccgatgactggaaaaacaccgccggcggaataatcaacgccctgataaacatggacaagcccacaaaaaaacttatgggaaagataataggggagcttatcaaaaccgcgaaaaaaaacttcggaaagcgcaaatcaaatagcaaataa

SEQ ID NO: 59538 - protein, 375 aa, Unknown
  Obtained from environmental sample
  misc_feature (1)..(375): Xaa is any amino acid
MASLFDYISWRGDLEFDKLPFNPVDNIVFSQLSYLPMEGIVPGPKDHDTITVEELAARYAIKQRDNPSEIPNDITVNDATSVINAIGSAPRYKNCRLFAYTNNIDLEQEKQFAAYCAIIGRKRLSRKMLVVYRGTDMTLIGWKESFNMSLITSIPSQKEAVSYLEKTSRRYPYPLIIAGHSKGGNLAVYAAAFCGKLTQGRITAIYSNDAPGFHKEVIQSKGYKAICSRIQSFIPQSSLIGMLFEHGETPMVIKSTASGPMQHNLCSWEVTYNNMVDAGELTPQSRFIDNIICEWINQIDEGQRQQFIQAIYKILVSCDADSVTDLTDDWKNTAGGIINALINMDKPTKKLMGKIIGELIKTAKKNFGKRKSNSK

SEQ ID NO: 59539 - DNA, 492 bp, Unknown
  Obtained from environmental sample
  misc_feature (1)..(492): n is a, c, g, or t
atggatctatcggatattgtgattatcctgtgcaggccgagcgagccgggcaatgtcggggctgtctgccgtgtgatgaaaaacatggggcttacccgtctgcggctggtcgcgccggagccttttgacgaggccacgctgctggcgcggaccgttcacgctgaggatgtctggcgcggcgccgttttttttgacaccctcgcccaggctgcggctgactgttcgcttgtggtggggacaacccggcgcaggggcagaaggcgtaaaagtatcagcatggaaccgcgcgctcttaccgcatggcttaaagaacaggaacgcgcgccaatggctttggtttttggcacgagcgcaccggccttaatgacgatgagcttaatttctgcaatgccgcgtcacatatccctgttaccgattncttcccctcgctcaatctttcacacgcggtgcaaatatacgcctacgagctttttctcgcttttggccgggtga

SEQ ID NO: 59540 - protein, 163 aa, Unknown
  Obtained from environmental sample
  DOMAIN (5)...(115): SpoU rRNA Methylase family
  misc_feature (1)..(163): Xaa is any amino acid
MDLSDIVIILCRPSEPGNVGAVCRVMKNMGLTRLRLVAPEPFDEATLLARTVHAEDVWRGAVFFDTLAQAAADCSLVVGTTRRRGRRRKSISMEPRALTAWLKEQERAPMALVFGTSAPALMTMSLISAMPRHISLLPIXSPRSIFHTRCKYTPTSFFSLLAG

SEQ ID NO: 59541 - DNA, 372 bp, Unknown
  Obtained from environmental sample
  misc_feature (1)..(372): n is a, c, g, or t
atggctctaaattgcggtatcgtcggtcttcccaatgtcgggaaaaccgccatcttctcggctttaagttccaccatcgcggaaacggctaactaccagttctccaccaaaaacccgaacgtgggtatcgccgatgtccccgattcccggctgacaaggttaagcgaaatattcaaacccagaaaaaccattccggcgacagttgaatttgtggacattgccgggctggtaaagggctcctcaaagggggaaggcctgggcaatcagttccttgcccatatccgcgaagtggggattatcgcccatgtggtccgctgttttgacaacccgcgacgttatccatgtgagcgacaagatcgatcccgaatctga

SEQ ID NO: 59542 - protein, 123 aa, Unknown
  Obtained from environmental sample
  DOMAIN (3)...(116): GTPase of unknown function
  misc_feature (1)..(123): Xaa is any amino acid
MALNCGIVGLPNVGKTAIFSALSSTIAETANYQFSTKNPNVGIADVPDSRLTRLSEIFKPRKTIPATVEFVDIAGLVKGSSKGEGLGNQFLAHIREVGIIAHVVRCFDNPRRYPCERQDRSRI

SEQ ID NO: 59543 - DNA, 1215 bp, Unknown
  Obtained from environmental sample
  misc_feature (1)..(1215): n is a, c, g, or t
ttgccaccgcaaaggatccatggatcaaagacgttctcggaaccatgtcgatacaggaaggagactccctggctgtcagcaaaattccggaagacggaaccttccccacggcgactacccaatacgagaaacgctcggtggcggagcaggttcctgtctggaatcccgacgtgtgtatacagtgcggtaactgtacggttgtatgcccccatgcctgtatgcgctttaaaaaccttaccgatgctcangtcgcgaaagcacccgccggcttcaaaacgcggcgataaaacccaagcggtggacggacagaaagcggcgcttgttatcgcctgcgaagactgttacagctgcggcgtttgtttcaatatctgcccaatgtccaataaaggtcaggagaaaccggcgttgtcatggaaatcttacgcggacgatcatgaattacacgcggaacaggtagctgtttgggattacttcctttcattgcccgaaactccggccggcgatcttatatcgccgaaagcgcttgcctacaagcgccccctgtttgaattctcaggcgcatgcggcggctgcggcgagactccctacgttaaacttatgtcccagttgttcggcgaccgcgcgatcatcgccaacgccacgggctgttcctcaatttacggcggaaacctgccaacaacgccttactgccagcgcgcggacggacgcgggccggcatggtcgaacagcttgtttgaggacgccgctgaattcgcaatgggcttccgcctgacaagcgacaagctcgccgttcacgctcgcgaaattgccgaaaaggcaaagagcgaaggcattgcggccgcaatcatcgacaagattctttccaacaatcaggccgacgacgcggcgattgacgaactgcgcaaaaatattgacgcgcttaaagccgaacttaaaaacaactccaagccgacagcgaaacttttggtttcgttagctgactattttgtaaaacgttcagtgtgggcgttcggcggcgacggctgggcttacgacataggtttcggcggactggatcatgttatcgcttccggcaagaaacgtaacctcttgtgcatggataccgaggtttattccaacaccggcggacagatgtccaaatcgacgcctgtcggcgncatcgcgaaatttgccacgcgggaaaggatattacaaagaaagacttgggcgcgatag

SEQ ID NO: 59544 - protein, 404 aa, Unknown
  Obtained from environmental sample
  misc_feature (1)..(404): Xaa is any amino acid
MPPQRIHGSKTFSEPCRYRKETPWLSAKFRKTEPSPRRLPNTRNARWRSRFLSGIPTCVYSAVTVRLYAPMPVCALKTLPMLXSRKHPPASKRGDKTQAVDGQKAALVIACEDCYSCGVCFNICPMSNKGQEKPALSWKSYADDHELHAEQVAVWDYFLSLPETPAGDLISPKALAYKRPLFEFSGACGGCGETPYVKLMSQLFGDRAIIANATGCSSIYGGNLPTTPYCQRADGRGPAWSNSLFEDAAEFAMGFRLTSDKLAVHAREIAEKAKSEGIAAAIIDKILSNNQADDAAIDELRKNIDALKAELKNNSKPTAKLLVSLADYFVKRSVWAFGGDGWAYDIGFGGLDHVIASGKKRNLLCMDTEVYSNTGGQMSKSTPVGXIAKFATRERILQRKTWAR

SEQ ID NO: 59545 - DNA, 549 bp, Unknown
  Obtained from environmental sample
  misc_feature (1)..(549): n is a, c, g, or t
gtgcatggataccgaggtttattccaacaccggcggacagatgtccaaatcgacgcctgtcggcgncatcgcgaaatttgccacgcgggaaaggatattacaaagaaagacttgggcgcgatagcgatgagttacggttatgtgtatgtcgccaaagtttcgttaggcgcggatatgaatcaggtaatcaaagcgttccgcgaagcggaatcttacgacggtccgtcgcttataatcgcttactcgcactgtatcaaccacggaatcgacatgagcaaggggcttgagcagggcaaggcggttgtgtcaagcggactttggccattgtaccgctacgatccgcggcttaaggatcaggggaaaaatcccttccagcttgactcgaaagatccgacgacaagcatagaggactttatgtacaaagaagtacgtttcaagagcttaaaagccgctaaccccggccgcgcagacgcgttgcttgcaaaagcgaaagcccatgcggaaagagtttggaaagagtacaaatacttggcggaacgtccgttctaa

SEQ ID NO: 59546 - protein, 182 aa, Unknown
  Obtained from environmental sample
  misc_feature (1)..(182): Xaa is any amino acid
MHGYRGLFQHRRTDVQIDACRRHREICHAGKDITKKDLGAIAMSYGYVYVAKVSLGADMNQVIKAFREAESYDGPSLIIAYSHCINHGIDMSKGLEQGKAVVSSGLWPLYRYDPRLKDQGKNPFQLDSKDPTTSIEDFMYKEVRFKSLKAANPGRADALLAKAKAHAERVWKEYKYLAERPF

SEQ ID NO: 59547 - DNA, 414 bp, Unknown
  Obtained from environmental sample
  misc_feature (1)..(414): n is a, c, g, or t
atgaagaccatatttgtcgttgacgacagcgataccaacctgacgatggcagagtcggcattggaagaccaataccgcgttatgacaatgccgtcagcggcaagtatgttctcgtttttagaaaaagttattcccgatttaatccttctggatatagaaatgccggaaatggacggctttgaagcgctcgcggaacttaagactaaagagcgattcagcgaaattcccatcatgttcttaacaggccgcaccgacgcggacgtggaagcgcgcggttttgaaatgggcgcggtggattttgtcacaaagccgttctccgcgccggtactgttaaaccgcataaagactcaccttgatattgatcaggttatccgcgagcggactgcgcagctgcgccggcttcaaaacatatag

SEQ ID NO: 59548 - protein, 137 aa, Unknown
  Obtained from environmental sample
  DOMAIN (2)...(115): Response regulator receiver domain
  misc_feature (1)..(137): Xaa is any amino acid
MKTIFVVDDSDTNLTMAESALEDQYRVMTMPSAASMFSFLEKVIPDLILLDIEMPEMDGFEALAELKTKERFSEIPIMFLTGRTDADVEARGFEMGAVDFVTKPFSAPVLLNRIKTHLDIDQVIRERTAQLRRLQNI

SEQ ID NO: 59549 - DNA, 666 bp, Unknown
  Obtained from environmental sample
  misc_feature (1)..(666): n is a, c, g, or t
ttgatattgatcaggttatccgcgagcggactgcgcagctgcgccggcttcaaaacatatagtatccgttctcgcggacatgtggaaaaccgcgacaaggggacaggcggacatattgaacgtacctcaatttatatcaaaatattgatagaagaaatgaaagagcgcggagtttatcttgatgaaatccgcaattgggatgttgaaaaaatagtttcttccgcgcgtatgcacgatctgggtaaaatttccataaccgatattatcgtgaacaaaccggataagcttacagcggatgaatacgaactgataaaaacgcacacaatcgaaggcgagatgataattgacgaaataatttctaaaacaggagaagatgaatttttaaacagcgcgcgcctttttgccggctgccatcatgaacgatgggacggcaaagggtatccccgggggctaaaaggagagaatatccctctgcaggggcgcatcatggctattgtggacgtgtatgacgcccttgtttccgaacggccgtataaaaaagcgttttccgacgaggaagccgtacagataatattggataacgccggcgttcattatgatcctaaaattgtcgaggttttttattcggtaaaagatcaatttaaatctgtaagggctaaattataa

SEQ ID NO: 59550 - protein, 221 aa, Unknown
  Obtained from environmental sample
  DOMAIN (35)...(172): HD domain
  misc_feature (1)..(221): Xaa is any amino acid
MILIRLSASGLRSCAGFKTYSIRSRGHVENRDKGTGGHIERTSIYIKILIEEMKERGVYLDEIRNWDVEKIVSSARMHDLGKISITDIIVNKPDKLTADEYELIKTHTIEGEMIIDEIISKTGEDEFLNSARLFAGCHHERWDGKGYPRGLKGENIPLQGRIMAIVDVYDALVSERPYKKAFSDEEAVQIILDNAGVHYDPKIVEVFYSVKDQFKSVRAKL

SEQ ID NO: 59551 - DNA, 828 bp, Unknown
  Obtained from environmental sample
  misc_feature (1)..(828): n is a, c, g, or t
atgatcagatggccgagatctgcatcccgcgaaggggccgaaagctgcagggccctttccctggaagaaatactgctcctcgccctggcgaaccttaaccccgcctttaagccgttcctttttatgtttgacgataaagacctggcccggaaaaccgtgtacccggcggcgattcaggaattgcagagtttctttgcggaactgccccccttcggccccgacgggcagagcctttgggatctcctccgctctccggcgctggcctgcccggattccctgacggggcagttggaatttatgcggaaacgctgggggctcctgatcggcaagtttatggcccggctcctgatgagcatggacgttcttaaagaagaagaaaagccttcgttctttggccccggccccagcgaggcctataactacggttatctggaaaacgagtacgagcggttcagcccagatcaggaatggatgcccaagaccgtgcttatagccaaatgcaccctggtgtggcttttccagctttcccagaagtacggcagggaaatttcccggctggatcagatacccgacgaagaactggacgagctggcccgccggggctttaccggcctgtggcttatcggcgtgtgggaacggagttccgcgtccaaaacgattaaacaatggacaggcaaccccgaagcggcggcaagcgcctacagcctctacgactacgacatagccggggagctgggcggctggaacgcgcttgccaatttgcgcgaacgctgcatgaggcgcggcatccgccttggttcggacatggtcccaaccacacgggcatag

SEQ ID NO: 59552 - protein, 275 aa, Unknown
  Obtained from environmental sample
  misc_feature (1)..(275): Xaa is any amino acid
MIRWPRSASREGAESCRALSLEEILLLALANLNPAFKPFLFMFDDKDLARKTVYPAAIQELQSFFAELPPFGPDGQSLWDLLRSPALACPDSLTGQLEFMRKRWGLLIGKFMARLLMSMDVLKEEEKPSFFGPGPSEAYNYGYLENEYERFSPDQEWMPKTVLIAKCTLVWLFQLSQKYGREISRLDQIPDEELDELARRGFTGLWLIGVWERSSASKTIKQWTGNPEAAASAYSLYDYDIAGELGGWNALANLRERCMRRGIRLGSDMVPTTRA

SEQ ID NO: 59553 - DNA, 993 bp, Unknown
  Obtained from environmental sample
  misc_feature (1)..(993): n is a, c, g, or t
atggaaaagatactcacattttcggatttggaaacacaaaacaagaagaagcggactcgccgcgatgaatttctgagcaagatggaatccatcgttccatggtcagacatagtatcgctagtcaagccttactattattccaaccataaaggtcgccccgccacacggcttgaagtcatccttcggatgtattttctccagatatggttttccatgagcgatgaaggtcttgaagattccatctacgacagcaaggcattcagttcattcatgggagttgatttatccagtgtccccgatgcgaccgttctgtgcaatttccgcaagatagtgaacgaaaacggtcttggcggcaagatgctttcccttgtgaacgccaagatggataagaacggtctgataatgcatggggggacgataatggatgccaccatccacgctgcgcccaaatccacgcgcaatgcggagcagtcccgcgaccccgagatggcaagcacgaagaagcacggcaactggcatttcggagccaagtcccacataggtgttgatgccggcaccggtcttgttcacagcgtggaggtcactcccgccaatgtgcatgacgtggtgatggcttgccagcttatacgacccgatgatgatttcgcctccggcgacagcggcttcgtcggtttggagaatcgagcggagatagtgaatactcccatattggcatcaaaggaatacaggattgtcaagcgtccatcgttctggaggaagcggaatcaaagcgatttggcgttggagtttgacaggaatgatgagcggcggctcataagcagaaggcagaaggttgaatatgtgttccacgtgctgaaggatattttcaggttcaggaaattgccatacaaaggcattgccaagaatgcggagcggcttatggctgcttatgccaatgccaacctctatatgcttgcggtagccgggcggcggttctgtccgatgctaggctga

SEQ ID NO: 59554 - protein, 330 aa, Unknown
  Obtained from environmental sample
  DOMAIN (138)...(317): Transposase DDE domain
  misc_feature (1)..(330): Xaa is any amino acid
MEKILTFSDLETQNKKKRTRRDEFLSKMESIVPWSDIVSLVKPYYYSNHKGRPATRLEVILRMYFLQIWFSMSDEGLEDSIYDSKAFSSFMGVDLSSVPDATVLCNFRKIVNENGLGGKMLSLVNAKMDKNGLIMHGGTIMDATIHAAPKSTRNAEQSRDPEMASTKKHGNWHFGAKSHIGVDAGTGLVHSVEVTPANVHDVVMACQLIRPDDDFASGDSGFVGLENRAEIVNTPILASKEYRIVKRPSFWRKRNQSDLALEFDRNDERRLISRRQKVEYVFHVLKDIFRFRKLPYKGIAKNAERLMAAYANANLYMLAVAGRRFCPMLG

SEQ ID NO: 59555 - DNA, 792 bp, Unknown
  Obtained from environmental sample
  misc_feature (1)..(792): n is a, c, g, or t
gtgagggaagccagtccaaacgccccagtctcggttcatctcacctcctaccccgacacaaacgcagagtacgcaaacgaaaaactagtccgccgaatgtccttggttagaagcgccatagaaaaaggcagagcgatacgcagcgcaaacgaaatcaaaaaccgccagcccctaaaaacattgacgttagtcccccacaacgaggaagcaaagcaagtagccgagacaatgcaggatttaatccttgaagaactaaacgtagagcaactccatttcgctggcgatgacaccgagctagcgaaaatctccgccaagcccaacttcgcagaacctcccctatccaccgccataaccgccttgaccgccgagcaaatcaagcaaatccaaagcggcaccccgcttgacgttgccggtctccccatagactactcctgcctaatgctagtccgcgaggtagccgaaggtctcgcagttgaagcagacgaaaactacaccatagcattggatttgaaaataacgccagagctacgtcaaagctgcatagcgagagagttggtgaatcgcatacaaaatcgccgcaaggaaatggatttgcagattacggacaagataaggatagcgttgaaagggctgggtgcttacgcggatttgcaggcagcggtggagaagcacaggggttatattttggaagagacgcaggggcttgagatttccacgagcggtgaagcgagtggggagtgggttgcggttagtgtggagggatgtgaggtggaggtttgtgtttgcatttaa

SEQ ID NO: 59556 - protein, 263 aa, Unknown
  Obtained from environmental sample
  misc_feature (1)..(263): Xaa is any amino acid
MREASPNAPVSVHLTSYPDTNAEYANEKLVRRMSLVRSAIEKGRAIRSANEIKNRQPLKTLTLVPHNEEAKQVAETMQDLILEELNVEQLHFAGDDTELAKISAKPNFAEPPLSTAITALTAEQIKQIQSGTPLDVAGLPIDYSCLMLVREVAEGLAVEADENYTIALDLKITPELRQSCIARELVNRIQNRRKEMDLQITDKIRIALKGLGAYADLQAAVEKHRGYILEETQGLEISTSGEASGEWVAVSVEGCEVEVCVCI

SEQ ID NO: 59557 - DNA, 330 bp, Unknown
  Obtained from environmental sample
  misc_feature (1)..(330): n is a, c, g, or t
atgaaagatataattctgatgggaccgaaacactccggtaaaacaaccacgggtaaagcgcttgcctcgttattttcatgtgattttatcgacattgacgaattgattttgcaaagaaccggaaaaagcccccgtcagctttttagcgaagacccggctatttttcaaaaagccgaggccgaagctctggcggctctcttggactcaagcggcagttcggtcggctcatgcggcggcgcaaataacgtagactgtggtacaaatatcaccggcggcgcagacatagctgtggctaaactgcgcgtaatgccacaggctcggccgatctga

SEQ ID NO: 59558 - protein, 109 aa, Unknown
  Obtained from environmental sample
  misc_feature (1)..(109): Xaa is any amino acid
MKDIILMGPKHSGKTTTGKALASLFSCDFIDIDELILQRTGKSPRQLFSEDPAIFQKAEAEALAALLDSSGSSVGSCGGANNVDCGTNITGGADIAVAKLRVMPQARPI

SEQ ID NO: 59559 - DNA, 762 bp, Unknown
  Obtained from environmental sample
  misc_feature (1)..(762): n is a, c, g, or t
atggctattttgttttccggagattttcacgctaacgcaagaggcgaaatggaatacatttccgaaaacacgcttcttgaaaattataaagaacatttatacaagaaaattaattatcatattattttgggcgatgccggatttttgtggcccggaaacgagaaggcggagaaattaaattattctgaattggctaaacggccgtttcccgtgttgagtgttgtaggtaaccatgagccggtgttgggacgttccgatttgacggaagttgatatagggataggcgaaaaagtaatactaattaataaagaaaaaccgtttatagcatatcttaaacgcgggaaaatatataatattgaaaatcacaagtttcttgttttgggcggcgctttatccatagacagatttcttcgtacgccgggaacgaactggtggaaacaggaatattggaccgatgatgaaaaaaacgctatttcccgtttattggaaaatgaaaaaaattttgattatgtgctttctcataccggtccaagccggataaacaaggctgtcaataaggttgatatcgcatatattccgaaaaaaagagacgaagtatcagctttgaatgaaatcattgatgagaaaataatatgtaagcagtggttttgcgggcattggcataaagatgaatattattatgatgaaaacgtaaaaaaaggttatcaatatttgtatcagcaaacggccttgctggatggcaatgatattattgttttataa

SEQ ID NO: 59560 - protein, 253 aa, Unknown
  Obtained from environmental sample
  DOMAIN (1)...(223): Calcineurin-like phosphoesterase
  misc_feature (1)..(253): Xaa is any amino acid
MAILFSGDFHANARGEMEYISENTLLENYKEHLYKKINYHIILGDAGFLWPGNEKAEKLNYSELAKRPFPVLSVVGNHEPVLGRSDLTEVDIGIGEKVILINKEKPFIAYLKRGKIYNIENHKFLVLGGALSIDRFLRTPGTNWWKQEYWTDDEKNAISRLLENEKNFDYVLSHTGPSRINKAVNKVDIAYIPKKRDEVSALNEIIDEKIICKQWFCGHWHKDEYYYDENVKKGYQYLYQQTALLDGNDIIVL

SEQ ID NO: 59561 - DNA, 345 bp, Unknown
  Obtained from environmental sample
  misc_feature (1)..(345): n is a, c, g, or t
atgttaaacccctatgatttatttgaaaatatactgcttgatattgaaaacggtataaaaaacgatataaatgcgtcggttctttcgaaaaaatatagtttttcggaagttcatttacgcaggctgttcagttttgcttttaaacaaactatttccgcttatatacgttcccgtatattggcggcaagtcttaacgacttgcttaataccgattcaaatattttggatattgcgcttggctatggctttaattatgaacaatcctatataagggcttttaaacgccaattcggaattacgcccggcaaacttcgcaaatcggagaattttgttataaaacaataa

SEQ ID NO: 59562 - protein, 114 aa, Unknown
  Obtained from environmental sample
  DOMAIN (62)...(106): Bacterial regulatory helix-turn-helix proteins, AraC family
  misc_feature (1)..(114): Xaa is any amino acid
MLNPYDLFENILLDIENGIKNDINASVLSKKYSFSEVHLRRLFSFAFKQTISAYIRSRILAASLNDLLNTDSNILDIALGYGFNYEQSYIRAFKRQFGITPGKLRKSENFVIKQ

SEQ ID NO: 59563 - DNA, 405 bp, Unknown
  Obtained from environmental sample
  misc_feature (1)..(405): n is a, c, g, or t
ttgccgagaatgaagacacaccctgcaaagcgcctatttgatttcacctccgatggatatacagagctgctgaagaagacactcaaagccggggcggatgtccacagtacggacagttacaatggaaccggacttatccgtgccgctgaccgcggacatgttgaagtcataaaagaacttttaaagacagatatccgcgtcaatcatgttaacaagatgggatggactgcattgcttgaagcaatcattttgggcgacggaggaaagcggcatactgaggtagtgcgtcttttggttgacgcaggcgcggatgttaacatggcggataaagatggagtcaccccgctggcccatgccaaaaacaaaggctttaccgatattatcagtatactggaaaatttgtag

SEQ ID NO: 59564 - protein, 134 aa, Unknown
  Obtained from environmental sample
  DOMAIN (73)...(110): Ankyrin repeat
  misc_feature (1)..(134): Xaa is any amino acid
MPRMKTHPAKRLFDFTSDGYTELLKKTLKAGADVHSTDSYNGTGLIRAADRGHVEVIKELLKTDIRVNHVNKMGWTALLEAIILGDGGKRHTEVVRLLVDAGADVNMADKDGVTPLAHAKNKGFTDIISILENL

SEQ ID NO: 59565 - DNA, 756 bp, Unknown
  Obtained from environmental sample
  misc_feature (1)..(756): n is a, c, g, or t
ttgacagttcgggactcccctatgcggacggaacggttatcagggcggattttgatgttaaatcgatcattttttcagtttttttcctttctattatgtcaaaatcaaaatatttaccgaccgctcaactctcccaccatagaatataagttatttacgttgtcgcaagttagaatattcatctccggaacgcatttttttgccaaacccttgagcaccgtcccgggaccgacttcggcgcaactgggcggggatagctccgagagcgccttcatcgagtctacccaccgcaccggggagaccagctgtttgaccaagagctctttgaacagcgtcggatccgtctccggctttgcggtgacgtttgcgatcacgggacagcacggcgcggagaacgtcacggactcaagcgccgcggccaatttatccgccgccggccgcataagcggagagtggaatgcgccgctcacgggcaacggcattgcgcgtttcgcgccggccgccttgagtaggccgcaggcctcgctaacggcggcgacctcaccggagatcaccgtctgctccggagcgttctcgttggcggcgacgacaatcccgctcttaacctgcgagatgacctcggcgattttgttccgctccatccccaagaccgccgccatggcgcccggattcgcccgcccggcctcggccatagcctcgccacgcgccgcgaccaacttcaacccgtcctcaaacgatatcacgccggcggcgtaa

SEQ ID NO: 59566 - protein, 251 aa, Unknown
  Obtained from environmental sample
  misc_feature (1)..(251): Xaa is any amino acid
MTVRDSPMRTERLSGRILMLNRSFFQFFSFLLCQNQNIYRPLNSPTIEYKLFTLSQVRIFISGTHFFAKPLSTVPGPTSAQLGGDSSESAFIESTHRTGETSCLTKSSLNSVGSVSGFAVTFAITGQHGAENVTDSSAAANLSAAGRISGEWNAPLTGNGIARFAPAALSRPQASLTAATSPEITVCSGAFSLAATTIPLLTCEMTSAILFRSIPKTAAMAPGFARPASAIASPRAATNFNPSSNDITPAA

SEQ ID NO: 59567 - DNA, 942 bp, Unknown
  Obtained from environmental sample
  misc_feature (1)..(942): n is a, c, g, or t
atgtcgacaatcgcaatgttattccccggtcaaggctctcagtccgtaggcatggggagagatttttatgacagtagcgataacccgtcatgtcgcgaactttttgaggaagcggacaaaatcctcaatcgtgatttgacgagaatcatcttccaaggccccgttgaggagctgacggaaacacataacacgcagccggcgctcttcgtagtagaggcggtcattaccgatttattagcaaaatccggcgtaaccccgatctgcgccgccggccacagtttgggcgagtacagcgctctttacgccgccggcgtgatatcgtttgaggacgggttgaagttggtcgcggcgcgtggcgaggctatggccgaggccgggcgggcgaatccgggcgccatggcggcggtcttggggatggagcggaacaaaatcgccgaggtcatctcgcaggttaagagcgggattgtcgtcgccgccaacgagaacgctccggagcagacggtgatctccggtgaggtcgccgccgttagcgaggcctgcggcctactcaaggcggccggcgcgaaacgcgcaatgccgttgcccgtgagcggcgcattccactctccgcttatgcggccggcggcggataaattggccgcggcgcttgagtccgtgacgttctccgcgccgtgctgtcccgtgatcgcaaacgtcaccgcaaagccggagacggatccgacgctgttcaaagagctcttggtcaaacagctggtctccccggtgcggtgggtagactcgatgaaggcgctctcggagctatccccgcccagttgcgccgaagtcggtcccgggacggtgctcaagggtttggcaaaaaaatgcgttccggagatgaatattctaacttgcgacaacgtaaataacttatattctatggtgggagagttgagcggtcggtaa

SEQ ID NO: 59568 - protein, 313 aa, Unknown
  Obtained from environmental sample
  DOMAIN (7)...(307): Acyl transferase domain
  misc_feature (1)..(313): Xaa is any amino acid
MSTIAMLFPGQGSQSVGMGRDFYDSSDNPSCRELFEEADKILNRDLTRIIFQGPVEELTETHNTQPALFVVEAVITDLLAKSGVTPICAAGHSLGEYSALYAAGVISFEDGLKLVAARGEAMAEAGRANPGAMAAVLGMERNKIAEVISQVKSGIVVAANENAPEQTVISGEVAAVSEACGLLKAAGAKRAMPLPVSGAFHSPLMRPAADKLAAALESVTFSAPCCPVIANVTAKPETDPTLFKELLVKQLVSPVRWVDSMKALSELSPPSCAEVGPGTVLKGLAKKCVPEMNILTCDNVNNLYSMVGELSGR

SEQ ID NO: 59569 - DNA, 906 bp, Unknown
  Obtained from environmental sample
  misc_feature (1)..(906): n is a, c, g, or t
atgcctgaagcccggcacagaacgctaccaaaaaccgcggaactgataggcgacctgcaacgagcctacgccaaaatcgccaatgaaaacgcgccgcaaaagacgctgtacaaattcttttcaggagacaccgaagacgcgggggtcacaccggcggtattgataaacgctgatcttaatgttaatgttgatataggtacagatgttgatagtgtcgatacagataaagccaatgccgttgtcaatgctgatgatgccgttagtactgataatgtcaatgccgatattaatactgatgatgtcttttgtactgatattaataccgatgatatagttaatactgttaatacggttgatacaaatatcaatactaatgttaatattgatactgatactgataacagtacggatatcaatacaaatcgcccgtccgtcaaaccgcctatcaaacggccattgacccaaaaaacaaccgtatacacggccgccgcactgatagccgttctgtccgcgtcttacctgacaataaggctgatatcgcgcccatcatcccaaaaagacaacaaccactccgtcgccgcggcaaagttcttctcaacacccgtcaatcctgataccgccgaccccgccgacaccgacgtctccgcgtccgtaaacacaccgcccccggtctccacggctcccgtcaataatacaaaacctgccaatgccgttaatacagccgacgttaatattattgatattgatattgatattgatactacggacgtcagtataaccgatgttaataccgccggcatcaatactattaatattgataccgcggaggttaatactatagatattaatcccagggcgcctagccngccgccgcgcccgcaccgccggtcaccgaaagcgccctga

SEQ ID NO: 59570 - protein, 301 aa, Unknown
  Obtained from environmental sample
  misc_feature (1)..(301): Xaa is any amino acid
MPEARHRTLPKTAELIGDLQRAYAKIANENAPQKTLYKFFSGDTEDAGVTPAVLINADLNVNVDIGTDVDSVDTDKANAVVNADDAVSTDNVNADINTDDVFCTDINTDDIVNTVNTVDTNINTNVNIDTDTDNSTDINTNRPSVKPPIKRPLTQKTTVYTAAALIAVLSASYLTIRLISRPSSQKDNNHSVAAAKFFSTPVNPDTADPADTDVSASVNTPPPVSTAPVNNTKPANAVNTADVNIIDIDIDIDTTDVSITDVNTAGINTINIDTAEVNTIDINPRAPSXPPRPHRRSPKAP

SEQ ID NO: 59571 - DNA, 324 bp, Unknown
  Obtained from environmental sample
  misc_feature (1)..(324): n is a, c, g, or t
atgaaccaaaacgtcaaaaacgaactcgacaaaatcgtacgcacgctagccgaaaccgggatcgtaacaaaaatcatcctgttcggctcacatgctaagggcgaagaaacccccgatagcgatatcgacctatgcgtcctgacgccggtaaaggataggcgtccgctagatgtgggaatagagttgcgtgtgaaattgattgatgtacaggaaacggatttagatttgattccgttcaaccacgatgaattttctgcacgggcaaagtgtccgggtacattccaaaacgacattatgaaacatggagtcgtattatatgaatga

SEQ ID NO: 59572 - protein, 107 aa, Unknown
  Obtained from environmental sample
  DOMAIN (5)...(105): Nucleotidyltransferase domain
  misc_feature (1)..(107): Xaa is any amino acid
MNQNVKNELDKIVRTLAETGIVTKIILFGSHAKGEETPDSDIDLCVLTPVKDRRPLDVGIELRVKLIDVQETDLDLIPFNHDEFSARAKCPGTFQNDIMKHGVVLYE

SEQ ID NO: 59573 - DNA, 429 bp, Unknown
  Obtained from environmental sample
  misc_feature (1)..(429): n is a, c, g, or t
atggagtcgtattatatgaatgatgatattttagatgtaaaagagtggattcaatacgcccaagatgattatgattgtgccatagtgattgcaaagacgaataatccgtacgcgcctagaattgcgtgcaatcattgtcaacaatccgctgaaaagattttaaaagcgtatactattgccaaagatggcgcacgtgcaaaaaaacataatcttgtaatgttactaaaacagtgtagacgacactcacccgattttaatggtcttggtacagcttgctcaatattagatatgtacataatagattcgcgctatccgtcaggtatgaagttaacaaattcggacatgaaccaagcgcttaatcatgcgcgtaatatattggaattcacaaaatcaaaactgaaagatttgggatacgaatgcgtgtcatga

SEQ ID NO: 59574 - protein, 142 aa, Unknown
  Obtained from environmental sample
  DOMAIN (13)...(132): HEPN domain
  misc_feature (1)..(142): Xaa is any amino acid
MESYYMNDDILDVKEWIQYAQDDYDCAIVIAKTNNPYAPRIACNHCQQSAEKILKAYTIAKDGARAKKHNLVMLLKQCRRHSPDFNGLGTACSILDMYIIDSRYPSGMKLTNSDMNQALNHARNILEFTKSKLKDLGYECVS

SEQ ID NO: 59575 - DNA, 1209 bp, Unknown
  Obtained from environmental sample
  misc_feature (1)..(1209): n is a, c, g, or t
gtgcaggacgaagcgcctctggtttcgggtgacagcctggaaatcacgctgcgtgataaatgcctgtcaggaaagccattcgcacccagagattaccaaatcgaggcggcccaggcggtgcttggggacggaaggccggggacaggctacggcgttgtggcgctgccctgcggttcggggaaaaccatcgtcggcatggttataatgtcattgttaaaaaccaatacgctgattctgactacaaatgtcgcggcagtgcatcaatggatcgaggagttggttgataaaacagaaataatccgcgaacagatagccgaatattcgggagacacaaaggcagtggcccccgtcactattgccacataccagattatcacatggcggcccggacgcgacgccgatttcccccatttcaggctgttcagggaacagcactgggggcttataatttatgatgaagtccaccttttgcccgcgcctgtatttcgcgtaacggcggaattgcaggcggtcaggcgtttggggcttaccgcaactctaatccgtgaagacggcgcggaggacgcggtattcagcctggtagggccgaagcgttacgacgtgccgtggaaggagcttgaaggtaaaggctggattgccgaagcggtctgtacggaaatccgcattgatctgccggaggatctaaaaataccttatgccgtagcttcacagcgtgaaaaataccgcattgccagcgagaacccgttaaaagaagaaattgtcatccaactgatcgaaaaccacagtgacgatcagattctcgtcattggccaatacctttcccagcttgattctcttgcgaaactccttaaagtgcccctgataacgggaaaaacacctaacgcagagagggaaagaatttataacgaattcaagcggggagatctcaggatcatcgtggtctcaaaggtcgccaattttgccatcgatctgcctgacgcttcaatggcgattcaggtttcaggttccttcggctcgcggcaggaagaggcccagcgtctgggacgcatcctccggccaaaagacaaaaatgccaaacaccataacgcgctgttttttacccttgtttcgcgttacacggtggaagaagatttcgcggcaaaccggcataaatttctggccgagcaggggtataaatactctattcaacactggaatacaacaacatga

SEQ ID NO: 59576 - protein, 402 aa, Unknown
  Obtained from environmental sample
  DOMAIN (30)...(188): DEAD/DEAH box helicase
  misc_feature (1)..(402): Xaa is any amino acid
MQDEAPLVSGDSLEITLRDKCLSGKPFAPRDYQIEAAQAVLGDGRPGTGYGVVALPCGSGKTIVGMVIMSLLKTNTLILTTNVAAVHQWIEELVDKTEIIREQIAEYSGDTKAVAPVTIATYQIITWRPGRDADFPHFRLFREQHWGLIIYDEVHLLPAPVFRVTAELQAVRRLGLTATLIREDGAEDAVFSLVGPKRYDVPWKELEGKGWIAEAVCTEIRIDLPEDLKIPYAVASQREKYRIASENPLKEEIVIQLIENHSDDQILVIGQYLSQLDSLAKLLKVPLITGKTPNAERERIYNEFKRGDLRIIVVSKVANFAIDLPDASMAIQVSGSFGSRQEEAQRLGRILRPKDKNAKHHNALFFTLVSRYTVEEDFAANRHKFLAEQGYKYSIQHWNTTT

SEQ ID NO: 59577 - DNA, 417 bp, Unknown
  Obtained from environmental sample
  misc_feature (1)..(417): n is a, c, g, or t
atgaaaatattccgttccgttgaattctggaaagcgtccataatgccccttcccgaccatgccttctttgaattattgaggaccgtcttcgggaaaataaaaactccctttaacaaacaaaatcttgtcggcgatcttgaaaaatttctttcaaataatgaaattcaaaaaaatatagccgcttacattgacaaaaatgacgcacgccttattgccgctgtcgcggcgctgaacgaacccaccgccgcggaactggaagccttttttgacggggagctggaccattctgaattgcaggatatgataataaatcttgaagaaagatttattctattccgctttacggacgagggtatgaaagagagccgccttgcccctcaatccggtcctggcacccgtattggcgccatatactga

SEQ ID NO: 59578 - protein, 138 aa, Unknown
  Obtained from environmental sample
  misc_feature (1)..(138): Xaa is any amino acid
MKIFRSVEFWKASIMPLPDHAFFELLRTVFGKIKTPFNKQNLVGDLEKFLSNNEIQKNIAAYIDKNDARLIAAVAALNEPTAAELEAFFDGELDHSELQDMIINLEERFILFRFTDEGMKESRLAPQSGPGTRIGAIY

SEQ ID NO: 59579 - DNA, 690 bp, Unknown
  Obtained from environmental sample
  misc_feature (1)..(690): n is a, c, g, or t
atgacagcgggggaaacggcgttaagttttgttgaagaactaaaaaggcggcaggaagaaagagaggcgcaagaaaaagccgaatgggaagcgttatccgaaacggaaaggcaaaaaatacttgaagagcgcaaaagtcttgataaagaacaggaaatcagggagaaggcagagcaacgcgaaagacagttagaaaactggaaacgccgtggcataacaaaacggtattttgaagccaaatgggataattggatcgccgatacgccggaaaaagaaaaagtgttaagaaatgcaaaaaacgcatggaagacaaatctgtttttcaccgggaataatggcacgggaaaaacgcaccttgcaatgtgcctagcgaaagacggagcgacataccgccgcttgcctgatatattgcgcgaagtaaggttggattttgaaagtgaagaaaaaatcatcgaatactacggagaatgcgatctgttaattattgacgaaataggcaggcagaaattcagtgattttgaatcaaacttattttttgaaatcatagaccgtcgatggaataacgtattacctacgacaatcataactaatttatcaacaaaggaattttcagaattatacaacgcggcaattctggacagattgaggcctctggaaattctttttaattgggaaagcatgagggagtag

SEQ ID NO: 59580 - protein, 229 aa, Unknown
  Obtained from environmental sample
  DOMAIN (69)...(220): IstB-like ATP binding protein
  misc_feature (1)..(229): Xaa is any amino acid
MTAGETALSFVEELKRRQEEREAQEKAEWEALSETERQKILEERKSLDKEQEIREKAEQRERQLENWKRRGITKRYFEAKWDNWIADTPEKEKVLRNAKNAWKTNLFFTGNNGTGKTHLAMCLAKDGATYRRLPDILREVRLDFESEEKIIEYYGECDLLIIDEIGRQKFSDFESNLFFEIIDRRWNNVLPTTIITNLSTKEFSELYNAAILDRLRPLEILFNWESMRE

SEQ ID NO: 59581 - DNA, 1626 bp, Unknown
  Obtained from environmental sample
  misc_feature (1)..(1626): n is a, c, g, or t
atgaagtacggcgattttgtcgacgaggcgcgggagtacgtcataaccaaccccaagacccccgtgaagtggatcaactatatcggcaacctgtctttcggcgggtttgtggaccataccggcggcgcgctcgtctgcaaaggcgacccgtcgctcaaccgcataaccaagtatatccagcagatgccctcctccgacttcaagggcgagacgctctatataaggataaagaaagacggcgcccgcaaggtcttttcgccgttcttcgtgccgacgctcgacgagtacgattcctttgagtgccgcgtggggctgggatataacaagatcgtctccgtgttttacggtgtcaaaaccgagtgcacgatcttcatcccgcaagacgctcaggtagagatccgcgacatccgcgtgacgaacgtctccggggcgccgctcgaaatcgacgtaattccggtgctcgaatacacccaccctgacgcggtcaaacagttcacaaacgccgactgggtgccgcaaaccatgcaatcgcgctgcatcacaaacaacggcgacggggtgcggacgctcgtccagtacccgttcatgttccgcgatataaagatcaactacttcacctccaacaccgccgcctcctccttcgagaccgaccgccgcgtgttcttgggggacaacgagtacggcacgtgggcggcggcgtgcgcgcttaaggccgacgaactcgggaacacgaggcccacagggggcgacaacatcgccgccctcatgcaccggcttggcaccctgagcccaaacggaagcaagcgcatcatcactcaactcggccaaaaggacagcttggccgtcgctcagccggagatagagcgcttccgcaaccccgacgaggtagacaaggccttcaattcgctgaaaacgttttgggagaagtacctgaccgccctgcaggtagaaacccccgacccggcgttcaacagcatggtcaacgttcacaacccgcgtcagtgcttcaccacatattattggtcgcgctacctttcctactaccagctcggcatgggcacgcgtggtttgggcttccgcgacagttcacaggacgtgatgggcatagtcgcccacatgcctgacaaggcaaaggaactcatagtcaaactgctctccgtacagaagacggacggctcggcgatgcaccaattcaaccccatgagcatggaggcgaccaacggcgacgcgcacgagatgcccgaccgcccgcagtattacggcgacgaccacctatggatagtgctggcggtgggcacatacgtaaaagaaacgggcgacagcgctttcctgaacgaatcggtttcatactacgaaaaggacgcttggggagcgccggtggagtcgggcaacgtctacgaccatctcgttagggcgttgcgcttcaccaaggagaacatgggcaaccacggcctgccccttttgggcttcgcggattggaacgactgcgtgaacctgcccaccggcgcggaatctatcttcaacacgtgcctctacagccgcgctttgctcgaaatgatagacttggaaacgtttctcgggcacaggacaaggccgaggcctacatggccgaccacgccgttatga

SEQ ID NO: 59582 - protein, 541 aa, Unknown
  Obtained from environmental sample
  DOMAIN (187)...(282): Glycosyltransferase 36 associated family
  misc_feature (1)..(541): Xaa is any amino acid
MKYGDFVDEAREYVITNPKTPVKWINYIGNLSFGGFVDHTGGALVCKGDPSLNRITKYIQQMPSSDFKGETLYIRIKKDGARKVFSPFFVPTLDEYDSFECRVGLGYNKIVSVFYGVKTECTIFIPQDAQVEIRDIRVTNVSGAPLEIDVIPVLEYTHPDAVKQFTNADWVPQTMQSRCITNNGDGVRTLVQYPFMFRDIKINYFTSNTAASSFETDRRVFLGDNEYGTWAAACALKADELGNTRPTGGDNIAALMHRLGTLSPNGSKRIITQLGQKDSLAVAQPEIERFRNPDEVDKAFNSLKTFWEKYLTALQVETPDPAFNSMVNVHNPRQCFTTYYWSRYLSYYQLGMGTRGLGFRDSSQDVMGIVAHMPDKAKELIVKLLSVQKTDGSAMHQFNPMSMEATNGDAHEMPDRPQYYGDDHLWIVLAVGTYVKETGDSAFLNESVSYYEKDAWGAPVESGNVYDHLVRALRFTKENMGNHGLPLLGFADWNDCVNLPTGAESIFNTCLYSRALLEMIDLETFLGHRTRPRPTWPTTPL

SEQ ID NO: 59583 - DNA, 924 bp, Unknown
  Obtained from environmental sample
  misc_feature (1)..(924): n is a, c, g, or t
ttggaacgactgcgtgaacctgcccaccggcgcggaatctatcttcaacacgtgcctctacagccgcgctttgctcgaaatgatagacttggaaacgtttctcgggcacaggacaaggccgaggcctacatggccgaccacgccgttatgaagaagcacctcaacgaacgggcgtgggacggcgattggtacgtgagctactacaacgccgacggatctccgctggggtcaaacagcaacagcgacggcaagatatatctatacacgcaagcgtggccggtgctagcggatattgccacggatgagcacgggcgcacggcgctcgactccgcccgcaagatgctcaacacgaaaaaggggctcaagctctccacgccgggcttcaacggctacgaccagtctaagggcggcataaccacctacccgcccggggccaaggagaacggcggcatattcctccacaccaacccgtggatgatgatcgccgaggcgcttatgggcgacggcgaccgcgcctacgagtactacaaccagatcaacccggccaccaaaaacgatattatcgacgagtacgagtgcgaaccctacgtctacccgcagaacattttgggcgacgagcacccgctcttcggccttgcgcgcaacagctggctctccggcacctcgtcatggacatatcaagcggcgagccgatacataatggggctgcgcccgcagatggacggccttttagtcgatccatgcgtcccatccgattggaagcgcttctccgtggagcgcaatttcagaggatgccgctatgtgataaacgttgagaatcccgggcgcgtctgcaaaggcgtaaaatcaatatccgtcgacgggaagacgcttgacaaacccngtcgtccccgcctttacagacgggaaaacgcacgaagttaa

SEQ ID NO: 59584 - protein, 307 aa, Unknown
  Obtained from environmental sample
  misc_feature (1)..(307): Xaa is any amino acid
MERLREPAHRRGIYLQHVPLQPRFARNDRLGNVSRAQDKAEAYMADHAVMKKHLNERAWDGDWYVSYYNADGSPLGSNSNSDGKIYLYTQAWPVLADIATDEHGRTALDSARKMLNTKKGLKLSTPGFNGYDQSKGGITTYPPGAKENGGIFLHTNPWMMIAEALMGDGDRAYEYYNQINPATKNDIIDEYECEPYVYPQNILGDEHPLFGLARNSWLSGTSSWTYQAASRYIMGLRPQMDGLLVDPCVPSDWKRFSVERNFRGCRYVINVENPGRVCKGVKSISVDGKTLDKPXRPRLYRRENARS

SEQ ID NO: 59585 - DNA, 828 bp, Unknown
  Obtained from environmental sample
  misc_feature (1)..(828): n is a, c, g, or t
atgaataacatttgcctattgcttgagggtgtcgccgggctctactacgcctctctgtggcccggcatagtcgactgcgccaaggagaacgattgcaacgtggtctgctttgccggcggggcgttgcgcatatcgccgcagaacccctacgaggtgcagcgcaatgtaatctacaaccacatagacccgtccaagttcgacggcgtcataatctccggcacgctgaacaacttcatctccgagatggagttcgccaagttcatggagcgtttcagcgcgctgcccacggtctctctcgcccccgcgctggagcatattcccgccgtgatcgtcgacaactcgtcgggcatgaggggtttgatctcgcacttggcgcacttgcaccattgcaagaagttcgccttcatcagcggccccaagggcaaccttgacgccgaccagcggctcgacttcttccgaaagtacctgaaagagaacggcatagcctgcgacgaggagcggatcgtgaccggcgacttttcgcgcagcggcggctacaaggccactatcgacctgctaaggcgcggcattgagttcgacgcgcttgtgtccgccaacgacgagaccgcgctgggcgccatagacgcgcttctggagagcaacgtgcgcgtgccggaggacgtggcggtcaccggattcgacgacatagaggagagcgagctgaccacgccgccgctcaccacggtgcggcagccgctctacgagatcgggcgcaccgccgtggagctcttggtaacaaagatgaacggcaaagaggtcccgcgacgcacctcccctcggccgatctga

SEQ ID NO: 59586 - protein, 275 aa, Unknown
  Obtained from environmental sample
  DOMAIN (1)...(274): Periplasmic binding proteins and sugar binding domain of the LacI family
  misc_feature (1)..(275): Xaa is any amino acid
MNNICLLLEGVAGLYYASLWPGIVDCAKENDCNVVCFAGGALRISPQNPYEVQRNVIYNHIDPSKFDGVIISGTLNNFISEMEFAKFMERFSALPTVSLAPALEHIPAVIVDNSSGMRGLISHLAHLHHCKKFAFISGPKGNLDADQRLDFFRKYLKENGIACDEERIVTGDFSRSGGYKATIDLLRRGIEFDALVSANDETALGAIDALLESNVRVPEDVAVTGFDDIEESELTTPPLTTVRQPLYEIGRTAVELLVTKMNGKEVPRRTSPRPI

SEQ ID NO: 59587 - DNA, 1350 bp, Unknown
  Obtained from environmental sample
  misc_feature (1)..(1350): n is a, c, g, or t
gtgtggatggatgtcgcggtcagcgacacaggcatgggcatacccaaggatgacattaaaagcctgttccttgattattaccaggtcatcgccaacgccacccgcaatattgaaggcaccgggttgggcctgcccattaccaaaagactggtagaaatgatggacgggcaaatcagcgtggaaagcgagcagggcaagggctcgaccttccgtttccgcattaaacagggctttgccagcgatatgacgctgggggcggaggtctcggaaaaactccgtaccttctgctattcggacgacaaacgcattgtcagcagaaaactgtcaagggtgaatttaagctacgcaagggtgctggttgtagacgatatgcagaccaatctggacgtggcgtcgggcatcctgcgcaaataccagatgcaggttgacgttttaaacaacgggccggccgccattgaccggatacgcgagggaaagcccgtatacaacgctatattcatggaccacatgatgccgggaatggacggcatagaaacggtggataatatccgcgcgcttgacactgaatacgcgaagacagtacccattatcgcgctgacggccaacgccatacagggaacggaaaagattttctacgagcatgattttcaggcgttcataagcaaaccgattgacattgcggagatggacgctactttaaggaaatgggtgcgagacaacacccgcgccgaagttgtaatcgaagacaatctttccgagaccgatcttcaaattgaaaagctggttatagaaatccccggagtggacacgaagaaaggtctttccctctacgcgggagtgaagaagatttatctgccgatgcttcgctcttacgcccacaacactcctaaggtgctggaaaagcttaaaaacgtctcggcggagaacttgcgcgactacgttatcaccgtacacgggcttaaaggcactagcgccgccatcggcgcggagcagattcgcatcgccgctctggaacttgaaaacctttcaagagccggggacttgcagggcgttctcgccaagaacgacaagctcgtcgcagacgcggaaaccattgtcgccaacgtacaggagtggctggataaaaacgacgttctcgattccaagccgcgccaaaaagcgcctgaccgcgaacttcttgccaaactgcggcaatgctgtgaaagttacgacatgaccggcatagacgaagttatgtcggaactggataaatacgaatacgatgaagacgcggacttaatggaatggataagggaaaaaattatcgtttcggaagtattcgaaatcgcggaacgtatcgcgcagctttaa

SEQ ID NO: 59588 - protein, 449 aa, Unknown
  Obtained from environmental sample
  DOMAIN (286)...(361): Hpt domain
  misc_feature (1)..(449): Xaa is any amino acid
MWMDVAVSDTGMGIPKDDIKSLFLDYYQVIANATRNIEGTGLGLPITKRLVEMMDGQISVESEQGKGSTFRFRIKQGFASDMTLGAEVSEKLRTFCYSDDKRIVSRKLSRVNLSYARVLVVDDMQTNLDVASGILRKYQMQVDVLNNGPAAIDRIREGKPVYNAIFMDHMMPGMDGIETVDNIRALDTEYAKTVPIIALTANAIQGTEKIFYEHDFQAFISKPIDIAEMDATLRKWVRDNTRAEVVIEDNLSETDLQIEKLVIEIPGVDTKKGLSLYAGVKKIYLPMLRSYAHNTPKVLEKLKNVSAENLRDYVITVHGLKGTSAAIGAEQIRIAALELENLSRAGDLQGVLAKNDKLVADAETIVANVQEWLDKNDVLDSKPRQKAPDRELLAKLRQCCESYDMTGIDEVMSELDKYEYDEDADLMEWIREKIIVSEVFEIAERIAQL

SEQ ID NO: 59589 - DNA, 1155 bp, Unknown
  Obtained from environmental sample
  misc_feature (1)..(1155): n is a, c, g, or t
atgcttggaatcggagcaagcggagaaccccgcggattgtacgcggatgtgattaaagctgtaaatgattgcaatgcttctgtcctggcggttgatattccgtcggggcttgattgcgacagcggaaagtgcgcttcaatttgcgtaaaagccgattgcaccgttgccgccggattttataaattggggcaatttttttaccccggcagagcaaacgccggagaattacaaattgccgatttgggctatccggcggatattacggaagaacagtccatcgggatttttttgccggacattgatttcttccgccgcgttctgcccgcgcgcaagcaagccggttcaaaaattgatcacgggcttgcgctccttttgtgcggctcacgcggaatgtgcggcgccgcaacgctcgcttccattgccgcgcttcgcagcggatgcggaatggttcatcttgcggtgcctaaatcaataattaacacattagctgttaaggttacggaacctgttttacatccgttagctgaaaccgcttccggcgcctgcgcttcatccgcgctgaatgaagtcctttcgctctgcgaacgcatggacgctctttgtgtcggttccggcttgtcgagagacccgaagaccgcgtcttttgtgcgggcgcttgtaagtaaaactgacaagcccgccgtaattgacgcggacggccttaacgcttttgcgggcgcgctgcctgagtntgcgcagcacaagggagaaattgtaattactccgcatacaggagagtggaagaggcttttcggcgaactgcccgatgatccgctggaacgcataaacaaactgagggagtacgcggcgcagtacaatataaatatcctgctgaaaggaagcccttccctcgctgtcaacgcgaaagggacggcggttattctgccttacggaaattcttctctggcgaaggcgggaacaggagacgtactgagcggtatcattgtctctctcatcgcgcaaggctgcccctgcttcgaggcggcaattctcggcgcttacctgcacggagaagcgggacggcttgccggctctgacctcaccgagtattcggttctggcaagcgatttaacgcgttacatacctgaagttataaaaagagtaatcggcgtatag

SEQ ID NO: 59590 - protein, 384 aa, Unknown
  Obtained from environmental sample
  DOMAIN (122)...(376): Carbohydrate kinase
  misc_feature (1)..(384): Xaa is any amino acid
MLGIGASGEPRGLYADVIKAVNDCNASVLAVDIPSGLDCDSGKCASICVKADCTVAAGFYKLGQFFYPGRANAGELQIADLGYPADITEEQSIGIFLPDIDFFRRVLPARKQAGSKIDHGLALLLCGSRGMCGAATLASIAALRSGCGMVHLAVPKSIINTLAVKVTEPVLHPLAETASGACASSALNEVLSLCERMDALCVGSGLSRDPKTASFVRALVSKTDKPAVIDADGLNAFAGALPEXAQHKGEIVITPHTGEWKRLFGELPDDPLERINKLREYAAQYNINILLKGSPSLAVNAKGTAVILPYGNSSLAKAGTGDVLSGIIVSLIAQGCPCFEAAILGAYLHGEAGRLAGSDLTEYSVLASDLTRYIPEVIKRVIGV

SEQ ID NO: 59591 - DNA, 912 bp, Unknown
  Obtained from environmental sample
  misc_feature (1)..(912): n is a, c, g, or t
atggagcttgataaagaaatatcgcaaaaaaaatctccagaattttatgaaaccgtttataacttacgtgaaaaatctcagaaattggatgataatgctaagaagttgtatgggatgtgtaagtattatcttcagaaaaacaacgaaaattataagagtgcagaacaactaaaattatctcctcttgataataatttttttcattcttggggagattatgcttatgcacaagccatagttaataaaagagaagcttcttatagatatgccaaaagttcttttgaaacagccaaagataaatatgaaaaaataaaaaaagaaaataaagacgatattgtttggcgccgtttgggaaatacttattatgagttagctgctatttatatggataattcctcgtatggaacggccaaaggctattttgaagaggccataaagaaatatgacgaaataactaaactaaataaagatgattatcgtaatttggggaatgcttttttcgaattaggtagaatgaaatggagagaatttttggttctaacagaaaatgaagaacctttttataaaaaaatcattaaaaaagaagcctataatatatttagagatcggaaggataataataacgtatccgatgaagaactaacgaaaataaatgagatgcttggaaagacagataatttatttaaagatgttgatgaattatataataaagcaattgataaatataaattatatgaaaaagcaattgatgaatgtaagattacgggagataaaaaatatgatgatgtttttcgtagttggggagacatatattcacatcaaggtagaaaaaaacgatatgactatttgtttttaattgaaaaaaaagaatcagaagaagatataaaaacgccatctcggccgccgcgataa

SEQ ID NO: 59592 - protein, 303 aa, Unknown
  Obtained from environmental sample
  misc_feature (1)..(303): Xaa is any amino acid
MELDKEISQKKSPEFYETVYNLREKSQKLDDNAKKLYGMCKYYLQKNNENYKSAEQLKLSPLDNNFFHSWGDYAYAQAIVNKREASYRYAKSSFETAKDKYEKIKKENKDDIVWRRLGNTYYELAAIYMDNSSYGTAKGYFEEAIKKYDEITKLNKDDYRNLGNAFFELGRMKWREFLVLTENEEPFYKKIIKKEAYNIFRDRKDNNNVSDEELTKINEMLGKTDNLFKDVDELYNKAIDKYKLYEKAIDECKITGDKKYDDVFRSWGDIYSHQGRKKRYDYLFLIEKKESEEDIKTPSRPPR

SEQ ID NO: 59593 - DNA, 783 bp, Unknown
  Obtained from environmental sample
  misc_feature (1)..(783): n is a, c, g, or t
atgcttaacatcaataataatacatcccgattaaaacgggaaatactggtgcgtatagcgagaatgcagcttgaggggaaattaggcgaagaggttcataccatacccagagaacttgcgcccgtcggcagtcccgcaatccgctgctgcatttaccatgaccgtgaaattctcaagaatagaataatcgcccagcttggatgcggtttggaagattatgacgacgaaaaacaactctccgaatatgtgcaggaagcgctgaatagggaaaaaccgacatggcccatgcttactgtgcttcatttggcgtgtaacgcctgcgtgcgctcgcactttatggtaacaaacgcctgccaagcgtgcgtcgcccgtccatgccttgtgaactgcggcaaaaaagcgattgaaattaaagacggcagagcgtgtatcaacagcgaaaaatgcgttagctgcggattgtgccttcaaaattgcccctatcacgctattataaaaattcccgttccctgcgaggaagcttgccctgtgggagcgatttctaaaaacgaagacagcagagagtgtattgattatcacaaatgtatcttctgcggtaaatgtatgcgggaatgtcccttcggcgcaatgatggacaagggacagttgattgatgtaattaaacatattatgaataagaagaatgtggtcgccctgtatgcgcccgccgttgcggcgcagttcagggttgagccgggcagacttgaggggctctgcttgcggcaggtttttcaaatgtggtag

SEQ ID NO: 59594 - protein, 260 aa, Unknown
  Obtained from environmental sample
  DOMAIN (188)...(211): 4Fe-4S binding domain
  misc_feature (1)..(260): Xaa is any amino acid
MLNINNNTSRLKREILVRIARMQLEGKLGEEVHTIPRELAPVGSPAIRCCIYHDREILKNRIIAQLGCGLEDYDDEKQLSEYVQEALNREKPTWPMLTVLHLACNACVRSHFMVTNACQACVARPCLVNCGKKAIEIKDGRACINSEKCVSCGLCLQNCPYHAIIKIPVPCEEACPVGAISKNEDSRECIDYHKCIFCGKCMRECPFGAMMDKGQLIDVIKHIMNKKNVVALYAPAVAAQFRVEPGRLEGLCLRQVFQMW

SEQ ID NO: 59595 - DNA, 687 bp, Unknown
  Obtained from environmental sample
  misc_feature (1)..(687): n is a, c, g, or t
gtggtagaagtcgccatcggcgcggatattacgtcggacaaagaagccgcggaatttaccgaacgcatggaaaaaggcgaaaagatgatgaccacttcctgctgtcccgcgtatgtgagagctgttaaccgccatgtacctgaacttgcgaattgtatttcaggcacttgcacacccatgcactacacagcggagatcgctaaaaaagattttcccgattgcatcacggtttttatcggtccttgtcttgccaagaggcgtgaaggtatggacgatgatcttgtggattatgttatttccattgaggaactgggagcgttttttgtggcgaaggagatcgatgtcgcaaaagcagacccgaaaccggggagcaaattgcctacctgtacgggaagaaatttcgccaaatcangcggcgttgccgcgtcggtaaaggcgagactgaaagatacttcgatactgaaagaggcggtcatagacggcttggacaaggcgggcatgaagcgcctcgccgaattcggcaagataaacgccggcacgctcccccacacggacgacacgcccaacctcatcgaggtgatggcctgtcagggcggctgcatcgccgggccgtcggtgatcaccaatccgaaggtagccctgtcgcagttgacgaaatacgctgaatcgggggcgcggacgccttaa

SEQ ID NO: 59596 - protein, 228 aa, Unknown
  Obtained from environmental sample
  DOMAIN (2)...(204): Iron only hydrogenase large subunit, C-terminal domain
  misc_feature (1)..(228): Xaa is any amino acid
MVEVAIGADITSDKEAAEFTERMEKGEKMMTTSCCPAYVRAVNRHVPELANCISGTCTPMHYTAEIAKKDFPDCITVFIGPCLAKRREGMDDDLVDYVISIEELGAFFVAKEIDVAKADPKPGSKLPTCTGRNFAKSXGVAASVKARLKDTSILKEAVIDGLDKAGMKRLAEFGKINAGTLPHTDDTPNLIEVMACQGGCIAGPSVITNPKVALSQLTKYAESGARTP

SEQ ID NO: 59597 - DNA, 1605 bp, Unknown
  Obtained from environmental sample
  misc_feature (1)..(1605): n is a, c, g, or t
ttgaacttttttgatgacagggctccggaggagcttgccgttgctatcgaaagggcgatgagcgatgatgaggcgctggcgcaggtgttcatgctcgggtgggtgggggcggagccttcgcctttgatcatggattggatacgtgaccgtaatataggcggggtgaaaatttttggctggaatacgggggatacgattcggctggcaaggactgtgggcgctttgcaggaagcgagcctgagagggaaatataatattcccttgcttgtggctaccgatcaggaaggaggctggattcgccatgtaaaggggaataccagcattacgccggggaatatggctataggcgcgtcgggttatccgcgtgacgcctatcttgcaggttattacatcggcaaggaactggccctgctgggaatcaacatgaactttgccccgacaattgacctcttcaccaaccgcgattcatggcttataagcacgcgggcctttgggagcgatcctgttaaagtgggtatcttcggcgcggcgtatatgagaggccagcaggcagtggggattatccctacggcaaaacatttccccggtcacggcgatacgcagctcgattcccacggagtgcttcccagaattaatgtatcatttgaaacgctttgggacagggaactggttccataccgtatgcttgtcaaagaagggatacccgcggtgatgagcggacacctcgcctttcccaacatagaaaagaatggggttcccgcctctctatcctcatggtttttgaaagacgtgctccgcgacaagataggctacaggggtcttatcatcacagacgacttgatgatgaacggggctaccgaattttccggaagcctttcgcgggccgcaaagcaggctcttcttgcgggtaacgacatcattatgctttcaaaaaccccaagcctgaacgatccagtatggacatatttggtttcttccatgaaagatgaaccggagtttcgagagcgggtgcgggacgcctgccgccgcgtccttgctttaaaacttgaatacctgcgcggagaaaaaaaagttccatacattccggatttaaaaaagatcgatgacggccttgttgatcccgaggggactgctttttttctcggcctggcggcccgcagcgtaacccttgtgaataacaggaatgtttttcccctgagtcctgaaaaggcgggccgtgtacttctggcgggaaacttttcggattttttcagctcgggacgaaaagcttttccgggcgcggtttcatactggtacgatacttcccaggctgtcccggatattgttccatacgccaggaatgttgataccgtgatcttctgcctttccaacaaggccggaaccagaatagtccagcagctccggcccttgaataaaagggtgatcgtcttttctgtgctgagtccggcttatcttgatgatgtttcctgggtggatggcgcggtggctgtttatagttacgccccggaatcgtttatagcgggtttttccgccatccttggcagaataaaaggggaagggaggctcccttttgcgttgaatatgcgtccttcatctgaaaattaa

SEQ ID NO: 59598 - protein, 534 aa, Unknown
  Obtained from environmental sample
  DOMAIN (78)...(309): Glycosyl hydrolase family 3 N terminal domain
  misc_feature (1)..(534): Xaa is any amino acid
MNFFDDRAPEELAVAIERAMSDDEALAQVFMLGWVGAEPSPLIMDWIRDRNIGGVKIFGWNTGDTIRLARTVGALQEASLRGKYNIPLLVATDQEGGWIRHVKGNTSITPGNMAIGASGYPRDAYLAGYYIGKELALLGINMNFAPTIDLFTNRDSWLISTRAFGSDPVKVGIFGAAYMRGQQAVGIIPTAKHFPGHGDTQLDSHGVLPRINVSFETLWDRELVPYRMLVKEGIPAVMSGHLAFPNIEKNGVPASLSSWFLKDVLRDKIGYRGLIITDDLMMNGATEFSGSLSRAAKQALLAGNDIIMLSKTPSLNDPVWTYLVSSMKDEPEFRERVRDACRRVLALKLEYLRGEKKVPYIPDLKKIDDGLVDPEGTAFFLGLAARSVTLVNNRNVFPLSPEKAGRVLLAGNFSDFFSSGRKAFPGAVSYWYDTSQAVPDIVPYARNVDTVIFCLSNKAGTRIVQQLRPLNKRVIVFSVLSPAYLDDVSWVDGAVAVYSYAPESFIAGFSAILGRIKGEGRLPFALNMRPSSEN

SEQ ID NO: 59599 - DNA, 1023 bp, Unknown
  Obtained from environmental sample
  misc_feature (1)..(1023): n is a, c, g, or t
atgccggaaacccacgttcttcgctggacaaaagacggcagctcgcttcaaaaagaagctgaagcccgcggttaccgcgccgaagttcagtacggcgacgcgaaccagcccacccagaatcagcagattcagagcttcctgactcagaaagcaaaagcgcttgtagtcggttgtatcactgacggcgtagcttccgtaatagccgaagcggcaaaagacaaagttgtggttgtcgcttatgaccgcataattgccaattcagcggattatgattattacatcacattcaacaatttcaaagtcggcgttcttcaggctcagagtatcgtagacggtctcgatctgaataacgcatcagcgtcagatcccaaattgatcaccctgtttgccggttcaccgacagacggaaacgccttcttcttctttgacggcgcaatgagcgttcttaatccctatatcgacaaaggcgtactcaaagttatcggaccgtatccgaaaacatccgccgacacgaataatttccagagaatcgccaccgaaaactggcaggctcccatcgccaaaacacgcatggaaaacctgttaagcaacgaggcgagaggcgttacattggacgcggtattagcgcctaatgacacacttgcccgcgctattctccaagcatgtaaagcggacgccaaatatcgcagcaaactgccgataacatcaggtcaggatgctgaatacgaatccgccgaatcaattaagaacggcgagcagtacagcacagtatttaaaaacaccgcaaaacttgcggaagccgccattattcttgttgatcaggctctcaagggacaagccattaatattcccggcgcggttctcgctgacggcgacctcgccgaaatcggcaataccggcaaaaaatacgtaaaagcctatctgttggatccaatccttgttaccaaagataatcttggcgtcatggtagacgccggattctatgatgacagacttgatcgcggtatcctgttgaaaaactag

SEQ ID NO: 59600 - protein, 340 aa, Unknown
  Obtained from environmental sample
  misc_feature (1)..(340): Xaa is any amino acid
MPETHVLRWTKDGSSLQKEAEARGYRAEVQYGDANQPTQNQQIQSFLTQKAKALVVGCITDGVASVIAEAAKDKVVVVAYDRIIANSADYDYYITFNNFKVGVLQAQSIVDGLDLNNASASDPKLITLFAGSPTDGNAFFFFDGAMSVLNPYIDKGVLKVIGPYPKTSADTNNFQRIATENWQAPIAKTRMENLLSNEARGVTLDAVLAPNDTLARAILQACKADAKYRSKLPITSGQDAEYESAESIKNGEQYSTVFKNTAKLAEAAIILVDQALKGQAINIPGAVLADGDLAEIGNTGKKYVKAYLLDPILVTKDNLGVMVDAGFYDDRLDRGILLKN
